United States Patent Application Publication US 2015/0240253 A1 - sequence listing, part 32

SEQ ID NO: 151990 - DNA, 502 bp, Zea Mays
accaatatatatatgcccgaaaaaattggtcacacttaatatgtagtgcagcaggcatacaagaatgacccggtatattctataacatgactctatatgccctatggtgccagcaaaatcgacacatctcaactccaaatgtgtcatgcaccatggacaggggagaatgggagatgaccatacccaactgacttactgaagagaccaatccaatgcaacgactttagcttcaacctgagaattaactagaaactgacgaacctgagatggctacggaagtacgattatgccacaaagactgctcaagtgagttcatattccctttttcttatcttttttctctctctctttttttctctctctctctgtatttacgctacgtgttgctcctttgttacaaagacagaaaattggagcaccctgaggccaaccatccaaagctttgcttgcagatggggaagaggcgatgatcctgaagtggaaaggtaggagtaggtcagca

SEQ ID NO: 151991 - DNA, 468 bp, Zea Mays
ctcttatgcacgggacactacggttttgtttaatcacgtggttgagcatacaccagtgtacatcacggatgtcattaatagagcagagcattcatcgtctgaataaggatgacaatcgtccggatgtggaggcggccggtgcggttgatccccacatcccctttctcagccccagccccagccccaggtgacgcaagaacaatccacggaaacaaattggtttgcaacagagattccgatgatttacctcgaaatcgtgttgcgccggagttcgatgtgtgaaatcctgttcgatctatatccatcgtgctgaacttaccagtggttcaattgattaggctatctccagcctcttctatgacatctcctaatttacatttcactctataaacattgttgtctattgttgacatcttttaggtcaaacaccaatgatccctagatcccgctcgcagggaacaagatctt

SEQ ID NO: 151992 - DNA, 325 bp, Zea Mays
cttttgatggcagtggtactccggtcgaggcggcagattggctaacttacgtggaggataagatgaatgtcttcgagattgtgtatggacatcgggtttgctttagcacacagctactgaagggagaggctcaaatttggtggagaggcgtgcaggcagcgcactcctcctcactaggagtcctatcttgggatgtcttcatgaggcagtttgaaaggagattctacttggtcaccttcctggagaaaatgaagattgatttgcagtcctacaagcaggagaagaagtctgtcacagagtatgaagtgggcttcaacaagatggt

SEQ ID NO: 151993 - DNA, 326 bp, Zea Mays
ggcgactgtggaagtgtggatcggtggaaccctgccttgcgcttcgtttgtttggtcggcgaaacgacgggaagcggtgttggtgttgggctctcacttcatttgtgcctctgacatttaactctacctctagcgttactgcgttaccagtgcgcgtccgtggggactggggactatgtgaaaccgcgtgtttggttcggtggaaggactatgtaaaaacattgtatcttcctttttcgattgacttgcaaatattaggatattgcttttagtgtgttagagttatggatagattcagactagcagcatgttactctttggaatcc

SEQ ID NO: 151994 - DNA, 876 bp, Zea Mays
ctcgggggaaacaagagtatcatatcgagggcagggtggtcggactgcgtcgctgtctggtcgtgtttctacatgaggcttaccatacattatttgagctagggctccttgttcgttacaataggtctatctagggaggcgcatcaccccttcccacacattttgttcaccgtaaggggaaacgcgagttgtttcgtgctccctttgatggttgaggccatggcgcttagttgactggtcttatcatggcctccttttgtgaggcgagcaccgagtcccccgttccttacggggatccgtctgggggcacgtcctgtctttcagccattccttcccatgcatttcattcgtcagaaggggaagagtgagctgtaccatacttccatcgatgggcttcaatcgggacttccgaatgtaccctcctttttgtggagcaatcccccgagtccctcattcgttataggggatccatctaggggcatgccatgtctttttaatatttcttctcgtgcattacgtttgctggaaggggaagggtgagttgtaccatgattccctcgatggttgagatcgtggcgctcgacgagctccaaatgagtgatcgaagtggcgctcgacgagctccaaatgagtgatccgtgtgaggccctaggactcaaacatggtttagaagtgcccttcgtgcccatgccctagggtactggccgctttggtgcccacttcataatcgcctcttgctctgttgttttgggagtggtcgcaaacccttcgtgggccgacctttgaactccaagttttatggggtttggttgggccgtctcacagtcatgggtcagcgagggtccactagttccttccctgcaggtgggagacatt

SEQ ID NO: 151995 - DNA, 276 bp, Zea Mays
ttgacacgatttggcatgggttttgtctcgggctgaatagtgcagacagagctgacttcacaccaccatatcttcccacccagaccatatctccactcgggactcacacaagacagagagcccttggcacggtgaagagatgatacacaggatcgttggcaagatatgcatgtttggtcgaccaacgggcgtttgaacaagagcagaaacaaacctccacgtgttcgatcgtgtgctaagtgctcggccgcacactggccgctctctgcgcgcgca

SEQ ID NO: 151996 - DNA, 668 bp, Zea Mays
gtagcggcgagggcatagggtgtggaaacatgagatgtgggaggggataggaaagcaaatagaatatagagagctaaagctatcacatcggacaaccatgacacaagtggtaatatgccatatggtgagccactagggacgaactccatagaaaattggttgtctgtggtgaagcgataaatcgagagaagattttgtacgacgttaggggcaacatggacgtggttgaggtacaaaggaccaagaagaacagtgttgcctactgaggtgacatggagactggtagagtggactcattattgacaatgttgaaagaaggaaaggtgggattacagggatggggtaaggagcggtgtggtacgaggtggtggagtcaacaacccaatcagtgggagtagctagaggaggcaccctatagtaacatcgggaggggtgctggggcgtccaatgacaagcatgttgatggcgagcatgggtggtggagatggcagggcctcaagcctcatggagacaatctcaacacttcagaacataaataccacagtagcgtggcggccctttcgagggtcaatggaggctggagggtggtagagcacgaagcagtcacaaagatcagggttcatgacctgatcaaaggctacgaacatgtccgggagaagctgaatggc

SEQ ID NO: 151997 - DNA, 601 bp, Zea Mays
ccggagtgcggtgaagaggatcccccttggaggcagagggggagcccgaggagcgctgtggcgggagcggtggtggcagtggcggagaggcgaagctcctcgagaattagatcgttcttggtctccgcaaaggtgggaaaaggcttcatgcgggtgaggatgggcgtcacacgatcgaagcgagggctcaagccgcggaggacgttgagcacgaggcactcgtcggtgatgggggccccgagggtgcgaagagtgtctgtcatcgtcttcatctaacgacagtactcgtccacagagagatcgccctgagcaagctgacgaaaggcggtctcgaggtacagaatccgagtctggcggtggccaaggaactgagcctcaagggcaccccagatccggtgagcagtgtcgtccggtacgcgaacgatgtcctgacgttcgaccgtgagggtgccatgaatccaggagagcaccacctcgttcatcagaagtcgatcctctgacgggtcagagaccgctgagaggacgtggtcggcgagggcgtaccggcggagggtctgcaagacctgatcgcgccactgggggtactgagtggagtccggcg

SEQ ID NO: 151998 - DNA, 446 bp, Zea Mays
gaagacatggaggctctacatcagcgcacctgtttgggggtaaccaggttcttatccaggggatgtcagcaacacaacaagggaaatagttgaggcggcacccctggtgctcggacgacggagtattcgagacaagcagccgaatagctggttttctgtcccggaatgggttctggaagagaagcaatgacagaaaccagaacaattaccgtattccagttctcctccacgtctactctcttcttctctatgcatcccttccttctagttacatgttgtcacatggaatcatgatattaaggggggttaaagatgggggtttgatggcagcagtgatgtcctcatcatcccagtgaaacgagtccgtgcacgtaaatggtgaagggggtcgctggtgtggttgtattgatggcagcagtgatgtcctcatcagggttcaatcgggt

SEQ ID NO: 151999 - DNA, 565 bp, Zea Mays
ctgagaactagcggtgtagaattgtccgacggatcgatactgtaatatatcagtaccataaataatgaagtatacatgtcatgtggagaaccttactatactagcacgtagaaggccgtagcatgatcaacagagagggaaggacaggcttgcacgagcacgggggcggctggggccggggatcggaatctgatacctccgcggcatcctccggctgatcgatcacttcgaacaagcagccgcaacgcaggctggctgcggctctgcctggccggacctccctccaccggatctggacacccgatcgattcatggccatggctcgcccgccgcgccgcgccgcgccgctgtggtgtgccatcgccggacgccagacctccaacacggcaacagctacccaatcataccatacgcacagtcgatcgatcggggggggcacggatccaaccaaccggcggcgagcgtcgggacaaaatgccagccggtcgcaagcatgatcgagaatcgctgcacgtccagtccagtccagatccaacccaccattatcatctcgcacgcagacgca

SEQ ID NO: 152000 - DNA, 536 bp, Zea Mays
caagggtgtctagatccactaaatcggcccctagatggtcgattctaaggatcacactgacgtctccaccaccaacatcatcaagccagtcctagaggcactcccggctaataatcagcagcgctttgacgatcgcatgaggcgcgaggaagaagaaataatgcgataactcaccgaacgacgcaagaaagcgaaggaagagtacctctcatacttcacggtggattgtcaccagaagatcatccgtcaaggtgagatcggtatggaatccctcctacctccgcctcaggctcccattgtaagtactccagatccatcttttagggcttttcatggaactgcgaggggaactgttaaaggattatatagatgaatctattaaaggttggacacgttcatatgaaaaatctatttcccctagttttccctcgcacgaacctaatacggaggcacccgcaccgaacatattagctgcaaatgggtcatcttgtacccaaccattgtatggtaggatgatgaacacgatcgtagcgcca

SEQ ID NO: 152001 - DNA, 513 bp, Zea Mays
caccgtttgaggctttatatggcagaaaatgcaggactcctctatattgggatcagactggagaaagacagttctttgggcctgaacttattcaagaggcagaagaacaagtgcgaatgataagagaaaatttgagaattgcacaatcaaggcaaaagagctatgctgataataggagaagactactgaagtttaaggtgggtgatcacgtgtatctgaaggtgtcaccacttcggggtatgaggagatttaaagttaaaggaaagttgtcccctcgctttattggacccttcttgatcttaaagcgagtgggagaagttgcatatcaactggagttacccgatcatctatcagacatacatgatgtattccatgtatctcagctgaagaaatgtctcagggtacctgaggagcaactaccgatggaggaccttagtgttcaagatgatctgacctatgctgagtaccctatcaagattctggacactttgactcgagttacaagaaataagg

SEQ ID NO: 152002 - DNA, 586 bp, Zea Mays
ctccaatctggcagttgagagttcgagagaggatctccatcttctctgaaggcacatttattggatacatatttgatttgttatagtttacctttaggccagtagaagtctcaaatgagttgagaattgccttaaggaagaaaagttgctttggacaagcctctagaatcaaaagagtatcatctgcatactgaacaatcgggaaatccaggtcaccaatagcaggtaaaggaagcttaagaagattcaaaagcctggccttattaataatgctctgaagaaggtcagccgccaagacgaacaacagtggcgaaagagggtctccttgtctaatacctcgcttgcaatggaaggatttaccagggacgccattgagcaacaccgaagaagtgccagaaagaaggatgctccgaacccaattaacccacttaggaccaaagcctttgtggatcaaaacttgaagaatcagttcatgctcaacagtgtcaaaagccttttcgaagtctagtttaagcacaatgatttctttctttgaggagtggcataagtgaatgtattcataagcccaagccaagcaatcctgaat

SEQ ID NO: 152003 - DNA, 758 bp, Zea Mays
ccggggtgcggcccaacgagctcaccgtcagcagcgtcctgcccgcgtgcgctgcgctcggggccctcgcgctggggaggaaggtggagcgctatgccagggggagagggatgctcaggaacgtctatgtcgccaacgccttggtcgagatgtacgccaagtgcggcagcatccaccgggcttggaaggtgtttcggggcatggggacgcagagggatctttgttcttggaactccatgatcatggcgtttgtcgtgcatggcctctggacggaggcgctgaccttgtttcataaactgagggtgaggatgtcttgcttgcacttctcttcttatccctgcttcattcgctttgcatccagcttgcttgaccaaatatgcttcgaagcaccaaactagtgaccagtaaccttaaatccagattatgcaccgtagttggtatggctggagctgattttactctgtttagatgacaggggcaaaaccagatggcattacatttgttggagtcattttggcctgtactcatggaggcttggtggatgaaggcaagctgcttttcaactcgatgagaggggagttcggtcttaagccaagaatcgagcactatggttgcatggttgacctgctggggcgtgttggtctgttaaaagaagctaacagtctgatcgcgagcatgccaatggagcctgacgccgtaatctggggagccctgcttggagcctgcacttccatggcaacttagaactagcgaaaaca

SEQ ID NO: 152004 - DNA, 626 bp, Zea Mays
tggtcatgttataggaatagtctgcagctattgtgcaggtaaatgttgttgctttgataagaattggcaagcttcacatctctggactaactcagtagcatcactcttcgttgttggccaacagaaaccagatctgaaagccttcctgaccagagttttggatgctgcatgtactccgcactgcccggcgtggatttcatccaatagctgcttcccaatagccgagtgaatgcacttcatgaggactcctgtcgcaccccttctgtacagtgtgccccctatgagggtgtagtgggctgactgccttgcgatgcgttctgctgtagccttgtcatccggttcttcttcattttttatgtacctgattataggctctctccagtcattggggtccaactccgattggctcaaggtgttgcattcttctgtctgatctgagagaaaactcaggtgtgatatttcttggacaaagatcctgggtgggacctaggcccgattggatctcagcttcgacaacgcgtctgctgccgcgttgcagtctctttccacgtgatggaactccaacccttcgaatttgtcctctagttttcggacagctgcatagtacttgcccatggaatcagtcg

SEQ ID NO: 152005 - DNA, 415 bp, Zea Mays
gaaacttcaattttatcaatcaaataagcaagtgaaatttgaattccctcctccttttcgttaatgggaaattctattaaactcatcgatcttttagatctgatgttgttctataacatggctgatcactgtgcggttgcattagttttctttctcatgtcttgagatagttgtctcgtgcttcaatcatgtaattaataataatgctttcaagtgcttgatgtgaagcaactttgactcttttgcaccctaaacaatgccctggtctcagcagcgtaataaattcatagtgtcccctcctcattctgtgtgtttttttgataaaaggaacatgcacttaacttattttggtccatgtttcttgtttctttgcagtattagtgtccaataaactaggtgctggaaatccacatgc

SEQ ID NO: 152006 - DNA, 442 bp, Zea Mays
atcaattttaaaggcgaaatatcaatgttacgcagacttattcctaaacctataactcactccagtattggaacacactgaattttccttttcttcttctcttctcctccatctccggcagttttagaagaaaattttgggaggcaactaggccaaggcggtgaggtcggaagagacagtagcaaggtggtgacgccgctgaaacgggtggcggagcaggagatggggctagcttgagatcgggggcgatcatggctaagacggcgtggagagggaaagatggaggtcgccatggacacggtagcgtctcaccggcgtgcagttgcggcgacgcgtcgggaaaaagaagatgcatagagcccaaaatagtcgggtgtagtatagacagttttttgtacggaaaaactctgaaattcaagtcccaaatcacccaattcgaatt

SEQ ID NO: 152007 - DNA, 446 bp, Zea Mays
agctcatcgaggacgacccgtagatggcggaggtgatcggcccacgtgctgctgtaaattaggatgtcatcaaagaataccaggacgaaccgtcggaggaatggtcggagcacgtcattcatcagggcctggaacatggcgggggcgttgcagagcccgaacgccatcacgaggaactcgtacaagccgtcgtgtgtgcggaacgcggtcttgtgcacgtcctctggccgcatccggacctggtgatagcccgaccgtagatccagtttggtgaagaatttggcgccgtggagctcgtcgagaagctcctccacgaccgggatggggaacacgtctttgatggtgagggcgttcagggcccggtagtcgacgcagaagcgccacgagccatcgggcttctttaccaggagcacgggcgacgagaatggggagtcgttgcgtcgcac

SEQ ID NO: 152008 - DNA, 665 bp, Zea Mays
ctctgcgcaagtattcccgtgactcaggcgaatccccatgcggacggcgggttattttctcagaaccccgagggtttaaacgaaaaagaacctgccgaaagggtgaccactaactgtgaccgtcctattggaaatcaggggctcggattagatcaccacacttgcgaaccggtacgcattactggccatcggatcaagatcctacgtctacgatgaaaacaaagtcataaactcccatggtcgttgatctgccaccgacggacacgatcaaccgattgaatcggtcccgccctaatctaatcgcgaccgcccacacatcatccaacggcccgcacggatccccccatccttctctacttccccagtcggagatggcagtgcgccagcccgcgcgacggcggtgccattggcggcgaacccttgagcatgcccggaagggcctaagtctaacgcgacccgattcaaaacgaagagggaaaggtggcgagcatcatggtggggccttaccgaggattaggtcaccaggagtcacgcccacgacgcatggcggaagtctgcgggtcctcgccgtcggtgagcgattacccacgcacagacggccctccgatcccaataacacagcagtcgcaccccacacgaagtggcgaggccccagacccaactcc

SEQ ID NO: 152009 - DNA, 555 bp, Zea Mays
cgggcaaaatggttcgagattatactcagatggtctgaccgtggtcagggacactgtcatctcgcataggggttgtggggacaatggctaccctggatatgagtttactggcataccatataaatgctagaactgaggaggcccattttctatcgatgtgtctagcgaggttgcctcaattgtaatctcatgagatggaaaattgagaacaatagttttttcaaatgcacgtgtgagtttttgagtatttcttctacccctctcatataatgttctaactgatccctttgctgatatacataatgcttaatagattgattatcattagaattacttacattgctattttagagcgaaggtactagggagttgagcatgatctccccttgcttgataatcttctagtgtcgttccactgtgaaatgtgacaagaaattctccttcgcttcttcatgcattcgggtgcattattgcggcgcatcatcatcccatttcttcatgagatcttcagactacaattgctcctcggccgacaaactttccatagttgaccta

SEQ ID NO: 152010 - DNA, 1163 bp, Zea Mays
cctagccggaccaacattacggcatagcggctaccgtgcggagtcgcttctcaccatcagaaagacataaagtgaggaacgaaggaacaaccaaaaacattaggtgtcacgacaacgcccggacgaagaaagccagcatcgtttggtagcttgatgtgaaagcggaagcaacatcaatttgttctagagcacttaaggcacgatctccctcaatccttgtatataactaagtacagattcctcctgattgctaaagctgcagttggagacgatgacgatccaccattgccaaaatcttcctctctctgaccacagactgacgatgcaacaacaatgacctctccatcatttctagttatagatctctgaccaacattcttcctcctcacagctgacatcgtaggggatggaagaacggacagtagaaggaagctcatccacgtccctaggaatttcggtatagctgcttccacgcatctgctagtgagtgcctagaaaatgcccccacacagcaatgtcatcgcatttggcagctagggacgctcgggcggagcaagtgaattcgcctcgcggattgctgcgaaacagtgaaggaacgggagaatatcggcagccaaagggagcatatttcaagttaacgtccggacggagcagtagagggtggctcgtcagcttgctgaaaaaatggcggactaagggagacggcggcttgacggcgcaggaaaagtaataagagagaaggatagagcgtaatgtagagagagaggaatgagtgttaccttcaacgctccaggtaaagcgaccatgacgctgaggccacctgccgtcatcgactgtctagaagatgacacctctcaaatttactggcacttctaccagactggagcactttcgagagactcagccaactccattaaaaaagtagatgaagagtaggcctgaagtactggacagaacagaccaaacaaaacaacagttcggcgataggatattcatctaacggctcttgaaatctgcactacgtgggcaccttgtctggggagcgtaatgaggcaacagatgtttctaggaggccgtggaacacacacgatgctaaagagctggtggacctacatgccagccagcacgaacggagacttttctagggttaggttcgatacccg

SEQ ID NO: 152011 - DNA, 327 bp, Zea Mays
cgcaattgaaacacccagttgaagagctgggcaaggccgggaatcgagtgcctggggcacccggctggtttgggtagtgggggtattgttggggcgaataatgattggctgtttgaaagggaatgagggtggacgagaaaaagtgcgattttggcttgaaggccggatcacaaaccgttgcctcttcgcctggccctgattaggcttctcaccactgaatcccttattcttcccagaacttgcgtattttgcttcaacagataaggctgtgctgacagcctttccatacgtcaagtcaatacaagcagccattttcctctgtagccg

SEQ ID NO: 152012 - DNA, 653 bp, Zea Mays
taacatgtgcattaacaaagttatataaagagtttaatccataggaatataggattgtgatccatgaccattgtgccgcccactatttgatgcattcctccagctgccccttcaacatgctagcgatcctaaaattttcagcaagatgagtgtacaattcaggcgcactagcaaaggacaccccatgttatcgatgatcctgtaaattcccttatttgaatcagtgacatgagtgaagcatatagtctcagacttttggggtacaagtgacgtcttgaatcatggcataatcgttcttttcattcttcattttcttctagtcatcatcaggtttctccttagaatcacctgtgtaggaccgttagaatctggaagagtatcagaatcatagtactgagatggattattgttcacatctacttgttttttactctttctcccgttgccattgggatcggcagcatgtcttggtgggccgtcaaaaggtgcttgaagcacactaaattctccaatagtttgttttcctgtgaagataaactctatttcatcatagaatggaattggaacgttgtagtgcttggctctcttgtgggcattctatatttgacatagaatagcatgtcttattagttacccagtgtgtaataaaaggc

SEQ ID NO: 152013 - DNA, 763 bp, Zea Mays
ggtttaaaaaaaaggaaacgaacttttagttgacggagggggtatggcctgctatgaactcgtagagcagcccataacacctcttgtgctgttgacatcggcctcagacctatgttcatcctgtggccagtggtggcctcgtgggccaaaaaggcccagcaaccagccccgtaaactttttcgtttcgatggaaacaggagacgaaaagggccatagtgattgctcgtcgccggtcccgagcgccagaggcaagagttgcgttggatgaaagtgaagaagcttcaggaagcagttccatccatcgtttcctgggcaggtgcaggtgcatcaagccactgtcaagagatccgtgcggcggcggcggcgtctggactggtggacgctagctgctgtacaggcacgagcttacgttgagagacggatctgaccgccgccgccgtggagctggagcgaaagcaaaacccgggcccaagcgtggagcaagagcaagatcgtcccccatggactggttcgtcgagaagaatccgcgctggggtttggttttatttacattttgcatgcacgcctaccaaaatccactctactcactctgtcactcaactcactcgatcagctagctaggtaccagtaccctgtacaacaagacgtataagctactgctacaagtaggaggcggaggaggtgggcgtggcgacggcggcgcgggcgtcggaggggaggagcacgaggagtagcaggacggcgaagatggcgacgggcacg

SEQ ID NO: 152014 - DNA, 554 bp, Zea Mays
tggggctcccaaggaaaaaaacaaacaaacagcaccaagtgtgaagaaaacaatcaaaaagtcaaaacctaccctggcctcagccctacacccccaccagtagcctgcacttaaaaacagaagagatttgcacagctgcaagtaccaatcaccaccgttaacctctcgtagaaatatatgacatggcacaacaaaccaaagaaagaaagaaaaaactactcaaaggacagcgaagaacccctctcagaacctcgaataaacacaatcagtgaagatcgcaagatctttgggcccatatctcccaaccagcaatggttcagttcctgacttcctgctaccgcatagacgcatgcaacgatgggtgcgttcctttccttgtcgttttagctcctcgcaagaacgcggatcagaacttatagcagaactcgacccccaacaaaccagtgctgctgcggcattgcgaaagaagcccgcgagatccaggccagcggcggcggggggcaagcaaacgccgagacgcgcggcaaggaatgcgggacggaggggaagtgaac

SEQ ID NO: 152015 - DNA, 717 bp, Zea Mays
tttctggcctaggaaggtacttgttatccaatttgatgtttctatgaccgaaacacctgtaaattggacgggtattagatttaagtgacgcagaggttcaattacagaccttcattggatggatagtagatgtctgcagaggttcatttacatcccaagcggtctttgatttttaggagttgtaatttattgacaagatttgtatgacaaaacatgccgccgtgtgttctgaaaatagatgtggattcccaatgttaacgtcaatactattgcacgatccagtaaatatacttatatctaatttggtcccaagtggagcccttgagtcgatggtgtgactacttgcttgctttcctgaaggctgtagtatgtgttgcatctctggtttattactctcagttccggtgtcgatgccggtaatgctgccttgctgtgtgcactgggtctcaccgcacgcgtggccaccggagatggttctgtcgctgccgctgccgctgccggtggtggactcggatcgtgtcgtgcgtggttctgatgctttccaggatcctgtgtgctgatttggtcgctgctccggcgttgtcaatggccttgcagggatcgcaatcacaacacgggcgcgcaagctttttctggcgctcgctgccaggcacacacggtttagtatagctagcgatcgtgcctgccggtgccgtgtcaacttagtgccgccgcccc

SEQ ID NO: 152016 - DNA, 367 bp, Zea Mays
cgcgcttcactggtcgggagccggtgtcgacggacaatggggtggagcctagtctgaaggatgaggtggaggctcttctgtcggctctcgagatgctgaagcggcaaggtcttaccggcgcgaggctagtgcgcaactttatgcatcgtcgaatccaacctctgaaggctcgccagaggccaatgcataggtactccggcgtcaacgaccccgaccgccactcttttgaaccgcttgcgctgtccgagattgaagcgcgagtcaaggtcgtcaccgcgctgtcgtcaggatccttcatggatgaagattctcctcaccctctttctggaaaggtttcgagcgatttggtgagctctctctctcctgc

SEQ ID NO: 152017 - DNA, 669 bp, Zea Mays
cgccgtggctgtggtgctctgcgctgcaaagactggtggggacttccttctcggatccgccaacatcttgacttcaattagcactaaacgtacgtggggatcatactctgtgggccggggacctgcgcacgccgacgagctcgccgtctggaactgctcgggcgccgccgctctaagcgctcaatggggagagaagagggatgtggaccgtcgatcttttggacggttcagattagcaggggaaaacgattcgtagtgttgaatcttagccgttgatcttgggatatacggttggggttcgatctggcgcagctgttcatgcgatgtagtgtggtccgttggatcggttgcagaggggtgagattagagttcgcttcaatttaatctgtgccactgatctactgatccaacggctggcatagcataccgcttcgctttaatggatgacctaatctgggccgttgaaatccgatccaacggctgtgattgaagcataccccttcggcatggctggtttacaaaagagcccctctactttccgtaaaccaacccgccgtcctatgacatttaaaaacccttacggttaggtcctgttttatgcgagatagaccctggactcttctgaaatagctgcctcgatccagtagttgtataaaatgattatattaa

SEQ ID NO: 152018 - DNA, 331 bp, Zea Mays
agcacatataattcaattcgcatgacatacaaacaaacaatatatattggtattcaagggaaaaatcactttatcgttgttctaacagatcactatttacttctatatcataggaacgtttcagcctttaacaatgagtttaaaaccaagttatttaaacaactacatcaatagaacacaattaaaacaagccaagtttcctatagaaacaaagaaatgaatagaccacacagtgctgacaacatggaggacaagaatacgacaaatatgaaagtgaaaaatgctataatctgaagttgttgtaatgctacagagtaaacccaatttcaag

SEQ ID NO: 152019 - DNA, 409 bp, Zea Mays
ctcccccgggtataagaaccagttgccgcacccatctggctatcgtgcgtcgtcaccttcgaccgggtgtagaaagccgagagggaggagagagatcgccgttggcaatgatacatggatgcgtcgctaaagcggccttcatacttggtccagggagtaacccagatcccatggaagatgtacgcatgaagctatgggcgcacttactgttcggcgggctcggaatttttctccggtgccaaccaccctccgtggacccgcgccacgacgagagcaagcacctctatggcataatcgacggtaagcaccccaccaagcctttttgcctatgcgtccacttcaggtaccaccggtttgcgtgtggattagtgctctgagacatgagatggttgaacgccggcgagacacc

SEQ ID NO: 152020 - DNA, 562 bp, Zea Mays
tggcgatcccctcctctgccgctgctgcctcgatccgtccatcatcctccccgtgctggccggagcccggattcacgtccgaccccgccggaagaacctgcgcgggcgagtgagtgaacgggttgcaggatcagagacactcaagaaggaattgaacaaccgcaacgtcgaaaggtggcaggtccatgattgcattgcatcggaaagaagaagagttcagtcgagcgagaacacctgcaagactcctgcaattgctcacttctcgacagcgacttgccgctcaacgacccagactggccgcgaaacggactcgccggctcaccgcccgagctgctggtctaccagtaccaggctactagagtactgtactctactttaccaagaattaggataggagtacattccggtaggtgaagctgtttactcctttgtatgcttcaaaggcgagaggcagtggtcagtggagtgtaaagtggcgcagaagcgagctgccatgccatgccccaattgcccatggcagaggaagaagtagcaggctatcgttgccccgaatccaatgcct

SEQ ID NO: 152021 - DNA, 748 bp, Zea Mays
ctttattggatgactggatcaacgaggagagggtacttgtcggggtggtcgaagttgagccactgatctgtttggctgaaggttattgcatgtttcgaccgccgataaggagctggggcactggtggttgccgccaggacctaccggtcattgagcttatgttgccttctattctcttgcgatccgtgacctccgaagatgacgttgacctccctatcaacgcgtgggaatgctccacccccttccccttctggttgctaaggctgcctgggcttgccaggccctcctcgtggtggggggggtggtagaggctggaacggtcggccattttcgacgcagtgcttgaagtccctgcagttccgtaaggtgtggcgcatgtccttgtggtacgggcactgggcatcgaggatgtcgtccagtgtccgctcgcctccacggggtgcccctcgggcacgagtgacgggtggtctgatggtgtggacctcctcacgaggcctcttctcccaacgcctgtcgggttgctggttcgcgtcgcgccgcagtgccggtggtgcaggtttcgttcctccgatgagttcctgggcccgcttgtcagcggtgatgtagaggtccgcctctcgaaacaattgtttggaggtggtcggcgctttctgcggtatggcttggacgaaggccgagtcattagatccctggtataagtcctcaatcactgctgcctcagtgacctcggggatacgatttctcatgg

SEQ ID NO: 152022 - DNA, 960 bp, Zea Mays
tgtgtgtagctagctgcctggacgttgcagcgctggaggaggcggcggcaagcgcacgggggggcccacatgccatccagcgttcagagaagcttcacatgcaaaagggcccctccgaagaatccaaacgttacgaaaaggcccgtgcccccgtgagatgacaaagcggcaaacggcgtgcctccacccacccacacacacacactgacaaacgacccccctcggtattctccaatccccaaaccctcgtcgacgccgtcgtcttcactgttcagtcccccccacagccccactcccttcactctcctcccctccaccgtcgccgtcattccattcgtggggggcgcattacttctgcggttctgcgccccgtcccgaatccctgtagcgtccaccttctccctcccaccgcccggattccgcaagactgagagcagcgctcgctcgcctcctcccaatctccgcatcgtttctgtccaggtcggcggcccgatttgttgccgggcgtcgtcctcgcccccgccctgcctgccactcctcgtaggactcggtcctgtccggactcccgctccacctgtcccctcctcgcttccatcgccattgccgccctcattttgcccccctcccgctcgaagccgcctgctgctttggaccgtgccgagcggggcggcgtaaatgcccgcccgtgcagaggatcccagacagccttctccgcccccaaaccccgtccttgtttcccaccaattaggagcaggggaaggttctcgcacgcgtgcccatcctaccaacggccaattccagatgcggagggcgtcctgactccacctgccaagctccggcctctgctctgctccgccccgcaccccacccgccgacatgggcttcttgatctgccgcgtctgcctcctccaactgctgctcctcctcctcctcgccttcacctcctcaccagcgtcagcg

SEQ ID NO: 152023 - DNA, 817 bp, Zea Mays
aatgacatcagttcactaagtgagtgccatatagttgggttctcttttcctgctctctccctttaatccgtctatgcttacctcttttctctccgtacccttttcctcttgtacctgctcagttggagagtccgagtcgaatcgaagaatctatgtgccaaccttgttttcttgctagtcttcccttgaaacacaataccatcaacctatccctatcaaaatacaacaccatccttgtatcacgctagctgtcactccatttctattataaatgtctaaatgtccttgtttcatatttgcccttagtatatatcatgaaccttgtgaaaccttgtctcactctccctttttcccctacctagatgatgaatcccaatgaagataaagtgaataatgtcaacgacaagattccaacctcgatagtggtgaaaaggaaggatgagtcacatagacatctgctgaatggaatgaagaacaacaagaggaccagaaaaatgtttgggtacaagattaaaccacctcaaccgcaagcagaagcactagagctaatgaatacccaaacaggagaatcaaatcaagctcagttgttcagcatgcaggcaaccggtcatccatcatctgctggcaatcaagcaaagctgactcgcagagaggtcaaagtaagaggtgcttgtttctactgcaaggaagaaggacacttcatttgccaatgccccaagaagcgtctagaccggctcatgaagaaggccttcaagcagaactcaaccagtgatgatccagaagaaattgtcttcactcgctcaaagtacaaagtaat

SEQ ID NO: 152024 - DNA, 354 bp, Zea Mays
accagcgcggtcagagggccagaaacgccaaaaaatttaaatttctgacgcgtctgcgcagtaaaaagcagattcttcaaacagtaaaagctgaaaaagtactgcacaggtttctgaaaaggtgttccaaaaagtgactgacgcgacctgacatgacattaattaaagcagcagattccaaaagccacaaaagtcaaaaaggtgcagcgcagatgtgaccagtcaactgcaaaagctgctgcgcggctgacacaggagctgacacggctgacacagctgcaaaaagtctgcgcggacagaactgcagcagaccagtcagagccagaccggttcaaccggtcctcaataccgatt

SEQ ID NO: 152025 - DNA, 597 bp, Zea Mays
cggcgattgtcgcattgaattcctctgatggtggcgtcaaactgggtgtgaacgaatgagaaaaaattggtgagggtagaaaaagtgtcagatttgagtcgcataggaaacgtccacaaataatgtgagcaatcatcaagaatgagcaggtaatattaaaaaccagaaatacttgggacgatcatagatcacaatggattaactggaaatttgtagtggcacgagatgaagacacatgaaaaggaagacgtgtgtgtcgacccaacttacaagcatgccataaagtatcactagcaaatttattacatgggttccctgagtgagctaatttggacaaaacttcacgatcagggtgcccgaggcgttgatgccagagcgacggagtggtggagacaaggtagatgccggaaaccgcagagggtagagtggaccggagctatcacatcggacgatctctctccgagagtgaaggtccttcacaaagcaaccaagaggatcaaattccacagaacaattattgtcagaggtaaactgtcgaacagaaatgaggttcttaataagacttggggaaacaagaacattattaagacgaagaga

SEQ ID NO: 152026 - DNA, 342 bp, Zea Mays
ttcactttatcactttgttttttgtttgttgtaactgtgttgcacagactgtttggttgctctcgtgcaacatgcttgtggactactctttcggattctcttgagtgggaccttatctttcaatcctggtgtcctcatttccattctgaccaagtgtttacatgtggttggtggtagcactgacaagtgacaagtccctttcagcttatcttggctatccaactatccaaacacacaggacacaatgccgcttttgtatctttagcaaaagtcttccgcttcgtgcgcgttggtggctgcaaaagtttcaagaatcatcgaagatccttccgcaatttattc

SEQ ID NO: 152027 - DNA, 477 bp, Zea Mays
catctaaaaagaaaaagaccacaaactctaataatcatctgggtgggccggtgggggctgcgaggaaggacaaccccttggccctagcaagctcccacattcgacgctcctccccaacctggattaaaactacaacaatgccaggagagaggccgccaaatacacatttatttctatgattccacaacacccatgcacccaacacaatgagagtattgagaccatctctgtaaggactatcaactgtttcgctgacttctttccaccaaaccatgaaacttcgagtggtaggttgcggtgccaaagcttggagcccaaattgcctaagcaccaggaaccatcattctctagagaagacacaagttacaatgagatgatcgattgtctccctttcttgatcaaaaagaggacatctcttcgggtgatcaaggccacgtttttcgagtccgtccgccgtccaacacttcttaagggcag

SEQ ID NO: 152028 - DNA, 573 bp, Zea Mays
ggagaaaaagtctcgctcccagtggatgatgagtagctggccatcagagcgaaagaagacgctttggcacgtttgcagtcccctacctagcgcgccaattgtcgtggttttggaaaccgaggggcaatagatttgtgtttggtggcgatgcaagtgtggactcacggagattcaaacaaggaactgaggcacaaggtttatactggttcaggcattcaccctagtccaatgtactgctgattgtagtattgctctatggtgtgttacaactggtgtgcttctatgaagaaagaaagttgcccaacccttttatagctcaagggtggactttacagtgggaactcgtattctactgggagggagcttggcttgctgcctttggatggcgtagtcctcctgacatcgtctgtagggtcgtgcgttgtcgtacccctagtatggcgttccatcttgtccatttggtatacaaatccctatagcttgctcgacgtcagcgttacggtacctagtgggtcccacaaagtgggcttatggtaaggttcaaggtcgtgtccggtactgcttcatcttccg

SEQ ID NO: 152029 - DNA, 514 bp, Zea Mays
ctgttgtgaccatcagctatgccacatttctggcatttcctgctcatcttcttagctcctttcgcacccaattttaaaacttgttgctcactacttttgattgttcttcccttaggcttggccttatctggtcttgctaagtttacaccttccatatgaaattccagtttctacaaaacaaagatattaagtcagtttttatatttacgtatgtcatcgtatattgtagcaatgttattacctttctagcttccacatccgtagaactactatcaaccagccgaatgtcagtgttatgttccaatgttaatatcggcatattacattgatcatccttattattgcattcatttgtattagaccccattaaaatttcctgtgaaataaagcaaagtccagtgaagacacaaatgttatagagcagcatatgtaatacattataaagatttgttccatacctcgttcccatcatctaatttgcgtaagttgtctatagccatttcgtctgtttcat

SEQ ID NO: 152030 - DNA, 444 bp, Zea Mays
ggagtagcaaaatttggcatcatcttctaccttgttcgcaacagtagagaaggcagagggcggcttcgacgaacgacaacggttcagcgcaccatagctagcgatcgtcgccgagctaggcgagctccaatgggattgtcgagggcgaacttgctacacgagtccagacatggcgagacgaacatcgacagtttgatgcttcggcaccggcgagctgtaggactttgacggcgcggggcgaactccggcgagcataggcaacggcgcaagatgtggcagcaggaggagttgtgcgacggcgggggaacaacagcaggggccggcgtcgttgtgcgagcagcagaagctcgacgacgatagtgtgcagcagcggcgcgacagcagagcatgtgcgcagagaagttcgggcgggagagcgcagagtcgagcacggaaggagagaag

SEQ ID NO: 152031 - DNA, 510 bp, Zea Mays
catattttctttgttgcaggtcagctagagctggagtgtattattgaatgttgttgctgctgtgcgcctgtgcttgaagtatggccgtatgggtgtgcttgagccttgaagtatggccgtatgggtgtgcttgaagtatggccgtatgctgtgttgtcctgggctcctggcgacatgtgctggacagctagagtgtataagtgtatttgctgctgtgctatgtataagtgtatttgctggtgtgctagatgtagctatatggttctatggataatcactgttggtctgtatttggtgccgtactgccgtgtgatgtatttgtgtgcacttgtattctcgtggggtgctttatatatttgtaatttgtggactattgtcagtactagcatgtgtattgctgttttttttctgacttccaattatatttttgctgaacatgctatattgctatgtaatggaaaacccgacggggacccgaaacccacccgaaacccgatgggtgcgggtgcg

SEQ ID NO: 152032 - DNA, 441 bp, Zea Mays
tagagaatgtgaaacaaccttgccactgctcagagttcctctgccacctttggaacgtcttctttttttcttgttgcagagagagcgctgggaatgaccactaggaacaggattctccagcagacctttctccatcagagcttcaccagcaggggtaataccacactgatttcttcttcagagagtgaccctcagtcaaagtgagcggcgccggtggagctgacagctgttgccacactgatttcttcttcagagagcgaccctcagtcaaagtgagcggcgccggtggagctgacagccgatgccacaccgagggtctcccacacagatgaccaagacgttgccgcactgaattcctgctgacctgatgatccacacggagggatggacaccaggcagcttgatgaccaagatggaaacaacgagcaacaactcggtggc

SEQ ID NO: 152033 - DNA, 407 bp, Zea Mays
gaagcggattaactcgccggtgaccaccgcctcccggccgtgcgccgcatggcttagcctttccaccgcaccgccgtgacaccttaaggctgtcccatcgtcgccggggagattgccacgccgttagccacggatttacatgcgccagtgctttcttccacctccggccgccgcgcgtcttgctcaaaattcgtggccaccgcccgctagcactataaattgacccctccccgaactccgtagagtagtaagctgtctagccaccacgaatcagccacggtcgttcactggaatccgcgaatttggaattctccccaaatcaagtttccgccaccgcaagaaactgctcaccgcggccagccctttctaggtccgttcatccctcactctcctttgtttgagcactc

SEQ ID NO: 152034 - DNA, 481 bp, Zea Mays
gggagccaattatcaagtacataaaaaatgaggaagaaccggatgacaaggccatgacagagcgcatcgcaaggcagtcggcccagtataccatcatagggggtctgttgtatagaagaggtgcaagaggagtcctcatgaagtgtgttcattcggctacaggaaggcaactactagacgaaatccatgcagtgtggtgtacatgcagcatcaaggacactggccaacaacaaagaatgatgcagcagaattggttctgaagtgcgaagcatgccaatttctatcaaagcaacaacacttgcccgcccaacatttgcaaattattcttgtaacctggccctttgcgtgctgggggctggacatgattgggccatttaaaaagctcaagggggatatacccacatacttgtcgctattgacaagttcacaaaatggatataatacaaacccattgcctctttgacctcagcaaaagtagtgg

SEQ ID NO: 152035 - DNA, 364 bp, Zea Mays
ttcaactggatacatggaaggcatcatgtacatccgcaagatgctcaagtaattctagttgataggcaacttcccccactctctttaagatcaagaaaggtccaataaagcgaggggacaaattccctttaactttaaacctcctcataccccggatcagtgacactttcagatacacgtgatcacccttcctaaattccaactgtcttctccaagtatctgcatagcttttctgtcttgactgcgcagtcctcaagttctcccgtatcaagcgtacttgttcttctgcctcttgtataatttctggcccaaagaactgcctttcaccagtttgatcccaatacaaaggagtcctgcattttct

SEQ ID NO: 152036 - DNA, 413 bp, Zea Mays
gtaaaccgttaccggtgggggatggacggtttttatcttagaacggttttgtaaaccgtgatgggaactctatggtaacaaggatggggcatccacatctctagtgccattacctgtccagctgtggaggtgctggctgactgactctaggccctgctgcctaataactggagcctactgtacgtgagcactcacaggctgccactgactgacactactacacctatgttgttggactggaggacatatatacacctatctttcgatcccaaactgaaccctttttagttgagactcgcacatcagtgccaaactgcctatccaaactatatgtctgttaaacaataccatgacctgcatctgaccaggcataatagtataaataaacagcactccgacgaccagcagactgc

SEQ ID NO: 152037 - DNA, 358 bp, Zea Mays
gaaagggaggaagaaggtgttgcgcgcatccaaccagggagaggagggacgccatgcatggggccactcctggtgctgggggtggaagaacacaccagggagaggtgttggctccatggggaaaggctcccgctgctggtgtccatggggagaagatggagaggggaggtggcgtgagacaggagagaagggagctagcggctccgcaggtgcgcgacgtgggcgccgaagggagcgggctggcggttttgccgaaggaaacgcgacgtgcacgatctggacgggaggaagaacgaacggcaggaggaaccgttaagaagatgaatagtcaacaggggtggggccctgaaagggaaat

SEQ ID NO: 152038 - DNA, 489 bp, Zea Mays
ctttccacccagcaacaaaaatacccctacttggaggaaacgacttcaggccttgtcagggagagatcctaatgaggatgaccccaccatagtctacatggtcggatatctccacacccttgataaccactatgacgaccttttctcccactgcacccacctaaattcccgggtggaaagcctagagcaacaaatcaaggaattaaaaaaggaaaaggtgtccctccaagaaagtctcgaaatagcagaaggtgaaaaagccaacactcgtgaagcctaccgaactctgaagatgaactacgataagaagttaaagaagctcgcccccactaagaagatctggaagcggaccaagagccaaggatgctagactgaacgaaaagaggaagccccgccaacactgcctccctccaggatagaaagcttgtgagacgttgaggagatgtccctggctagccatgacgatcttctcagggaatttggggacac

SEQ ID NO: 152039 - DNA, 688 bp, Zea Mays
cccctttacacggccaggctgtgtatctaatgctgattaggttgcccctagaacccgcctaggctagcttcctctattcggccgactatagtggtcggcttccccgtgaaactcagtatagccgacttttgctagtctatgaaccaattcgtttctaagtcaatttttaaaattgaaaacttgttgcacgtattttggagttgtttcctattgggataagaccattcccttctatatatatgagacggtcattggcaattaaggtatccaacattcaatagatcaaaatacatctactatccttttatccctgtgttactctatatcttgatattcgtcatgtctccatgcaagatatggcggcgttctagatggccttgccgatcctagaacaacctccacatgctcctccccgataggtcttcgcaagagatgttcgggaatctactgcgaagaataggatcaatatcggtttgcttaaccggtctctagatcattttatcgaaccgctacgttcctcgttgcgttcaaagggcgtgtgtcaactatgggtgtgttagcccttgtcattgtgtgatccggatctcttccaacgtcaactacacgagtggcagagacgaccttgggccttggagagcgcttcaagcaaggctgcctgctcctcctagcggcggtagcctaagcggac

SEQ ID NO: 152040 - DNA, 523 bp, Zea Mays
cttgttaacattccctgtcagcctagtgatcacaattcagaacaggtataaggcggccgtaggcaagaattcccccgcctcctccacaggtatttgagaatgtgcgaacctagccctgtgacactagattctagttccaattaattgtccaataatgaacttgactctgcagcactcccggccatgcacacgatataagtgcacccccaccagcatggcctcccctcccttgagacgcaccaccaccccggcccagagcactgcactgcttctccctctctgttttacggaggacgaggaggaacaggaagcagcagggtgcaacaatggtgaagttctccaagcggttcgagggccagctggtgcccgaatggaaggacgccttcgtggactactggcagctcaagaaggacgtcaagaagctgcaggccgcggcaggagaggctgccgtggcggcgccggcgagggctccggctcactgggcgatgaggctgcccttcttccacccccttgggcagccgcc

SEQ ID NO: 152041 - DNA, 373 bp, Zea Mays
ctataatttacgtaaatttcgtattcatttacgctatttcggttcacgttttatgattaaatccacccgagccagaaccctagcacggtcggctgcacgcgattttcacgccgtaattttgggccccgtttgctgttacaaaacagatataggatttacgctaaatttcgtatttatttacgctgttttagctcacgttttacgctggaatccgcccgagccagaacccgcgcacgatcgtctgcacgcgattttcacgccataattttgggctccgtttgctgttacaaaacagatataggatttacgctaaatttcatactcatttacgttgttttatctcacgatttacgctggaatcggcccgagccag

SEQ ID NO: 152042 - DNA, 504 bp, Zea Mays
ggggaagtgagcgattctctggctatgggggctaatcggagacgggagtggtggctatggctttggtacgacctagcgcagctggccgggggctcaatttataggcagagcgagcggtggcgcttgaattgacgatggcgcggtggcggccggagatgaggaagaagcctggcgcggtgaatacgtgtcctatggcgtggcagtaactccggtgatcgatagacagttggagggggtcgcggtgatgcggtggcgcggttaagacacgcggcgcacggtcggacggcggctctcgtcggtgaacttatctgccacagccgtggagcacgaggggtacggcggtgagtcaccagagttatccccaggtgcatggcttttacttggcggccttatcgggtcatcgtcgacgtgaatcacaacggcggtggcgcgaatcacggcgaagatcggtcgtcggcggtgaggacagccgcgctggcggtctgatccggtgcagacacttta

SEQ ID NO: 152043 - DNA, 563 bp, Zea Mays
gaaaactgattacctggccgagcgaaagcgccgacgaggacccatacgccgcggcgctgttccggacgatcatcggcggcatgtgcctcgccgggatcatcatttctccctctcagaacctctcgaaccctaattcctgccgcctcagtagcttctttccatttgttcactggcacatgcgtagtatctatctcccgcctcacggacaaagaacaggcggcgccaatcctattcctatatggagatgtataccttgcctgccaagtaacaacacgaccaacaacagatctagcgatcgacaaggtagcccagacaaccttcgctgcgagctgacgactggcagtgagatctagcagaagagctacatatgttcgtgtgcctatgcaaaaatagaactccgatcgatctctggctgcatgcagctctcaaggcgtgcgtgcagcaaaaactttgcaagctcagaagggtagctagcaggaggtggcgagataagccgggaggagactagcttgagaagctataggcggccatggaaggggaggcgaggaggaggaggaagagga

SEQ ID NO: 152044 - DNA, 365 bp, Zea Mays
taagaattcattatcgatagaagttataaaggaacaacgagatcaccaaggatgggcaacataaaatgatcgctcatggaccgttgagaaataggggtggtcaaggacatgttaactgaaatatcctgaacggttattgggatataaaggtaggcataaaaaagatgagagtatgagagatttcaaggagatgagcataccaataccaagagtaaagaaattgccgaaagatagcgacttaacaacagaaaaggaaaaggtctcaaaagacagaaaggtcatgaacatataaactgaaatgtttaagtagacaatagaagtttagaggcaagtatttgaaacaagagtattaaagggatacaagc

SEQ ID NO: 152045 - DNA, 451 bp, Zea Mays
cttaatttgacctcttctcataagattcagaacaagttcatactagtgaaaacattggcttcatattacattagcatagtttaggtgtcttcttggtctcattttagcacattaattaggataaaactcttctacatctttatcgccttgtgtgtgaccatagtctgcatccgaatacgcccatcgttccctgcttccatgcaacaatttctccacatcagtttctacacccacctttttgtgcacattctcgccctctagtccaaaagcagctctcatagttcgaagttgcttctcctgttctaggacttggtggctccgtgtccgtgaacctaagaggaatcaccatcttgtgggaaacaaatgcaacgacatgagcaacttcaaacagaacaacaatccaatgaaagatgtaaagtgcaatgtacgttgtgccacctaatcttagggc

SEQ ID NO: 152046 - DNA, 804 bp, Zea Mays
accaactgccagctgcttcttctcgaattgaaatgaatcccaaaacagaacgcgatgttggcgggatgaaatcctttgattaccgatcaagctaacctctggtctctggcagattcgcggcagtcagtcactgacaggtgaaccccaaccacaagcgtcttcctccccgagatctcagacaatggttccccgctcgcatggcacaaatccgagctccacggctcaaccacccgtgcggagtcgccgggttctgttacagccaccgcgatccaacctccgctggagccccatataaacaactgaggcctcgctcgcccatcaaccatcgaactccgtgaagccctcaccattgtagcacccgagagagagagagaacgtgagatgtgagccgcggtatgggtcccattgcctcgggtgagtcgtgtgggattccctgggaagctctgcgcgtgcttggggtctcaccaggggagaatggcgaccggaatccttcaacaacgtcgagctgcgagtttaacagagactcatacgacggcggggttaatacaccgcaggatccaaggtaatgagctgacccttggattcctcgttctctccgcgtagtgtggctataccgaattggggaataatcaacggattatgcggattggaatcgccggccatgggcaccgtcgtgggctagtacgccaaggtgcggtgtccagccgaggaagggggaaggtgcactggtcgtccgttcgcttgtttaacggatgggattgaatcggccaggtgcggtattcagcgattgaaatccgagcgttg

SEQ ID NO: 152047 - DNA, 568 bp, Zea Mays
gcggcttcgaccgtggttgcggaaaatgattcggatgattctgtgagttttttgagtctgatgttctaggagttcggtggtgtggacggaggagtcttcggatgaggatttggattattttgtggcattggatgtggctgaggcggaggcttctccgcgtgtgatggatactgaagttcttcccggtccgagtgctgggcgtaggcggcgaagggcggtggcgaagcgtagaatgagtgaggtggagggtggtcgtcttcgtgtggacagggctggcaagcgggaattgttgtcctcgccagttggtgcgagtgtaggtgagggggagttgcgaagtctttttgagggtgaggagctgaggataatgttgtttaactatagggagatgggtatcatcccgaaggttgaaccaatgtaaggtgtgatgccctcgctgtacgtacgtaactataatttgtatgatgaggctgtgtgccttcggtgacccggccgtgcccgtaggggacttgtgcactaggtctagcgcgtttattatgtcggtccggctgcacctgtagtcggtctttgc

SEQ ID NO: 152048 - DNA, 1091 bp, Zea Mays
atcaataatcaatccatgaatgggagtaacaatacaaaatcatatgcagtaatataacctgagaattcatttaatttagtgctggaaacctaacttacatgtttcgtcgttgtagctttgtcccaagtcaaacttttctaggttagaccaaatttgtagaaaaatgctaaaatatcaagcaagattcattcgatacaccatgctatctattttgatattgcatttatttgattttgtagatgttgacaatatatttttttaagcttgcacaaaccacaacctatgcagaacaaggacttgaacagtttgatattctaaagttaaacatgttgcatcaaagtgtccctatttcgttccatctggtagaaacaaatgaagctaccccttttaccctttattcagagcacaatattgcaccctattcattcttcaactaaacagctgtttggcccgttcaaagtacaaacaccatttaaatgctacaaggtgcccagccgtgtccatttaaactgtttaaacggccatgtagcccatttaatggcagttttgcccaataataattgcctaaacaacaggtgactaacttattacatttaggtgaacatttacttttaaccattatattatttattaccatatatttgggaaatatacaaaataaggtattgcagaagtaagaataatttactagtaccattttcggatatatgaatgacattttattttaatggtcgaggaatagcaaacatattgcgtcaggccaaagaaagttgtagagttgtgttgttgaaagatcaaaatcatattgcatacacctcaatagtgaaacatgttaagtcagtacaggtgcaaggacacatcatgcatgttactgcatccactatagcaagtttatataacagataaaacatactcaatcgcaaaggatagtaatgaatgtgaataacaaaatgtagtactgactagtccatgcacatgatggactaagtctattaacaaactcttgccacgccaagcaagaaaataagaacaaaactggcaagatttagatgcagattaacttaaacagaaatggctacagtgcaatttaa

SEQ ID NO: 152049 - DNA, 571 bp, Zea Mays
gttgcatttagccattctgtaatcatgtcaatatgttatcagtgcatttagctgcattagctcgggtagttaaattataaatctgtttgtgtaccgcgtagaatcgctggtgtactggagactgcccagtatgcgcagtgaccgcgtccagccctggttttccgccacgccgtgcatgccgtgcaagtcgcgcgagctcccgcttgaaaggggcgtcgtgcagctgtaaggagtggcggggaaaacggatcggggggtttaagaagactgtttcaatgcatgagaggtgctgcgcgaatttgcaagtgcccagaactcattgagtctttctctgtgttgtgcctgttcttgtctctggcggctgaactctcaatcgtcgttgccggtccaacattttggtaccagagccttggtggatgcaatacgacggctgtgtgagcccgccgagagagccagcaaagaaaaagagagttatcccacgccgcgcgccgccggtaagcaccatgagtgagacctcgagctcgagtggtggagtcagggaaagttccctgatgtggcccatgctcacccg

SEQ ID NO: 152050 - DNA, 524 bp, Zea Mays
tctgaagcttgaagttggcctttctgctatgtcgaaggatgatctcgcagacaaccttgcttacaatagtctgaaggtatagaagttatggacttataggcagattatttttgcgtcctttattcttgtgctgatcctttgtctcccccttttttgtagggcttaattctgagcaatgctttgagagcacagaagaatgctgaggatgaaagctgccaaatagcccttggtaaccttcggtcagaggttatcaaactgaggaatggagctacatagaaggacaaaattctgcttttcttggtagtcagagtcaaggctagtgaagccaatcttgccgcgcagtctgaagctcatatagccgaaattgaaaatttaaagaaaaaacttgctgagaagaatgaagattttgaagtggctaatacgaaacaggaaataagcgagtggactagcgcaagattgcaaaagaatgtagatgagctttgggaatcgaaggagagatattacgaaaaatccttggattgtgc

SEQ ID NO: 152051 - DNA, 324 bp, Zea Mays
catggagcctttgatcgatgaattggtacgtgcctgggaggaaggggtatggacgtatgaccgagctacaaagacaaacttcagaatgcatgtttggtaccagtactccatgcatgacttaccggtgtatgggctattctgcgcctggtgtgttcacggtaagttcccatgccagtttgcaaggaagctctcaggttcatttggttgaaaaagggtgacaaatattcgtccttcgataaacatcgacaatttctccctcctaaccatccattccgcctagacatcaagaactttacgaaaggtgtcgtagctaccatggctccg

SEQ ID NO: 152052 - DNA, 516 bp, Zea Mays
agttgaagaaggatatgtcggggaggtagcaagcttctttgcttcatgttttcgaaaaagtgaagcaatatctccacccctcttcatgttcaaatttcaatcgctgcattgtacaagtaaattgacagggcacgacatcaaaattatttcattaataatgaacttcagatttacataaaattgctagctgacataaaattgcagattcactaattaaaattgtaaagataaaaatagagtttgctaaaaaaataacctctgtaggggccggagctcggagggcacccccacgtcgtgctgttcttggaggcttggagcccaatggtccactggcacaccgccccggcgtgggatgctgtgttctgcgaaggagttcgggtggtgggctccacggtcgtcgggcagcagcctgctcggcgggcggcagcggcacgatcagttttatggctgcgtgtaggctggagactgcaggcttggatcaaccgttgatcactaattattgctccagcgtcccgg

SEQ ID NO: 152053 - DNA, 430 bp, Zea Mays
gttcgtgaacagaggtcgtggactacctgagaaaatgaggacaacaaatacccaatttccataataagatttaatgtatttgacactgcatatattcgtttgagccggtattgtagatgttgaatttggcatataagacattgaagtgcaaattcacaggtggcagcttagaacagatcctggaaaattccacagtcgggcagcacgacctagggctaacctcgacgcaaacaagccattcagtcacgccgctgtcggacctcatggacagggggcgctggtggtgctttctacgccgcgctgtcgtgcaggctgccatggctatcgctggacagcggtgcagtggttaatgccaggggcaagctccggccataaccattgcaggcagctttggttgttgtcgattctcaaattgatcaacatacctttg

SEQ ID NO: 152054 - DNA, 599 bp, Zea Mays
atgctcgtcatcgcaaaagaaaaattttgtggctagattggtcgacggaaattagatcctaactagtcatattgggaaagctgagtgcatcgatcttttctacaccaatctcttggggaccagtgaaaacagagagaggagtattaatctagagaatttgggaatgccttcctatgatttgtctgagttggaagcccctttttctgagcaggaagtttgggaggtcatcaaactgcttccttcagataaggcacctgggcctgacggcttcgctgggaggttctataaggcatgttgggacataatcaaagttgatgtcatggctgccatttctgctgtttggggaagaaagtttgagaattttggtcggctaaactcagcatatatcacgttgatccctaaaatggatggggctgaaaatgttaaagatttcaggcccattagcttggttcatagttttggtaaattagtcaccaaaatcctggcatctagactgtccaagaggcatcatgagatgatatcaccaaatcagagtgcttttattaaaggaaggttcatccaggacaactttatgcttgttcatcaaaccacaaagtttc

SEQ ID NO: 152055 - DNA, 724 bp, Zea Mays
gcaaaattggattttatacatcagaggaaggatgcaaattttgcaaacatggttaacttctgtatgaattagcaacattgcatgcctgtactactactgtaccgatgtgaaaatactactgaagggaagtttgcaggctattatttgaaatctggagtttacagatcctggtatgatacagaagtcatacaaaaaaaagtggtagatgcaagagttttggaaggaatatatgtatcaatatttcatgcaataacattactggcttcttcagataatgtgcacatttataattgatcccagttgtgattcgaggacatggacaccacaactatctgatgctttcctgtgactgtcttggcgtttgttgaactagaagtcagagacatgacagataaattcttcatccaggtactttcataatcctcttctaaaagaaaatgtttgctataagtgcttccaaatttgacgctgcgactgcgattgtgccttacagttgattaacattaatccttatgatcgattctggaatcaattataacgtgataggaaagggtggtgacatgctggcaaagccacaataaagctggtttcatatgttcatctcaaattccacatctccatccatcctcatcttatttagagccatctgatccaaaaagtacattccccaaagatgataatatgcactgagcaagcataaaaaaatctgacgcagatttttttt

SEQ ID NO: 152056 - DNA, 639 bp, Zea Mays
cccgtggcaaaaaggaagcttctcctgctcttcctcggcaaggaaaagaggggaaggtggcactgcagattctgaacaggaatcaaccgcacggctcggctttgtatgttactactttttctgggctctgtgtgctgctgctgagaccatgttctcgaggatcaaatcacaggctcagaggtggaacaggcgaactgatttgtagctttcacccttttattcctagtgcatgtatcttatgactgctagatgaagattttacttgtctttgaagacagatgtcagtgtgctgcaatcttcgtatgatactattctgcactagttctcagagcagatggatgacacatggccaccaagattgcttgaagcaattgcctgcgaattgtgagctactgtgaacgagtcatatggcaacaagtggtgaactttataaatgatgttacttctacgctcgacgttcggattaaagacatacagctattcagactgttgcagctgtaatttatagagacaatatattgtagaagcagtaagagccagtacagattaaagccaaacgaacatactaaatgtatttgaataactactaaatagtactctttccatagttccattccaaattctagatacttaactttt

SEQ ID NO: 152057 - DNA, 331 bp, Zea Mays
gccatgtttcccttgccttgatttgagctccctgagttctaatgattgttggatttattctgcctcggatatgggcagtctttgataaaatgaccagacttcccacaattgaagcagccagttgaggagctagggagggcggggaaacgagcaccaagggcactcggctgacttttagaagtgggggcaattgcagggcaaatgaagacagacagtttgaatgggtaggagggtgggcgaggtgaagaacgattttgattgaaaggtcagattaccaaccttggtcgcttttcaggtccctgattggacctatcaccttcgaatcccttcg

SEQ ID NO: 152058 - DNA, 753 bp, Zea Mays
cactagcacagtactgtgttttatcaagggctttggataatgataattgaaatacaaggtcatccgaacctatgttgtgcacaaaatttgtaatatatagtaggaactcaataaataaaaaagtcattcaggaggtgtttttataaagcaggcatcaagcatcgacaatctataaacaatgtgagcatccataaaactgattggccaagtattgcttcatagattagagtcagagaaagagggatgtccataatcaagccaggtagtttctagtcacaccatgtatttgaaacaagatcagtagtatgggaatgttggggcgtgagtgtgtgtctggacgtctggtgtctgtggggttgtttgggctcttgccccttttttcttcttaatatagtaatcagctctcctgcgttttttgagaaaaaaaaatatatcagtagtatgcgcagaaacagaggctagtgaaattctgttttgcgatatctgttttgggactaggctctaggctgaagcttggaagtgtaagccctgagttctgcacctgtttgggaggattcttacttttcaaaggataacacaaattaacttatctatagcaccaatttggcttgtttttcagatatgttacaggggctgatgttttgaatctggacaagtcacatactgaatgtgtggagacagagtgaagtgctagggaaggtggcgcagattgcttgctaaccacaattcagtgaaaagaatgtcatggaccac

SEQ ID NO: 152059 - DNA, 476 bp, Zea Mays
tgacgagccaagagcaaaaggggagagtgccgccacacgggattcgcgtctacatgcaatagtcgccttggggggtacttggagggctttgtgggagcactgtggaggtatcttgggcaaccccgaggactgcgacaactcgagaccatgggaatttgtcatcgtgatcttcttctccaccgtggtgtgcctgttgccgggatcaagcctcatcgtcgtacagtcgcgggtaattatggtctaatcctattcatgatatcgtgtgcatcgcgtatgactacttgggggtaggtttggggaccctgggcgctcaacggagagaactccgccgcgggagggctcgccgtcgtcgttctgctatggcctgaggagggagatagggtttgaccattggatactcgttggacggtgttgatcagagtgatggataccccttcgaccgatagaaccctaaccgtagatttgtgatcttaggg

SEQ ID NO: 152060 - DNA, 299 bp, Zea Mays
caagctagatgcttaacgtattgtgacttcccaaagaaatggacatgggatgtctcagcccgatgttggaaatcgaggtctcgctgcacaaaaattggacgcatgtactatgtacatcctactgctggcgaactatactacttacgcatgctattgatgatagttaagggttcgacaagctatgttgatatcaggacgttcaacggtcaagtgtatgacacatttcgtgatgcgtgcgaggcgcgtgggttgcttgagagcgataatgagtggaagctgttgtttgacgaggcgatcat

SEQ ID NO: 152061 - DNA, 334 bp, Zea Mays
ggaaggtgatgatcttgtgaccattgatttcccaatcgacggccaggactagaagctggataaccttttgccggttaaatccatgtcgcagaaattagatcggacgatccataggcaatcaaacttcattgaatctgtgacgtagatcttggaatgaacggctctaggtgcgtaccgattcaaacccttcgtgatttaatctggtgtgtccggtgttgatcggacggccctgggatcccgataccccttcgtcgttacaaattcacaaaagagaccccgtagttttttagaatgaacccgcagtccacactgtggggaagcctgagtcttaggg

SEQ ID NO: 152062 - DNA, 457 bp, Zea Mays
gtgtcggcgtgcgcgcgcctatgggtccccagaaactcttgcgggaaaaaatatatgtatatatcttgaagcttacgcacagaaacatgcagcgtatatatatacagcgtgcatgcagtagtagctaactagcgtatattttctttttttttttttccttgttggaaagagctagctttactaggtgcgtgtgggcgtgggcaataatggtagtcgcaaaaactttagcttgggctggtgtcgtcctcgttacgaatctttccgatcatggaaagatcgcttccaagatttttcatgggcgcgcggtaactctgtctgtgcaaacccatgtgtgactgtattgttgccgacacccgttaggtacggtggaacccaagcaccaactcatgcaaaagctcctctagcttctctatattcccgtctttatttacctccaggcttcaaggcttcagcaacg

SEQ ID NO: 152063 - DNA, 652 bp, Zea Mays
ccaccatcgccgccaagtacgtcggcaagcccgctggcagcctgctgctgctgccccccaacaacctgtcaaacaacgtctccggcccggcgctttcctcccaccaccacctcctgcccggcggaacagacgtgttcggtggcctccaccgtcatgctggcggtgggtttgactttgacaaggggttggttgtcgagctcgccgtcgccgccatggaggagctggtgcggatggctctgctcggcgagccgctctggatccctgcccttgccgtagacggggctaccaccgagactctcaacgaggaagagtacgcccgcgggttcttccccaggggcgttggtcccaagctgccggagctccggtcggaagcgtcgcgggaggccgtcgtggtcatcatgaaccacgtcagcctcatcgagatgctcatggacgtggtaattattaataaccaactaatgattcagtaactgttattgtgttaatcagcaggatctgacgatgcttcactcaccgcgtgcattatctgagacttctgctgtgtgtccgccgtttccatcttattggtgcgtgcagaaccagtggtcgacgctgttctcaagcatcgtgtcacgggctgccaccctcgaggtgctctccaccggcgtcgccg

SEQ ID NO: 152064 - DNA, 563 bp, Zea Mays
cgtgtcatcttcatggtcagcatcaagatctggggtttcagtgggaggtgtggcatactcggtagccattatcccaggtgtgggcacctgctgttcatcctgaacatcccattggccaccgggatgagtgggaggcccagaacgaccactactcgacgtgcttggtgacgaggacgaaggacccggcttgtccatcaggcgaatggagctctcgacagggacgaactcagcaccaactgggacatttatcccagtcttctcctcctcattccagtcccaggcgcgatcctcttcaaacacgacgtcacgcgacacatgtacgcgttttgtgcttggattgtagaaacgccaggccttgctgccactttcatacccaatgaacaccatttgtgtacttctatcttcaagttttgttagacgcttgttgccttgcttaacatgtgcaacacagccgaatgtacgaagatgactgacggtaggttttgttccatgccatacctcatatggagtgctcccttcatttccttgagtgggtgatctgttcagtatgtatacaaccgttg

SEQ ID NO: 152065 - DNA, 552 bp, Zea Mays
cttcaccaagtgaggcaaccaaagcactaacctcttcgtgggagggtcgcactctaaggcccaaaccgctatcaccagcaggaggattcgacacaaaactggtaaaagccttggaaggaggcagattccaggctgagtatgcaacaggagcaccgatgttttaaacaccttgcccctgagtaccatctcgagtcggctgaccaagtccacagcaggaattcttcttttggtaacccgggtcgaatcagcgaggcctcgatacagataagtcgggtatgctctgtcctttaagggctgaatgttcttaaaaatgaaatcggcgaccacagcttctgctgtcagacccctctctttcaacaatccaacctcaacaagtagagcccctgcctcagccacctccagatctgtgggggattcggtccagcttggagtgcgaacatctggctgtctccctgaccgtggggggagggaattcccgtggttctccacgataaaccactctaggcgccatcctttgatgctgtccttgagtgggatgtcgaggtagtcggt

SEQ ID NO: 152066 - DNA, 790 bp, Zea Mays
tttttcccttgactttgactctcctcattccacgaagtggtgacaccttgaggtacacatgatcaccttcctcaaattccagtggtcttcttctattatctgcgtagctcttttgcctggtttgagctagctaccctcaaattctcccgaattatcaaattctccctaattatatggacttgttcttctgtctcttgaataagttcaggcccaaagaattgtcttcctctagtctggtcccaatatagaggagtcctgcacttcttgccatatagagtctcgaacggtgacgtcttcagactggcctggtaactattattatatgagaactcagcataaggtagactcttgtcccaactactaccatgctgaagggcacaagctctcacacgtcctccaatactcgagtagtcctttcggtcagtccatcagtctgaggtaggttgaactaaaattcaacttcgcatccattttctcatgtaaacttttccaaaatctcggggtaaactgtgatcttctatccaaaatgatcctcttcggtacaccgtgtagagacacaatccaagccatatataactctgccaattaagatcccttatacgtagtcttgaccggaatgaaatgagccactttggttagtccatccacaataacccatatagaatcatatcctttcgaggtgcgtggcaatccagtaatgaaatccaaaccaatctattcccacttccattcgggtatctttaatgggtatactagtccagcttgtctttggtgttcggccttaactctt

SEQ ID NO: 152067 - DNA, 854 bp, Zea Mays
ggcgcccacggcgaggcggcccacggcggtcttggcgatcttgagatcggtggttaggcgggtgaggacgggcgaggcggtgttggcgagcacggcggccaggccgaggaaggagcggagggaccgctcgtggacgacgccggaggtggcctgcatgagcggcatgtggaagagcgtgacgagcacgcaggtggagaggattccggcgtaagcgacgacggagtcgccggtgggggcgtcgaggagcgtggtggggtccatctcgaccccgagcgcaaagaggtagggcgcgaagacgaagccgccgatcttgccgaagacgaggttgatggcgttggtgagggagagcacacggaactgggcaaggatgatgccgagcagcaggtcggagaagacgcgcggctggtaaactttgcggagcagcgcatacaggaccttgctgctcagcaggatgacgccgaactcgaacaggatcgtgttgtagttggccgacaggatgctgctcgtcatggagcagtccatggccgcccaagataggattctatgataggctacctagctgctcgtcgatcatcaatttcttgttcgtttcgattccgccacgaaggacaaggcagcaagagcggacacaggtacggtggtgaggctgcggcagagagcatttcgcgcggttgcttctttttatctagctctcatactgtaaaagaaaatcgttttcgaagttccttgcgtttgggtaatagaggtacttttggaaggacggcctatacatgctggactgttttacccccatcatttaattgccgacgtctgaattaaaggatgcgcatgcgggaaggggaatgcatgagtgc

SEQ ID NO: 152068 - DNA, 670 bp, Zea Mays
gggcacacaagaacactaaaacgagagaacagggagcatgaacagacctggaattcgctggccacagtgagagttctaccacggtggcggaaacagaattgggggaaaagaggaattggaaggctctggtggataatctgaggcaaggatcggtgcgttggatgcataattacctagcggagccgcgggtgcgcttaatttataggctccgggggcggcggtgcatgaatttggtttggcgcggtggcgttcggagatgaaaaggggtcactagcgcatgagcttagtggctttcaccgtggcggctctccggcgatcatcgggcatgcaagacgcgattcactgcgatgtggtcaagcgctttagcacgtggcgtacaacggtaagcggccaacgacggtgaggtctatctcggctgatcggcgagcaagtgggtacggtgaaactcatccgcgaccgagcccaagcctatcttgtgccaagattcttactccgtcatgattatcccctcaccagagagcatgaatcgcgacgacggcgcaaatcacggcgcaaaggtcaccggcggcgagggggctaaacttgtgatctgtttcagttactgtaccatggtggttaccatcagagtgtatgacagaccattttgtagggctcagatctcaaattttca

SEQ ID NO: 152069 - DNA, 324 bp, Zea Mays
gcctgctataacggtgtcaagagaattaatcatgcaggtctctttgagtcatcagggtggaagctagctccttttgcttttgttctacaatcatgagatctcgtcagctcatgtagtacagtagtagtagtatatgtctcggttggttggttggtatgtaggggtaggaataggatggtgaaaaatcctcgtcttttgctttcttgtgtgttggaatgatgcacacacaagctagcgcgtcgtacggtcgtggctcaacggtacagtagtgtatcaccccatcccaccacaccacatgtttagcatcggcctcctcatttaggg

SEQ ID NO: 152070 - DNA, 710 bp, Zea Mays
cttgtcatgcgaccagatgtgctggaaagggttgcggtgcttgcgttctgacgtgagatgctgggcctggtgccgttgatgaccacagcatccattcccacgagtacctgcactgaccatgctcgcaatcaccatatccagagggcagcaaaagtcagaagctgattccagagcaactgtccttctggtttcgctgctcttgggactcgtttttttccttctcgaaatccatatattttttctcgaaagcgcaagagagctgcgcgaaaatatattaagaaggggaaaaaggtccaaaaaggaccccaagatacagataagccgccctacggcggccaataacaagcataaatgaaaccatccatgacaaaaacactgctaccaaaacagcactatagctatctagctaacatgtagactagctaacatgtagacctgggatgggggcaataagcataaatggtttgatctttgggttatgggctggtgcaaagaagctgtcgaaatccatatattgcttctgatttttgcagcatttcaagttttccacagtttgacgcatccagctaccagctgttcagctctaccattatttcctcgtggagtattgtagcctgcagcaaaaaaccagctcagagatggacttgctgaggtcggcggaaagcattgcttgactttaatccttactcgtttctattgttgatatagag

SEQ ID NO: 152071 - DNA, 1158 bp, Zea Mays
ctcttagcttcttgatgcaaagaaagttgcatactacacacacctggggagctcttgtgatgaagcaagcgttagatctggatcacgtacgtactacacagcagccacgcatcagaagttcagaactcggtgcaactctaacttttggccagtttcgtttttcttttcgtttctttcaaacagctcctcatagcacatgcatgcatcctatagctacattctctgtcagcttattaattagtacatatttcgtgtatatatatatggcgtatgtgttaatcatttgcacgtacaggtaggcacaccgtatatgtaggcagaactaaatgcttcaaatttgcaaatttcaagttttccgcgaaagaaactaatttctccattcagataaagtaagatgtctcctctagttaccgtttgtttttagtcatcatgcactgttttcttctatctagttatcctttgccgagttttttttaccggttgtttttttttgttagacactcggcaatgaacttttttgtcaagtgtccgaaaaaaacactcgacaacttgtttgacactcggtaaagagccagattctgatagtgaaccattgcttgctgagtcgtctcaatccactttcactatcaaaactaagcaaaatgggatgagattgaatgaacatgatggacgactatatatcagtcagttatcatataccaattgctcatcaccttggcaaaatatacagagcggagctttttgcttggctgcgtaactccgtttcacatttaatctatagatagatagatggattgaccagtatggagtgcagcggcgtttggatttcagacacacaaatatcgagtccccacaaacgactccggctgctgaatggctgtgtcactgtgtgacatagctgacacacatcccctaacacggcccagaagcgaacctgacctcggcctgtttatattcttttatacaagcaaaaagcccaatacgttagcccgcccatggtatatctatagtatgttaacttttttatatataagatgatgtgaacctcactgacactgagccatgcatgagtggtaagatgtgtgacttgcaatttgatttctctgcaccgtatatgaattaagacatcagagataacatgaaatatgacagtaagaa

SEQ ID NO: 152072 - DNA, 1002 bp, Zea Mays
cacttatgcctcgactaacttggttgtgggcctctttcgcatctggactgactcgcttttgctaattccttttatccggcccatagcgggacgcctccagagggtggctgctatatggccccgggcgtattttcgcactcgtgtggagccgggggatatccatcccccacagttagggtccttggcatcacactttttgttcatctttgctatctaccgttccgccgggatgggtgttcgcaagttttcgggtccctcaatttccactagtgaccattatcgtagccttcgaggcataggtattcacagtctcgaccagcttccccatcaggtccttccgttcacgttgcccgccccataggtccatttctagcgaagatggggatggagtcgtcccgctcgatgctttccccaaagtttatccactggggtctctagttacgttgtcttgaggtcccccttcccgtcgagggtgccccaaggatgcacgagcagtgcgatgtggcgttttgcctgggactcttcgacaaaaacatataaagactcaaagcgtgttgttatagaaaagggaaaatgatagctggtttcacgaccagagtttcggctcgttactccaccgagtcggttgttcctttgtcccaccttgtttggttcgtggtacgcttcctgtcctgaaagtcaccaacaggaaatgagcagaagggaatggaaaaagatgaaatcaggacaggggagactagggttcgaccaaggctctctccccctgttgggggcctggcttgctaaaggtcctcaaaacacttgaatttcggcatgttaaaatatgtttcatgtgaataacgaaggctggatgaagctagctttctgccgaagcaacacatacaaaagcttcgtcgtatccaaaaacggtggaagaacaagccgaagccatcagcttcggcatggacaaaagcttcgagcgcaagatgacgaaggtaaagaagtccaaggcttgcacaacaa

SEQ ID NO: 152073 - DNA, 680 bp, Zea Mays
tactgtttgatgtgttcacagatattcctccgacactgatactggacaaggagacctctgcagtgccaaggttagtggaactacgaagtatccaaaggtgtaatcatgcaatacaaggagccactctgggtaactaaaatggccaatcaccgtacgttgcataaatttgggccagtcgtacatagaacatgcacaatggagtcgcccccccgaatggacagtcatctagatccttgagcccaactgatagacagatgagtgtttatttggatatgctggatacagggcaatcacctctgcactgaacagagaggtcttcgtagttctgttccaatccgatgatctagtgtaatcactttttgcagtcttgtggtttctaacaaaagaaacctatttatcttccccgcatgttaggctcgaatagttagccctcaaacaacacattcagttgcatttcttggtcgccagagaggcttcaggttcttagcaaaaggagagatgcagcttccaagaaaacagtgcaatacctgccaaagacatgaaaatcgctcgatcagtttggttcgggagcactcccataaagcagcaaggtggggcaacgtcttccagatgcaataaaagatacatgaattaacaacaaccaaacaggagcaatatcctcaaagaaaaggtaaatttta

SEQ ID NO: 152074 - DNA, 792 bp, Zea Mays
ggaggttcgcctttgcgccgccggtgtcagttccgtcggtgcgctcatggcgcggtgccccgcgctcgcgaggctcgtgctccgcatggactggtgaggacaggtcaagagctgatctgtatgcatgcggcggcgcttttagtggaactgatctggtaccgtgagatgcaaatgacgggcatggaggtcgatgcaatagaacgctgctcgatccaaacgggagggaaaggaactaacgaacgaacactgaaattcgctagtaatccaccttaaacctgatttaactagtggttgaactgctgctcttgactgcagtgcagatatgtgaactgatctggtaccgtgagatctccgcttgtggatctttgatcggtgcttggttggactctaaaatctaaatacgcatcgtgcacggtcaagtcggaaatggaaagcgaagttggcaccgaaatggaatttaagggtcgatctgctgtggcttgactatatgaacttgaatttttgctggatttgattttcttagtggagttctagttatattgctgtgagatctggtctggtggtctgagggtaggaagtacggatctgataactcgtagctttgatgcagtatcactgcctggttgacgttagatagtgaaattctacttggccttgtgaacagctaggtgaagctgataaatcagtagtgatggtaaaagcttcatgaatctctgatgtgattgcctgtcggagtaaacatcagtttgtgcagcagatgcagagttagttggccttctgaagaacaccttg

SEQ ID NO: 152075 - DNA, 730 bp, Zea Mays
agttcaagacagtatttaaaactcatcaaggtcattactaatttagggtcatgccttttggtctcactaatgcgcctgcagctttttagtgtgctatgaactcagttttagcaccctttcttcgtaaatttgtcttgatattcattgatgatatattgatctatagtgcatcatgggctgaccatttacaacatttaaggatggtgtttgagaagttgaaggaacacaagttctttttaaagaaattgaagtgtgtttttgggaaggtggagttgttgtatctgggcatattatttctcagaagggagtatccaccgatccttctaaaaatgaggttatgaagaagtatcctacacctaccagtgtgactgagttgagaggttttttgggtttgacagggtattatatgagatttgtgcagcattatggaatcattgctaaacctctcaccaaccttctcaaacataaggcattttcactagagtcaaggtgctgaaacaactttccagcagttgaaacgggctatgtgtgagacaccagtgctagacttgcgtaattttgaagaagtatttgtggtagaaattgatgcttgcatggatgggattggggcagttttaatgcaaagaaacagacccattgcgtttcttagcaaagctctaagtgagaaaaatcagatgttatccatttatgacaaggaattcttggctcttttaatggtagttgaaaggtg

SEQ ID NO: 152076 - DNA, 454 bp, Zea Mays
cgggtctgattggctagaacttgggctaggtctaagggtaggggtggaggtgcggggaggtgggtttcactttcctctctaacgacttccccttcagctcttcgggggaaacctgctccaatccctgaggcggtaggcgtggttttatccgaagccatctgccagggaagagaatcactgtcatgcacatgcaaattgttttcaaccaagttattttattcattacaccatcacattacaagcataagactactacagggggagactacacgagagcgttcttcgaggtactagcaagttccttgtctaaggtgtccccaaatgccttgagaaggtcgtcgaggctggctagggatacatcttcttcgtcagaccagtcatctattctggggggaggtagggctagaggggccttcttcttcttcttctctgtctggcatccttggttagtggt

SEQ ID NO: 152077 - DNA, 527 bp, Zea Mays
gcgtgagcatgttgcaccgtcttaagtcgtcgccgacttaagctgattgctccgttagtagggtatagtggtcaccctaagtcaagtaagcgcgagcatgttgcgccgtcttaagtcatcgccgacttaagccgattgctccgttagtagggtatagtggtcaccctgagtcgagtaagtgcgagcatgttacactgtcttaagtcgtcgccgacttaagccgattgctccgttagtagggtatagtggtcaccctgagtcgagtaagcgtgttgattccatgtccaattgaatcgaagtcaagtgatagttaacagtttgaatgcccttgaaaatgaaaactttattgatgatgtattctcccattatagagtacaatgttgctctgatagctttcgaggttttgctaagggtaaaactttctaagatgctctatgttccatgaattccccacttcagtaccatccatttgagtaagccggtatgatcctggccgagtgacctctgatacaatgaatggcccttcc

SEQ ID NO: 152078 - DNA, 934 bp, Zea Mays
gccagatattcgtgctacagttttgcttcaacgtccatcgtctttggattctgcttgtgctctggctctcttgcaggaggaggtggcggtcccggacaagcgttgggaggggaggcgtctggacgtttcacaggctggcaaagcattcagcaagccggcgttgcctgtgtctttccagcctcggctgaatacgtcccccgctggtgtggaggaggctaagaaagttgaaccgcctcgacagtgcacctttgaagacaaattggcggtgcttcgagcatatcgtcgcgctaggggattatgccagaggtgtgctgaaaaatggtctcgcgaccatcagtgcccccaaactgtgcaactgcatgtgctgcaagaggtgtgggatttatatccagtggatgaaactgaactatctgaagatccagatctgactgaagatacttccgagctggcttgtttggctatatctctggctgcagcccgtggcatggaatcgaagcagacgataaaatttcagggactcattcaaggcaattctgtccgtcttttggttgattcaggcagttctcattcgttcatttcgtctcacgtggctacataattatcaggaatttcagatatgccatgttccatgatggtccaagtggtcgatggcaaccggttgatctattccaggcagctgttgggagctcgttggtctgtacagcagtgcactttcacaactgattttcgtattctggacttctcagcttatgatgtgatcatcggtatggactagttatgtgccaatagtcctatgaaggttcattgggagcacaagtggatgattattccctatcaacgatccccggtgttgttatatggactgtcagccatgattcctccagggtcggtagtggagttggctatggtggacactactccgattcagtttgag

SEQ ID NO: 152079 - DNA, 427 bp, Zea Mays
ggaagatttatataccagcggcatgcagctgtgccactaagaaaaggtggtgatccacgataggatttgactgatgttccaacaaagataacaattacatgattcatttcactggctttaaagacttgttgtcctgggaattcctctgctctacgtctccatagtgatacctcaattttatttccccttcattaaattagaattttgttacaacagtaacataacattttatacatatgtttcaatggagcaacgagcatttaccttagatccacaaggtggatcagccttttcatgcaaactattccactgctagtatgaaatggtgttgcatcagaaagagctgtaatgcgtccaatgacatctgcatgttgttgttacaacaatgttaatttgacgaagtgtttattgtctttttgaaaatagg

SEQ ID NO: 152080 - DNA, 304 bp, Zea Mays
ttagaagtggcggaattatcctgctcgatggaaaggacaatctacaagaagggataatggattcttgatcatcatgctcgaggcggttgatttgtatgacctatggatttgacatatttttggggtttagggtttagggttttgacctatggatttgacatgcttccgtgagcggggttgaacaatggtgaaccaatcgttgttgttcattgacgtgctcaaggaagaaacactaaatgtgagcttcaaggtgaatggacatgggtataaccaagggcactacctctctgatggcatctaccca

SEQ ID NO: 152081 - DNA, 507 bp, Zea Mays
gccgtccgcagccctgaagggctccaaataaccaacgacagcgagggccaccgcatagtcaacctcatcatgaccgaagactggcgggcaccaataaccctgtacctgcaggggtactatcacccaactgacagcaatgaggccaagcgcctcaaacaccgaagccgggacttcgcactgatcgagggccaactttacaagaagggggtcagtcaaccgatgcttaagtgcatcaccgagaccgaaggcatccaaattctgcgcgaagtccacaacgggacctgcggctcccacgcagggcctagggccctagcggcaaaggtgattcgccaaggtttctactggcccgccatgatttgcgccgcaaatcgggtcgtgagatcctgcgaagcctgtcagaaattttccccacgctcgggacgcccctcgcagttcacgaagttgatcgcccacacgtggccccttcagcgctggggcctcgacattgtcgggcccctgcccacggct

SEQ ID NO: 152082 - DNA, 297 bp, Zea Mays
gttgtattatccttgttgggcctagaaacatcatttagtcatgtgataggattacacttaggcgtaccaagttcctaatcctcatgatgctctaggtactaaaaggcttggggctcggtctcctcagtgaggcgacattgagaagcttagagaccttagggtcagcagagggtccccaacatctaagttttgtcaagtgttttggggcctaaactgtctcgaacacctatacttcataatgccccaggacgtgagaggtttgaagacttagacttatttttattagagctcttggta

SEQ ID NO: 152083 - DNA, 372 bp, Zea Mays
tggacgatcaccttgctgcatcctgccgccttgggccaagctgttttcgctacaaggcacttggtcatcgctcctacgcctgctctgggccagtgaatggtgataggaagttttctgtgcatcgacgactgttgaggggggcggtttggagcatactatcgacagttgcgccaacgaacaccgaccgtgcggcgacagggcctgtcccgcagcaccagttggctcgggcctcggtctgggggcgacttcagcctccagcgccccatccacgcaagaagaagagggtcagtgtctggcgtagaatctcccctccaggcattgaaaagggccaggtccatttcgagatgatggaaggggcagtggatgcacaag

SEQ ID NO: 152084 - DNA, 363 bp, Zea Mays
gaactaagtgctcactatgagatgatcatttacctctccggcgcggtggatccctcacgaccgcgtacaaccatcgagtcgggtcaccaacaaatcttccggggtaatcaccgaactccaatcaccactgagtcatctaggtgatgccaatcatcaagagtaataaatcatagactttcagttgaccaagataagcctaatgcatgtgatgtgtgctctagttggctctcatgcgcactaatgaggtcctaacatgagattatgattttgctaatcacctcagtaggctttatggacttgcaatgctctagcaataaattctagatggttgggacaacaagacacttaatatggctggtggag

SEQ ID NO: 152085 - DNA, 326 bp, Zea Mays
gtgattctccagatgtcgggaacccgtggtaaatcttttgttgctggatgttaccaaggcattttatattaacgtggacgctaagtcgctaacaagccgtgaactgtagagaggccacaaggaagaagataatgcgaagggatgtcaaataagctgggtttgaaccttggatgttagcaagttcagggatgtgaaactgcaaattaatagttccaggacttacatgcatctctggacaagctcaaagatgctgatgtatttcactctgttattttacccatttgtttgggcatttttatgttcccatttagcttaacaatttctta

SEQ ID NO: 152086 - DNA, 286 bp, Zea Mays
gcaacatcttggataaaacacagaatgatatcaagtcttacggggtacagtggaactaccccacagaagatgaagccatgtagaaggtcagaggaatatttagaagacaaagtccttgccctaagtttcgagtttttggaaaaccttagggtttgtgaattttaaaccaacagtggcacacccgctgtttggtaggagaaattgggaaataaatttgtgacacatttccttttccgttactgagcctaaacttttaaatctcgggacgagatttcttttagggggg

SEQ ID NO: 152087 - DNA, 1241 bp, Zea Mays
ggaaagtctttcagaagatgaagaacaaattgttggctaactcatctgcacttgagaatctcctgagagggctctgcagagcagggagaatggatgaagctttgcaggtcacggaatacatgaagaggacatcaggtctaaacagtacaatgttttcgttcctcatcaatggctaccttaggaaaggggagcatatcaatgcacttgacttgctacgggagatgagagaatatggatgtgtcccactggcgtcatcttatacccaggtcatgcaacacctatttgcaaccgatcagtgtgaagaagcgtgcggactgtttgaagagatgctaaaaaaccgcgttgaaccagatattgttacgttcacagcactgattggcgggtatgttcgcagcggacatatatccaaagcatgggatgtcttcaggaatatcaataagaatgttcagaaacccacattgaaagcatatacagtcttcatgcgagagctgtgcaaggtgtccaggccccttgaggccgtagtacttttgaaggaaatgctggaatacgatttcaggccttctgagagaacattctgctggttaatttctgctttacgtgacaaatcctatttggaagaggcaagtaatgttgagagaatgcgagcatcttttaatttgcgaaaccctagagatggtttgcaattcgaacagttagatggcattggcaatattgataagtttcgaaaaatgcgcaagtctaatcctcaagaaaaagaactggcattggagttcaccagctccccgtcagatcaaaatggtaagacctccagtttcacactttctgatgacacacatcagaaagaacaagagcaggactacagtgatggagatgtcgaagaaatatgtcagattctgtcttcttctgatgattggggctcaacgcaacaggcactggagacgagatcagtccattttagtcctagtcttgttgatgccattttgaaacgttgcaaaaggaatagttgtgctgctttgcaatttttctcttgggtttgtagacgtccttactacatgcctagtacgaaaacatacaatactgctatgaaacttgcgggttctgcaaaagattttaagcacatgtggtatctgtacagagaaatgttaaggaccggatgctccccaactgtggatacatggaatgtcatggtctgtcagtatggcaatgctggtctgtctgaaaaggccttgaatacattctgg

SEQ ID NO: 152088 - DNA, 395 bp, Zea Mays
cttagaaaaccgaaccagagtctcaaagttgtacatgccaggttgtacatgcccttagagtgaacaagtgactgcaggtccttctaagggccgtcattcctggccttccttaaccagagccacctcatgttcagcgagacagcgaccaacccaaagcttctaaattatggattccaagaccgccttggttgagtgacctgcagactctttcccaaccaacaagacaatgccctccttgtacgtttattcgacctttctagaggaacctcttctaattttatcaatgactttaaaaactcattcagagcagcgcaaatacggagaggctactttgaacccgttacctgactcagtgagacaactcttaccagtgcaccagacctgcccttctgcag

SEQ ID NO: 152089 - DNA, 430 bp, Zea Mays
gtggggctcgtttcacggtggcggaaatcagatttgggggaaactccgaattcgcggacctcagcgaacgattgcggttgattcgtggtggctggacagcttactaccctacggaggtcggggaggggtcaatttatagtgctagcgggcggtggccgcgaatttcgagcaagacgcgcggcggccggaagtgaggaagaacggcgtgcagtgaacacgtgtttatcgccgtggcagtaactccggtgagctatggagagttcagaggaggtcacggcgacacggtggaagagttgagccacgcggcgcacggccgggaggcggcggtcgacggtgagcactttaccgcgggcggtgagccaaggggaggggtgccgtggccgatcggggtggcttccagtttagcggtgacgacgatcttttaacccca

SEQ ID NO: 152090 - DNA, 481 bp, Zea Mays
cctttctagtaggaaaagaagcacatatgccatttgtctcatgcattatcaagtgacgatatatccttaatgcccctatgtcctaataaaaatatggagccaaatgatgaatcggcaccaaattatcaaaataccttatgatctgctgaaaaactatggaattcacatctttgacttcaatgacttgtatactttgacattgattttggatttctatggcaaaatactttatgatcagctggcaagctaaggaattcacatccctgatttgtatacttgacattgattttggatttacatggcaacataatttctccatctcttatgtcataaatgactgactaatgttgcaaagaatggattttaattgttaccgttttcacatgaaaattccctgttgcattgtgggtacttttgaagaagccacagacattgaagaatcctttgttcaacacagttatagagaaaaaattggtacgcc

SEQ ID NO: 152091 - DNA, 666 bp, Zea Mays
ctcagttgcaagcaaccaaccaccagcgaatgcgtgttggcactacggagatcccagtccattcaagaacaactgtccccagctgaaagccatcaggacctgcttactccaactcggtgaatttccccaagaatacctcagcacccgcccccaaggcgccctcctccatcagccagtagaacaagacccagtatcaaggaagggcacgagtaaatcacgtcgatgctcaggaggctcagcaagctccaggagtagtgctcggtgagttccttgttgaatttactcccgctactgtacttttcgattcaggagcatcccattcttttatagccactagttttgtggaaaagcatggcatcccctctacccctctagagattccattggtcacccgaaccccagggtcagaccttctatgccagcacaaatgctcccaagtcagaattcttttaagtggggtagtattcttggcagacttaaccgtcttgccgccccaagggattgatgtgatcttaggaatggattggttgaccaagcacaaaggtatcatcagttgcgcaaacaagacagtccttctcacagaccgccatggaaagtcagtctcttgtcagtctctgccacccgccaatgacccaatgatgtttaacgtagtaacaaaaagtatgt

SEQ ID NO: 152092 - DNA, 354 bp, Zea Mays
ggatgtggcagtggcggaggcttcgccgcgtgttgcggatgctgaagttgtgcctggtccgagtgctgggcgtaggcggcgaagggcagttgcgaagcgtagagtgagtgaggtggatggcggtcggcttcgtgtgggcagggctggcaagcaggaattgttgtcctcgccggccgttgcgagtgtaggtgagggggagttgcgaagtctttttgagggtgaggagcttaggataatgttatttaactatagggagataggaatcattccgaaggctaaaccaatgtgaggtgtggtgccctcgctgtaagtatgttactatagtttgtatgatgaggccgtgtgccttcgcgc

SEQ ID NO: 152093 - DNA, 414 bp, Zea Mays
ggcaccttgaacatgatctccaagaccctgcttatagcttattgtagcaggagattactcctctacatatatacagtgtatatataacaagtaatacatcggctatatactattcttagccaactaatcctaaattataaacaccaaacagaaagaaagagcggagaaaaggttcattaattaaaagataacacgagacgaaaattgaaagtggtgaacattaatatagctaggtaccgctttgcgcttgtgtgcctttcaacttccaccaacctagcttggcgtcactcccgtgaggccaccgtgcattcgccggctcaccggccggccggcgccgcagttacgtcggccttcacaggcgacaccagcagtaccaggtccagacctcgatagatcaccaacaccttccgtgcg

SEQ ID NO: 152094 - DNA, 1269 bp, Zea Mays
cggaatccaacctcacccgccggctgccgctcggctgccctccggcctccgggcatcgccatcggagtgtgcaggaaccaggaggaggccggtagagtccgtgcacccgggtcccactcccctgaggccgtccgtggctccgtgcaagatggggattgcgcaagggtgcgaggtcaccatccccgcgcctggtcatcagtgtgagttgagattctgcgtctcctcgctcgatttacttgcagccacatgcttgcgagttgcggtacccagcttagctttttcgagtccttgctaatcttggtggggacgacggagacctgatgctatgcttccttccctccctgtgctgttgagttccgcttccacagctcgtgtatggccgacacggtaatcgctgcgaaacgaggtcatgcgcgtcttccttgtgctttcggatgcaccgaggcttgccatccaaaattcgctgcaatgcttagctagatcgaaggcctacttacgctcagaggtgtcagcttggggatccccatcttttatctcttgtcgtggttaaaacagcggcctgatatgtcaggtgtttgttccgcaaaagggttggacttcccacgttttgggatgagagtttgttcggaatagcatgctcaaagtcatggaatttggtcgcagggagtgatcaagtaggtactaggacagtcctctccctttggtggtgctgttgattccttgcaagacctgtacctctgtgctcagataatccagcatgtgctgcattcagatgggagattgaatgaaagtgtgtaataccagtagcttcctcaaatactgcagattgaatgcacgacaggaacattccaactttgttgtcggtatccattcttcatgaagacgtcagtatagccggctccactgaattcttcaaatggaataccttgttaattatctgcaaaattttgtaaccaataatggagcacttggaggctcatagaagctacatttactagctggatttttaaattggtttctctttggagaagtaggtgcaatcttttttgtaagcatagtcaaatttttaccctttcagaaagttcttgtgccgaaagcttgtggaatgtggtactgaggaccacttaattcaaaactaaagtggctaggtgatcatatttcaaggcctaaatatttagaatgcctcccctaatcaagacttttttccccttgtcaatctacatcagttgcactgtttcatagctggaaggttggtaatccaggctgtca

SEQ ID NO: 152095 - DNA, 527 bp, Zea Mays
ttgcatctgtattgctatactatcctgagagtccaaccaaatcagatcctaaatcttgaaaaacaattgaactgctattcatacaaagcaaccaaacgtccagaatgtagcgacttgagtattgtacacatcttgcgggcaaaacatataaaccaattaacagatgcaagctaggtcgcccgtacctgcaaaagaagtagcttaggcgtcgcaaggggagcaccacggcggtggcgtccgccacgttgtggcattccctcaccgtgacgccagagatgaaactgcctttagcccttcacgacataccacgtgctccacatcaccgttgtggatggccagatgacgggagatacggcggccgcggtgagcgcggggccgaaggctggacgagcggagcagccgaggcgtggggccgcaggatggaggagccgaggtgctcgggcggagggtggaggccatgcagtggaggaacggaagacggcggatgagcggacgagcggaggaggcggagctggggtcggccgcgc

SEQ ID NO: 152096 - DNA, 639 bp, Zea Mays
attttttttagagttgctacgtagtttatttagttgtttcttctttccattatataattgttttgccattgtcctctttgaacaactcaaatggccgcggaaatgcggattgagcagcaagaaaatctattcatttcacacgtctccatctcgttgagcatttaattatttttgggcaggaaagaacacataccagagatgaggttgttggtttaatttgattctaagtcctaatgaagaagattgtgagctccggcccggcggtgccgccctcggggttgtgcatgtagtacgtctcggagtccttggaaccgacgaggcggtcgaaatgcgcgcgcatgtaggtgagctcgccgtcggacgggtgggacatatcggacggcagcacgccggcgcccatggacgtggagtggagcatccgcatcacgcagtcgtcccgctctgtcgcctcccgccgcgacgcgtgcccgacgctctcgccgttcacctcggccgtccagaccggctcatcgagcagcctccgcgcccccacgtccaccgtatggtgctgcttctcgcactcgagcgtgacgcgcaccatccccgccgcgctcacgtcctggatgaacttggccgtgggcacgccgacatccagcagca

SEQ ID NO: 152097 - DNA, 321 bp, Zea Mays
atttgattcaacctttcctttccaaaggaaggagcggcggatcctgtcgatgcgtttacgggcccatgtcgcgaggggaaagaccgacaagtggtatgtgggcatagtggacatgacggaagacataagcgtgagacggccagcccgatttagcatgcttcctttccatccggccaagcggttcccgattttctcgatcagaggttggacatgaattctctagagcgcccgggtgtgaagttggaggctaaggtaacggcacgggaaggtcccccgggtcccttggaacggctggagcatgtggtctaggtcagtgttttc

SEQ ID NO: 152098 - DNA, 479 bp, Zea Mays
gtgggatttgttggcaatcagcgacaggcgctgatttggatttggaagaagacgaccctgacgcggcggcacaatcacatctctctgcttcatggtggtggcctcctccatcgcgctgctccatggcgagatgagcacaggcctgcctaacgacgagcgcgcgctaactctgtctcttttcttgccagcgattgattcccagttcttgcctatatagccatggctatggaccggataatgatggggttggtggcagatccgactcacgcggcgtggaaatcggatttagttaggattcctcttgaggtgcgctcgatggggaagaagatatatctgccgaggggggcctaccagtcagcaacagagggagagaaacacgggtgagcgcggcagtgtccgtgcgcgagtccggcatgcagccacccgtccggctgataaggtgggccccgcgttgtcagtgtgcgcgggagcgacttcat

SEQ ID NO: 152099 - DNA, 330 bp, Zea Mays
cttggaatcacatgagctagtcttatttccactacaaatgtagtgagtacatcccactctagaaataattgttagttgcttatcaattaggctctcgtcctttgcattgctcatatacattgggcgagggcacaccaggttattgagtttgatatgtgttaggatttctaattgatgtgaccattggtattacttgtgatacatatagcacatatataccactgtagtaataagtattgtgctcagataatcattaggttaccattgtaggaaaaaagagttgtacggcttcataagaatgtgatgtattaacagtagataaaaatgaac

SEQ ID NO: 152100 - DNA, 951 bp, Zea Mays
ggggaggaggggcacgaccgagggtggagcggcggctagtgcgggatgaggggttgcaaccacaaccatggaagcccaggtgtggtgtagggagggagaagggggtggggttgtcgaccattgccggcattggggggagaagtcagcggatggccctggcggctatgggaaggggaggagggaggagagagtggcagtaaccatgttggatagaatagaaacccctaaccctatttagagtagggttgttgtattaatagatagaaagctatataaattgggcctaagctcattacacctatgacacacacatatgtctaacaggaattgtgcccagcaattaataagtgtgcaatttaatggcataccctcagtgtttgtgaagcagcatctattatttcaacagattcatcagataaataagtcttcaagagtttcaaaagcccaaccagaacatcatcagaaataccatagtttgtggataatttatcctccttggaagcagaaccagtatgtagttgtaaagaataattttcggtggtagttggcagacggaatattacttgatgtgcatcagatataccagcctgcgctagcattaaagaaatcaactgactgagatgaaaaattgtacatcaccaacatactgtagcatcagaaaagattaaggccaaaaacataccctagagataaaatcagcaagcacccaagaagcttcatttgctacagatgatgagctacaaatgtcaacaagagcccatacagcagaaatgacatctgggtcactatgccagcagctaaccatgtttgtatcagccgcagataggtcacttctacgaatgatttctcccaaaaataactttttgtgatacgcacgaagactgaaagtataagaaatgaaagaagtgttataacaatagaaacgtgtttggaaaagaaaaataataatac

SEQ ID NO: 152101 - DNA, 291 bp, Zea Mays
gcattaatgctacattgttgtgttgtgacatttggtacttgccaatgatgtcaaggtagccatgtgataattcgaggcatataattttatcactacctgcattgtgactagaatagtagtagtagtaaataactctttctaaagtcaaaattgtgtttaactgaaaatgatcctaaacttgaaggtactacagacattgggttgtgttgtattgtcgttcaaatgaaagatcttctaaggtacactcagatggggttgtaaatggatgactgccaaattgatgctatggaa

SEQ ID NO: 152102 - DNA, 428 bp, Zea Mays
gttaaactcgaccatgttttctgtacaaccagctgggaggagatccatccagattgtattcttcatagcagttcttcggagctctctgaccattgtcccttagctctgcatcttaatgaggatgtcaaggggaagcgaagattccatttcgagaatttttggactaagattccaaattttttggagacgatgtctacctcttgggagcagccagaatggctctgaagttgaaaaggcttgctaaggctttgcagtcttggagtcataaaaggatcggcaatgttaaatctcagcttagcttggccagggaaattttgcacagacttgagattgctcaagacaatagactgctgtgtggggaagagatatggctgaaaggaaggcttaagcaccactgcctggggcttgcttctctggaaaggacaata

SEQ ID NO: 152103 - DNA, 536 bp, Zea Mays
gaaaaattgtctcgttgaatggaaagagaagtttactttgggggacactggatccctgcccataatgctcgagacggatgcctcgtatgacttatgaattttgcatgcttttttatagtagggtggaacaacgatgtcaatgcgctcaaccaatcgttgttattcattgatgagctcaagagagaaacatcaaatgtgaagttcatgatgaatggacatagtataactaagagtactacctcgccaatggcatctagttctagtggtcagtgtttgtgaagaccattttctcctatagactctgaaagcagcatatgtttgttgcatgccacgagaggacgtacagagatcatttggggtcctctaggattgcttctatattctcgctagcctaggtcattctttttcccagcaaatacttagtgtgatcatgtgtgcatgtatcgttcaacacaacatgattgttaaagataagcatgaaaaaagcatatgatatggataactatgagatagtcgagtcctccattgtagcacca

SEQ ID NO: 152104 - DNA, 789 bp, Zea Mays
tgtgcatttttatttgttggcaagacattctctttggaggccggtggggagaccagctttgcattgatttattaactactagcggagtggttcatcagtcaccaaccaatgatcaggggattgtaccaagacaagtgcagaattccattatctgcgaggtaaatggtggtcagtagtaacggcccaatcatgatggcaaccacaaggtttgcaaagcatttagcatcagtgccccccctaacaggacagctaagaacgccctttcagctaaaggcattcgcataattttcgttcgctttctaactcggaatgtgattacacaagacaatgatcaagaagaagccaatgattaagaggaggatcattcattcatttggctgtcaggctgtgatgggagctgtccgcattggtggcgttcaggagagacggggatgggaactatgcacatgcctggttcggggcttcgggcatccgctggcccggccctgtcattagtcattgccatgttatcttgtcattgtcatcgccggctgttcttttggctgcactggagaacaggttggtgcttgcttgggaacccaccctgatgcatgtcactcaccccacattttcacatgcagattttttcccccttctccgtaccaacaaccgtcgctgtcaactcaacacggagcctgccgtgccgccgcagccgatgcccgatacatactgagcatatgacctcacactgactcgatctgggctgtgcgcctgtgcgcgctgacatgttaactgtaacaagctcagcac

SEQ ID NO: 152105 - DNA, 522 bp, Zea Mays
cggaggggcttttctgcataaaaatcgggccgaagaggtatccgcacaccgtggccgcccgatcgactatctgcggccacgattagatcccggtgcacagacaagcccgcacacacccagggtccctggatcctgaatcaacgcccagaaacgtgccacacccagctaagccctgagcccgtccgatgcaagatcgacgacccagatttaccacacgcgaaaggatacgcccgcacagatcaaggccgttcagaggacatccaacggccgtggttttttccccaaatctactgccggacgacgacggctgctgtaccaccacggcggcgccatcaccggcgcacaaccgcccgtcattccgagcgcgaatcaccaagcccaagtgacggtaaacggagcagagatgaaggcgagtcatacggaggcgttctcaccgttggtcatgtcgtggagacctccacccacggtgtgctgcgaacgatggcgatacacaggcgccgatgaggaatcccggtgatcaag

SEQ ID NO: 152106 - DNA, 382 bp, Zea Mays
gtagctgttcggtggggttgtagctagggcaaggagtcgtggccgttggattgcaagcgaacggatgcgattcgatcatggagataccgattcgggtatgcataggatcattgctgtggccgttgatcgtgaaatctagggccatcgttggatctcgcgaacataaaatctagaccgtaggtgctggatccgaccgctgcagtcgcataccgattgggatgaacgaaaccctaatctgggcggtctatttttaatctgacggctcataacacccgataccccttcggccttcaacttttgctaaagagaccctgtgattaaaagaaatcaacccgcactccaagcgccagtgatctgtgccttgggaaaattttggttttgc

SEQ ID NO: 152107 - DNA, 438 bp, Zea Mays
gaactgttgtgacttgtgacaaccattgattcaaattgaaataaagtgcttcaccatgttatttaatcctcatcaaagcaaccataggttttaagtgattaagtccacttgtctaaagaaaagtgctttcttcaatttcatttttaatgggggtactgtggttatatgttaaatcatattaacaaattagctccatagtccctgggaacgtgaaaccatgccagattccttgtccaaaaatgtttttcctgttcgaagaacacagaagcaatctcgtccccaccgtgtggcctgtcaaaaccttcctgggaacttggtgactgtgatcaatccgttccatgctacaccagcaaatgagttctcaatatgtaattgactttgctatcggctgagcttgtgtatgtaggcatcatattaaaaaagctttcagcttttttt

SEQ ID NO: 152108 - DNA, 656 bp, Zea Mays
tgtatgttagtgcgacaaggttgaggccacatttgttagtagaagatccaatgcatttgaagatggtgaaaagggccacatacaatagtgccaaattggggaatggacggtgggcaaccaaagttcgagtatgagactgaagcttgaactaaaccttttctccatctaggaagtgaaaatctcagacatgtccaaaatagcacatagtttcatcttgttttgtgctcttaacaacaaatctggaaattgttttcgctcctgtagcatttcagaagtcacttatgtgtgccttcagacaaaacaggaacatacccttgtggcagttcaaaaccaaataatacactgaaagtgaacacccaggggccatgtgaaataaagtgttgtgtgcaaaaactatgtaggcacaaggaataaatgattgatactctcagtctggttattaggctattggtttgggaaccataagcagcactgagttgcagtttagtgccaatgaggttgaacaatagagtctacaaagaattggtaaagatcttgtctctgtcagacaggattgttttacaacattattcaaaaagggttcaactacttgaggggagcagaaaatgaatgtttcagtggaagaaagtatatatatttataaacccttgcatccc

SEQ ID NO: 152109 - DNA, 423 bp, Zea Mays
tgcacggtccagccgacatatatagacggcatacaacattacacagttacaaattaaatcattacaaaggtgcgcgcaaccgtctagctaagatgaatatatatgtagctcacactgtcgtcaaggagattcttcctgcatgcatgcatgcattaacatgcgtatccttgtaaataaaatggtgcttgggagaaaggcatccattgtaattcatataatccaatcgaaaaactgaaccgcccacatacgctgtcttatgttttaagggcataaatattatatatatagttactttcttgaggtgcaatatatgtatattttcttggtgctagctaacttttcttctcgattatatatatggatgatggacagatatatatcagttgcatgcaaatgacccatcttggttgatcgtgattcgtg

SEQ ID NO: 152110 - DNA, 528 bp, Zea Mays
ccagaggattttctgctgtttttgcctgatgaagatactgcaaccagagtccttaatgggggtaggctgttcagaggccctcgattctctcttctgttcaaaagatggtcgcggtttgtgcatgcttcgtcagcttcgttgtccaagctggtggatattgagattaaaggcattccagaacatggttggtctctctctacagcggagcacatcttacgtggctcttgctggatttccgatatccaccaggattcggcacacaagaaaaacttttcatctttcctggtgagagcatggtgttttgatcctagaattctgcccacagaaatggatcttcatattattgaaccaggccctgccgttcttgagaagagatgtctatcttataaaatctcgatcggagtttgcccggtggatcttcagtctgtgagcctggatacaccgtcttcttctccaccgtcgtctgggaataatcacgatatgggaggtgatcgtggcggtcacgttcctcctgctcgtcgtcaaggc

SEQ ID NO: 152111 - DNA, 309 bp, Zea Mays
tcacatcacaccgtgatgcccagtgcccatttcccccctatccaaaatggatgcacaagatgcgcctgcctcatcgcttagcccacttgcattgcatgccaacctagctctgcgactcaagttactgcagcaccgatagacctgcaccttctgcgcatgcacgctagctagctgccaaggcccacctattctaccactcaatcattcaggaagcatctgcacaaacactagcacgacaaccataacagactagccgcagagctgcctaatcacaataattccaaggcagacagcgacagcagttcaaat

SEQ ID NO: 152112 - DNA, 403 bp, Zea Mays
gaaaatgagattgaggatgtgtttatcgttgttttgtaggtgataagtgcttatcaattgctatgagctactagcttaccacttctcgtagtttaggtgtttgataaaatgcatatttaaggacagattagttattattcaattcttgggtaatggagtaccgttggttggtccctacatagcatggtattggttctgtagatctaaatgagtgtcaagacagacaagattgacctaaatcctttgttaaatctgaaaatagaggtgatccaaggtcctatgtgtctcggttgatagtcgtcgagtagggatggcaacgggtttaaaacccgcgggtacagagattacaaacccatacccgcgaggttaatgttaaacccgtacccgcacccgttacccgtgg

SEQ ID NO: 152113 - DNA, 677 bp, Zea Mays
atcaccattcaccaacaacatgagctctgaagtcaagacagtagctctgaactgaagtctgaattctgaaccgaacaacaacatgatcaagattcaagagtcaagacaggagctctgtagactaaatcactgaactctgaaccgaacaacaatgagaaaagattgagataggtaccttcagaagaggtgctaatctccagtccctgggtagccgcctgtgagataggagtgcccaagcctccaagggggggggggggggagagagagagagagagagaagggtgtcggagggagagagaagggtgaagaagggagagaagggagctgccggtcctgggaagcagaaatgtcatccagggtccaggtctccagggaaatggaagagttagggcggctagccggctatattaattatgggtccaacacgcctgttggactaccttgagtattattccctgttgatcgactgaccgtccatcagcccgattaatcgctccatgttgctaactagtccaacgatatggacgatcaactcaactgatcgaattgagccctctaatcgtgattagttggacaatatgaaaacagagtcctctagtcatgaaaacatgtgtcacaacccttcttgggggagggggctgcggatgctcttgctggtgtgggcaggagagagggcg

SEQ ID NO: 152114 - DNA, 1841 bp, Zea Mays
tcagtaatatgttgttgatatcaattccatttgttcaccttcatgagaatctcctagttcatccttttcgtcatcaaacaggaaacactcttcgtccttcatatgcttcgctagccttatcaactctacatttatattttccgcttcaggatgttgttgttccccaacaacaaacacatgaactcggttgtagagctcaacccagctacaccccagatctttgctaacacctcggagtctcatcaaatgtctcacccgctcaacatcattccacttccgctgggcagcatagatgtttgataacagtatataagcagatgagtcctcagtacctaactccatcagctgctcacctgcatatgctccaacatcaaaatcacgtaaactgcgacatgcccctaggactatacgccataggcatgtaccatggtcaatagttatcgaatctatgaagtcctttgcttcttttaactggcctgcacggctaagaatatcaaccatgcaagcatagtgatcaagtgtaggaattaaattatagtctttggtcattgccctaaaataaaaccagcctctgtcaactaagcccatgtggctacaagcagatagcaaattaatgaatgttatatgatctggtgccgttccctctagcttcatctcctcaaacatgtcaagtgcatcacttccacgcccatgttgtgaaaaaacagaaataattgagttccatgaaataacatccctatcaggcatccttctgaagacaaccatgctatcttcaaggtttccacacttcgaatacatagtggacagagctgttccaacagaaccccccaagctaaatctacacttcaatatttgtgcatgcaattgcttcccaaggtccagtgctgcaaggcatgcacaggctctaagtacactagttacagttaaataactgggtataatgccctgtttgtccatcctggaatacaacatcagggcttcctcatgctccccattctgcacatgtccggtaatcattgctgtccaaaggacaacatcatcaacatcatataattgatgaaacccatcttttgcatcaccaatacaaccacacttggcatacatgtccaccagtgcactcttcacataaacctgcgtttcaaacccaagcttcaccatcaaacaatgtgtctgcttcccaaccactaatgcgcccatgtcactgcatgcgttcagtaccccaacaaaggtgaattcagttggcgtaaatcctgacgaatgcatctgtaggaacatcctagctgcacaattggcttctccattctgagcataccctgtgatcattgctgaccatgtgatggagttcctctccttagatgacccaaacaccctcattgctgcatccatacactcagcctttgcatacattgtgacaagcgaattctcaacagacacaaatcccaccaaaccatcctttaataccagcccatgcaactgcgtccccataagcaaacccagtggcacgctaactgcgctaagaactgctgtggttacaaactcatttttctccaatgggcacttctgaagcatcagccggaagagctcaaaggcctcctcagaacacttcccagtggcataacctgacaccatggcagcccaggacactgcattgcgatgtagcattccatcaaacactctcttggcatcagaaacagctcccagcttgcagtacatgtttagaagggcggtcgagacgaagacattattggagccgcaggaggatggcagcttgcacgcgagcgcgtgcgtgacggcgccagcggacgcagagggcacacgggcggcggcagtgaacgcggcag

SEQ ID NO: 152115 - DNA, 624 bp, Zea Mays
gaagtcgcctaagggtgcagccggacttagcacaacaagtgcgaaaaaattccgatgtctatcgcgaagactatccgcgcagtagtcgcctaagggtgcagccggacttagcacaacaagtgcgaaaaaattccgatgtctatcgcgaagactatctgcgcagaagtctcctaagggtgcatccggacttagcacaacaagtgcgaaaaaattccgatatctatcgcgaagactatccgcgcagaagtcgcctaagggtgcagccggacttagcacaacaagtgcgaaaaaattccgatgtctatcgcgaagactatccgcgcagaagtcgcctaagggtgcagccggacttagcacaacaagtgcgaagaaattccgatgtctatcgcaaagactatccgcgcagaagtcgcctaagggtgcagccggacttagcacaacaagtgcgaagaaattccgatgtctatcgcgaagactatctgcgcagaagtcgcctaagggtgcagccggactaggcacatcaagtgcgaaaaattccgatgtctctcgcgaagactccgcgcagaagccgcctaagggcgcagtcaaactagtacaacaaaagcagaagcgacagcatcaaac

SEQ ID NO: 152116 - DNA, 1016 bp, Zea Mays
tatgagataacaagttggtacttaccaagatcaccgtaagttttgtacatttcatgtattttagatctgctggttcctaatgattcctccagagtagttacaactagactcccaccaatgttcagttcctagcttcaataacaaacatgaggttaatgtatttgcatgtcctatgacaaggtatagcaaaactatattagaagagaaaaagatgaacaaggaaagaatgtatgacttagagcatcatactgtaaactactcccgccagtcccggtttataaggagcacacacacacatatcaagattcaaactttacaatctttgaacagtggtttgatgcgtgtttccattaaaactggtcaaaaggaaaaatagaatcaaattgccctttactgaaatgcagattgttcataataaaattaaattgtgatcttgtactccctccagccaataaatgtgatgttttggacatcatggggtctcagaaacataactttgactaatacctttcactgcaacatatttttatgaggcataaaatatagcaaatgtatacttttgtggaactacttttgagttttgagacaaatctacttgtatcatttataaatatcccaactcaatactattaaggtactccctctgttctaaggggctctttgggactgctccattccaggttttccagctctgctcccaggttgtctcaactccatgttttaatggagctcctcaagggggtactccagaacctattactttcgataatggacatcaaaacatatttgtcctttgtaactttttttcttccttaatgaaatgacacgcagttctcctgcgtagttcaaaaaaaacatatttgtccttatttttatcgaatgttgttgacataagtaatggttctgccactgagttcgttgggaccaggtagtgtgaatactttatttaagctatatgcaatttacagtacaagatgtgcatgtgattttgttccttgtgaatctgcatactgcag

SEQ ID NO: 152117 - DNA, 729 bp, Zea Mays
taggtccccgtcgagcaagtctgtgaagcagaacgaccacccaggtcccaaccaagatagagaagcaaggtggaaaccaagtcaaacgtcgcaaagtccacgccaactaagacaagacatgacatcccgggtcatggcgagtcatcggaaaggtaggccgcgcgcacgcgcgagtgtccgctatcgtcatgacagcacctccccaagtacgttcctcaaacgcgctcccatagcctcaagggaccgaacaaccctatacataaagtacctcagcatcggagcttctacattgacccgaatatcgggtagtgcgcaatagatacaccataccgagtgtacgcctacacacgccaacgagtgacgcaggcttgtgacgactgacaaggctgcacagtgcatggctactctatacgactgacctacaggacccccacgcactaccacaagaatgtcattagaagatcgcacggacaggacaacacaccatgatgggagtacggctacgcacgaccccgcgaacaacatcagagaaaacacgctacccaaaggccatcgaccgagctccacagcaggatacatgtcctcactataaaatccagcccttgaactataaaagggaatgacccactctttttgaacacacaagcacaccggttgtaacacgtcccagagcaatactacgatcaacactacattgggctaaggcgtaagcctgaaccagtataaccc

SEQ ID NO: 152118 - DNA, 733 bp, Zea Mays
atgctggctgatcgtgtggaaataatgggaacggcttaagaccttaagcccttaggttgctgcccatgttcattatatattcagcacaattaatacatgtcccaatatgactttgttacttaagttgtactaggtctaaccaactatatatctaggattctatctttatatctatcataagtatctatagctctaacagatcaaactcatgtttgcaaaggatgggtcaaatgtggtcagccatcagtcattccccaacatctcatctcagggttgggtcccacgaggtcatgactcctgcaaagtacggaagagctgcacatgacagaacaggcccactaactaatcaactaaaacatgggccacctctccagggaaactacaaacgaaatatcacgcattgctagtggccctgcaaagaaaacaagtgctcgtgctgaacactggagcaccacagacagaatgccaggcatatcagtcgtaacattcagcaatgacaagcatttctcattctgatattctctccctctgtatgtggtactacggatatttgattggtagtaggtactacatcggtacagcttattgccctattggctattttatgatcaaccactagatgtttataatctccaaacaaagaaaattagtttttattcccaacttcacaatgtgttgctagtcaaacaacattttatcatataactcaaacaagtaataaccaagacactaa

SEQ ID NO: 152119 - DNA, 500 bp, Zea Mays
gccggcgcctacgtacggacttggcttctctgatttttgttttcaatttctccagtacgtatacacacacaaaaagttgctgattattgcaattaagtcaaaagagtgtaatgatcatacaaaatctacataataacagcgtggcgataatgtaatctaataatgacgcgttcagaaaagcttctccatcaagcaaagggtcattagagcactagggcatcgtccatgggtgctacgccggctacgacacgttcagaaaaagcttctccgtcaaggttaaaatagaacacccttcctttttgaccgcatgcatggtttttggaccaaatgataggaagatctcaaccacctctcccacccacattactttttttttgagtgtgtgtgctctagctacggacaagtacagcagtgtacgaataccgccggaaccactggtgcaaaaactggcgtcgacagcctttctatagtgatgcgtgtacatttatgtgtgtttatat

SEQ ID NO: 152120 - DNA, 431 bp, Zea Mays
gctgctccagccactcaagtttagtgaagtcggtgaaaactattcaccaccactcctaatttttaaaaaaataatatagttactcccttttttattttcttctttgtttccgcatggtttattttcatgccgcttcctactctatcagtggctccattttcttcctcagccatctccctcccggactccggcctcaacgaaggcgctatcctttcgagctagtttgatgacaagtaaaatagaggggatccataacgagattgaattggatcctctctatttccttgttcactgaaccagccttctatggcgacgcttctcgagcatctcttgagctgaccgttcatagaagggttttcttgttttttggaaggaaaaacaacaaaggagacattgacacggtgaggtggtatattctaagagtaaataag

SEQ ID NO: 152121 - DNA, 551 bp, Zea Mays
gcgactaatcgcgattagtcggccgactaggtgccatgtccgactagcttgtgccaagtttgggcctgtaaaaaaagtgtcctcctctgttatatcattatatgggttggcggcccactgtctccactctccagtccacagtagaaacaagctctactgtctgccactgtgccgccgcacagtagaaagttagaaaccctaaaacagtaaaaccctaagccgccgcctctgccccctctcacactctgctccattgctggcctgcggccctgccctctactccggtggtcctcagctccggtggccctgccctctgccctctgttgcactcgcctctgctcagctccggtggccctgccctctgttgcgctcgcctctgctcagctccggtggccctgccgtctgccctctgttgcgctcgcctctgctcagattcggcgctcgcctctgctcactgctcaactccagcgctcgcctctgctccgctccggcaaccgtctgcaccaatctgttctaaacttaaccgaaatgagcacctctacagatggtaa

SEQ ID NO: 152122 - DNA, 434 bp, Zea Mays
gtcggcggttatggggaaaggggcgaggaggcgcagccgtgcgtctggcgccgacgggggtggacgcgggagcaagcgcccgtggcgggccgaggaggaggaacaggaggaagaggaaatggaaccgctggtgggggaggactattgcttcggctgcaaggacggcgatgacctccgcgtctgcgatttcaggtttgccccctacccctccgacgggccccagtacttccctcgtctcatctcatgatcccgcatgagcagcatgctttgggttttgggaatctacaagtccggaggatgcctgtgtgatggtgagtgctgtggcattgctagagcaggtttagggaccgtgtggaatgcagcaattttattggaactggaagcggttcaatttcacatggcgaaaaaccctcgcaacaggaagaaaaatcccg

SEQ ID NO: 152123 - DNA, 419 bp, Zea Mays
aaatcaccctcctttccaagtcaccttcactggacaccgcttcccagacacttgccaaaatgttgcccgaaaagccctccgccagctatgccaaaactacagcagggaagtctttgagacaccccttcgttattttccacccagcaacaaaaatacccctacctggaggaaaagacttcaggccctgtcaggaagagatcctactgaagatgaccccaccatagtctacatggccggatatctccacacccttgacaaccactatgacgaccttttctcccactgcacccacctaaactcccgggcggagagcctagagcaacaaatcaagaaattaaaagaggacaaggtgtccctccaagaaagtctcaaaatagcagaaggtgaagaggccaacactcgtgaagcctactgaaccc

SEQ ID NO: 152124 - DNA, 443 bp, Zea Mays
tagcaacaacctcttccagttaaccatcaaagagtatgtgaaccacgattgccaagaattattccattagcacaacatgctgtatgcaaaaaggtatatttaagtcaacactaaaaaaggcgcaatgccactcaagctaatattcttttgttttctcaaacacactggagggtagacggctgtgtatctttgtagtttgtattaaaaagaaaagaggccaataacccttacaacacaaagccacaaatcctgtattctcaaacctatattctgcctgtccagcagtcaactatttgaaaccataagatatttaaccaaaggtgcccctaggggcttaggtcacatgctgcatatctataagattgagtatgcaccaagatgcatgtatcccgactcatccttgattgtttctatagagtgtcaatatggctatcacatgctgc

SEQ ID NO: 152125 - DNA, 395 bp, Zea Mays
gtgagccttcggcggaggggatcggcaaacttggggcgacagcagaccgagggggcagaggcgggagctgagagatgacgcgatagccgccgcggggaggagggagcgaggacgggacaaaggcagtagtggccggagggagaggaacacggacacagcacgctcagagctggattgcagaaaatattttcggatccgaggccccggcacgatgtgtgtctgcaagagagagaggattggacggttacaagatgcgactgaaccagcacagacggacactatttttttgccgacgtgggcagctccatagctggatatttcccgtggcttttaagactttagaagagtcggcaggtatcttgttcatggtcagttgcttgtgtgccatcgtatcg

SEQ ID NO: 152126 - DNA, 482 bp, Zea Mays
gtcaacaggtacagctaattctttaacaagtcctatcagaagtaacgttggttgaaaaatcaatataccatctttgttattaggaagagcaatgaaggtatacccagcaagcataatatagctggactcaaaaaacgtggatcacgaatacatacaataccatgcaatacacaacaacttatttgccacattcgcctcaacgaaagggtcgcctgcaaacactaccaggaataatgccacatccacggtggccgatgctgacgatataaactctcacccgatttaacacatccctaagaataatgctatgcggcagcgtgtgatatgccctaaaagagggtttccataaatcaacgaaaaaaatgagaaaacgtttctagacccaccacatgtatatatatcacccatctatctaaaaggcaaaaagaaaagttggtttcccgcacgctcctaattcctaaatcgtgaaagcacattaccat

SEQ ID NO: 152127 - DNA, 345 bp, Zea Mays
gcgatggctgcgaggacaacgtcaggaaggccctggaaaagctcaaaggtgctcgcatcgtccaatttttctttgcttcacgcaggcacaaatcctgcaccggtctacctatctatcgctgaaatttccatgcccaataattaactgatcgaacctcctcttcctgcaggagtgcaccacgtaagcatcgacaggatgcacggcaaggtgactgtcactgggtcggtgagccagaggaaggcgctccgcgcggcgcggcgcacgggcaagctcgccgtgctgtggccgtccgcctacaacaacccgtcgtaccaccaagcccacgcgatgcgggcctactaccag

SEQ ID NO: 152128 - DNA, 370 bp, Zea Mays
ggcatcttcataaaatgcattctatcgtctactgggaagcaacttctggaggaggttcatgctggacaatgtggaatacacgcagcgtccaagacactagtcgggaaggtcttcaggtcgggattctattggccaacagcaaaaagtgatgccgccgagttagttcagaggtgcgaagcttgccagtacttgtcgaaacaacaacatctaccagcacagcaactgcagaccataccggtgacttggccctttgcatgctgggggctagatatgattggacctttcaagaaagctcaaggaggatacactcacgtgttggtagcaatcgacaaattcactaaatggatagagttcaaacccattgcttctt

SEQ ID NO: 152129 - DNA, 723 bp, Zea Mays
caaaactggagaggcaaaaggactaacactatgttctatgaggcctgccttcagtaattcagaaatttgcctttctatctcggttttgtgggctggtgaatatttatagggcctggcattcacagggactaaccctggaatctgaggaatgtggtgatcaaatggccgagcagggggtaaagttgcgggaatagcaaacatctctttaaattcatccaacagattctgcaactccacaccaacagttggttcctcagacttgggggttacttccagcaaggccaaagcccagacatcatttccttttaaccatttgtccacatgcatagtagacacctccaccactcttccacactgtcccccagtccccttcaatttgacctcttctccatcaactgaaaaactgatcaccttcttctcccaatcacagtgcattggactgtgttgcttcaaccagtcataacctaaaatagcataatacgcccctaactccaagactctcatgttagtcctgaaagtgtgtccatctgcccaccattccagtgaatgcaccatttggtcacttctgagagtttcaccattagctaccttcacaatagccggagaacacttggatgtaacgagaccaagtctgtccaccatcagcctattaatgaaactggctgagcttcctgaatccatcaataccaacatcacctgattgtggacaagggccctgactcc

SEQ ID NO: 152130 - DNA, 510 bp, Zea Mays
ggctgctgggattcgagcccaggtctccacggccacaacgtggaattctcaccactaaactacagccacattgttgtgaaagagccagatattaactatagaagtcttgtacagcctgagtacccaaaagataatataagaaaacaaatcagcgttcaacttcacagcagaaaggaactctaatgtttcctggatttcactgaatctgtcgtcatcgaattgtgagttcgcgtgctgttcttatgttagatgaaccctgatcctatctattagctagttagttagttgttgcatgcatcagttagttacttagtcagcagcatcgcacgagctacctgttatggtgggcgtcgtgcgcataggggaggcagtgaggcgtggggatggacgcgctcactcgcctgggtgccggacgaatcgcgtgtacgtgcggcgtggggatggacgcgctcaaacgcacgatcgagaattgctcggagccttttacgatttcctgcatgtactctgtac

SEQ ID NO: 152131 - DNA, 538 bp, Zea Mays
gatggctagcaaccacgtgaaagcagccccaaagagcgacaacaaaagtagcacctacatgaaaggatttatgtttgtttttcctttagaactttattaaatactggatctaccgtagtgtgggagtattgcttccacggttggaccaggtgggtcttggtggaggactgctcgtccatgaggactgtcgccgccttgaacctttggatggagccactgcccccgcgtcgggtagaaggaaggaaggagaaatgtgcgagccatccgatccaatctggacggttgtgatttaaccggctcatacagcctcggggtagtgaatctgggccataggattggatcggatggatcagagtagcgccagcttcataaaaatctaaacccttgaattttaatccagcggcagcaatcgcataccgcttcatgaaacgcctggatctaatcccagccgcaggtcttagatctaaaggctcataacacccgataccccttcggcctggccattttgcaaataaacccttattgattacagaaaaca

SEQ ID NO: 152132 - DNA, 561 bp, Zea Mays
ccaatggtataagtacaacaaagaatggtgttgcacccaagcttacatgcggtaaagaagaggatatagccaagggtgaggtaagtaaaacaccgttctcaaattgagataggagactggagattttagatagcagacataatgtaatcacaaggtaggatagagtgatgagaagggtaaagaaaataacaaacaaaacacaacagaggatagagttaaaaactcgcatgtggcagagaagaggatacgaccaagggaaaaaataggtaaaaatctacaactctcagatcgagatggaagagaggagattttgaagggcaggtataagataaatatcaatgtaagatatgatgatgtcgaaggtaaagatgataataatgaaaagcataacaaaggatagtgttaagataagactcgcgaagtggcaaagtggagaaaacaataaagggtaagatagataaagtcccaacagaaaggttgaggtaaaaactcattaccgaaggatgttatgagggaacaatgagatcatcaaggatgtgccaaatagaatgatcattcatg

SEQ ID NO: 152133 - DNA, 587 bp, Zea Mays
cggtgtacttggacgatcttctcttctccgattggtacagctgctccagagccaccgagaagagtagcagcagcggtagtagcctccccgcagccgcagccgcggcaggtgtgggttggcacgactgcttctccttcaccgagccgagcaataaggggcacggcgatcatgtgggcttgtcggaggcagataaagtctacatggtgctctcggacatgtcgctgtccgcggccgccgacgaccttgtgctgcgaggcagggctcgaaatgtggaggatgttcttcggcccctgagcaccaaggcggagcaggcactcaagcgctggctgcgtggcgcgtttgggctcatatacaccagagccaacctggtcttcactcgcacgtacctggtgtaccatgtgctggtggtgccgatcctgcacgtcgccgccctcacgctgttcgcgacgagcgacaagcacgggtacgaccgcaccgacgtgaagatcacgtacgtcctcctgtgcctcaccgccgcgctggacgtccttgcggtgttcgtccgccagctgctgtacggggccatgtccgccaaaggtgtcccggcg

SEQ ID NO: 152134 - DNA, 421 bp, Zea Mays
gggccattcaccgagttggagtaggtgggtcctagtggcttcagctgcggacagttgtttttgaagtgactgggatcactgcagtgccaacatgcattcgccgggggttggttgcttgcaactgagggggcatggaaggagctctgactctgctggctgaaccgtgacggggtgggtccagctggtctactgaagtttggtcccttgggtggaagtccaaatgatcgagtcttctggtgccggtcttgctgctgagcccagagaacttggaactttcttttgagatgccctttttctttctcctttgccctttcaacttgcatggccttgttggaaaggtgagagaaactgaggaagtcttggctagccagaattgtcttgagttctggcctgagtcccttcaggaaacgggccatctttt

SEQ ID NO: 152135 - DNA, 787 bp, Zea Mays
agccagatcaccactggcagcaccctcgggggctgggttgtagctcgcgctacccactcaagctggatcattgccgacaacaccctcgggggctgggtaatcgctggcgccatccttggggaccgggttctctgcagcagccacctctaaggctgaaggattctcagtcacctccatgggaatggagcaacctagaccagcttcttgactctgaagaccgcactccaaggtcgacgaggcacgagacgctgctcgggataactctaactccacatccggaatgtcagtgcaaacgtccatcataccaccatctattggctcggacagcagatcttcaggaaccatatcctcgagagcctggtcaaaatttgctatggacaactcttgcagaccaacgagtgcagacaaggctagagaaggaatatcactactcccccactgaccaggtagcgccgactgtttttccgaattaaggggatttccttctcttcttcctcaacctcgtcaacaatacgaacaacacacccattggggtcagctctggccggattgcacccattgggatcagcatcatcaaggtcacacccattagggtcagcgtcagtagggtcacacccattaggatcggctccagtaaaaagttccactggcacttcctcagcagcaggagcagaagggccggcatcctgattcaaacatgacactcgccgaagcctcctctttttcttcttcttcccctcggcaggagcagttggatgactggccgggcgaaggcgctttgggcgag

SEQ ID NO: 152136 - DNA, 564 bp, Zea Mays
aagcttaggtgtctggaagggggtgggtcacctcgccttacgccatcataaccatgcctgtcactaatgattaatgttgttttgtactgtcatcttttttattcagataacaacttgacatcaatttgcatttttgtggtacttgaaacatccagatagctgttcaggattaacaagaattgataggtcaggctaattgtatagttttcttttactgaagtttaataacaatgacacccttttgctctagatgctattttttcagtgtcaacaacaaacacctaggaagatcttggtcattttaaattggtatgttaagtaaggacgtggtttgggctgcaccctccatgttgttacacggagagctaagggaaaaattataatgagcataccaggtaagaatagcaaggaaaagttggatgaatgtctgatataaagcactcaatacaaaaatgcagaacaaattaaacgcagccgctaactcttagattgcttcttcattataaacaaaactaagccattttgtgttagcttgagcatctgaatttgctatattgacagccc

SEQ ID NO: 152137 - DNA, 469 bp, Zea Mays
tcaaactctacgagctagtatttcttgcttagccttcaacccaaaggattacgaattccacaaacgccaacaggctctccttgcaagcctctctttttaagttacggggcacttgtcatgcacatgggcgaccgagctcttccatttatatctctaccactcctcatcggtgaccggacgaacgccgggagaaacaggccgatccgtagctgcctgcacacatcggtgatcgttcgatccatgtgcgattgattgatcagggaggagcgagtgatataatgccttgcttggcgcaagagttccacccgaagctgcccgcggcgaaccactactgcaagtccttgtcgtcgctcatccgggagacctacgcgcactgccatgtcccctgcgtcgggatcgccgggtggagctccggcggggacagcgacgacgacagcgtcctcgacgaagcgcgagataccaagcaggt

SEQ ID NO: 152138 - DNA, 998 bp, Zea Mays
cacgaaacatattctaaacaagtattcatgatggaactttgaggaagcataattccttgacgttctaatagaaaacacatgaacaccacatgaaacaagactgctagtttgcctcgaacatattaagaaaatgatgtacaccattaatgaactctttggagcatcagtctatgttgtacatatattgttagttcacttcattacatgagtattctaaccatattttcttcatgcttggtcaaacaaatatatatagtctgccacgaaacatattctaaacaagtattcatgatggaactttgaggaagcataattccttgacgttctaatagaaaacacatggacaccacatgaaacaagactcctagtttgcctcgaacatattaagaaaatgatgtacaccattaatgaactctttggagcagcagtctatgttgtacatatattgttagttcacttcattacatgagtatatccaaaacttggacatgtcgatgtccattacacaacatgattaattaattaatattgtatcatagccgtttagtttgaatattgatttattaaaaccctttacaatgtagataattccaactagcactaaacaaactaaatctagaatgcacttcaatagaataaggatttcacgacaaattctaacaaaacaaacaaatctttcgttagttcttcatcggtggacttttttcgttggttcaccacttcatgcttaggtgtactctcatcaactgcctcagatgatttttgcacattcatagtatattcttcctcccaataccaacctttacatacagtaccatccgactgaaactagaacatcaaattattcgaacaattaatcaaattcatcacaaaaatagctagaaattatgaacacgtctaaatgagaacgcacattgcagttcaggtacttgtaaaagatggggtcctggttgggacatttattcttcactctatactctagcacggtcttcttgtta

SEQ ID NO: 152139 - DNA, 383 bp, Zea Mays
ccaagattttggctaataggcttactgaaatcctccctaaattggtctcccccaatcaaagtgcattcattaaaggaagaagtattcatgacaattttatgatggttcgagaaactgcaaaagctattcacaggcagaaaatttctagaatcttgctgaagttagacattggcaaggcctttgactcagtttcttggcatttcctccttgaagttcttgaacatgtggtgtttggtctactctggcgtaatctaattgctaagctgttgtgttcctcctctactcgggtgttagttaatggggaacctggagacctcatttgtcaccagcaaggcttgcagcagggagatcctctctccccaaatgctctttatattagtgat

SEQ ID NO: 152140 - DNA, 1851 bp, Zea Mays
ggaagccacgccaggatgcacaggcggtagccggtaggacaccaaaaaaaatcgatcaccaaatctcacatgcgagacataggacgcacagacgatttgacgaacaattttcctttgtcgcaattgttttcaggcaccgatgacagatctacttcgatatctttctagttttttatatcaaggaaaagggacagatgaattgtcctcacacaaatgaaaaaacaaggtgagctgttacaattcagtcgcagatgaaaaaacagatgagctgtacacattttttagatcgaggaagagggacagtttgtgtcctggaggcagcaacttttctatcatcacacataaggcctggttcgtttagaccaaaccaagcttggtttggtttggattgggatttagttcagtccacaatccaaacccaaaacaatccagtattgttatattttttctcttcatttaaacctgttcgggtttctagcccaggacttggatttttttacctgtgtagctcctggatcagaaccataccccattcgttctagaaaaattccgactccaaactcacgtcgacgcacacaaccgagaagatgaggtgtgggtgagcggtggtcgcgacggcgacctctactacgctggcagctttctctccggttggtccctctctcttttgttagttagggttcttggatcgagtccttctactcacgcgccgtacgtgcgtgccgctcactcgtagatccggtgacgattcctcccctgcgcgtgggtggtgaaattctccctccgcattccaaatcttccgtctcgccgctgggatttgatttaaggcgaggcgaggtgatgtgagatgagatgcctcgcacgaacgcctgttggactagggagatgagacgattcatgcaagatttgttcctgctgctgtcttcctcctgctaccaagtggcttcttgggggcaggcaaggaattaagcttgtaaatccctggaatttgaagaacaaacatttgaaatcaaaagaaaaaaacagctctcttcgctaccaactttagaagcaggacatcaaattccaaattggctgacggattcttgctttacatacacaataacacaatacatgcgcctgtctgttgtgccttgcacttagtcactggttgttgctgttggggcatcagttccttgtggagcttttacttgctttagctttctatttctgcttgctttgttttttttattatcactgctagaagcatttaactgcacaactgcaggcttcgactctagagaatttaactgttaagaacaattatcaccaattttgatttagtaaccaattagcagacttatgcaattttgacttggtaatagttagcaccagtttaattatctaacagcatgctgattttttagattgtccctactccaataaaagtcggcgaggacacttttgagtgtgaatttgaaattcactgcttcaacttgtttctatgtatagcaaaatctatatgtaggatacttttgagttttcttgatcaacattaattttacaaatacaatgtcattcatttccagaacatcaaaatttagttgctgaaatgagcttatgtaagtatgtttgtcagtgtggcttctgttaaaagatatttcaattatgaacctacgagttaatttattattctgatcaattgcagttggtgcatatgttgtgaaactcacctctgttgacttggagaaggctttatataaatcttagcatatctccgtgaactcttggtggtcttattggtggacaagaactgtagtaattgatttgcaatagatgaataattagtagcaacctagaattgtatgacat

SEQ ID NO: 152141 - DNA, 447 bp, Zea Mays
agctgacctccttcctggttggaaggccaatttgatgactagtgctggtagggccatcctagttcagtctgccctcactgccaccattatttaccgtgctttggctcttgaccttccaaagtgggcaattaaggcctttgacaagatttgccgcagttttgtttggagaggtcgtaaggatgccaacgggggtcactgtttagtggcatggcccactgtcactcggcctaaagatcttgggggtcttggtatttccaatcttcagtatttaaattgggctttgcgtgtaagatggttgtggttgcaaaaaaactgactcttcgaaaccttgggctgctattccaatgcagtcccactccattgagcctctaatgtgggagatggcaaaactactcttttttggcaagatagatggctgttgggtcagagactggtggacttggcccc

SEQ ID NO: 152142 - DNA, 314 bp, Zea Mays
ttcctccttgttgatttctatgtaaagaacatctcatcagacaccgaacaagaaagatactaacgtttgaaataacagcagtataagttgtaacacaagcatataaaaatgaaaaaggagtagcaaattgtaaagttaataaccttatgtaaagtattctagtcaggctatctagttctaggtttccaacgacgaatttatatggtcagaccaggaatacttcataattggattaaacatacatgaatactggcccatataataataatattttgaaagcaaggaacccaattgtataaaaatgaaataaaaat

SEQ ID NO: 152143 - DNA, 673 bp, Zea Mays
ggcgcggtgtgcaggaggcgaaggtggtggtgagcgtgacggttgagggcagcgtcggcccggtgaaggccatggtcaggctgggcgccagcgtcggggaggccattgctgccgtggtcgagaggtacgccagggaggggagaagcccgcgcctggacccggccgcagccgagagcttccaacttcaccactcccacttcagccttgagagtaagccaccaccattacgcttgattttagtaagaagtgtcatacgaacgtttcggtgcttgtgcttgtattttggatgttagcgtgcgataggaaccattctggcttgatcaaattggcgaaccattccggatttctcgaaatcgaactgcagagtaaggcaaccttagcttactgttttcctgtgatccacgtttagttattcttcatgtcgttttgactcagaaaccattcccgaaaggccgaaatggaattgctatttgtccagtgggttgatttgtattttaactactgtctggctgattatttgtgagacaactgcagttttaactactgtcatagctaaaatgagctctgttgtcaatgacacatcacatcaatgagaccatagacatctaacatttttttttgctactatacatatagagacataggttggaaaattttctggctgtcgttctcc

SEQ ID NO: 152144 - DNA, 780 bp, Zea Mays
gttctcatcaagctactaccttcttcttcttggtcattatttgcttctttggtctagccatccttgtcacttggagcatatatcctcccatactcttcaaacaactttgtgagtgtttcgttcattttaatccaaaccacttctccatggacatcaccaaacatttctaaggtagcgatcttggtgtaatttgaaagtttgtaccatggatcaagtgcaacagccacaaagatgagaatattgaaacttgtatgatcaccccaatacttgttgtactttgctaacattctttttgccattttgttgcgcaaaggatcactgctttcacaccaagaccgcaataatatgttaagttcagcaacctcatgaaagaatatgtgagctgtagggtgaagagtggcagaaacacgaatgctcaacttgtggaagtgctcaagaaactcggccatcttcgctgcactagcccaatcatcagaatctggcactccaggctgtttttcaccatttaaatcaattgcatagtatggatcatcttctgcatacctctcaaacaccttctcatatgctactgctaccttgagcatattatatgttgagttccagcgtgtgacaacatcaagtgacaagaaagccttggtgttgaccttctctagctccgcacacttcttaaatttggcaatcctagaaggggagctcttaacgaatttaacagcagcacaaacacgcttgatagatatgtcaagctctttcaacccctcttggactatcaagtacacaata

SEQ ID NO: 152145 - DNA, 738 bp, Zea Mays
gccccagtcgatcgtctcggaccgggaccccatcttcacgtctaccttctggagcgagctgatgcgcttaacgggcattaggcagcacatgtcctcggcgttccatccacaatcggatggccagacggaggccgccaaccgtgtcatcggcatgtacttgcgctgcttcaccggagatcgcccgcgcgagtggcttcgttggctgccgtgggccgagtacacctacaacaccgcctaccagtcttcactctccgacactccattccgggtggtctacggtcgcgacccgccatccatccgatcatatgaagcgggcgacactagggtggctgcggtcgccaagacgatggcagagcgcgaggagttcctggccgaggtccacgaccacctagaacaagctcaagcagtgcagaagcgccactacgacaagtcccacagaccagtcacatatgccgtgggtgactgggtcctgctgcggctgcgcaatcggtcgattgcttctctgtcccaggcatcaaaggggaagctccagcctcgcttcttcggtccataccgcatctcagaaatgatcaatgaggtagttgtacggctggaactaccggcccaggccaagctccatgacgtcttccatgtcggcctcttaaaaaaatgggcgggcgcgccgccagacgttccccctctgttgcccgaggtgcacaatggggtgttggtgcctgctccagagcttgcagtgcgcta

SEQ ID NO: 152146 - DNA, 550 bp, Zea Mays
aaatacatatcagtaaagaaattgtatataagttactgtaatatagaatattacacattattgtttataaaataacattggctgaaataataaaaatttacttgtcacttctcatcttataaaacttcttctaatattttttgtacaaaatcatcgattatactattgatatcgatatcattcaatagcttcttctcgatcataaaggcgtcaaaccattcaacctttcttgactcattgttgatcttaaataattattcagtaacttcaattttgagaagcttctttcagcagatgcaacagtaacaaacacagtaaataatattctataagtaatagaggcattaggataacaatccacaactctaatatgctcaaaaatctccacagcagataatgtgtcgttaggcaaagtaaactttagaatattcaatttagaaatcaaatcatttaactcaacatcacatgaaccatcatgagagaaagtgtttgcaaatttagtgcaaaactcttcaagttctctatcatttagtgagcttagtgtgcttga

SEQ ID NO: 152147 - DNA, 434 bp, Zea Mays
cggatcaattgtaacttcctgtgcaaaaatataaattgtatcatgtatggtaccctacatatttttatgttgtatgtacatcataacaattttctgaccatagttttacagtgtatgcacaatataactactgaatgtcataccatctgtagctgcattctactgtatacaatttaacctacaatactgaaaattcaaatcagttcaatattacttacatgtctctgcagaatcactggtgtgtcctgttcatgatcaccaatagtacgcatagtattaaggtgttgtcctccttgatttactgtcatcctcgatgcctcaaatatggtctgatcatcaacccccggggccctcaaagctgctggtggagtaattgcatctacagcagtagttgattctgtatgcgtacttgcatctgacgctaactggttccc

SEQ ID NO: 152148 - DNA, 278 bp, Zea Mays
ggaaagctaacttgatgtccagagcaggaaggagaattcaggtgcaacatgttctcacaggcatgacggtttatttagcaatggcaatggacattccccaatgggtcttagatgtcattgataagataagaaaaggttttctatggagaggcagaaaggaagcaaagggaggacattgtttggtagcctggggaaaggtgtgtcgaccccttcagctgggaggcttgggaatctctagtctcctagagctttgttgggctctccacatgagatggctg

SEQ ID NO: 152149 - DNA, 469 bp, Zea Mays
tgaaccatgtagttcttatttgcttgtgcttcctccttgtatttttctaactgctctttcaactggaatagctcatcattctcctattggtgaccaagacaccaagtatcaggaaatcaacaagttaatacacaataagctgcataaaataatcatatggaagtaattccaataaaaaatctagcattatttgttcagaaataacggcaaaaggaatacatcagcatcaccactccaaaactaaatctggcgcattgcttctcccttcctgttagtttctgcagctcattctcaagtttttgtgcaagcatttgtacctcttgtgcaaggtttccatttctctctcgttctgtagttgtagaacagagctagaacttgtagagtcagtctggagcagtagcaaccatgaggaagaagtgatagcgacagtgagccatggccatcgactttcgaggcctggccgaacgtg

SEQ ID NO: 152150 - DNA, 1127 bp, Zea Mays
tgtgtttcctctgcttcgccaccacctaaattagctgtttatttatgtcagtacaagggaatcaacattgggttctaggtttataccagtgctctaaactgtttcttggattccaataattgcaacaatatcacataaacaagccaacaaggtttacctcaagagataattagatctcaccattgcttctacttcgctacagcattgtgttgttgaatcgactattccattttttagcatttagttctaacacggttgattgatgtactgcttctgctatgtaccgtgctacctgtacatcaacaaatttgttattttggttagttatgattttcgtctgcttcatcctgtacttatttggctaactatatgtttacaccaaacatagagtatataattcatttataagaacatgtttatacatacgtgtatgtaaaaactgcacggatgtatacagatgtatgtttgtgttgaaattcccatatggacacacgaggttaatcccactttgcttgtattttttcccatatgcctcgtgatccattaacacaactatatgcttatacatttcagtagatcactattcattaggataaacgtgtttatacatagaaatatgttttcgtaaaaaccggcatttgtttctattttttccctgtgtttcataatttatcaacacaactatatagttattcatgtcagcggttcactatataaccgatatatgtaaacatttcaataccacatgttccaagaaaatctcaaacgaaacatgttttaacatctagattacatatgttctcacacttaaacagttgtctactctaattgcaacaaaaaacacatattacaatccactcttgcttcatacatgttttataggagtaacaaataatttaactcgctgtcttctactctttccttaatttttcaatatctttgtttcttattgatttgatccccaacctaatccaacttgctttcaaacaaaaactatgatgctggtgtgtacttcataccaaacagaattgtttatagtagtctactctacaagaaggattttactcgcatctaaaaacataaatcatcaagctattgctacacatactcaaaaccaaataaaaaat

SEQ ID NO: 152151 - DNA, 518 bp, Zea Mays
atattaaatggtgttgatcaatccgaattggcacctggtcgtcttctaatagtgaggaaatgggtggcagtggacatgtgcttgaaccgtgggctttatattgttgtttgcttgtttatgtgattgctttgtgtcatgggatgacacgaacgaccaatttatcccgtcttctgaaacttggttcaggttggcaggcatgttagaatgttattggtccttgttacattgcaagatcacttgttggtttagtcaatttgtctcatccaaattagtatgtgctattctgccctttgctcttaataaatacaaaaagtgtggtttctttattgattacaccatgctctcataagggatgttcatttcacttgccctcgtcgtcatagagaatattattactcagttttttttaaaaaaattgacagtttcacgcacataatgggatactacacaagggaaatcttgtgacgcctgaaaccaaatctgatacaatcatgatcaagaagctccagttgcacttg

SEQ ID NO: 152152 - DNA, 489 bp, Zea Mays
tgattttgacatccttttttgcagagtagtggatcaacattattcaaaattttgctcatgacgtctgatatgtggacagttgccattcaagttttactctatcatcaataggtgaagattcctgatccagaatacttgtgtaagattattaacatgttacccaataataatcttacataatttggcccaacccaaagatacgttaatttaaactccctagattattttgtggaatcccaacagagtttattcatttgcttgtactctatgaagtggaagttcttgagatgccaaaaagcagggaagtgcggacataacagtcaagatgagctacttaaaagtgaggataattcaaaggagcgtggtatcccgagaatatgaacactccagagatgcaatatttgaggttagtatgcagtagtcgagcctgttcatagtttattgttcctgttttctaatcttggtcttatgactaataatttttaatga

SEQ ID NO: 152153 - DNA, 630 bp, Zea Mays
gggccctccaaccaactcgtctgcgtggaagataaaagctccctagggtctcgcccacactgtcgtattcccaccgccgtcctgcaatcgccgtgagctgagagggagattcacgccgctgccgtgggattcacaccagcgcctccgcttgggtgccaatcgcccgctcgcaagcttcgccgagtcgtggggaaggtttccgaaggccaacgctaaggatttgtcgtcgggacccagggaattcatcaccggagttgcgcccgaccgcggagccgctcctcgccgtggttctccctgcactgcgaccctcgttgtcggtaagtgcattcctcagatctgcaagcatctagtgtccacgtagcaccatctaggtcagagttcatgggctggggcgggtaaaacgcgaggtccgaccatggcgccgccgtggaatgttacccgccgccgtgttcagtcaccgggttggggaggaaggttgtgcgtcgtcgatcatgtggacgatgaccccgattagaagatgggtatcccagattacttcccttgatgaggatgttgtgcccccaaatggtattcctcaccccatgcatggccatacagtgagtgggaactagaacatcccccatcattagg

SEQ ID NO: 152154 - DNA, 769 bp, Zea Mays
atttcgaatttattataggttctggactgcgcacacaattttgcagaagcctagggtataactcataaagttcaggaccaatccgtaatattaacagcacaggagtggatggcgggttgaataggtaaaacctcagggtctcttttgaaagaagtacacgacgaaggggtattggtgatcgctggccgtcggatctgagatggaaagctcagattaaaagaacgaactggcaagcgatttgatcccttggatcacaaatatacggccatgatttaatgtacgaagggggtatgcgcccacttaatcttatccgtgcgctgcaatatcaacggtctgtgttgaacctagtcacgatccaatccacatcgctcctgctagatcctacggtccttatgcatcttcttccttagtccgagctgggcgatgccttgtcccaaccgcggtggcggcctgaccgagccccggaccaccgttgccccgatgaccaccgatgtacggaacccaaatgttgtgacggcccgaccactagcctatccacggtcatacaccaggaaacagaaacagtgataacacaggcggaaaagtacttactgacgacgaccctgctacgatgcctaccacagctcaccgaccagatgaaccttggaaccgataggaaaatctgccaagtcttcggtgtcgttcaaagctcctccatggcactggatcggtctcccagatccggcgcccaggatcctggcgacgatgtgcctggtgtcctagttcctgc

SEQ ID NO: 152155 - DNA, 670 bp, Zea Mays
tgaggttgttagttcaatttgtcgccaaccgcatagctgcaaatttgtcatgaaaaaagcccttctccctaacaaaaatattatttttgttattctaaaaacatattttatgtttcttgaaaaggatttccacttacggttttattaccttaactgactgacggttctcagttatccccatgtataattaatttttctactgacctatagtactgacctatagtactgacggtttaaaaaacgtcaatacaaatatgttcataaccgcctgtatatatagagttcctcggtactgcggttaaatcttatcgagttcgtcgtgtctgatctctgccgcctggtttgatgatggaggtttttcatgttccttactatcgatcaagccttgcttgtctggttttcccgtgactcatcggcggtgtccggttcgttcagcgggtgcactttgatcgtcatctcggcttctcccttcttgtcgtcgttgtcgtcgtcatccagctgcttgaagttggcaagcgtcgccagcgcgtcgacggcgtcaacgacgccctcgaccctcgcggatatttccaccagcagcgacgccacggtgaagacgggcatggtgtccatgagggacgtctctcccagcttcacggccagcatggacgggagcgcccgcaagtcggcc

SEQ ID NO: 152156 - DNA, 589 bp, Zea Mays
catggcggccgcatcccgggatcctctccatacgcgatcgcccacccataaaagtttttccgagacccgttctccccctgctactccctcgcgcatgcgccgagccaaactctccaccatcctgccgccagacaccgccgcgagggagcgattcgcgttgctaccgtcgccatgtgttgcgtcgccgtccgaggtctgctaggtggtcagggtcaatcgagttggaagtgctggtcgcgtggaagtcgggcgtgggcgcaatcgaagaggggagctcacgaaattccttgccggtgttggagaatccgcaggttcccgtggccagggctgtccgcgctaccaaccgtggtgagaaccccctttccgtaatcgccatcaccccctctaggtttggcaccgaccaattttgagtttggagcgtccagccgtggaattacgcgtccgccgatgatgctccgccgtgggcggactgtgcgtctccgtcatgtagaatagggggagaagaagaactgtgggccgtaggatctcgggttgacggttctgattagatcagtgatactcccttcgttcgggccgtcgatctcgaatc

SEQ ID NO: 152157 - DNA, 717 bp, Zea Mays
tttaggaaaaggttttaccctatttccctttcaccatgcaaaagacccttgctactactactacacctaccaactactactacactacataatactacgaactaagccgttggcggcttgccaccggcgttgctgcccttgccgccaccattgcctccatcgccattgccatcgtcgctatcgctgcccttaacacggctgtcgttgtcgccaccactgttgcttcccttgctactgctgctgtcaacgccgcctttgccgccgtcgccaccgccatccttgcccttgctaccgctgtcgacattgtcatacatggctccttcatcaccaccggcgtagccatcatcgtcgacatcgccctcctcctcctccctgactcatccaagtcatcgaggtcggacagctcgatgccccagagataagccctctccccgccgacatccccatggagtcgtccttgcaaacggatgatggggagccaggggacggcagattggtcctctcatcagagagctctgtgtcaccgaagtcctccgatggcggagttggaggatgtttcctcttatcacccctggtgttcctcctacccttaccgtctttctttcccgccatcggagtttctagaagaggagaagaggataggaggaaacaagaagtatgtgcaagtgaaggagtttgcggcacacagttggtctatttaaagaaatgaaacagtac

SEQ ID NO: 152158 - DNA, 503 bp, Zea Mays
acgcgacagacttcgattccactacacaatcgaatggtatgtccttctaagtagattggatctgcttgttcgttggagaagaacatgcgacggtggctttggtctcgcgctacatgaatcgtcgtgacagatagggccagcagtcgaacgtccgaacctacgcgcagcgactggtagtcccctgcgcctgcagccatcacgaatcagcagataccacgaattggccgcctgcatgccttcaggtaggctgcgacctgttctctgctggatcgaatcgctcggtcggcctccttgtcgtgcgtgacgggcgatatggctcttttctgtggagatcgtcctcttctccagcgcggcctctgctctgcctcgcccgcctgacgaaggatccatggctcgccgggcgctctgttgcctgctttgtgcgtagcaacttggccggatcaggacctccacgccctacgcgtagcagatggaggtgcacacgctgaagaacggtgtggacg

SEQ ID NO: 152159 - DNA, 1429 bp, Zea Mays
gcaaatcagctatatgagaaccaaacttagccaatttgactaaaatatcatcaatgtaaacttccacagtgttttccaacggctcatgaaagatcaaattcatatccctctgataagtggcatcagcattttttagatcgaatgccatgacaacccacttaaataaaccaatgaagcctggacatataaaggtcgttttagacgcatcttcttcgccatgaagatctgattatatccggcattaccattaagaaagctaataattctatttcctgatgcattattaatcaacatgtcggctataggcatatggtattcatccttaggagttgctctatttaaattgcggaaatcaatgcacaccctaagcttacctaattttttcttctccaccgacacaattttgaagacccactctgtgtatctgcaaggtctaataaaattagcttctaaaagccagtggatatcgtccttaatccgtgggattaagtccagacaaaatgatcttggtctctgcttgaaaccggatttaataggcagcagatgctccactgtctcttggcttaatctgcgcatttcgatgtaattccaagcaaagcaatcagtgtattcctttaacagactgatcatttcatctgtaggatcggcttccagggtcttgttcacaaaagtcggccttggagttttaccatctcctatgtcaatctcctccaaagggtcgaccgatgtgaatccctgtcctaacttgccgagatctctaaattcctctattgtgcttccttcagaggaattagatgctctctacgtggctgtggactgtccggcctcaagggctagaccatccgtggcactggactcgtgtgcgacgcttactagcaacaaccgtattgtctggccttaaggtccggactgtcctagaaaggaccggatcgtccggcctcaggggtcggactgtccgcgacctgggctgagccctgccaatctccttgcctttcttcggaccgtctagcctcgggggccggactgtccgtaacctgggatatattctttttgggtgtactcattatttaaactttacttgggatttagtcgattctccatcatctctaacattacaagaatgaagccatacctatccatacttatgaattgataatcaaaaaagtcaactcccatgagaaatgtagaagtctcataggtccaaagcacaggggcatcggccacggcgatgcagcctgatgcattagcatgtacttgttctacatcatcgcctacccattgtaacaacatttgatgtaaagtagaaggtacacattgattagcatgaatccaatctctgcctaagactagactataatttccttctacatcagtgatgaagaatgcagcagcaagggtcttggtcttgatggttaactcaacggatgtg

SEQ ID NO: 152160 - DNA, 385 bp, Zea Mays
gtgccggccacatcagtttggcatctcagagaaggacaatattcagtccactgatttggcgtcgtggttgcatgagaggcaattgatgtccgaactgatccgacaacatttggaacgggctaaactcagaatgaagaagcaggccgacaaaggtcgttctgaacgggagtttgcagttggcgactgggtgttcctcaagctccagccatatgtgcagtcgtccctggcagttcgtgctcatcagaagctggcattcaaattcttcgggccttttcaagtactacaacgtattggttccgtggcatataagttgcagctgcctgattcctctcgcattcacccagtctttcatgtttctcagcttaaaaaggctctgggtagtggg

SEQ ID NO: 152161 - DNA, 332 bp, Zea Mays
gtccgttaaggttagtaaacaaagatctaggaacccaaaagtcctttgtgttagcgcttggtaacctcattacctttctagcacaagttgcaattttaggttgcctagttatatgagaattaattgacaagctaggagtggagttgttaccaatgggacaatccttgcattgatgtccctttttccggcatgtgtagcataggcgtttttgaagtcttgaagatttcttctttccttgtttgttgcctgctacatggttagtaaaaactttcttttctaaccctatgcctctttgtttcaaatggggacaagattttattaagtgtcccttc

SEQ ID NO: 152162 - DNA, 340 bp, Zea Mays
aaatattagagcatctccaggtgttcccgatataatagatccttaaataattgtttaggaagttgataaatatggtatgggaataaaaaaactatttatctccaacggttccgtatatgtaggcacttaaaatcaaattttcaaatctgtggtggacccaaggctttctgttacaaactcgttgccctccctccagatgcgtctttcccctgttcctttgatgcatcgctgcatatacaggcgtccattgctgctacgccgccaagaaacaaaatcacgttctcttcctgtgtctgctagtcgcctgggagggacttcaaagcacagcacctgccagtgc

SEQ ID NO: 152163 - DNA, 620 bp, Zea Mays
agaattttggtacaacacctgccatcactcatcccttggtaagtctccatttgaagtgctttatggccatttgccaacacaagtgggacgggtagctgctgaacagtgtgaggttccagatcttcagcagtttttggaggacagacagaaggtgctgcaataggtacgcatgcatctccaacgagctcaagcacgaatgaaaaggcaggctgatcagggcagaactgaacgatcattttcagttggggaccaagtgtttctgaaactgcagccatattgtcagtcgtcgataaccgagaggcagaaccagaaactgtctttccggttcttcggcccttatgctattaaaagacaaatcaatcatgtggcttatgaactggctttactagctggcagttctattcatcctgtctttcacgtttctcagctcaaggcggtcatcagatctcgtatcccggtgagtcctgtgttacctgatttgtctcataatcttcaggtgccagttgttgtgcttgataccaggttgcggcgtcaagcggggaaagtccagaatcagcttttgattcaatggagtggatggcatccgacattggccacctgggagggagaaagcgacatca

SEQ ID NO: 152164 - DNA, 803 bp, Zea Mays
aaccaactttttagaagattggaagaaagaatcagctcaactgaatacatgtctaggaaacagcggcagtctcgaagtcaaaccaatgctggaagacctcatatacaaagctcaacgcctagacccagagacaacaagacttgtggaaaaagcccgcaaggaacaactcccggacctcagggcagatgaacaaggagccctttggttcaaaaatcgtctttgtgtaccaaaatgggaagcacgaggagtcctgctcgaggaagctcacaactcagcctactccatccacccaggaactaccaagatgtaccttgacctcaaaaccagatactggtggagagggatgaagaaagagatagctcagtatgtggcccggtgtgacacctgccaaaggacgaaggccgaacaccaaaaacctgcaggcctattacaacccctccccgtgcctgaatggaagtgggaagaaataggcatggattttgtaaccggactaccccggacgcaaaaagggaatgactctatctgggtaataatagatcgcctcaccaaggtatcccatttcattccagtaaaaactacctttggaggagccacccttgcccgaatttatctcaaagagatagtcagactccatggcatcccaagaaagatagtgtcagacaggggaacccagttcacctccaaattctggacaagccttcagaaagctatgggcaccaagctagatttcagcaccgcttatcaccctcagacagacgggcagacagaaagagttaacaaagtcctcgaagatctattaagag

SEQ ID NO: 152165 - DNA, 293 bp, Zea Mays
tgtaacggtttcacaacggaaaaggaacgggtctcagaagacaagaagttcatggacatataaactaaaatgtttcagtaggcagtataaattctgatgtaagtatttgaaacaagagtattgaagaatctaggagtacgagcatgtcaataccaagggagtagagatggtcaaatggcagcgatttaatgatgaaagagaaaagaataccaaaagacaagaagtttatggtcagggggcatctacaaagatgtcggaagcacaagagtgagatcagatctaatagattgaga

SEQ ID NO: 152166 - DNA, 324 bp, Zea Mays
ttatgagttgagcagatcttcggcaaatggaatgacagggaagatgcgttgagagtgggggtgggttgagaaaaactggtccatccttttaataggagtcacaacgatacccatggggaagatgttgggtggaaggttgggccgaattaggaatgcgcgcatggatgggggtgcggataggggcatggtgcatgcgcaagttacctactatggaagggggccgcctactatggaagctccacctgtggcacactaacgatgtgtaaggattgaaggtcgcctccatctatggaaggagacgctgaggttggaaggaggcgtgct

SEQ ID NO: 152167 - DNA, 456 bp, Zea Mays
cctcgccccgcctataagtgcccccacgacctgagccgtatcccctcgcacactctcactctcgtccaagacggagatcaccggagatcgccgaagagagcaagcgccaccatccgccaagccacccgagcttcggccaccgtggccagcccaccccagccattcccagtccacgatagcaggtcggttagcttcaccagagacccgtgaagctccccaagccctcaaacccagtagaacctcgccagagacctcgaatcactcgccggacttcttccgctcaccggcgaatgtggaccgggtaagtctctacgccattttccaattcctcacgtgtaccgcctctgcatcacttggtcgagcctcacgaaccaaccaattgaactatctcgccgtgagcacgctggagcacccgccgccgacgaactccccccgcctgcgcacgtggaccagccg

SEQ ID NO: 152168 - DNA, 512 bp, Zea Mays
gtaattgtcaaggatgctggaataatatgcaacttcatttgctttcgtgccttttctgtggctggtgtatacattttgcatgggcgtcttcaactttccttccctctcgggtatataaccaatgcttcctcgtgttatgatgccaatatgtttgacaaaagaagcatgcatttcatgaatctactttgccgatctgtgtaattccattcggtgcttcctatttcctttattctttttctcttttgggggaaattgacatccactcattgttatatggcactatcacagtggtgatatgcagtgggtccgctgtcctaaccacatgcaccatacctctttaaaaccccagcctaatgtgcatcctccagtccaaggccactaggagtttgtaatggagaacaatacccctccaaagactgggacgggcttcttaaaaacttgcttcaatggagttaatgctctctcaggttcttagtttcttccatcctgcctctgttttctatatgcttgag

SEQ ID NO: 152169 - DNA, 271 bp, Zea Mays
gtggaggacaggaattaggacctaggcggctgataccatgtgagtgagttggaagcatgtgtttgtattgatgatgatagacagtacatgtacaagtatatataggggaggaaggtgagaggtaaaaggaagccttctacacctaaggaaagatctagactacaatcagatcctcaatcagagggattgagactagaatcagatcctcaatcagagggattgagttcctcccctaatcctctctatctatatcagagacagcacttccata

SEQ ID NO: 152170 - DNA, 347 bp, Zea Mays
aaagcgtcagttagtgttaagttctataaacagagaaagactgaaatgttcaggtgaggtacctcttcaagtgagagctttatcgggcctacgccatttgacaactgccgcgtaagcttgttgtaccgtccccacaaatctttgaagtatttaaacctattttgcagatacttaagtggaatagtcatattcgtttgtttattaatggattttgtaacattctgccaaaaaaggtgagtgaattctgttacatagatgccgttctcaacctctttgaaacacgcatccacgaaaagtgtgtccaatacatcaggccatgccatgtccaacggatccctccaacctaa

SEQ ID NO: 152171 - DNA, 1087 bp, Zea Mays
agttgacatgggaatagacaataaaaggagactggaaatgatgggatatacccaaagattgttgaatagggaaaacttgacttatgggctctattgcgttttcaactatagcctacacaacttgcttgggatgaaaggctttgttgttgttgtgtgcatttaaagtacatactaggttcatccaagcaacattgaaattttattcctaagtaatatatattgacacgactatacatgcacaaatgtcacgtagagatatcgaaaatgcagagcgcaacatgacatgtagagggttcaaagtggaattttagtttttcagtttgatagttggtacagaatcattagatggacagctaacaggaaaaaagattaattaggggtacaggacctgtgaaagtctaagaggcaaccacaagcaacaaaagtagatccaccaaaaacatatggcagttgagtcacgtcatgcaccaaactatacaactgaaaaggaaaagggaatccagctgctgctcctttgcaaatgacatcttctagtttcgcataaatagatttatgagaactgacaaaggcaacctttgcacaaaaataattgttagcaaaagtctatgagttgtgaaatgtcatgtctgacatgggacgccggagaggagagttttatgcctaccaaaaacaattcttttcatctttgcatgcacatcttttgagatgatcacgaaatttagaaaaagaggttaaagcagtaaaagcactattaatgctgagccctttgtggcaaaacatcccaaaatggacactcatctttttccaattcattcccaaaggtggtcatttttcaaccaactgctcagttggaacgaaaagcagagatgagttgtactagtcctacataactggcacagatcagcatcaaacaggaccttactgctgccgagtcttgccaagggggagaataggttagtcctattcatattttactcaaaaacataaaagagcttaaaagaggtttgatcttcataaaaaaaagcagatcaattccagtgtacgtgcatgcgtccagctttccaataccaaatgctgtgcctgtgtg

SEQ ID NO: 152172 - DNA, 497 bp, Zea Mays
aagcaactacctcaacggagcgtagcgttacagagctgagagcgcgcagggcagccgccaccatgggacctctccggcgtctgcgattggaggccaagatctggacagggagcttcaccgacacccacctcgtgtttgcgtgacctttcggggtggggaatggcgggactcgtcgggaattcgtcgctgaacctggtggcaccgccgcggagccgccggtcaccatgggcgggggtctacgccgcatgagcaccggtatggaagctctcaccatgatcaccattttcccctctatgcgatccagtcgtcggtaggatagggggcacactgggtggggaacgagtgtagctccggcggcactgccgtcgtgcggggaccgcggctcgccgtggcgctcgcctagggaagaagaagctgcatgcgccgttggattccaagcgggtggccgcgatcgaccctctggctgatgcggtcgggttgttgttgggtccgttgga

SEQ ID NO: 152173 - DNA, 597 bp, Zea Mays
caatgagtgcaaaaaatcgaaggcgcattacatcagtgcaaaagtctacaggcgcagccggaccgacataataaacgtgctagaccaagtgcgcaacgccctatgaacatagccagatgcgcgaaggcacacaacctcaccatacaaactatagttacacgcgtacagcgagggcatcacaccttacattggttcaaccttcggaataattcccatctccctatagttaaaaagcattatcctcagctcctcaccctcaaaaagacttcacaactccccctcacctatactcgccccaaccggcgaggacaacaattcccgcctgccagccctgcccacatgaagccgaccaccatccaattcactcactctacgcttcgccaccgcccttcgccgcctacgcccaacactcggaccaggcaaaacttcatcatccataacacgcggagaagcctccgcctcagccacatccaaggccgcaaagtaatccaagccctcatccgaagactcttccgtccacacaaccgaactcctagagtcatcaaactcagaaaacttatacgtacactcatccgattcattttcagcgaccacagt

SEQ ID NO: 152174 - DNA, 1165 bp, Zea Mays
gttatgttattacaattattccggatcggactctgcttgtttaacgatacgatcagtgagtgcggttagatagagacgagacgtcgctgctctcccttttgcgcttcttttcggctacaataacaaggcaacgtattatatacgtactgtacgcagaaggcaagagtgagtttttctattcttctccggaaacagtcttgcattggaccatgtgacgtttccactgattatcgtgcagtgcagtgcagtgcatgcatgttccatcaggcatgaatgaatgactgactgactacattctgattgccttgctagctaccaccaatgcaaaagaagaagacagcagcttttctcggatcacccatatgcatgcatggctctggtactatgttattattactgggctccccgttttttttcttcttctaatgatgatggaaaattagggtgtagctatcttgttgggtgcttaattaggcaaagaggagcatggagtactagattccatggcgcaccagctagcgtcaaatccaggccccatggatatgtcgtcgtcgatgcttttccgtgttgccgcgtgacgatcgccaacaagtcccaggagccggttcggttccagggacagctgtcgtcccagtagaggaggggactcaagagagagtgaaatattcacctcagtctagagcagtagagcctttttgtcacaatgtcacccacctgatcttcacttgtgacaaaatccacgctgattaggctatattggctacagattcatgaacaaagtgatgcttcacctcgatatactcgctctgcccatgaaatactggggtcttcttcaacattgattgacgtgtctctctccttatacctgagatagccatattgcttgacatttgtagcagtgatatatctaccacctttttgtttcatggattggaacgtaactggaatattggccattattccagatgtgcttttcccaccatcaacatcttcagcgaaccacaccagtgttgttgggatcctctactaacatctacgcctggcccccttcttccttccaaaccaccaaatagcaaagaattcctccccaaaaaaacaaatgcaagatcggaacgaatcagcctgaaagcataagcatacattgaggctgacccgtcgtgacgca

SEQ ID NO: 152175 - DNA, 1199 bp, Zea Mays
gaaggcatggcctcgggtacgactccaagaacaggataggaatggggtagttgggtcttagccggtagaatccaaggttgatgtaacttctctcctcccttgcactataaaagggaggtagagtaactgtttaaggggtgagacctaggggattggatcagatttggtcaattggggttctagattccacaagattaataggggttggttatgcccgagttgctacgtcatactcttacacaagagttcaatctacactgaggatagacataaaggtggactagtacaatgcccgtgcattgcgacaatatacctatcatatttgatggtatagtgcaacagttgtacgacacccgagggtccagtggcaagccagttcgatggactctccccacaaaaaaataaatttaaaattaaagtggagtagtggaccctccccacaaaaaattgatttaaaattaaagtggatatatggcccacataccggatattaaactacaaatactgcattttatcttagctaaaagggagaaagttgagttgaaaatgagacctggcctttttttatagctcacttggtcgctcgtaaactgtagatactgcattttatcttagccaaaagggagaaaggtaagttgaaaaggagacatgtccatttttatagctcgcttggtcgtcctccttcacctagagacgtggtactatccgggagcgctgcgctgtgtgtagcttcgtgtcatatgttgggcttgagtgtttttctcactacctatctgagaggtaacgacctgtttgttaagcgagacatggggagaaaaatagatctactctacgcgtgtgacgcacgacgcacaaaactcgtgttttaaaggagtagagattaagactattagtccattaggctagaactcccattacaactacaaggtgagggagtgctagtatggacagctatgtgcaagcttgtaatctacttcacatttgtgttcatcaatcaatgagaggatgtagagtattcacaacctgaacctctctaactgtccacatgttggctcctagtcgtgccatgtttagcacgaccgccgacttacaccccgctctcttccaaaacctatcatttcatgcaactacattattattgatacattgtgtggttgtgtggcaaaaatcgttgtttctgtctggcttgttgagtatca

SEQ ID NO: 152176 - DNA, 556 bp, Zea Mays
gaccaactcaaccatgagcagaagatctaacccaaccagtagagtcatgatggattgcataatctgtctatccccacctaacattaaaccagattttgacctacatcatgtggtctatctcacccataactatttcaaccatatgccccaactctgctgatatatattaacctcaaattaatgagaccaagaccagaaaagaaaagatcaacaccatcaaggaaggatataacagtcaaagcgaatcttgagataaatcaagacttaaacctttccgatgaagtctttttctcgccataatctttcttacctcaacctgtccagcttatatcctacataaacagtaactggatacctatactctcctaatcacccactacctccaccaccaccagccccaccaagttacataaatatatatatatatatatattactatttgtaaacctaaatgtatctattatgttactattttaggaggaataataaggtctaattgaccccatgtgttgctaataaattatgcatcatgccgagatttttgtttgtgcatatg

SEQ ID NO: 152177 - DNA, 437 bp, Zea Mays
gactgccagcaccggatgttcaccgccggcgacctctttgccgggattggtgccgcggccgtgtggattttgctcaccctgaaaagatctcaccgtggataaacttggagcacattggccactcggtcactcctccacttaccggcgacgtggccgcacggccatcaccggcgtgccgccgttctttgctgttatgccacgccgtcggtcatcttaccacgtcgcagtggattaccatacgccgtccttctattacctaaggccttgccacgacgttcgccacctatcgcacgcaccagtgaactctctcccctccggccgccagctcgccgtgatcaaattgtgagccaccgcccccggagtctataaattgagtgcaccatcagcttcgttatgtattcgagcatctagcgcacccttctgcacctcaaatcctc

SEQ ID NO: 152178 - DNA, 369 bp, Zea Mays
ggtaaactttatatctgatatattaatattgttattacaatgtagattgcttctgactccgtgtgctaattttccccagagctatgtttctccatttttcataattgtggtagaactatttctgcctgagctattagttggaacatctttttaccatgacaaatattgtcgcctagcacattcccatcaaagaaattcaacatagtagtccacagtctgagttctgcaaaatcaagtaaaggatatgaatagggtatttcctcttagattttctagcgtttttcagattcaaacacacacacaaatgaaattttgtcatttggaaaaactgacttgtctattgtttaaattgtctatatgcatgaagag

SEQ ID NO: 152179 - DNA, 607 bp, Zea Mays
ggagagcgcactgaccgagcgggcccagcgctaggaaacacgggcgctgacaggcagaccaggggcgcagggcacgcgtgcgcaaagcggtatccgcgatctgggccatgcaatcaggatcgaacggaggggttcagaccggggggaatgaatagctgtgagcggcgctgctcctctccgtggcggtgaggtcgccggagttgaggcaggcatgtactagggtggctccggggtcaccaggattgggcagagagggagagaatgccacggcgaactcagtggcggggaaaaggccacaaatccgcgtactgagggggaagaacggcggggaggaggcctcggggggactagaggaactccggtaagggattccggccatggggagagggcttgaggcgcgctaaggcctgggatagcttcagcagagggaggggtaccttaggactaacaccgaggcgctggaccaggctaaactggccggccaccgcgagggcacggtggaccgccacgaccgagcaccggcgatgctaaaattggtcgagcacatagcgaagttggggaaattaagcatgggcaacggtgtctcaccttggggcggagctcgggg

SEQ ID NO: 152180 - DNA, 606 bp, Zea Mays
gcgctacataatgtggaggtcggggcgaacttgagaatggtggatttaccgtcggaggtgttgggatttggggtgcccacggtgtgacgcggcttcgcggcggtgccctgacttaggagagaaattcatcgcggtccgaggcttctctatgatccgtgtttgtcgtgtgcagtttccaagcgacgcgagcgaccctccttaacaaccaccaagaggttggtgcctgcgcaggcccgaatcgaccatggccgtgattccggacaccccccgactcctacttgctcgatcctggcagctcaagcggaggtgttggtgcccaaggtgcggatggacgagggagggcacgactttataccctggcttgagtccgagaaggtgggcacgctcccgagatcacggtcgattcagttgtaacagctcgatccgagcctcacaaacccgagggctcgaagaactgactgtcgagggggaccacatggcggtgaggagtgcagaccgcagcgcagctggagttccggtcccacacgccagcgcctgcgttctcctcccatgggccgcacggcagccagggagaatcagacttactgggccgggagaagaaggcgg

SEQ ID NO: 152181 - DNA, 748 bp, Zea Mays
tggcgtcatgattcttgaaggaagagcatgagatcgaccagaattgagagatttaggtaagatcaacatccgatacttgagaacgggttatagcagataaccagataacggggcagaatcattaaaggatccagggattcggatgataaagccacaacatgattcacaaggaaagagatcaccagatccatgcgaaaggagaggtaggcaaacaggatcggctaggatgatcaatagaaatgttataaagttttaggagcaaggatttatggaaagaaacatggccttgatagggtttgcgcaactagacaccaaacaacaattttttttgacgtaacaagtgcacaaggagacttgggttggtctagcggtcaagctgtgggggtctataagctgtgcaggtgtaacttcaaaggtaaaacactcaagggggctagaaaataccaacacaagtaggattttttttaagaaggtttcacttgctaaactcaaggttgtttggagtgggggtcttttcatgagaagagcagtcaacattttttttgtaaaaatggttgaacaattaaaacattttttttgccagacaagagaagcacataacacaacctagtcaagactatcttgacacacaggataagacttcttttgcagttcctagcaatacagcacattattcacaatttcttattattggaatgaaggtgagagaagcatgttgatgcacaagagacaatgatgcgacaattag

SEQ ID NO: 152182 - DNA, 464 bp, Zea Mays
gcgttgctatgctgcaacggatatttagtccctactccaacggttacatgcgtttgtactggcaatgacgagtaggttaaggcaacattttgattggatttatggtaacacatatatgtgttgcaaggtggttgaagcatatagcaatggtaacatttgtaatggatttgtggcagcacatacatgtgttgcaaagaattaatcgtttattaataaaaatgattatacaacaacatttgccaatagtaaacgagaaataattttgataatcacaggcataaacatgacaataatggacaaataattttgcatttaaataaaataatagtcacgattcagcgtaggagaacttaaaataatcaccgcttgatgcgtgttcaagtatttttgggacaaagatataaacaacatatgactcatatcctaaacaaatctgaaattcatggtagtgaaataagcaaaac

SEQ ID NO: 152183 - DNA, 528 bp, Zea Mays
ttttgaagtgcgcagaagtggaagaagcatcacttgtgttgcagccttcttcctcaacactcaccggcatagaagagagcacttcaaaacggttgctcaaggctcttttatgaggaggaaggtaaggtactattgttttgccaccagcatgatttgaggacacacccctttgtgccttactagccatggaatttgtaggaattgccagctctctttgctttaagctagcacgtcttgcacacacattagcagcttgttttgcatattttcttcggcgcgggtccttttttatgaactcatgatgctcaggtaactttgctaaagctttggcacgtcgcatgagctcaccttcaacattatctgaagatgtagatgctccaggcaataaacttcttaaatcttggcatatggtcctttctatggaagcttgaaaagcttgcattgcagcattttgtatcctacggtactctcctctttgttgagccaagattgaatcagccacataagctcgttgtgcattggtcaaag

SEQ ID NO: 152184 - DNA, 994 bp, Zea Mays
gttagatggtcttttgtttcaggtgcgaccgattaagataaagaatatggaagcgagtaataaaaccatcatatgcttagataaatctgatgatgaaactaaaaatcagtctctaaaaaatgttgagtgtgagattggaccatctgtgcatggcgcctgaaatatggcttacgttttgatatatcatgaatttgtggttctgatcgcatgatatataccactctatccggtggtacattttatcttaccattgagtataagcaacaatatattactttgttactggcgggaagaaacctgtattttaagggttaaaggagtggaatgtatggaacatttgaaatagcagtgtcaaatgaaaggtacatgctacgagatgtcactgttatatattgcagaggactatatgtttctcagtccagatacgaacgttgggcaaactaggatgagacctgatgctctaagagattcgttcgagagtctatacaagtgctaaggaaaaaagtacagggatatcaaacgtgctattggaatcttcacagttcatatttctgaggcagtacgtatccaatgtgtctacaaggccgtgtgcagatcatttttgacttctgaccagcctacattagttgccacaatcgaaaactcattcgggaatatgagtattgtggtaaaaagaatatgaaagatataaaaaacagacttgtaaggttagcttcttcatgtgtagaagatcttgaaggtgctaacgtaagaacatcaatattagtttttagagagatcaagatcattctacgagatgtttgtactaaagatgttgatgaggagaagcctccaatggttgagaatctagacgactattataatagaatgaaattctctgaagtgtttaaagcaggaagcaagcgataaaaaaaaagacaagggagaatgggtcaatgtaacaaattatatgaatttgcagagaggggaggagatgaagaccctcatctttttt

SEQ ID NO: 152185 - DNA, 661 bp, Zea Mays
ggggaagcccctacagcggcggcaattttataaatataaatataggaaaagaaatggtataggagggctgtacagacaaggaagagaaaagagaggagaggaagggggagcacaaacctgacttacctagacaaagaaagaaaagatagacaaacaaaagagaatagaaaaaagctagctaccatccaaacaatcaagggaaaaaacaactggggggaactataaggaggaaagccaattggctcactaagttcttcacatcagtaggcattttctataaacttagtcaaacttaaggaactttgattcactccaaacacaattctatcctttttgggctggaggtagcaaattacatttgcttaatggagtcctttttctagttcacatctgactcttggtagattggggttgatctataactctattttcttaatttggttatgctgtgttatctgattgctccaagaaaaatcagttggtgcttgtacaaatgcaattgttatgtccctcccccttttctgctagctgcagtgttgatatccaaactgtagacttgagtttcagaagaaagaagtgctattcatggatccgaaggtagtgttggggaagtgggccatcgcttgattcctggaggcccttgggaggaaggcccttggag

SEQ ID NO: 152186 - DNA, 286 bp, Zea Mays
gtctaagttttctcatcaacaggcgatacacaagggattttcatcaacaagttcttagtagactcggctggtcaaaacagcatgtttctttgatgttaaaaatgtatccttctgttgatattgatttgcatcagtgtagtttaggtatgctccagtctttagttaggactacaactttttattctgtcatacttcagtttcgttatggtgcacaaccaatagttctctgtgttggtctgcttgtgggtcttttcattattcagcgagttgctatttccagtttttg

SEQ ID NO: 152187 - DNA, 456 bp, Zea Mays
gggggtagtgtgaaaggaggctccggagtcaaccacccaatcggtggtggttcggggaggtggtggtgacgaaggtgcggtgtgagcggagagggccaaaaaggtgccccgatagagacacacggaagggagggagatggcatgggctcaaccgctagggaggcgatcgtagcacgtgggaagacaagcggtccaggcacgtgacggcccgcctgagggtggacctcgacgcagtcccgaaggatagggttccagactggatcgaaggacacgaacatgccccggatgaggtggccgtcgtggaggagaacacgtacagtcacgagagcggcatgtgaggtaaggctcatgtgtggcgggggagcagcatggggcggcccgaggccggggatgtagggggcccctccatgggcgaggctgctgctgatcgcagcaggggcgatggggaggtgcatg

SEQ ID NO: 152188 - DNA, 960 bp, Zea Mays
agaggaggactcctccgactcttccgaggagcggagtggcggcgacggtgacgaggacgaggacgatggcagcagtggtgatgatggcggtgagggtggcggtgacggcagctagggcgacgacgacgacaagggcgatggtgatggcgatggtgacggcgagggcgatagcgatggcagcaagggcgatgacgacgacaacaagggcgacgacgcggtgacaaggccagtggcataatgccgctggtttaagtattagtatagatagcagtagtagtaagtagtagtggattagtgtagtattagtatagcgttgcgtaagtagtagagcaatgtaatgtaatgtagtgtagtgaccaggggtgaaagaggccgactcatattgagtcggcttcaagtttgtgatgaattcccactttatgaataaagaacacagttatttcactttaccactgttgcatgctttttgttcgtgtgcttgaaggcttgccaacattttagaggtaatgcccgagtgatgattgtgattcttgcttttccgagttatgatctggcattttaggggtaatgcccgacttatggagccaacttatacttatgccgacatgtcttcttgagttctgaaccctaaatctcacttttctcctccgccgcttctctgttttcttaattctcgagcctgcccactccgtccgagagattgagatggcccccaagaggaagagacagagtgctgctgctccaatcattccacccattgatcccaatagccagcttccatttgccggtaaccacatgtctgtcatttctgagtccgatcttctacatcttgtggaaactggagttttgccattgaaagagttgtgttcttggtgaatctggcgtggggtgactattccgacagaggacactgtgacaccctagtgtcacctagggtttcttctcagtactaactcaagt

SEQ ID NO: 152189 - DNA, 388 bp, Zea Mays
cgcacagcctcatcatacaaactatagttacatatgtacaacgagggcatcacaccttacattggttcaaccttcggaatgattcccatctccctatagttaaatagcattatcctaagctcctcaccctcaaaaagacttcgcaactccccctcacctacactcgccccagccgccgaggacaacaattcctgcttgccagccctgcccacacaaagccgaccgccatccacttcactcactctacgcttcgccaccgcccttcgccgcctacgcccagcattcggaccaggcacaacttcagcatccacaacacgtggagaagccttcgccgcagccacatccaaggccgcaaagtaatccaagtcctcatccgaagactcttccg

SEQ ID NO: 152190 - DNA, 771 bp, Zea Mays
cgggaccgaccgcaacctgatctaaattcatgggtgtatcaatcattgttcacttgtgacttagccgattttccatcggctctaacattatatgagtgaagcctttcctgcatacacttacgaaccgataatctgaaaaatcgactcctgttaaacattttgcagtttcataagtccaaagcataggggcagcggccatagcaatgcaagtcgttgcgtctacatgcacggtttctacttcattgcctacccattgaagtaacatttgatgtaaagtagaaggtacacattgatcagcgtgaatccaatctttgcctaggatgatactataatttccttctactttagtgacgaagaaggcaacaattagtgtatttgtcccgattgttaatttaagggacgtgacacccttggcctcgattggactgttgctcccaacgatgttgagtgtcatgtttgtcctgatcagcttgttatcctatttacctagctttctttacaatgagtaaggaaataaatttatggtcgcacctccatcaattagcatcctagaaatcggcgtcccatcaatatggtcgcgcatatagagcgacttcaagtgattgatccattctttgggtttggtgaagataatatctttaggaccgaaatcaaattgagctaccataggtttatcatcaccaataatagtataattgaccaaaaaagtaatcacaataactttcatacctgcgtgctatagcgaggcttcgtaatccaccatgtcttctc

SEQ ID NO: 152191 - DNA, 750 bp, Zea Mays
tcgctttgaatcaaccttcgccagagttagacacctcgcggtcttgtgacacgtgcctcggcactttaaccacgtcgcagtgagtcgcgtcatgcatgtccggttatcgccggtgagtccgccacggtgaaagccactaatcgctcgcaccagtgcaactctccttctccggccgccaccgcgccattccaaattcacgtgccaccacccctggagcctataaattgagtgtgcctttgggtccgtaaggtagtcaagcacccaagccaccaagctgtgcctccaattgctcaccagagctcgccaattttagatttcccccaaatcagccaaaataccgccacgtgaacacctcgccgtggccacccttctgtaggtcagttcaagctttcttaattggtgttctagctttcctcatgtcccctgaagctcaactacccattcgattgaactagaccgccataaattgcctagaacaccttggattatcctcggtttccgccgtcgtcgtgagcaggcgtgctccggtccggatcagtgaaattagctgagggattagtgttggggagggttgaattaagtgacaaacaaaggataagtctagccgttgtgttttccggccggtattggttcgccggagtcgctgctccgccgctcacggtcgaggatctcgggttgtgaagaaacaaaaaggggaggggtctttgcgcagatgtcagtgagacaaagaaacagtagagaggattcttt

SEQ ID NO: 152192 - DNA, 427 bp, Zea Mays
atatgtttcagtttacgaaatagtaatgcacgtgtcggtctatttgccatcgcgtagatttcgtcctgcatattacgtgtatcaggcccacgatcccacccacgagctcgcagttatccagctcacctcacccgcaatgcacgcggcgatagaaccctagacatacccaccgccgtcgccttcatcttctccaccgcatagagtccggaaatcggccagtcgtcattcccctccatacaccggtcagtcctccaccaccatctccttcattctctccgccgcattcctgacatcgagtcacttcgtccgtttgccgaactacatttgaaggaagcaccaaataatcgcattggaggagctgttatcagtaagttttaaatctctaacattctatttgattcgttgattttatcatggttctacattt

SEQ ID NO: 152193 - DNA, 576 bp, Zea Mays
ggcttttgctgttatattacatggctccgcctcgttaaaaacctcaccccaccgggaggaaaagagtgcaggccagaacaacattgtttgcagaattacaagggcgcgtgggccctgagggttaaacaaaaaatttctggagattgtcaatgttctaggagtgttctaagtcttcgtcggaaggtgttaccagcctgtacgcgctgggggatgccttcgtcttgacaatgaatggaccttcccatttcggctccagcttgccccgtgactctgtccgggtggtccagatgaggacgaggtcttctttgttgaattcctttgggacgacggtgttgttgcgccaggccttggtttgggcctgatacctgtcgagagtctgtagggcgaggacacggtctttgtcgatgagatctttggaagtttgttcgtcgacatcggggactgctgatgtgtttgtcctgggcgatccatgctttatctcctgcggcgtcatggcttcggatccgtacagtaggcgaaaaggtgcgaacccggttgcccggtattctgtagtgtttagggcccataccacttcag

SEQ ID NO: 152194 - DNA, 416 bp, Zea Mays
acaaattccttcatgcacttcggccatggctaatatagcatcatctgggcccaagcacttaaccaggacatcgttgactgctcggcggtagagttcatcactcatcaaaacatacttgaaagttgtacgccgaatgttcttatctgtcctaacattgggatttcgtaaataattagttatgagtgtcctccaatcacttgcatcggtctcattatcagccgaatcgattaggagaactttcctggtaaccccggactgtccgacgtcttcacgcggacggtccgcgacctggggatttggccctgcactggttatcagattttcaatattgtaaaatttctctctctttatccgataacctgatgcatcttgtgccaaaacgttagctctatgattctcaattctagagatatgcc

SEQ ID NO: 152195 - DNA, 386 bp, Zea Mays
acgttgaagtcttgagcgatccgcttcgctcccgcgccgtttttaatgataagctgcaattcatcgccacacgtgccacctttactgaaacgggtcttgggagcagcaggcgtcgctggaatcatggctgcagttgaaagagggatggaatggaatgtagatgtagctgtgctgttctgtgctgtggtgccaccctcaagtgagtctctgcactttctacctactgcaggcatgacatgtattgcaggtgtcccctttgttccttgcatcagatgaaactccacaagcagcctttcactctatagtaacatgaacatgttgtattcagcagatggacatggcatcttaagtcttaacattgagaacagtggccatgcaggtctcct

SEQ ID NO: 152196 - DNA, 769 bp, Zea Mays
cactaaaccactaacaaaaggatatcttgggtgctctaccacaaaaaaccctattcttattagttggcgattatgtgttttctttcttcaaggtcgttgcatacaatgctcatcaggaaagaacaaattgagtaggtagtgggctttgaacaagaaatgcattaagtggatggagtttaccatggtgctttgaactccgactggtcatggggacagaatcatagccgatttgggaatggatgcggcctatgtagagtcgacgttatctagtatttgccataagaattattcgttgaagaccttgtccggatgaaagaacgggggcagcaagcggctgctgccccgccatgaatgacaacacgagcccttggaagatgtgtagggaacaatttgaggttaggttaagacatagatctaggttttggagaggtcaacacggggcctagaaattgaagaggtagatgtagagagcttacatggagtctgaatccacattgacttgcccgctcgccgctggcgatgatgcggaggatgggcgacgaagaggaaggtgagcccgggggcgctaggcggcgagcggaaaggcacaaagcaaggctgagcagtgtagtggagtcgtggtcgggttcggagcaagcgttggtttctaggcgagcggagttcgtcctcgcgtgtagtggagatcgtgggagtctggagacaggggacgcgccgtgtctgggcgagcgatgtagtagagatgagttgtagaaccacggaaatggtaaag

SEQ ID NO: 152197 - DNA, 724 bp, Zea Mays
gcttagcgatattcaggcattactgaaaattaccgagtgttctttggtaactactggatggatcgatgaagcttcacctagagcgacgaataacggtgccctacatacactagtttaatgtctgtgcattaccacggtttttatatacttgcatgtgtagaccttgtttaaatagtatagccgttcaaacacgttgcaaacctaataagcatccagaagtcctgagcggtttgtgtggacggtggcattgaagtcatgctcgagtcttagcgactttaggcttcgcaggtgcggtgggtgtcaccaccgccacaacgggtgtatgtgtcggggttcctttcctgctaaatcaaataactacaatcttgaatcgaactgaactaatcgtcccaaatttacaaatcaataacccatgtatcttatctgacaataactctggtatgatgacacctaatagccccatttgctcaggccatcgtcttgattatgttgttgcctgtgcgaacacatcaccgttgtacggtattcaggtctaattggcgtaggtcgactggtgggaccatggcccaccgcgtccttgtcgccaccaccagtcagtccatgcctaaatcctaaacctaatcggctagtccaagtgtctcacaccccaccggatcgttgtcgctagcctcgtccaggccgaggccagttagcacctcgctgatgcatagcactttttcccctt

SEQ ID NO: 152198 - DNA, 494 bp, Zea Mays
aaatggaatttgggcactcggctcggaaacgatcgctcgaaacgaggaatttggtgaaattgaagcttggtagatcggattagcgtgaaatttggcgaatatgttactggagatgttgtgaaggtgcctgaaaaaattgggttcaatcggagcagttttggctaatttgggcatttcaccgagcatgtggtaggcggaggtttaggttttcggtgaaaaggatatttgaggctgtgaaaccctccctaaggagctgagaacctacaagggtattcaagggacacagaggaacatctccaaccacatggactcataggaatttataaggatttgaatcgagcattggaggtgggcaggagctccatggactgagtaacagaggaaatagaagagagagggaagaggatgagctcaccagagaggagtgaagagctcagtcgaggaagatcaccggaggatcgccggagggcagcagctgtcgccggcgggggaga

SEQ ID NO: 152199 - DNA, 490 bp, Zea Mays
ggttaatgtcccttgtcttactctcatggattctagccatcctataaatgtccttctctccctcctctgtgcctagccgttgataaacgtcatcataaacctacccctgtgctacactcatggctcgctttgcaaccctcttcgctatttaatagccctcgatgttggttgcgctcttgtcaaggtggaggcgcttgaaacactccttttccttaataactctttgcacctcgtcattctagcaccaggtgtatttcgcttcctgtttgcctcccctactcacactaaacacttataaaagccacctttcaaacacatgtaaccatatttagccacgtgtcgactacatcttctccttcttcccaaggtccttcgcctagcatcttgttcttaaatgtttgtgccacttcccctctaagctcccaccacttcgttctcatgatcttggcacatttgtgatggacacgtacccaaaaacagaagtccgccg

SEQ ID NO: 152200 - DNA, 432 bp, Zea Mays
cagcagagaggtatttgaaaccccccttcgttacatcccacctagcaacaaaaatacccccacccggaggaaaagacttcagaccttgttagggagagatcctaccgaggatgaccccaccatcgtctacatggtcggatatctccacactctcgataaccactacgatgacctttcctcccactgcacccacctaaactcctgggtggaaagcttagagcagcaggtcaaggaacttaaaaaggagaaggcatccctccaagagtgtctcgatatagcagaaggcgaggaggccaacactcgtgaagcctaccgaaccctgaagatggattacgataagaagctaaagaagctcgcccccacgaagaaaatccaaaagaagaccaagagccaaggatgccagactgagcggaagaagaaagcccctctagc

SEQ ID NO: 152201 - DNA, 529 bp, Zea Mays
gcatggtctgttatggcaactagaggttccttccttaagtagccagatctgctgtactaatttaggaaagaggatatctctcttttggtaggcctgctctgattggcaccaggctgccgcacccttccctggtgcatcacatgtgtggcctatatattgtaagcctcatctcctttattgaatatagaagtctactccaaattacctctccaatatggtattggagattcctagtccctgtcttccacctatctagcttctgcctctccaaagcagccgttcttcctcctccctcctctcaccctcccatctccaccatgacgatgtccgacgacgaagcttcttttctgcagcaaatcgcgactatgatcaagaccgctcaggatgctgagtagcaggctgctgcagcacgcgcccgtgtcaaggctgctgcggccgttcttgagaaggaacgggccactgctgctgctctggaggagcagggagtcaccgccgccaagcagatgacgccgccccttcttcgccggtt

SEQ ID NO: 152202 - DNA, 290 bp, Zea Mays
ctcaaaaggtccagtaggggcacacaggcccagcaagagagcaccacccttttgtctagaatgcccctgcagttgaagtgctggcaatgcagacattgaggctggacctgctggagatggaggtcgaaagctctttgataaagatatcagtgaactctaacattgtggagacatgcagaaccttgatgtcaccgagagtgaagatcaatctcgatacgcttagtgcagttaatctccctaatgctgaccaccagtttaaacagggttatgtggattggtcatgtggaaat

SEQ ID NO: 152203 - DNA, 543 bp, Zea Mays
atcactgtcggcctgggatggccggaggacagcatcagctggtgggggcgcgagcttagaaatgcgccgcggaagaaaaactgattatctcgatatccccctcaaagatagcattaaaggatggcgcttggagtggtttattgttgagaatcacggaaattctctccccccgcggtcagggagacagccggacgttcgcactccgatctggactgaatcccccacagaccagaatgtggctgaggcaggagttctgctagctgaagttggattgttgaaggagaggggtctgactgcagaagctgtggttgctgactttgtcttcaagaacattcagccattgaaggacagggcatacccggcctacctgtaccgaggtctagctgactccacctgggtcaccaatagaagaattcctgttgtggacttggtgagccgacttgaaatcatacttaggggcaaggtgtcaaatgttagtgcccctgttgcttactcggcttggaacttgcctccttccaaggcctttacccatttcgtgtcaag

SEQ ID NO: 152204 - DNA, 868 bp, Zea Mays
gtcgctatcttttggcaatttgtactctcttggtcttggtatgctcgtaccattggaatcttgcatactcttatatatgcttacctttatacctcaatatctatctaagacatttcagttaacatgcccttgaccacccttgtttcttaaggatccatgagcagtcattttattttgcacatccttggtgatctcgttaattccttgtagcttccttcggtaatgaatttttttacttcaactgttctatcggaacctcacttattttatccttgattgttttctccacttcattactttgcgagtcttgccttaactctgtccatggattatgctttttcatcattatcacctttatccttgtcgcctctatatcttaccttgatgtttatcttataccggcctttaaaatatcctcttttctatctcaatctgagcattgtactttacctacttttcccttggtcgtatcctcttctttgtcacctgtgagtttttaactctatactttgttgggtttttgtttgttacttcctttacctttctcatcactctatcctaccttgtgataacattatgtctgttatctaaaatctccaatctcctatctcaatttgagagcggtgttttacttacctcacccttggcttatcctcttctttaccgcgtgtactcttgggcgcaacttcattctttgttgtactcataccactggctttccaatgccttcatcttttccttcatacccttgtttgttatcgcctttgacccatgcgatattgaggtcttctacctaaatgctcaccttaaacttatcctttaaaaagtctcccctttccttcaacccagtttcagagttgcgagttac

SEQ ID NO: 152205 - DNA, 354 bp, Zea Mays
aggcggaggaggatctcgcgtgaggtgcgtcatcaccaccgcgccgtccgtggccgtcgacgccaccagcgacgccatgcctcaccgctatgggagggaggcaaaggaagcacctggagcagcctcggggaagctggagatcgacggcatcgactaacggcggagaacacagaatagatctccgcgtccctggcacagcttctagatcttggcatccctggcacagtcctggatctcggcgtcactagcgcagcctcgccacatgcccctcgacgacgggactgggccactggggactggggagaagattgagatggactgggaaggaaacgtacctgcaggctggcgccgccg

SEQ ID NO: 152206 - DNA, 433 bp, Zea Mays
accatatgtatctaactcagatggtcaataccaggcggggtggtggaattgatttgcctcccaatcgacacactcggagaatatacagacaaccccagccacagcctgcagagatgaatcctcctaatcctccaccaggcggagttgacccactggttgctgctcagatggcggtgatgcagcaaatggcagacactatggctgatatgcgtgtccagatgcagcaagaacgccaggagatgcgtcaggaaagagaagatatacgccaggagttgcgccaggagcgagatgagatacgccaggaaaggagggcacaacaacagcagctgcaacaacaaatgcaacagcaacaacagcagcaacaacagcaacaagtgccactgcctccaccaccaccaccagttccacctcgtgataagcaccgggagttcat

SEQ ID NO: 152207 - DNA, 566 bp, Zea Mays
cgatacaacacgttggaatggagatcaatggcgtggattttaaacattagagatctgcttctgcgcaaaacgcttccctccatctaatctaagccaatcatctctagatcaacgatactggtttctctccctctcctgtcactcttgctcgtagaggcaaaggttccacacggcggcgccattgcctggggtcatccccatgaggccccctacatccaaactcgacacccatggtgctataggaagagtgcgacccgacgaatagggttaagggaattgtgttgcggatcgcgcactcatatgcaccaaccacaacacacggcggaagctcagggatgtcctaccctgatgaggaattgtgctccccccataaccaaaactcaacctccgatggctactaagcgctaccataaccttactagagaccatggagcaatggccctgtccacgacgagatgtagagcggcagtgaggttcctgctccgatgagcaatctcccgcacatcgatgggcaatcccaaccgagtgaaccacgatcacgcgcggtgagtgccggcaaatcccta

SEQ ID NO: 152208 - DNA, 506 bp, Zea Mays
ggaagcacttgccacttacaaaaatgaggggttttcagtttgtctcaacattgctaaggatattgcaaatgatatgggtgtaaatgcatcatttccagtaaagcgtaaagtggtgagaaagaaacaatttgatgaaagtagttgccatgaagaaattatagaaaatgagagagcttttgaagtcaactattttttggtatttgttgacatggcgagcacttctttgaggaccagattagagaactctgcatgtttaaagatttatttggggttttattgagctcaagcacactaaggtcactaaatgatagagaacttgaagagtgctgcactaaatttgcaaacactttctctcatgatggttcatgtgatgttgagttaaatgatttgatttctgaattgaagattctaaataagattactttgcctagtggcacattgtctgctatggagatttttaagcatatcagagatgtggattgttatcctaatgactctattgttta

SEQ ID NO: 152209 - DNA, 475 bp, Zea Mays
ttctgtttgaatggattgtgtagcattagaattatcctgttccttgctatgggaacttatgcagactgtacacaaagtcacaaaatatatttaattaaaatgcaaatactgctcgacaggtttcatgacaagtgaaattatgtgaaacaaagtacagaggaaatggactgaaaagtgtggcatcttcatgccaaaccttttagattcttcaaatgcagtacgaagatgttagggttagaactttccaatgatcacataactcagcaaaaatcaaagaattgggactgatatttccaaatgtacaatgaacctaccataaaggcatgcgtgatatgaacacagaactcgacagcaattcctatcgacataacaaggtttacaacagaaattgcattgagctgaataccaaggatggccatcaccccctgccaacaatttcaggacaaaaaggaaaataaaaattagagtaaacggt

SEQ ID NO: 152210 - DNA, 772 bp, Zea Mays
aattcagatttcattactcttctgcccaaggtggaggggggccactagtgtgagagacttccgcccaataagtctggttcacagtttcgcgaagttggtaactaaattgttggctaacaggttagaaggccggctgcaaaatatggtttcccccaatcaaaccgcttttattaagaaacggtttattcttgacaactttatgctagtcaagcagacgaccagattcttacattgtcagaagcaggctcgtatccttctcaagcttgacatttcaaaggcttttgactcggtatcgtgggccttccttctcgaggtcttgaaaaaacttggttttggacaaatctggtgtgatataataagcgggctgttagctacctcttctaccaagattttactaaatggtctgccaggggaatgtattgggcatcaacgcgggctgaggcagggtgatcctctatcgcctatgttgtttattcttgtaatggatgtcttgaatctgctcgtgcagcgagcttctgaggaagggtttattcaacctctctcttcaaggaatacgcagcaccgtatctcgctgtacgcggatgacgcagtgttatttctaagtcctactgccccggacatcagtatggttatggatattcttcatttatttggttcaacttcaggtctaagaactaatatccagaagagcagtgtgttcccaatctgctgtggggaagaagatgtgaattgtttacaagacttgctaccatgtaatatttcagattttcca

SEQ ID NO: 152211 - DNA, 371 bp, Zea Mays
ctcacaggtattggtttcctcaccttctgctatttcgagcctctcttgaagggacgtcttttcccttgtaagttccctgactttttgctccaggctttctacccgggaggttaggtgagtgcagaggagggcaaggtcatcatattggttatcgagggtgtggaggtatccagccatgtagacaatggtggggtcatcttcgacagggtctctacctgacagggcctgaagtcttttcctccaggtgggggtattcttgttgctgggtggaaagtagcgaaggggggtttcaaagatcactttgctgtagttctggcatagttgtcggagggcggttcgggcaacattctggcaagtatctgggaagcggc

SEQ ID NO: 152212 - DNA, 622 bp, Zea Mays
gataacgaacatagcgtaatcgccaagttaagattgagagatgagaagggtaaagccaataagaaacaaaagcacaacaaaggatgaggttacaaactcgcgagccaaagaagaggatacgaccaagagaaggaaggtatgagacggaagaggggcggtttttaagggcaggtatgagacaaccatcaatgtaggatatagaggtgtcaagggtgcatatgataataagtaaaagcatgacaaaggatataattaaggaaagactcgcgaaacaacaatgtggagaaaacatcatgtgtaagataggtaaggttccaacagaagggttgaagtaacagaaattattaccgagggaagttatgaggaaacggtgagatcatcaaggatgtgtgaaatagaatggtcgctcatggaccatcaagaagcaagggtgatcaaaggcatattaatcgaaaggttttgaacaatcattgggatatgaaggtaagcatatataaaaatattagtatgcaagattccaatggtacgagcataccaagaccaagggaataggaaaagctaaaagataacggcttcaaaacggaatagaaaggggtctcaggagacaagaactccacggaca

SEQ ID NO: 152213 - DNA, 419 bp, Zea Mays
tttctggtttgtagttgatttcaaactccgttagttagcgtgctgcgtcgcgcgcttcgtcgcgtgacgattcttttagtttatatttattaaagtgttgtgccgcgcgcttcgccacgcgatgatctattttaatttcaggttgtttaaggtgcgatgtcgcgcgttcagacgctcgacgttccactttaaactcaactctgttggagtatgtcgtcgtgcgcttcgtcgcgcgatgcttagcgtctatttataattagtgcaagcgtctcgttgggcgctttgtcgcgcagcgagtcgtttacttcttaatgcaatctaaatgtcgtgtcgtacatctcgacgtgcggccactcccttttattcatcttcaattgtttataatgattaaatgtggaacttgactttactttatgcca

SEQ ID NO: 152214 - DNA, 482 bp, Zea Mays
gggagtcgggcaatcctgaccaacctcttgacaccgaagactgccttccaaagtcgacgatgcacgagataccgcccgggatacctctaatcccacgtctggagcgtcagagcaaacattcatcatatcatcaatagtcggttccaacagcatatcttcaggaatgacattctcaagggcctgatcaaaatctgttatggataaatcttgaaggctaacaagagcagacagagctggagaaggaatatcactatccccctactacctctgtaacgccggctattcttgcgaattagcggaacttcttcttcctcttcttcgtcctcatcaaaaatgcggacaaaagatggtgctggatcacacccattggggtcagcttcaacaggatcacacccattggggtcagctggtgcacggatacactcgttggggtcagttggtgcacggtcacacccattggggtcaacttcagcaggtacacc

SEQ ID NO: 152215 - DNA, 441 bp, Zea Mays
tccggatatgtagggacacaatctgcgacaaagaaggagataagcaagtagatagtaatcgcaacttgtaacgggataactctctctggtcgcgtatatgaggccgagggggaccccctaccattccatctcatcacccaccactccagctcatcctcacccacaaccctgagcttgtaatcctcgtacttcggagatcaatatcaaacccaacaggaagtagggtattacgcaattctaagcggcccaaacatgtataaatccgtgagtgatcccagcgtgcctctgcacgaaccatcgagtcgcgatcaacgacgccatcctacccaaaagcatcacgtaggtaacctcgtggtgcgtggttgggtcacaaacgccgacaacgatcgattgagagaatcacatatccaatcaaacaaatctacctacattactttatat

SEQ ID NO: 152216 - DNA, 886 bp, Zea Mays
taaaattgtagatctattgcatgccataatctattgtcggtaagagggtgtggggtattatgcacactatagcccaaacctctataaaaatttgtgtgttaagctcttgatgtcatgatcgcatagacgtactctatgaggctaatacatgctccatgctcgccaagatattatttatttagtattcttgataccctagtgtctccattgacatttggcatttttcatggggagcttggatactttagtagggttctgctcgcatgacatctcaattttctctccttgtggaccaaagctctcaaactctagctccaataactctaactgtgacccccgatactgacaccatcaatttctagttgtcttgtcccccactacctcatgtagagggcacattttagttggtgcacaaaacgcttcactgatagagtctgtctcttcttatgcctcttcaaggacacactgcccataaagagtgttgcatcatgaatctctactagcacacaaagatcatgatcatgcatgacaccacacatcgctagcttcaggctcatagggaggaagtctctaaactttaggggtcctccctataacatcaaccaagttgccaccacctacgccatgttagagacaaacacttgtaaagggcgacctcatgctctgatgcatcctcaatcgagcattggtgaacaagctttccccacttgggaatgtcccttttagttcacagaattctacatgttgggtgtgttaggcttgcaatagtagaaggtgtattgttgcccaatacatggattatagagcactttcataagttttatccttagagggcttcataggtaaatacgtctgggtcctagtctccctagctctgttgctcgag

SEQ ID NO: 152217 - DNA, 300 bp, Zea Mays
gttttggtgacgtagttgatatcgagtccgttgagctcgaggcaccactttgagatgcgcccgaacacgtcccgattctggacaatatcatcaaggggtgccgtagacaccaccgataaggggtgttggtcaaagtagtggatccacttccgcttggagatgtggaacgcatagagaagtttttgtatcagagggtatcgtgccttgcactccatcaacacctcactgacgaagtacacatgcttttgtaccttgagtacatgtccctcactttctctttccaccactagtgcagcgcta

SEQ ID NO: 152218 - DNA, 546 bp, Zea Mays
tcggttgcatgaaaacctcaacctatttagtcaaagaaatctgtactcataacccacaaacgtaattgcatcggtgcatgtgcaactgtaacctaaagttgttctgagagaattaaactacaacagtatgcggaaaaggcaggggttattcttggggtaatctttgatccatgctacgtcaccgtcttattgtcacagctaagcatggagtgaaccacatagtcttccatgctttgactttagattgttgttccaatgtataatatcatctcatctcatctgtatctatctattcttcgaatttgcaatgtcaattggcaactcattgaaccaaatggtttaaagttgcatatcataaaaaggccatctgagcatgttaaacactctccatttgggacaagtatgatcacacactaacccatagtaacgcctggttaaaaaccttgaggccgagctctagtcaagctataaatcacaactcagtttttgataaaggactttgtccacccaaacagcatgacagtcgtcttccccattcgtatcccc

SEQ ID NO: 152219 - DNA, 701 bp, Zea Mays
ctctcggcgtacgtttcttcttccctgggatataaatcaaagcaccgcgcctgtgacgattcccttctagatttcccctgtctcttctcctcccgtccttgcctataaatggagccacaatgcagttgctcctcctcccccagctgctctcttcctgctttgctctgacgcccatcttcgtgctactcgcccggagcagcgccaccgctcaccactgagccttcctctccagcagctccctcctctatttggcttcctgctcacgacgtcaagactccgttgctatcatcacatgctcctcggcgccatcgctcatcgagccgcgccatgctgcatcgtcgctggtacctcctactacgtcgacttctctgctggtgccctcctcattgccgctataaatccatccccatcgccgaacaaggtataggaagacgaacattttactagctacccccttcatatgtatgtttaattgcgtggagacgtatgcgataggttccctattttaaatacgcatttaaaacccacataaagtaaatgttgatttattagcttcataaatttgtaatacacatttaaaattagtgtttgcaacattttacatgtttcgttaatatttgaattatgattgttatatttttgaaacaagaaataataagaattatagctttatgttttcaaccaaaaataagagataatta

SEQ ID NO: 152220 - DNA, 297 bp, Zea Mays
taactcccgtcgagagggagtttaggcgtgaacgccttaggttgtataatagaacaccaaggcgaaaagaggcaaaggtagaccacaacagaagacgtagagttatgcaagccgacactttgaatcccacatccatcgccatggaggacccaacatatacccctgagttggtacaccctacagcagatgcaaagggatctgatggatccatattatctgtctgcgactgggttatccctgaattcgtcaacgcaccttttttgccatctccaacccagaccgaggatgtcgcttcgc

SEQ ID NO: 152221 - DNA, 647 bp, Zea Mays
aggctggcccacgcgaccaccactctggtcggcgcaagggcaagcgggagcacacctcttgcaagcacaagtccagggggaagtacctccagaaggccaaggtcaaaaagcatgccttcctcgcctccctgagcgacctcgaccacgactccaacgagtcggcctcctcttcgagcgacgaggagctcgagagacacgttgaggacaagctcaacgggttgtgcttcatcgtcgacaccgtaggaggtctttacaccatggcccatggtgattatgcagttggtggcgacagcaatgacatcagcgacgactctgcttttgaggtatcaaattccgcccactgaggtagaagagttgaacattgctttggcaaattagtacaagttgcttaggcttgctgcttgtgagaggaaagagtttaaatccaagtttgagtccgctagagcttcagttgtggtgtccgacaagactaaatgtgatgggtttgcccttcacatgtcgaacatcgccactttgcagaccaagtatgccaccctgctagatgagtgcggtgagcttcaatctaggtctagcttgttgggcgcatgtcagacttgtcctagcttgcagactgagctagcggagaagaacgctaggatagcctcgct

SEQ ID NO: 152222 - DNA, 662 bp, Zea Mays
accaaacatatatgtatctgtcccgacttcgtttttcagggcacagagatatgcacgcttcttcatgtatccctaatgtgtggcccatcaggcccattaggcgagcggacacaactgccttccgtggcatgttgaggtcttggctaatcgagtaatcgtggggccacgtagtggcggcgcaggggactgcaggagcagaccagccgggagggagctagcaaggagcgtcatggcctattggcctgtgcgcgtgcgtggaggtcgacgcttgctgtcctgtgccggtgtcactcgatttcaaagctggaagccttgaaggattggaaggttgttttgcaatacgtaagattgtctatgatatttaatatcctctatatattaaagatattgctacaagcaacttgattatctcaaacaattaatactttgatatgtgaagcattaaacaatattatcttataacatattctatgtggcgtgaattatgatttagtttgcgtgttatgtaatttgtatgttctattatatgatatatattttatatgctatgaactatttctatgagatactataatcaattatatatatctaaaggttattagaataggttatataccataaaaaatttatgctctaataaaattttgaatacccattccata

SEQ ID NO: 152223 - DNA, 528 bp, Zea Mays
gttggatgtcaccccacctgtgttccaatgaatgttgtgttcttgagttaggtgctttcgtgtgttcattgtagtactcacttatgcgacgccaatacgacttccatgattgattagttccaatagccggatctttggagatgtttaggtaggccgacacaaggacctcatcctcagcctgactgtagtttgcaagtcttcttgttactgtcttcttaacaattctgtttcgttgagttggaggagtagtattgttttcagatgcctgcaagttcacgtcaatgttgcaagcgttctggaaggttgcatcatcatcaaattgagttaaatcaattccttcggtgtaaacaaaaggttggtggccatgagaaggttctccctcagtatactggtccattttacgactgcgttaaaacaaacagcaaacatataccaatttagtactgaagtgtactaaagtgatagtaataagaggcaatgcagcagcactggaatactagtaccgggagttcagacatcgttcgacaa

SEQ ID NO: 152224 - DNA, 568 bp, Zea Mays
cgaaatttgacagtctcacgctggtatgggttatgattttgttttattctggaataaattaatgtgccttacttctcgtgcatgtggggtcatgaagtgctaaatgttcatactaatgccttaaccttagcggggtgggggtgggggtggggtgggaggattgcattttctttccaatctttgattctttgattatacttttcatcagaagctgaatgtctatattatgtatgaacgaagttctaattgtagattctttcattgctgtcttcatccagagaaaaggggatgagcaccacaatactgattctgactgggttcagtgctacagctgtcgtaaatggagaatgttgaatgcaggcttcaatgtagacaatcttcctgaggaatggtttgtatgaggcagtcatgaaggattttcaaacatgatgaagtcatgattttgatatcgtgccctttttactgttaagctgtaatgacacaattgattggtttacacgttaacactagagcacttcttttagttagcattaatctttcttttagatcaggtgactatgctctcttt

SEQ ID NO: 152225 - DNA, 921 bp, Zea Mays
acaaaaaaaaacagtgagcgccctgttgagaaacgctgaggaccggtcgtcgcagggctcggcctcgcgcggtgcaatccgggggagtacgcatcggctgggggctttcactggtgctcggtgatggttggctggggagctcggcctcgccgccggacgtgagtacgggagagagaagaggagcagtgggctgctgccgccatggacccttgtcgatggtgtccgcttgtgtgtgagggagctgtcgctcgtgccaccgtgggaaacactgccccattcctgatgaactattcgttggagtcctcggaccaccaccaaaccgcctcctgccatgattgttggtctccgcgacgtgatctccggtaataccctgaccagcgtgtccattcgattccccgctttgttttaagtcggattagattcccggtagtgcaccattcggggcggatcgacacacaccggtggcgccgccgccgtgaaggttcggttgacgccatcgcccgatgccaggtggaagacgcctgcccagccgttgaagcctaatcggacgtccaggattagaatccgctcgggtaaggcttacgccgtcgattcaggaaccaacggataggatcgcttatttgcgtaacgcttcgggatgtaaatttcgaccgtaggatccgatcggtcggatcagggggattctgggataattaaatctgcaccgtagatcctgatcggacggccgtgatcacaagataccccttccgccctggagttttattaaagagaccctgagattttagaatatcaacctgccatcctctggcgttgtgtcctgtgtctgcggattatttccccaaagcccctgcacttttcggtaaatgaggcccggtccagtgcagttgaaattgaataaataatttggaaaatggattttta

SEQ ID NO: 152226 - DNA, 1319 bp, Zea Mays
caatggttcggacactagtgtactatggtttggacactaaattggttgttcggccatgaaaacttgtgttgtagctcacgcgaggcccaaaacagccttactttactttttagggttgtgttttagggtttggagtttggggtttggagtttagggtttacagtgacactagtgtactatggtttggacactaaattggttgttcggccatgaaaacgtgtgttgtagctcaagcgaggccaaaaacagccttactttactgtttagtgttgtgtttttgggtttggagttgtgttttggtgttcgggttttcgttttagggtttggggtatagggttcacaatttagggttcagggttcagggttcgggctttagggtttggggctctgtgtttagagtttgggcgggaggcatgaaatcgttgttcgacgacgaaaacatgtgtcgcgggaggccaaaaatagccttaccggcctccggggccaaatgcgtgtacaatggttcggacactagtgtactatggtttggacactaaattggttgttcggccatgaaaacgtgtgttgtagctcacgcgaggccaaaaacagccttacattactttttagggttgtgttttagggtttgaagtttggggtttggagttttgtgttttggtggtcgggtctttgatttagggttcgaggtatagggttcacaaattagggtttggggttcaatgttcaggccttagcgtttggggctcgaggtttagagcttaggcttttgggattcgagatttcgggtttcgatttgagggttagcgtttggggtttaatgtttagggtttggagtttgggatttgtgattttgtgttttgggggtcgggttttagtctaagggttcgcggttacgggttcatggtttagggtttggggctcggggtttaggatttaagtgttttgtgtgatgtagctcaatagatgctaaaaacaacctttcccatgccagtagccaaaacatgtttggcgggcgggaggcatgaaattgttgttcgacgaagaaaacatgtgtcgcgggacgccaaaaatagccttacaggcctccggggacaaaaatgtgtactatggttttaacactagtgtactatggttggacactaaattggttgttcggccatgaaaacatgtgttgtagctcacgcgaggccaaaaacagccttacctgtcttagtggccaaaacaagggtggcgaacgggtggcatcaaattgttgttcaacgacaaaaacatgtgtcgcgggaggccaaaatagccttaccgtcctccggggaccaaaa

SEQ ID NO: 152227 - DNA, 418 bp, Zea Mays
agacattagagaccatgacaaactctttgggcatgaattaggagcaaggggatgactgggagggcacaaacgacgacgaggagtactcccggtggtcgtgggaactctggtgagcaattcaagtgcactccgtgtaggtttggacaacggaaggggtatgcgagttttagtacctgatagtgcacctccttatgccgaatagaagttgggtatgcgtctagggactctagttgatagaagcgagggcacgatggagtcaggtcaccatagcccaaggcgtaaagggcgatagagctccggtggaagcttgtttgagactcctcgacctatggcgaagctggtgatgacggtaggtaggtcgaggatgctctggtgatggtggaacttgttctatgaagctctagaatggcaatgtgaa

SEQ ID NO: 152228 - DNA, 411 bp, Zea Mays
cactggggctgttgtcaaatgctgcctcaaagtgtgaaaggcatcctcacacttttggctccaatcatacttgactcccttcttcaacagttcagtcattggtttggcaattctggagaagtccggaataaatcgtcgataataccctgccaatcccagaaaactccgaatctgcctcactgtagtcgggggtttccaatccatcacttcttgtaccttctcaggatcaactgttatcccatcctgaaaaattgtgtgacccaagaatttaatttccttcaaccaaaactcacatttagacaacttagcataaagatgatgatcgcacagccgctgaagtacgatgtgcagatgctcggtatgttcgtcttcattcttggaatagaccagaatatcatcaatgaaaacgac

SEQ ID NO: 152229 - DNA, 966 bp, Zea Mays
acactagtagtggtaggtcagtaggtgtgaaaaggggagatgctctgatgaatcgttcaacggggacaagtttctagcacaaaattcaggttgcgtggggggaaaagatcatgtctttgtggttgtactggtagcttccggtacagttgtttgtttgtgcattgccctgtttgcgctgtacttttgattccgtgacgaatttgtggtacctgtgatatacgcatgtgatgtactggtctgccaagtcttttcatttcgaccgagcagtagtactcggtacgccaaagttcacgtggtactgctgcgtccttcgtttactaaggatcaaagtcaaacgtcgagaaatatagattttcctggatgttgctgataatccaccatttagtcggtaagcatgtatggcaaagttcagttggtgttcacttgttcctcaatggaggccaagaacaagaaaaaagggtcaaaggtcatggtatttcttctcttgttgattgggcaatccggacaagtctttagtgatccatgttctttatagcactctatctagaatatcatctggtagcccgtggtgcccttcctttagaccttaatggggtagctttgttcctttacctgctactgctagcgatgttgcaaacaagaagtggattatggagtggcgcacaagaatgtccacctcttggctctacatggctctgctaactagctcaactgtgacgaacaaccgggatttctgatgtcctatcatatcgccacggctgtttgttcctttgccaagtttatatgatgctattacctttttggctggaagacaaggtcacacgtcgttcttggatttttctattattgccctctctagaaatggttacatgcagcctttcctgtccagtaatgatttgccttctgtcacttaactttaccaaattggacgtctgattctacgtccctatcaaccagctgtaatta

SEQ ID NO: 152230 - DNA, 290 bp, Zea Mays
ggtcccttcgccctctcctatgtctagcatggtggagccggacaccccctgttctccctagcgaacaacctcactgctccgacagccgcgcagcagccgacgacgaatctcctccaccgcacccaggccttcttcaacctcgcggtcaacctcgcctccactccaaggccgccgccgtcggattagaagccagtcaccctctgctcgacttcacgtcactcgacgacctctgcgtcacgccctcatgtgctcaccagggcgccagcgtccaacccaactcggcccctctg

SEQ ID NO: 152231 - DNA, 901 bp, Zea Mays
tttccccacacataattgggttctcaagactgacctcaccaaactttctatcccacattttctatttcgaactccactgtgcctacagtgcgtgaacagtttcgtgcaagtccatatacatggacctcgcaggacttgcaaaccccacacgtagaacaatggtatgcacaagtattgataccatcggtgtgtgcaaatgttatacaaaccttgtcacaaccaaaagcaatgtactaagtagtataatcaagcgcttgcaagcactaagccatactatatatgcacctaaacactttattggctagagcttcacaggaatgaatctctatccaagagtatattctagtaactcttaactacactaaaacgagcaccaaccatcaaactaactgttgctccaatttgactatttatgtgttcgatgtacaactagactgtcaggtgcgtgcaatcgattcagtgtcatcatcaaactcaatatctcctcaggtcatttaatcttgtgaatcgttagaccatccaatgcattatgcatttcctttaccaagctcttctaatcactggacctttcaatgttcactaacattcttataatcggaccatctagtgctaagagttgtgcatcattgcttggtcttcatttttcattactttcctcaccaatttgttcggtgcatgtttctccattgtctaggccatcaacttcttgaaaattctgaactgtggtttattcagtgtgatgtcttaggtcttctagttggtattctaggtcttctcttgtactctcgatcactcctttgaggtgtttgtttaccaagtccattactttcatcattggaactaaatgaaatattttagcaagctatattagtcacaatggttatgttgtcactcaaatacc

SEQ ID NO: 152232 - DNA, 596 bp, Zea Mays
agaacatgtctagtgtgtcgatcaggttaaccgataggttccgtaatatgcttgtgatgcttttatgtgcatgataagctcgatgccttgtcgtcgtagtctcaggaaattttctgaaatatgctagtactccactgatgggttgaatgaacttgagatgtattacaatagctgtgtgtcgtgccggttatccaaaaatggtgaaaggtggtgtgtgatggtaattgggaaatagtcacgtcattagccaactcatgttaggcaggagttgattgtgttaagtgattgttatatatgttgtgtctcgaattgtgataataataggcaagccgacgtgtatgctgtctagtgggttgtgttgttgctctgattaatcaacttgttagatggccttagttaagctcgtaatcccggtgatttgcttgttttggtctagatacgcatgattatggtcgcgggtaaaaagtagtagtgctcatgtgatgtctaatttaaaacacaaattgttgggtgatcatcgtgaagaatgcgttgttaattggttgtagtaattttagtgcactaaatgatttggacaaaatttgtaagcctacttg

SEQ ID NO: 152233 - DNA, 675 bp, Zea Mays
tatatgcatcttgatattttagatgttatttgtacacttatcgatctgcctatgctcctctataaatggcctccccgtacttcagtcttatgttggcatacatggcactcaattaggagtgaatgtgttccttgttggcttgttctgcctgaatctgctgtttttttttgtatcccctccgtttttaaatacagtatgtgacgtttacgagtttaaactaattgtgaaaaataaggattgttttctcttagcttagcttttgtacctcaaatcctcaatccctttatttgctttcatatttctgaggatcatgatgtgaatgagagtcatgctcattgtctttcatgaatcgctcttattattcagcagcttaacatcagtgttgacttcaatttctagtccatactcctactttgtaaaatttgctgacgcaaatgcttccaaacttagcatcttctatggcgacatgataataaaagttacaggaaaatctgacacttgagcaactacgatccgggttcaggataagtccaaatcgaacaatgaagtgaagtttgtcgttttatgactccagccgttgtctttcttgtttgatgctgtccacaattatgtgggttcgctgattgctgtcattactattgcccaagtgcgctccgctgaataggaccacgccga

SEQ ID NO: 152234 - DNA, 751 bp, Zea Mays
tgcattttaaataaatttgaagaattcaaattcgaaatggtaatttcaaatgaatttggaaaatagaaagcagaaaaaaagaaagaaaacaaatctgtgttaggcccaatcctcgcgccggcccatttacttctcatctacgcaagcccactccctccccttttcttttctttcgcgctagctgataggtgggacccccagcttagtctcttcaacgcgacgcggactcatctctggtcgcctgaaccgtggggtcagctggtcagggtgttcttcctcctctgtgacgaattccgccccgctccaccattcccatcgccgtgtggacccatgccgcatgcacctctgctcaatccaacgcgccctcaccaaccattgttgggtgggaccagagcgtcagctctttcccctccgctgaaaccaaacaaagccgaagcagccaccaaaacggaatccgcggaatcaccggtaaatcgagcaggatccggaaatgacttgggggaaattggccgggcggatttctcgtgcaaatccaaacaacttgcgcttggattctctctgtcgcggtctataattgcgagccctcgcgacctcctccctcctcgaaccgagacaccaaaactcctctccaggacatcacgtcaacgaccaacgcaggatggcatgtcgacgccgacaccaaatcggtggttcacaactcaaacgccctcgaaaagtagtcaaggtacatcgccgtgctgtcacggtgtcg

SEQ ID NO: 152235 - DNA, 3281 bp, Zea Mays
ccggcgacccgtccctcggttccggcgctggcttcggcgcgcgctgcatggtcgacgtcttcaacttcctctgttccctgctggtgagcgccagcgacatggtaataaccccggatggccagggggccttcacctccgaggaggatgtgatgctattctctctcgtgctcgtcaacaccgccgtcgaacttggcggcgaggccatcggcaagcaccccaagctcctgcgcctcatccaggacgacctcttcttccacctgattcactacgccaccgaatacagccccctcgtcctctcgatgatctgcagtactgcactcaacctgtaccacttcttgcgccggtgagccagccagcaatataatgttagcatcagtggcaggttcttctaactcttggcaactgcattgctctgcttcaccaggttcctcaaattgcagctggaagccttcttcatgttcgtgctgctccgcgtgtgcggcggcggcaacgggccgcagctgcaggaggtggcgatcgagggcctcatcagcttctgccggcagccgacgttcgtgatcgagacgtacgtgaactacgactgcgacccgctgctgcacaacgtgtttgaggaggtgggcaagctgctgtgcaaggcggcgttcccggcgtcggccccgataacgacgatccagctgcaggcgttcgagggcctcgtcaacatgatcaccaccatcgccgacaacgtcgagatcgacaagacccccgaacacggcgcctacgccgtggacgtgtcggagttccgcctcttctggaccgagcgctgggactctgccgccgccgccggcggccagcgggagacgtgggtggacttcgtgcgcaagcgcaagctgcggaagaagaaggtggccgtcgcggcgaaccactacaaccgcgaccagaagaagggcgtggagttcctcaagctgtgccacctggtgccgacgccgccggatcccaggagcatggcttacttcctccgctactcgccggggctcgacaagaacaagatcggtgagttcctgggcgaccctgacgagttcagcctcaaggtgctcaaggagttcacggagacgttcgatttcacgggcgccatcctggacacggcgctgcgcacgtacctggagacgttccggctccccggcgagtcgcagaagatccagcgcattctggaggccttctccgagcggttcttcgagcagcagacgacgggggtgttcgccaccaaggacgccgcgttcatcctctgctactcgctcatcatgctcaacaccgacctgcacaacccgcaggtgaagaagaagatgtcggaggaggacttcatccggaacaaccgcgccattaacgacaagaaggacctgccgcgggagtacctgtcggagctcttccactccatctccaccaacgccataaccgtcttcagcacgtcggcgacggcggtggagatgacgcagagccggtgggtcgacctggtgaagcggtcgcgcgccctggagcccttcacgccgtgcgacttcaagcacaagctgagccgggaggtgttcatcgcggtgtcgggccccaccgtcgcgacgctggccgccatcttcgacagcgccgacgacgaggagacgctgaaccagtgcgtggaggggctggtatccgtggcgcgcatcgcgcggtacgggctggaggacgtgctggacgagctgctttgctgcctctgcaagttcaccacgttgctcaacccctacgccaccacggaggagacactcttcaccttcagcaatgagctcaagccacggatggccacgctcgcgctcttcaccatcgccaaccgcttcggcgagtcggtgcgcggcgcgtggaagaacgtcgtcgattgcctactcaagctcaagcggctcaagatgctaccgccgtcactgatcgacccggacggcagtggcgcccacggcggctcggatcagcggtcgggacatcggcacaggccgtccgcctccgacgctggcgtcatcttccccccgacgcaccgcggcgcggggacgagccggcacgtgtccggcatgatcggccggttctcacagttcctgtcgctggacagcggcggcgagtcgctgctctccgtcggtagcgagttcgagaacaacctcaaggtcatcaagcagtgccaggccgggagcatcttcacggagagcgccaagctgccggacgaggcgctgcagaacctcgggcgggcgctcatcttcgctgcggggggaaagggccagaagttcagcacgcccatcgaggaggaggacacagtcggtttctgctgggacctcctggcgctccttgcgacggccaacctccagcgcttcgcgaccttctggccgccgctgctcgagtgcttcagcgccgtgtcacagctgccgctcttctcgccgtccccgttcgccgagaaggcgatcgtggcgctcttcagggtcgccgtgcggctgctgtcgacgccgccgccgctgcgcccctccgacagccgcgtctccgaggagctagtgttcaagtcgatcaacatgatgtggaagctggacaaggagatccttgacacgtgctgcgaaggcatctcggagaacatcgtgaagttgctgacggagcacaccgacggagtgcagacgccactcgggtggaagacgttgctccaccttctcaccgtcacaggccggcacccagagacgttcgaccagtccgtggcggcgatgatcaagctgatgaccgacggcagtgccagcatcacacggttcaactacgccgccgtcatagaggccgccttcgggttcgcggcgctcaagatcagcccgctggacgtcagcacaaagatcctggagctcatggccgagtccgtgaactggctgatccagtggcacaagtccggctactccgaccctggaaacagcggcggcttcagcggcagctcttcgtcccagacgtcggtggaagatgcgtcgcggatgggcaacctggcagtcaacatgttcatcaagctcgcggaggcgctgcgcaagacgagcctagtccggcgcgaggagatccgcagccaggccgttttcgagctcggccgcgccttcaacctggccgcgacgggcgacctcgacttcgggccggccggctgcctcgcctgcttcaacctcgtcatcttcgccatggtggacgacctgcacgagaagacgctcgagtactcgcgtcgcgagggcgcggagcgggagacgcggagcatggagggcacgctggccgctgcggctgagctt

SEQ ID NO: 152236 - DNA, 1029 bp, Zea Mays
gcacattgtgtttgtagaaaaagcacatggataagtaaccattcaggaattcgttcaaaaaagactaattgggaaaagcatatggattactaaccgttcaggaattctttaaagaaaagaatggttgtgtatcattacgtgcatatggtgaatgattaccaacatattttggtttgttatggtggatgacgatcagatgttcacactaaactaatacgaaacacattgcggattttccctattttagaaagctgaactttctatctactttattacacatacgtggacggatgaggtaatatactataatatattgtcggaagcacaaagaaaaataaacagacactaatattatatcagagaaggtagtgtacgttcctgataatccaatacagcggccaaaaaagttgagaattgaaaaagaagacgtttatttggtggattccagcagcaacatgaaaaggaaaacaaagaaaaaaatgttaaggaagggaaaaggtagaagcagaggggaaaaggagggcacatatccgtttcgcagccactggatattaccgatacatcacaacatcaaatgatggggaattgttggaaccctaactttaactgagcaacaagaattagaatacatggaaaggaagaaatcaaatttaaatttccctaagagagagacacttgtcagtgggtgaatcagtaatcggagaaccgatcgagagtagatctagaggggaactaactagaagatgtaaagagggactaacctgagaacttcacgaagctgatgaggaggacaacactagggagatgtgagagtcgcgcgagatcgtttgcgggcgcgatgtcgtcaccaaggttcgagagagaggatgacgacgagcacgtgagcacgacgatagagatgagagccacagctgcggctgcgagtgaacccagagacgagaaagaggcgagtgaaccctagcatatttttaccgggcgagcatagtccaggccggcaagcgaagcgagttatctccgtttcgatcggcc

SEQ ID NO: 152237 - DNA, 279 bp, Zea Mays
ccccaatccacttcaatacatgtggatcgggatggatactagagcacccaaataaagtctaatcaagatcttgcacacagtgccgctaccttgcttcatagtccgcaccagtagatgggtaggctatcggtaggatctttccttggcaccatgacgccatctacgctcactatctcattgggtctcactatgccgttgcaatgcggcaatggctgctgcttgctgccgctgccatgtaccgccgcatcatcgcctgcccttgctaaccctcacctgttg

SEQ ID NO: 152238 - DNA, 383 bp, Zea Mays
ggggttatcaggtaaaagctggtgttggttccagatgcaacagcccacaggccttttggtaggcgtaaggatgtgttgcgaaaggcagcctggtcgaaaacgatgcaagtagtctaccatggcagaaaggaagataccgtgcgtgtgcgtgtgggaactcagggaaggggagtgttgcttgttgagagcgttttctgggactggggtatggaaggcgtcggtgacgtaggcccagcatttccttttccgagtgcagttgagttgagagcgaaggcacaccagcacattaaacccaaggacgtatcacgtcggcacctgtttcatgcacgaacggcaaaaaaaaaaaaaaacttaaacggagtagtggcaaccccaatgctgcg

SEQ ID NO: 152239 - DNA, 1005 bp, Zea Mays
tgagagagagtgactaagcacagagcgaaaatgtccgatagattagcaaaggatgagatgactacctggaatgctcacacgagaggtgacgatccaggcaggacgggagacggcacacgggcaatcaaggtcattgaaatgacagaagaggtgagcacatattagtcacatagtcataagtatatgaaatgtgaataaatacatacacagagagagatatggcacagaaaacacgagacgagacgatcgaaaggtcaaacggcgtgaaaaacgacgtttgaacgataaatagtgccataggaggtttggaattcgaattgaggcacaaaacgacatggaattgagccgatacttcacgaataggtttatataggtgaatatgagtgaagtgtgtgcttggtttgaatttaggcgaagaaaaagagattagggcactcggctcggaaacgatcgctcgaaacggggaatttggtgaaatttaagcctggaatctcggattggcgtgaaatttggcaagagtgttactggaagtgttgtgaaggtgcctgaaaaatttgggttcaattggagcatttttggctggtttgggcatttcaccgagcacatgacgtgcggagatctagggtttcggtgaaacggttatttgaggtgggaaaaccctcccgaaggagctagaaacctgcagggatgctcaatacacacagagacacacatactacaacatggatgcacaaaatttcacaggatttggagtttgggcaaaatgggtggaaatgggagcctctgctcaccagaacagagagggaggagaactgagggagagatggatgggctgctcaccgagagggatgaagagaagcacaaggtcgccgtgggatcgccgccggtgaagagatggacgccggcgaggggaggaatcgccagggacagagagaaatcactggcagggagaagaagtgagcctctggctcggtctcgggctggaggcctttttttaaaacgcga

SEQ ID NO: 152240 - DNA, 725 bp, Zea Mays
ctgccttcaggcgtcgtgtcacgactcacattctcgagggtgagtgttgatatgtcgattagcgtctcgatggagagcatgatcttgcacgttcttggcgggtactacctgcaagtacttggtgacaacctcctcgtggctgatgacaatgccaagtgccgcaagctgattggccagcgaggcagcgaccacaacgtagcacaaagacctccgccgcttcgccatcgcgagacgtcagcgcctcgaccttcttcgtgcggcccgatccgatacacatggccttgagggtgtcccaagcgagctttgtggagtccttgctctccagcgactccacatactctagtggcacgacacacacgactgccttcatggctgcacaatcttcatctttgtcctcactcctcagtgccgatgttgattgcgcgccataacttccttgcccacaacatcaccttcatcaccaacacccactcgtcatagttggtgcgggtgaggactggccagttggcgctgccaactccccttacagtccgttgcaccacaaccgcctgttgtaatggtggctggggctgccacgacagaatcttgtccccgtctcagctcacctggcattggtgacgatgaaagtggctccgatgccacttgttggcagccaacaagcctgcacaggtgactagcagctcagtcacacacacacaactcagtttgggttggaggtagaagag

SEQ ID NO: 152241 - DNA, 800 bp, Zea Mays
cagataacgggcatagggtaaacaccaaggtaagatcgagagatgagaaaggtggaggcaataagaaacaaaagcacaacaaaggacgggattacaaattcgcgagccaaagaagaggatacgaccaagagaaagaaggtatgagatggaagaggggcaattttaaagggcaggtacgaaacaaacatcaatataggatatagaggtgtcaagggtacatatgataataattaaaagaataacaaagggtatagttaaggcaagactcgtgaagtgacaaagtggagaaaacaatcaagggtaagataggtaaggttccaacagaagggttgatgtaaagattccttaccgagggagataaaatgatcgttcatggattgttaagaaacaagggtagtcaagggcatgttgaatgaaatatcttaaacagacattgggttataaaggtaagcatagaaagataagagtatgaaagatttcaaggagatgagcataccaataccaagagacaagaaattgccaaaagatagcgacttaacaacagaggaggaaagggtctcaaaagacaggaaggtcatggacatataaattgaaatgtttaagtagagagtggagaatcagatgtaagtatttgaaacacgagtattgaagaatccagggatatgtgcatgtcaatactaagggaataaagatagtcaaagggtagcaatttaatgacagaagaggaataaatcccaaaaggcaagaaggttatggtcagggggcatctacaaagatgtcccaagcacaagagtgagatc

SEQ ID NO: 152242 - DNA, 823 bp, Zea Mays
gagctcgtccttctgcatctgagggtaccggtacggccgcactgccaccggcgtggtctcgggcagcaggtgtatgcagtggtcgtaggggcgggctggtggaagaccgcgtggtgtgtcgaagacggcttcgtgctgacataggagctcgtccaacagcgcgtggtgcgggtccggaactaccgctagcagcgaccgctgctgggagggtgcacccggggcgcccacacactgccacgtgacgcggcggccctcgtgcaggaaggatacggtgagcccctcgaagtcccaggtgaggggacccagcgtgcccaggaagtcgacgccgaggatgaagtcgaagcagccgagcgcgaggcctacgcaggtgatggagaagggcgccccgaagatgtcgacgggcacgttgcgtgcaaggccttcacacggcacgcgctcgccgttggccactgtaacgcgaagctggtcgcccccctgaggagcgagtccaaggcgccgcatggccgcgccctggaggaacgtgtgggtggagctggtgtccaggagggcgaggaggcgctcgcccttgatcgtcacgggcaggagcatagtttggtacgtcctgatgcctgccagagcgtgtacagagaccacaagagcgtgatcgtgagcgtccgctgcggtggcggcttcttcaggcgaggccgcggccgcatcgtcgactgccgcctcctcgtcggtgtcgaggaaatcgtccacctccaggaagaacaagtgggggcatatgtgcccacgcacgtactgctcgtcgcagttgtagcagaggccttgacgacgacgttcc

SEQ ID NO: 152243 - DNA, 389 bp, Zea Mays
tcactaagatatcatctcttatatgggttgtacatgcccttatcaacccacggttaagtcggtttttgtctcatccgggttgatcagggcgagttttgaaattgcctacagcacaacatgcagtgcaggtcgtccctgtaccgtggggatcacttgtacagggttttgcgctgggtttggactgattctacgctactggtaataaccactgttttcttttgctgtggaggatgggaccatgtgtagccagcctttttatctttcttcacctcgctagtcgctactagtcatatagcgttcaaaagatagctttagcttgtgtttccctcatttgaaccgtcaatgattgcgatacggcccaagctgtcagttactctgcctcctcggcg

SEQ ID NO: 152244 - DNA, 465 bp, Zea Mays
agaaaaatggtttaagaacacaaatggatgaattgattcattgatttactaaagatttatgttttctcctttttggcttgctggtcaggaaccatctgatgatccagccagcctggtacatttagtattgtctgtcatgatcggtgttttttttgcttcccttttggctagggctatctccaacagtcctacccattttatcttctatttcaaactttgccgtgtaaacagtgcaatctgcagtgaaggtcatatctgctggccacgggttaagggatcgcttgttgatatatgcatcaaaacagggtgaaagctagatagagatccataaaaacagcctggttccttactttggtgccactttggtaggtcacatttgttcacccttcattctaagttgctgagtgagcagaaggctagaagctacactggcccgtttcagttctactgatgtctgcataaaga

SEQ ID NO: 152245 - DNA, 440 bp, Zea Mays
aaacgttctaagtgtgactttgctcagacaagcatatgttatttaggacatgtaatcagtgctgatggagtagcaactgatccatcaaagatacaagtgattgaacagtggcctgttcctacatctgtcaaagccttgaggagcttcttggggttggccggcttctatcggaaatttgtgcggcactttgctactatcagcagacccctcacagagttgttaaagaaacatgtaattttcatttggacaaccgtgcatcagcaagcatttgattgcctgaagaaagccttggtgtctgcaccagtattagccctgcctgacttctttgtcacttttagcatttacactgatgcttgtctgactggtgtgggagcagtattggttcaaaaagggcacccgttggcgtacctcagcaaagcactgggacccagaaatcaagg

SEQ ID NO: 152246 - DNA, 403 bp, Zea Mays
gattgtttaagtacaagaaccaagtttgatattgtggtacacatagatctgaacctgtcctcaatcacgtcttggtaactgatccgtgcttttgaattcaaaaattgatgcttccttactatggtacaaacgaaacaacattgagacttgagtgtgatttgcataatcctcatcctcatttactcaagtttgtgactccaccattttctcttttgcgaaatgatttgcagtcatgtggattgaatattttttgttgaatgttcctggtagagatatccatgttaatgttcctagtataagaactaagtaccagtgtcgttcatttccccaacacaaccccttgttccttccatattgattacttgaaattggtgttagttcctctgtctaagaattggacatc

SEQ ID NO: 152247 - DNA, 600 bp, Zea Mays
gtggccgtcggggaagcaagaatggcttcgacaagctttgatgggtgcagaatgcagtcgtcgacgtgtttggcgagagcactgcaacagggacgcacgcgcggcaacgacagcaatcagcggcatagtaggcgtgtggcacgagagagcaagtagtggacaaatggaggaacgcgagcgcggattttataggggatatagaggagctcctcagtcgtcaatgaatgttgccatgaatagctttaacgtccactaatggagcagcaatggctgtgggtgaaacgtcgcgtgaggaatagcagcgggctggacgtgggcgcgcggcacggctagacacgggtacacgactgtgcggcaatggatgtgggcgttgagcggaaacgcgggcgccggcgacgtgcagcttgaaatgcggcggctggtgctcctgcgtgcaggcatgaacgaacgggagagaagaccaacagttcctaaggcccacctgccatacgcataaagagaaaaaataaataaatggagtgggtcggttgacgtgctgcttgggcaaagggccgagcggccgtgaccttttttatttaactttatttttgtttttctttt

SEQ ID NO: 152248 - DNA, 506 bp, Zea Mays
ttatggtctgtgctagctttgacattatctgaagagatgctatgcctatctcatttacttattattctcatccctgtggctgcagctatgccgcctcgtagggctcggggtagtccgcaagctcctagtggggactcaatgagtccggcggcaatgttagccgcaatgcaggccatgcagcaggagttggcccttctgaggcaagccattcctgtcgcccctgcgggtgctgcttagggtgctggaggtggagaagtgcctgggggcgccgtccctgtgggtgctgctccaggtggcggggccgaggtgccccttccagtcagtggtctttctctgatgcagtggatgggcatgaagttggattcttttgatggcagtggtactccgagcaaggcggcagattggttgacttatgtggaggataagatgaatgtcttcgagattgcatatggagatcgggttcgctttggcactcagctgctgaagggagaggcgtaaatttggtg

SEQ ID NO: 152249 - DNA, 446 bp, Zea Mays
aggatctccttaaaagtaataaatccaataaaaaagacaatgtttcaataactccctataatttccccaaaattcctttgaagtctgttgttgtgggcctcatcggatttctgttttaccgatcttcctttggcgcaaaatgtcgaacatcatgactgcgtccggatgcaaagcgccgagtcgccgacctcatctgcaccatcgtgcagcgtggcgtgaggtgggaggggcagcccttaagcatccgcgggccccagatagctgtgagctgcaagacacggttatagagcagcccatgcgtgagctcaggttcgctccatggaccaagcgagcaggaggcgccttccatggaccaagttggggactaatgggaagcgaggagactcatggaccatggatcaagtggagctagaagcatctagggcgttgggagcattcaaagcaag

SEQ ID NO: 152250 - DNA, 320 bp, Zea Mays
aggtgacaattcagaacatatttctcatgtcaagcaacatcttagtaaggaatttcagatgtctgatttggtaccgcttagctatttcttaggcattgaagttcagcagactcaaaaaggcttttatctgtctcagtccaaatatacacaagatcttcttgaccgctctggacttactgatacacgcactgttgcaacaccgatggatattcatttaaaactttgtccgaaggatgggacaccactagcagatccaactcggtaccgtcacattgtgggtagtcttgtttatctcaccatcaccagacctgatattgctc

SEQ ID NO: 152251 - DNA, 310 bp, Zea Mays
gaaaagatggcactttactgattgtacgtgctgcaacttaaatgcgcattagtagtactgattcaactattgtctgaaggaagagcttaatcgcattggtcacagtcacaggtactggtagtgcaaataaatttgtcattgctcacacgaatcattgcaattttgctgcaagtcttaaggactcgtccctttggtactgaaagaactgtcctttggttgctttgcttcatcagtcgcaaaatcagtacaactccacaacgcctaacgccttggcgttccatttttacgatcacgaggctcacttcacctg

SEQ ID NO: 152252 - DNA, 1554 bp, Zea Mays
gccacccggagaggtgccccggccgcccgacgggctgctgcgaccactcttgcgaccgcggccgtgacccccacggagccagtaggctatcgaagagctccagaggccggtggggccgaagtgcggtgaagaggaaccccccggagtcagagggggtagcccgaggcacgctgtagagtgtcatggcgggagcggaggtcgtagtggcggagaggcgaagctcctcgagaagtagatcgttcttcaccttcgcaaaagtggcaaacggcttcatgcgggtgaggatgggcgtcatgcgatcgaaacgagggctcaaaccgtgtaggaggttgaacacgaggctctcatcggtgatgggggccccgagggtgcggagagtgtccgccatcgtcttcatctggtggcagtactcgtccacagagagatcgccttgagcaagctggcggaaaggtgtctcgagatatagaatccgagtctggcggttgccgagaaactgagcctcaagggcaccccagatccggtgagccgtatcgttgacacacgaacgatgccatgaagttcgaccgtgagggtgccatggatccaagaaagcaccacttcatccatcaggagccaatcctccgtcgggtaagggaccggggagaggacgtgctcggcgagggcgtagcggcggagggtctgctggacctagtcgtgccaccgagggtactgactggagtccggcacgagaacgtcggtgatggttgcccggatgcttgtaaaggccgccgcctgagcgtgaagagaggcgcgaagagttgaggctggggcgggcgcagacttgaaggtgtcgacgcagtgatgggcggacgtgggagaaccatccgacacgcccttgccggcgagacggcggcaggtcttagtgtagtggcgctcaatggcgtcaacaaccgcctgctcctgctcaagagcacgagcggcgtcctgggcccgctggcgagccgtcgtaacggctgcccgggtggcggcgaggatggcggcagcgtcatccgaaggagcgcacagggatgaggtgatggcggagggctggctgtaggcggtcatcggtgaagtgcagtcacgcacgggagccccaaccattgtgccgagcgggacatggggaaaacccggcgccaacagctgagagcgaagcaaggcggcatccggcagggagaaggcgatggaagggaagccgagggagaggatggtggcggtcagagcaggggctgcaccgtgagtggcggcgttgccgatgtactggtgggagagcgtaggagcgctcgctcccacgggcgccggtgccagcgccgcagctgggggcggcgaggcgggtaccgcgaggacgggcgctggggccagaggagacgacgacggcgtgggggcgagcggcggtgctaggaccggcggtggtggggagggcgcagcagggggagagggcgcggtggcggcaaccaggacgtgccccggcggcgcgccgacggtggtggtggtgcgcgcggccgccaggggcgcggcgagggccgcccggtaggagag

SEQ ID NO: 152253 - DNA, 714 bp, Zea Mays
tgcttatatatggactggagagttaggaaagatgtagcaaatcttgtaactgcaggtctcactaaatcaccccatatcttctccctcatggcatcaagaagtttgccatgcccatatatgaaggttgtcacttggcgagcatgggaaatgcatttcttgaactctccaattttcccaatgtcctcaagcatgaggtccaaacagtgagcagcacatagagtccaaaccatgaccaccaacaaggtgctgcttcaaccttctaacacctgcatgaacaattttgccacaaaggatgcacttcaccacatatttttgttcaaatccggccaataacaatagttccatgctggatccttcgattttgcctttctcttaggatctttgatcgtatggctgctggcttcctaactccccttgtggtcgatctgcagatgcatcttccatctcttcaaggcctcctgcagatccgatgagagggcgggggagggtgagcagaggccgggcgagcttgttgcgagggcgggagagggggagaagcactcaccaagtcactaggttcctgcagattgatgagggtggcgtgcagactgcatattgcactggaggggcggtgtgagatgaagggcggcaagcgaggaggggtggccgacggcgtgagaggggcggccggcggcgtgagacgaggggcttccgacggcttgagaggaggggcgg

SEQ ID NO: 152254 - DNA, 645 bp, Zea Mays
ccattttgatttgcagctccggcccttgctaaggcactacctctatggcgtccagggcgtggtattcgtcgtcgacagcagcgaccgggagtggattcttcgagccaaagatctgctgaacatcattctggacgaggtagtaggtagccggatactgccaggtttcagtagctacgcctaggggactcatggtttggttctgaatccggattgaactaatgtcaggaccagttcaggaatagggatctcgcgctgcttgtgtttgcaaacaagcaggaccggccgaacgtcatgagcgcagcagagatagcggacgagtttgggcttccgtcacggctttgcaaccgtagatggtctgtaccttccccaggtccctttccctcaactctcctttcagtaaaaatcgatcatccagattgcttccgcaggcacattcaaagtagttctgcgatctctggagaaggcctccacgaggggatggcttggctctgcaccaacattcgataggaccaagatcctcctccttcacaaaagactacagtacaaaaggggggcatgctgtttatgtttttgcaggcctaaggaattgtaccagcagatgagatacatgattatgattgctggacaaggatagtttgcagtgtg

SEQ ID NO: 152255 - DNA, 282 bp, Zea Mays
taaagatactgaaggatctgtttgaccgcactcaagtgcacgaggatcatgcatgtctgagacagacctgctagacaacatacatgatgtcgaatatggtaaaggtgagatactgaagagcgtcgacaagactgtggtaggtagtggggtcgttgataggggcaccaccagcggagagcttggcctgcatgtccaccggagtcacacaagacttggaatccaacatgccaacacgctcgaggatccatggtgtactgtcgcttctagagaaagaggccatct

SEQ ID NO: 152256 - DNA, 320 bp, Zea Mays
cctggccgtcttatttagccctggactgagagtttgtcgacttcgtcttcctcgctgctcatcacttcggttttgccacccaccgtcgccatgggagcatttgatgtgctgttgttgcccaccgcgacctacgcattgtcagcggcttcgtaaacccaggttaccattgctatattttttgtgcagatctgcagtgccatcacttacctgttgcagactccccgtagttgtcgccttttctcccttctgtgcatgtggctgtgtttacttcctcccctccgaacttttcgttgtttctttttatttttgtaggacctggt

SEQ ID NO: 152257 - DNA, 315 bp, Zea Mays
gcggacacgacactgtcgtcggcgttggaccccggtgttggggcgaaggctgaccgcccccctcgctcggttcatttataacgagagcaggataaatcatgacggagggaaagcgaagtctactccaaccaagcgaaggccctaagacggagggagcatccaaggcaagcgaaggctttgccggttcctggtgcggccagtaatggcgaaggccttgccaatttccgaagacccagcacacgcaacacgaaggctactgtcacaacccgcacactgttgttaaagcgggcccgtgtggaaccgccctgagtcgcc

SEQ ID NO: 152258 - DNA, 692 bp, Zea Mays
gctgcatcgtgcctgcacacctgcagacatgcccaaacaaggttattaaaacgccaaaaatgttgaaacgctcatgggtggaattttaatttttaaacggtttaaacaacataggtaaatttcaatatatcataattttagacaataacatagtcaaataccaaacaaccaacataagttcacgtaataatattgtgcaaaatgacatgtccacaaccacattaccacaatagcacaagttcagctaatagcgagccgacaaccacaaacaaagtgcaatgagatgtctagtagttcacaatcacaaacatagcacaaaagcaactaaagtggaatgcaatgtccacaaccacaagcacacaagtgttactcaagcactcaataaccatcatccaaatcatctaaagtaacatcatccttgtcttgctcatcagcacaaccaccactgttgtttgttgcttcttcatcatccatgtcaaggtcatcaagcacaaaattttcatcgtcttcattctcttcacccacatcaagcccatcttcatcatcatcaagaattggctaccatgagctctcctaggaaagttgtggcctcgaagttgtgtggatgcaccgacgacatgatcaacatgcattgctctgatagttaagaggacaccaatagaatagtactccactgaaataatgggctaatg

SEQ ID NO: 152259 - DNA, 513 bp, Zea Mays
attgcataccctgaattggttgcatgctcacgaccaatctcgcaaatggatgcaaatgattaaacaagcctttgaccatggatacaaaacaaaagttaaactgatgtatcgtggacatgatatgatatatcactaattggtactatcatctagtgattattagtttattactatgcttttggttcatccgtcagcaactaaaaactgagtctcttcttaattatatataagatgttccttttcccacgaaccaagtacgtgctacttgaccaactaccggaccgaattgcagcagctaatttgggacagctcacgccgaaattaaaaccttgtccaagcaataatcagtgcttctagacgtagaagcgatataatcattgtgttcgttcatcgatctgtcatgaaaacgacgcacgtacgtactcctacgacgtgcttcaaagattcctgggtttaataccacagctgtagccgagaaccgaaagcgatggtcgcacgtacgtttccagaggg

SEQ ID NO: 152260 - DNA, 394 bp, Zea Mays
ctccttttaaggtggtgtatggttatgagcctccagtggctgctgccccagctttagacacttccagtgagactcaggtgtctgaatttctggagactcgactacgtcacatggagatgctgaaagtgcaactggctaaagcccagaacaggatgaaacaacaagctgataaattgaggactaatcgaaagtttcaagtgggagagttggtgttgctcaagttacagccatatgtgcagcattcagttgtgtttcgatcatgtcctaaattgtcttttcggtattttggtcccttcaagatcgtgaaggttattgggtccgtggcttatgaattggaattgcctgatggggctgcgattcatccagtttttcatgtattgcagttaaaaccgtt

SEQ ID NO: 152261 - DNA, 432 bp, Zea Mays
ccatttttggcagggtttcttgaagtgttttttgaacttaaagtgataaggcagccgaacgagttcaccctctttcttctcttcttcaagcttcggcataccccacttcctcagcgctggaaatactatgttggctaagtattcctggactaggtctctagttccaacatgttcagacacaattctaaactcatacacaacatcttggcatggatcccccggtgtcatgttgcattaaggcctagttagcccgaagattagcttcaacgggctctgaactagcttctccttttcttcatcaattttaacataaaaccattcagatttccaaccggtcggccatttagtacgatagctaaccaccggtgtcttcatatccttccgataagcaaaattataacagccgaagttctcatgcaatctatcttctct

SEQ ID NO: 152262 - DNA, 806 bp, Zea Mays
cgcgcccgtgctgagaaggttgtgcagccggaacgtcatagcacccggctcgctcagaaggcctcatccaacttcgtcaacatgactgacaaggctgttcagcgaaaggaaattcagaattccctccagccatgttctgctgctgtcaagaaagaagttcagaagaaggggctgctcaacaagaccaaggccccaatctcagtcgctgccctgcgcaagctggtgcgcgctgctggcctgggttgctctgcggctgacgctgtgggagtggtgccgccggccatgggatgaagatcttcagcctttgttccaagcgcactttggaggtcggcgtccgtgcttttgtgtctgtcgccgctatctgctcgtcctgttgtgctgttcgtctctctgttgttggtcggctctgtgagcctgttttctgtcttctgctgcttaggctagactcttctgggtggcttgctaatctttgtcccttggtgttatgtttgtgtggtcatggctagttgtggtaagaaccttgttgtaatgtcgtggaatgtacgtggtcttggcgactcggataaatgtgttcttgttcgtgatgccattgtctcctcttccccagctattgcctgtctccaggaaacaaaactcagcgacgttactgtgttcaaggctgcctctttcctcccttcgtctcttgcttccaattttctgcacatcccggctgccggtacccgtggcggcatcctcacggcctggaacgaaaatagtctacagctaaattcttacattattaggcgccatgctcttacttgttgctt

SEQ ID NO: 152263 - DNA, 528 bp, Zea Mays
cacgagtctctgacaccactgtccacctaagctgcctcggtcagcgacgctgcccgtcggaccctgtggtcgctcagccacacctaccggcagcagcttcagaacacgaggttcaggcatcttcctcagcgtctgcgtggaggaagtcagaccagcatcgtcccaggtgaagctggtgaggatcgcctcaacaccctagctggtgtagtggccggtctcaacaccgacctggatagtgccaccctggatctctttagggtgcatttggagctagagaatgcccatgccaggattgcagccctggaagcccaactgcaaggactggatccgcccgaagctcaggtccccgccatggcgttgtctcctccccgcaagaggttgcgctatggggagcccgaatccgtcactaggctgctttagctattttgagatatgatgtaataagttatgcttcgcgttagacgttgaacactcttttaagttatcatattaataaataacaaccatgtgatggtgattggttgacat

SEQ ID NO: 152264 - DNA, 383 bp, Zea Mays
atgctattctttgaacacaatatttacgagcttgataggcctgttttggaatacaaattatgtgtccgataggtaaataatttatgcaatgattcttagacctttggctcttactgcttcaaggattaatgtgtgactatttagccttcaatccaagcggtatgccactaatctcaaaaattgcttctacgcaatatttacttgacaatttatagatttgttgtttcttagagatattttttcatgtaataggttataaggttgttcatgacatatagaggtttgttggtcataatttatactatatgaagattatgggagtcagccctaaattcacattttctgcaatctacagattcatgtaaaaaagttcaatctacaac

SEQ ID NO: 152265 - DNA, 572 bp, Zea Mays
gtggagtactacattttttggacagcagcattgctgcgttgtagaggactgcagtttgtggagcttttgactgtgctttagcatctagaagacaacatctttgtgctgcagcttttgactgcactttaacatgtagaggacaacacctatgctacagtagcacctagaggacaacgcctttgtgctgcagcttttgactgcactttatcatctagaggacaacacctttgtgctgcagtagcatctagaggatagcacctttgtgctgcaatgtgtagtgtagtgtagtgtgtagcatagcagcccctcgggctataaaatgtaaccccaacccctctatggggtatgacatttgggtactgtgtgggaaataaacgaaaatctaccatatgtccacaaaaatagccaacaccaagctcggaaggaactaatccaaacttagcttcaataccacatttgtagagtactggatcagacttcaactcttccgcccactcattttttttctttttcctttgcctctggctctggctaatgggacataggaccatacaaccactctaagaaatgac

SEQ ID NO: 152266 - DNA, 418 bp, Zea Mays
tgctgcctatatttcagagtttgagcaggctagatatggtgtcatagttcacaacccacagtatgatgaaacatattttgtgacccaatttattaggggcctcaaatttgaaatacaaagtgtggtagaggtacaactgccttcaacagtggataaagccattctgttggcccaaacccaacaagaggtgctagagaggggtaagaccataagatgaaggttacaaggccatatgtgggaggaaaaatgttgaatactagagttagaggtgaagggaggtctctaacaggaggtgctgatttatccaaggaaagacaaataagggagtttagaaaactgaatgggttgtgctatgcttgtggagataagttcgaacctggtcatcttgatgaatgtaccaagaggggacaagcacaac

SEQ ID NO: 152267 - DNA, 471 bp, Zea Mays
gaattacttttcccagttgcaattaactaaagtaggacggacttgttagaaagtcaagtgtgtcggggtggtcaatactctttgctttttgtttccaatgaaagacatcagccgtttggaaggcgattgggaggaccttgttgctgtccctgtccacaagcaagttgaggggcagctgggtaggtgcagcgcaggaacaagcaacaacgactaggatgaaatatttgattctcttggaaagatgaacaaataaagccaccccatcatcgatctacgttgctttacgtttctcagtggttgccacgaaacagccattatattgatcgcgtgccagcatacatgggctgtcctaatcagccgagcaaataaagcagattaaattagccactctcgtcggtgaatgaaattaaactaccctttcatgaatgcatggaacaaacaaaagcacagaaataaaggacgatacaggaa

SEQ ID NO: 152268 - DNA, 302 bp, Zea Mays
ggagccataaattcttggcaccgatttccctcctttggttgcgagtgcctctgttcaagattaacaggggcatctgcttgttgtgttgcaatacaaaagctgtagggagtgctagagcttgcaccagcagcacctcttggttcactggcctggagctaaaattaattcatttagcttcctgttgacaaagcatctttatttagttaaagtttctgcaaagatcattcatcaaaccttcctatatagttcctctttttgctgtgacatgaaatgtactcttctactgagctccatgttttcct

SEQ ID NO: 152269 - DNA, 415 bp, Zea Mays
gaacgtggagagggcgacacacgaaaccgctgccagagatcgacatcatcggttgggagaagactctgagcgtccctagcgatgcgggtgggccgcgggcggaggtggttgcagctggcggagcaaggattgtgcgtgattgatttagagctcgaaggttactgggcgacggtcagctgtgggcccatgtgatcggacgatccagattgaccgaaggcagaacgacagaaccagagaggcaggctacccttgcagcgttaataagtagtagataaaaataggtgcagtcttagtgatatccagagcagctccattctttaatcatatatccatcagagaaattatacaatgagtcagtgacatcatttctgcaggagtaatgttgcaagatgcaagagtttaaaacgaacaccac

SEQ ID NO: 152270 - DNA, 454 bp, Zea Mays
attaatttggcataattatattcataatcgagcattgcatctaattgtgctaattcatttgctgctgaattttgctttgtttttatcagctgaaccctccaaccaactgaaggctacaaatactcctctgtttggacgagggtgaacatgagcttagacttgtcctcattcgatttgcaacgtctcgacaacccttgcacgatctgactctactgttagatcgtccgtacccatagtttatccaaaagaattattttacacggtatgtactgttatgtgttgtagattatattgttagaaaagtgaagtttgaatatataggtatagagatggataaactgtcatagatttagtcttagaggtacaacaccattccgttgcaagcctctgcctcaacaacttgtgccatttaaaatcacttgtcgtctctaccagtctgcctcgtgccatgtaa

SEQ ID NO: 152271 - DNA, 385 bp, Zea Mays
caagccatagagtgacttcttaagtttgcacactttcccagcagtctgctcatttgcaaacccaagtggaatttccacatagacctcttcctacaccatgaagaaatacattcttcacatccagctaatgaagcggccaaccagaattggccacacatgagattaaagtcctcatgatgaccatttttgccacaggtgcaaaggtctcatcatagtcaatcccatatgtctgactatatcccttcgccaccagtcttgctttgtacctgtcaacctttccttcaggactctactttactgtaaagacccacttgcactccaccgccttctttccttctggaaggtgaacaagttcccttgtcttgttcttttgaagggaaagcag

SEQ ID NO: 152272 - DNA, 1270 bp, Zea Mays
ctattgcaccgctagcgtgcaccggtgattgggtgagcaagcctttccaatctctcgctcttgtgaccctacgccaagagtgggtgaataggttttttttggaaagcacatttctattaggccctcaacactgggtccactcaaggtattatattctaaccagttattttttttgtttattctagtactatgttatattttgtgtattgcatgaaaacaaaacaattgacatgtgtcaatgcaaaaaaggcatgtagtatcttctagaaggtcccatcttataaagtatttggctattttttatatatattcccttatatgtttgctcatttatttttttagagtccgcttcccttcattcctggcctcctcagtcatctagtttcaccagtgttttggttggagggaataaagatgccatgttgtcagttgatgctcgatgcaattatgtctatgaatcatactgccaccagcacaccatcatggttgcgtcgtttgcatgcgaaaaaaggaatatctgtgccatccaacctacaaattgatgacttcatcaatggagatggatcccaaccttcactatgcttgcctgtaccaacttcttcctaccaccaccataaaaatcttcttgacatttccaaaaaccaacatcaaaaggctactgagaccgaacaatgtaaaccacctaacagtcagacacaacaaagcccaaggtttgaaaaacctcacatgccacaaccacagcccaaagccatgatttctaatgttttggggaccccttccattgatcccatggataccttgcccctcaaggcttttcgcaagaaaaagaaatccaccagcagcacattgtgcaacaaatccatcaataaagagatgcagaccaccttcatgatgtcaaacgttctagatgtcccctcatgtaattcgatagaaaccacaccttataatcccatatgcaagcagccaaaacccaataccaatgtcaccaatgctttagcaatcccctcctccactccaatgaataccatacagcctcgcaaaggtatgaaaatgaacacaaaaggaaaaaatcggtatgaaggcaagtggaatggtaatatttattacaccatcgtcgacaccagtattgataaatgcaagggcaccaaaaaatcaatttgtagcaatgacttcatggtctctagcaaaaatcctaagcagacctttgaacaacatgattccatcataaagggaaagcgaaggtttaatctcctctccaatctacaagaaa

SEQ ID NO: 152273 - DNA, 488 bp, Zea Mays
cggagaggagcgagagcaggaggagcgcgaggaggtaggcggacttgaagaggagcagggcgagccagtcggaggcgaggcgggacagcaagcggcgctgcgtgtcggtgcccggggaggatgcgtccagggccgtgtcgtcggagtcgatgtgggtgaagagcgcgtgggagatggcgacgtgcaggaggaagagcgcggagaggggcagcgcgaaggcggccgcgatgcacgcgaagagcgggcagtgcgggcctcggaggatctccgcggagaagcggtagataccgacgacgcccaggaactgcagctcctccagctcgcactccatggctagttggctacctgcctaggatttggagacggggcggattggcgctaggagacgattgaatttggaggagacggggagggaggggaggctgtggcatggggattagggaatggggattttcccgcgctcgcctctaggactggggcggggcacg

SEQ ID NO: 152274 - DNA, 681 bp, Zea Mays
gccctcgatcaaaaagggaagcaaatacctagttcccctcacaaatgtgcaaaagtagcgtgattaaggggtttggtcaaaatgtcagcaagctgcaagtgggtatcaatgtggcgcaaatcgatgtcgcctttctcgtaatgatcatgaagaaagtgaaagcgaacatcaatgtgcttggtctttgaatgcagcacaagattcttggcaacacttatggcactcatgctatcgcaaagtagaggcacatgagaaaacttcaagccaaaatcccgtaaagtagccatcatccaaagcaactgcgagcaatagctagcggcagcgacatactcagcctctttggtagactgtgcaacgctagactatttgcgcaaagactaggaaaccaacgaagtacccaaaaactgacaagtcccagaagtagacttacgctccaagtgtcatcccgcaaaatcagcatcagaataaccacacaaagacagaacaacataaaaagagtaccacaaaccaaacttaggagtgaagcacatatacctcataatccatttcatagcctatctatgagaagtgtgtggggaggcctagaaacgagcacacatacataatgcaaagtgtatgtctggcctcgtcgcagtcaagtacagaagggagccaatcatgctcctatactccttctagtcc

SEQ ID NO: 152275 - DNA, 330 bp, Zea Mays
acgacgggccttcgtcaaccatcgccatcacctttttcccccggcgaataacagcatcggtgtggtcgtccccagggtagccagcataaggcaaatttttcaattcaaagacgcagttcaaccgaacgtttgacccacagatatcccaactcctcagggtctccatcctcaacacatacttccccacaatcttcactgcctcggcctccacttcgcgcacaaatgcggccaagtttagaccatgcaaatccacagcgaaggcaggacttcgcaccaaccggtcgcccagggtcggcatccgctagaggcatgcttcgcccagcacccagc

SEQ ID NO: 152276 - DNA, 748 bp, Zea Mays
ggctctttcgatctgtttcgtctaaatcgcctgaaatctacgtggctccaaattgctgaggtttttgggggcacatggttactatgtggctgtgcgttttcttattatccatttctatgcttgattgcttctgacaaacaaaaccagtagctacacatcctatcggtatctttgatttgaagctctaggaatgcaagagatgtcttgtgcgcccttttcttatgcggtttgactccatctcaggtgatctctcgatcaattgctggatttcatcttcttcgaattcattttccgtttctgaataggcttctacgcctattcaattttatttgcacgcagaaatgcgaaaaaaatgtatatctaattcttatgtcttatccttataacgatcagcagatccatgtatgtactctaaccatttgtatatttaaattctgattattgttcgtctggcgctgctgtaatgttccttgtgcgttaggatttagaacgaagccgcatatattcaacttaatctctatcctctctctttttggctacatagcactatatttttggtggctagtgctaataaagtatgacagtagtggagaagttggcaccacacggactttctttatttatgtttacatgtgatagcttgattttgtttggtatgtcaatagcgatatgataaatacctataaaagcctgcttctccgtttgggtttattaaatattgatttaatggactcttatattgtttctt

SEQ ID NO: 152277 - DNA, 273 bp, Zea Mays
cagacattcggcgggcggcgactacagaggtatcggccgcttcatggagcaccagaggttcgaggcgtctccgtacctgcgggacgactgcttcaccatcaagtgtatcatcggcgccgtcgagaggcccggcctgccgccgctgccggcggcggcctcggagctgcaccacgatttcgaccgacttgcggtagacggcggccgttcggaggacgccatgtccgacgtcgactgaggaagccatgctgctgtgcactgtgctatgctcctctt

SEQ ID NO: 152278 - DNA, 423 bp, Zea Mays
aactaaagccacgagatactaccgctaatcgacgtaaagcggggcatgcagttcacacttgcgagtccggtctgtgactgcaaaagagatagatacagctgttcagttcaggttcagccttaccccacctctgctccggcgagagagagcagcagcatttagcgtaggcgatcacgagcgctgtatttggcgtccgcagtgctggagagagaagatagagttggatttacagtcaccgctgcaggcctccagctactgcaaaaatttacgggttccatttccagctctctggtgtgggcagcctaacccaggaatccgaacaacgactatagactccatgcacaaactatataaaattgaagtattcgtgcaaacaaacaggacaaccggaaagaaatggcagccggttcagacacagttgat

SEQ ID NO: 152279 - DNA, 1043 bp, Zea Mays
gccttcgccgagccaaccggtctaccaccagcccggggtcacgaccaccgcattatcctcaagcccgatgcttcaccggtggcggtgcgcccatacaggtacccggtcgcccacaagaacaaactcgagcgacagtgcgctgccatgacaaaacagggcatcgtccgccgcagtgactcaccgttctcctcgtcggtcctcctcgtcaagaaaccggacgggtcatggcgattctgcgtggattaccgcgccttgaatgtgctcaccgtcaaggacgattttcccattccggtggtggacgagcttcacggcgcgtgcttcttcaccaagctcgacttacgttcgggttaccatcaagtgaggatgcggcccgagaatgtgcacaagaccgcgttccgtattcatgatggcctgtacgagttcctagtgatggcgttcggcctctgcaatgcgccggccacattccaggtgctcatgaacgatgttctccgaccgttcctctgtcagtttgtccatgtcttctttgatgacattttaatctacagcaagacatgggccgaccacctgcgccatcttcgtgccatcttatctaagcttcggcaacaacaactcttcgtcaagcgcaccaagtgtgctttcgacgccacctcggtcgcgtaccttggccatgtcatctccgaggcgggcgttgccatggatccggccaaggtgcaggccatccatgagtggctggctcctcggtcagctcgagcggtccgcggcttcctaggcttagcgggacactatcgcaaattcgtgcacaacttcgggaccatcgccacgcccttgactgccctccttacgaaggaaggtttcgagtggtccgacgcggcagcagcggccttcgatgccctcaaggcggctgtctcctccgctccgaacctcgccattccagacttcaccaagtcgttcatcgtcgaatgcgatgcttcctcgcacggcttcgtcgcggtcctcgtccaggagggccacctggtggcatttttcagcaggccagtagcgcc

SEQ ID NO: 152280 - DNA, 805 bp, Zea Mays
ataatcatgaactgctagagaagctagtgaaatttatacctctgaacaggggcaaatgaggagtaggctcctgcttggtcgttcctaagtcagctgaaccaaaaagagaagaaccaaactgagaatctactgaacatgaagatgttggcacacacatgaaaatgaaggaccagcgcagactaacctggacgtcggtggtcgcgacatttgggggacaattgttgtgattgcggtaccgagatcgtgctttccaaatcgccgacgtagattgtgcggtttccaaatcagccgatggagatcatgcacgccatagccaaatcgggcgccattgccgcggcttccaaatttgtgggtgcatttcctcggcttgagcgcggaggggaaggagaggcgggttcctggcgggtcgggcggttgcacggaggggaaggcacgatggatcgtgcgaggcgggggcatgacggatcgtgcgaggtcatggcagttcgtgtggctgcgcggacctcggcttggttgtttgagcgcgaaggggaaggagaggcggggtcctggcgggtcaggcggctgcggatctgcgcgtagggttagccgaggcgggggcatggctgttttgcggaggggaaggcggcgggtcgggcggttgcacggaggagaagcagagacgctggcatggaggatattgcgaggctgaggcatggcagatcgtgcgaggtgggggcttggcggttggtgtggctgcgcggaggggaagaccgacgcgggggcatggacgcgccaggcgcccactgtcgaagcttaattagta

SEQ ID NO: 152281 - DNA, 326 bp, Zea Mays
agtggattggctggtgccacgttcatcgcgggcggtacgcgggttcctcggcttggcgggctactaccgaaagttcatccacaactacggctccatcgctgcaccactcaccgctctactcaagcgggacgactttgcatggagtgtcgaggcggtcgcggccttcaccgagctcaaagccgcggtcaccaccgcgcccgtgctgggcatgtcggacttcgccaagcccttcatcgtcgagtgtgacgtgtcctctcatggattcggggctgttctcatccaaggcggtcgcccgatcgccttctacagccggccagtggcaccac

SEQ ID NO: 152282 - DNA, 399 bp, Zea Mays
acgaacccgcgaaattccatttcccagttctcaccatttcaccaaccgttcactccctcgccggcgcacctcgccggcgtcgtgtcctggcacaccaccaccagtgcacggcacttctatcttcgtctccttctgccctcccatccttcattctgccgctcggaacgttggatgtgtgctgctccagatcacgcgggagggcaataagccctagctcggccatcccgggatggaggcggccgcctccagcctctcgacgctgctctccaccttgcgcgtggacgggccctggacgcctccgggaacctgggagtcggccatccctgagagtggcgccgctcgcgttacagacctcggaggacgcctgcagccgatctacgagctcgcatcggttactgt

SEQ ID NO: 152283 - DNA, 610 bp, Zea Mays
cgccatccggtttgaaataagtactcttcggattctgtagaaatcttgcagcttcgaaactgaaaagaaaataatagaagttagtgatcaacaacattaatgtttcatgatgttctatattgtactcgtgcataaatttaaatggaggtagccaattctacacaagaagcaagttaacaacaatatcattgttattggacatccctgcgagatcaattgcccctgacgaaacaacctaagaactggatgtgctactgaatgtgtatagactataataatattgtactcaactccaaaccactccctctccccaaaatcgatctgcactgaattgcatgtcttggtgcatccagaaaaccaaccaaattacaacactgatcggcacttatctgcactgaattgcactgatgttgaagtaccattacacattggacaagcttatttaacatgttgcgccgagccaaaccagaaatgtgcctcttctctaaccatccccacccaaactacatcaacctagaaacaaaaactgatccacgccatccggtttgacccaaaccaattccagcttcaactctactaggtccttgatttaattatgtgtcactatgat

SEQ ID NO: 152284 - DNA, 561 bp, Zea Mays
ttcgcatcgtggcgtaattagatcggctgggatgacagattaatcggctgccggaattcagttgagagcttgggattggatatgcaaattcactacccttggtttcattggttgatttgagtagaattggcgattttgcacgctgatgaaaatgtcatgagaaggaattgagcgaaggacagattcatgctcacatgctgctactgctgatgttacagctttcgctttctcaattcttattagattggactatcggtgataatgaactgacaaaatttaaaatatttgagccagctgttgcagcatttgtagtgcatattctagtagccagtacatgccagagcagaattggttgctttgactgatatatgtctgcataatgtttcctagtatgcattgctttggtctatttcgtgccatgaggctgtccgcgccccattccaaacaaatactgttcggccactactatctgacctactggttcattgtttacaaatactatcccacaactaatgtctctccatgtccatgtttcgttatttaattaagtatatactcatc

SEQ ID NO: 152285 - DNA, 607 bp, Zea Mays
caaatgaaacacataccatattttctgtgtgtgaactaaaaaggaatactgtgacttatggtgcccataattgtcataaaaattcaaatcgcctaatcaactcaccaaattaaatcctctaatcaactcccctaatcaaatcccttgatttatgacggatacatggacatgggggttgttagttggtatatatctaacactattttatgctcaaaactgaggattttacgatcaacgcatcagagttatcaacgtttctcacattggctagctatttactctcaaaatgaaggtttttacgctcaaacctgaaggacgaccattagcgtcccacgggcgcaataaaagggaatttcgtgatttatgatatccataactatcataaaaatcatcttgtttaccattgtaacatcatttacgtcatatacgacattatttacgctcgaacttgagaattttacgcaaaaacctaggatgcgcacacacaacatcctgcatgcatattttttggatctaaaaccgcacgtgccataaaaatcgaaaaccgcatgcgcacctgctggataacgacataaccttccataaaaataggaccccgcgtgcaagg

SEQ ID NO: 152286 - DNA, 274 bp, Zea Mays
gctagcgacacacgatgtagaaagcgtcacctcactcttttctctagccgacaagtgcaccaaggctaccaagggacatggatggcactcgaccccacaggccaagactacccaaataggtggctcaagtgctactgctcagggtaccaagaagaagaagaaccacgatggcgagaatccactatatggtgctccggtcaccatagctacgggtgggggttagggtgcgcatggcaaacatccacgccagtagggtggcaacagtgggtcatgc

SEQ ID NO: 152287 - DNA, 996 bp, Zea Mays
gcattttcttgccttttcttgttttatgtaactatgaaaaaagaatgacagggaggctctttgtttgcttcagagtgaaagagagttctgtacaattatagtacgaacatttgtgctatttggttgcttgtgggtgtgaaatcatgctgtattaaatagcaacacaatggcaatactaaaatgatatccatggttgataatagctactgtacatgtaagcattaaaccactcgcagacactaaaatgacaaacatgttctcgttcgttagtcaccagcatagcatgcaggtaactgaaattccctgctacgagatgctgatcacagtggcggtggcggctctcgatggctccaaggcgacgcactgcaccagcccacagagcatgctcaactcctggtcgctcgccgccgccggcggcttcttgcaattgtcaccgccgtagccctcaggcgccgcgcaagattcgaggtcgcagcactcctcgaagcggtagcaggtaacgaggtggtcattggccatgccgacggcctgcatgaaggcgtagaccaccgtcggcccgacgccgaggaacccccgccgcatcaggtcctggctgatggcgtcggccttggccgtccgcagcggcacctcccgcgtgtgccggtatctgccgaccgttggcttgttgctcaggaagctccagcagtagctgtcgaacgatccgaactcgtcgatgacctgtcagcagcagcgtatgtagtagttgcagaaatcgatcaatattaacacttgcaaattattggtaataatgtttcggctcatcaaaatttaggtgcggggcagatggataggatagaatggcgtgctgcgtgcatgatcaccttaccttcagcaactcacgtgcgttttcaatgattatgcgcagcctgtgttgcgacagcagggagctagcggggctgcttggcgccaagaacttcttctcgttcagctttgccaccaactgagggtcaaagttca

SEQ ID NO: 152288 - DNA, 603 bp, Zea Mays
aagtcgtggaggcattatctttatggcgaggcttgtgacatttacaccgatcataaaagtctcaagtatattttcactcagaaggagctgaatttgaggcagcatcggtgtctcgagttgattaaagattatgatttgtccattcattatcacccggggaaggcaaatgtggtggctgatgcccttagcaggtccggggttccaaaagtggccttgtcgttgatcgctgatctagaccgtttgggggtcgctttgtgctatgtcggcaacgctattgaggagactcgtatgcttattcaatcttccctcatggagagagtgtgtgcgactcagcagcaggatcatttattgcaggaagctcgaaagagggttggcccaggagttctccattgatgagaatgatttggttcgtttcaggggccacctttgtgtgcctcagaaatcagaggtgaagatggatatcttgagagaagctcataaaacgccttacaccgttcaccctagcgaaaccaaaatgtaccgagatctgaagcaaaacttctggtggaagcggatgaaggttgacgtttctaagtacgtggccgcctgtgaagtatgtcagcg

SEQ ID NO: 152289 - DNA, 743 bp, Zea Mays
gcaggagactcacctgcacaagtatcttgccagcttcaaggcagcttcaagctcaaagctcacaggcgaaactctacaccaatgagaacagctacaatgttagtgtgttaagtaattttccaagtaaatagcctgttatagcatgccatacaggattccagttcccactgttaataaagaactatcacagcagggagggggaaatggacaggcaaagaagacacaaaatatacaaaagaacaagatagaatgtaacatcattcaagccctcataaattatcttcaaaacaaaagagaataatggccaagaaaatttaagacaggaatgcaacaatgcaagaaagaactattatagaaatcagtatgatctcttcaatataccagcagctcaaggaaacagatgaaatacttgaatcctttgtgtacctcagaagaaacaaaatgagcttatgcagaatgtaacagaactaaaaaaaggaaacagccatatgggacagaatgacatacgcatagatgattaagaaagaaaacaacacccctgaaacaatacctttgagcattatcttgtaaagtggctcttctatatagctggataatggtgtaatagcgatatttgacttcatcctccaaaacaggatcactttcgcccatcctatctacctgttcacaaccagaatataatcacctaaaatggtcctggaaaggttgctgtcacacccggattttaggagtccaaaacccag

SEQ ID NO: 152290 - DNA, 528 bp, Zea Mays
gaacctcaatacggggtagcggatatttattcttgattgtcacttgattcaaagcccgataatccacacataacctcttgcttttatccttcttctcaacaaacagtactggggaagcccaaggcgacctgctaggcctaatgaaacccttagccagcagatcatccaattgccgcttcaattccacctgctcctttggagccatccgatatggggccttactaataggctgtgtacccggaatcagtttgatttcgaaagctgcatcgtgatccggtggaaggcctggaagctctgctagaaatacgtcggcaaagtcacacaccaccccgatgtcctgcacccacaaggcaacctcaccctccaccaccatggagaaaaagattcctgacttccttgaccggtgatccggaagcaattgcgccaacaaggataacatgaactttggggaacttcccaagaataccacctccctacccgacggcgcctgcaataacactgtcttccaaaaacaggatataactgtgc

SEQ ID NO: 152291 - DNA, 438 bp, Zea Mays
atgtttttgctataactgcagcatcaaaataaagagtacatgaccatgcaacgggtgtgaagcatgggctgaaaacagcagcccagcctggagcacagacgcagcctgctattgcaggggagatggctttcaggcagacaacaacaaaagttcgggaagacaactcgatacctaccaagtctaaggcaggagttgttgttgatatgtctatgcaccgtcagtaactgaaacacagaaacatacccgagcgtcgtcatcagccttctctgtgtcgacaaagcccaagcgttggagcactcgtcacatggtggcgatggatggtttggctaccactcacgaggactccctaaagaaggcaatgagacatcaggctgcgcacaacctcgacgttcatgcaggtaactcacatcagaagtctttcctttcctttgataatac

SEQ ID NO: 152292 - DNA, 873 bp, Zea Mays
ggaagacacacgctgagcgagctagctgaaattcgacgatgatttgatggcaaccaacgacatggctgatctctcccgcttttaattcgctaagcacacaatgcaaatcagtatcacgccacacatctcacactcttcttttgtacaaagctagctagatgctcatggatcgatggatatctgcttcatgaaatcagtttgttggtcagcggagggtcttgatgcatcagatagggaagagttctataaactcaaggcaaatgaaattgttgatatggtagtggacaaatatataactagatgttaatatgttattgccggtgtttaaaatagcgggctaacccatttatccccggctttctccagcggctacaaaaggatatatcgggatatatctgcagctaaatgttttagcggttttcactagacagtagacacttagacagatcctcccatgatcatgcctatcccaaattccacgaacagcctcgacggcccgatcctagttcccagacctcacactagccgctgattgcaacaagcaaagcagcccaaaatacatttatctcacaactagccgctgattccacaaacatccaagtcattgatctcacaactcacattctcacctacaatttaaaatgcacctcgaacaaaaacagctagccgctgattgcaacaagcaaagcagcccaaaatacatttaccattcacaaatgtaaacagctagcaaaacattcaccagaaataatatgcacctaccagaagtccagaacatccacctacctcactgtagcacgcacattcagtcagccattcagcaagcaaatcagctagccgctgattgcaacaagcaaagcagctagccatgca

SEQ ID NO: 152293 - DNA, 717 bp, Zea Mays
gggagagagagagattgatagttgatcttgcttgtccctttcataatctgagtacaaggtatatataggccaaccgaccaacaacttatggaaacaaactcatattttctggaaacaaactcctattttctgggaacaaactcctaatcttgggccctaatctctcctagccgctaggatcagacctgccctcttgggtcgcggtgatcgcggctgctgcgcgcgctcctcgcgctctgcggccatcacgcgccctgcggcgtctcgtgtacgtcgtgccccacatgacatctctcccctcctcgtgaagcagctcgtccccgagctggaagagtggaaactgcttgcgaaaagcgtcgagatcttcccaagttgcagactcggtggttcaccacgccaatggacgagcagctggcggactccgcgcgccaggcgggtctgctccacccgaacaggctccggggtgaccactccatggtggatggccgacaaggctggtggagtcggcggaggcgtgccgacgaacttcttcaggacgttgacatgaaaaacgtcgtggatgggagtctgtggagaaagagccaggcgaaccgcgacgtcgttgatcaactcctcaacgcgatacagcccgatatagcgtggtttcaacttgcccgtggtagcttgcggtggggaagacatggtgcgctgacggaggcgaagcagcgcccaatcgcc

SEQ ID NO: 152294 - DNA, 298 bp, Zea Mays
gccttcaagaatagtctagagtagaaaccattaaaacattatttgcagtgaacatgcgcttaacctcttctttaagcaatgcatcgtactatttcagttactaggatttgaaggcctcttgttatttatgctcggacactgaatgctggcatctgtggacatcctcttgtagttgtgccgcttgctgctgttctgaagaagtgttacagttttttgtggtagcttacattaagagttaaaaattgtggagtcatctaaggacatcctcaccggaacttaaattgttaaactccaatgt

SEQ ID NO: 152295 - DNA, 376 bp, Zea Mays
tccacaattatttggtcatggacaacattaaagatttcatttttgaagtgatgaaaatatgttaccaactgtccaccacgacctcttgagcgacctcaaaaagttaatgtatcatccgtctttggcacaatgatgtgatgtagaagacaaaagttttctacctttgcaaataactcgtcccaaccattctcccgtatgtcattcattttctgcagtgttgtcccaatcaaccctatagcacgaacaatattttgatccttcttttgcaaacactgtgacagatcattagttttgcccaatagtctgatcataagatgcagtacaagaacaaactcaaaactctccatttgttttaacaatccagctgctgtgtatt

SEQ ID NO: 152296 - DNA, 577 bp, Zea Mays
gccatatcttgctttgctttgaattgctaattcaatacttcatgtctgttagcaagtactacccattagttcattggctacagtccttcctcaaatctgttcatttactgtttcacctcatttctgttagcaagtagtacccattagttaattgggtgtagttgacataaaatctgtccattggcagtagttgacctcaaatctgttgaggtactggttgtacaattttagattttctgtatatggtcctgttagcactgcagtgtttgatttttgtttgatctgtatatgacttgggctgtctgcatcaattgtgaaactggacagatcagactggactgtcctgtgaagttttttgatttttgtttgaactgtaatatgacttgtagtccttgctgtccttttatataatttagattgagctgaataaggcagttgaacagatttgaggatggcagttgaacaggtttgaggatggcattgacttgaacagtgttcctgtatcggcttagtcttgatttcattttatttatagctatccaatcactctatatgttttcagattttagagttctcc

SEQ ID NO: 152297 - DNA, 395 bp, Zea Mays
tcagtctgctgttgtccacatccactactagaattctggtcaatggtgaaccgggcagttctatactccatcatcgaggccttcgccatagggatcccttgtcacctatgcttttcatcctagtcatggaagttttgaactctatggtaaattttgcaactcaggagcatctcttacagccaatcgcatatccacaggccatacatcgcatttccgtatatgctgatgatgttgtgttgttcctctggcccctaagatcagatctctctttggtcacatgtctccttgatatcttcgggcaatctactggtctcaggacaaacatcgctaagagttcagtcactccgattcagtgtggggaggaagaattggctgctatcttggagctcctgcct

SEQ ID NO: 152298 - DNA, 868 bp, Zea Mays
ggcgtggctttcctcaaaaaaaaatcatgtgattttctagtgatatatatgatctacctctccaatgattttgttgtggtaatcaatgattaatgacattttggcttctctgttttctacaatctttcttgtttcttgtttttttgttattttctgtgattcaagataaggccttattgtcgacacagttagtaagattaagatccattgttacttgctaatttacatctgcttaaacatatcatgcataagagcaagtttcggtgctaatgcagctaaaatgaacatatcataagagcaaatttcgatgctaatgcagcttaaataaacacaccataagagcaagtttaagtttgcttctatctaagccaacgggatggagatacacaattttatttagctgttccatgaacattgtgacatctggccatcatgagcaggtgaatttgcagtggcaaacgcccatgggcttttggaaacttcacatgttgaataaagtcaaaaggacagccattggtaactatggaagcatgtgaaacctgttaatactacagcctaacaaacagtagcacagttctgtacagaacagtttgtgtttattttcttgccatttaattccaatgtatttaggcaatgccaagtacagtcatgcatgcaggttactgcaaaggggtatgaaacattgtcatactgatgaccacagtaaacgtatcccctgttttactcagaggggttgtgattttatacggaaactctgacaattcgatcaggccaataggagtatgctcgcatgtttatgcaaaatgattgtaaggagagcctagcaatgagcagcatgcatataattaatatttggcagtgacaagct

SEQ ID NO: 152299 - DNA, 521 bp, Zea Mays
atcctattccatgcctcttcactgcttaaaagtactgtcaaatatttgattctccaaaaatagcaggcatactatcatttagtcaacgtaaaaaaaactgcaccttttccatgctgtactatatccttcttttgtaagtttattttccatgattatatatgttaaaaattgttatgtgatcctagaataattcagtggttgcacatgatataattctcttgcttatttacacaattacattactcccatctgaatctggccaagcatccttcatcacaaacttcacagtagatcttgcttcacgccgtgctcattttgaattttggcgtttttgcacaaatggcctggactcgatccccaaacttacttcatttggagccatcgtgtctttgctctgaattggcctattagaatgtggcgactctcctcccactcccagtgtaagcaacaattttgtttgcttaagatattcacatctgactccgatttgctgaaacatacaatatatgctacttaaacct

SEQ ID NO: 152300 - DNA, 550 bp, Zea Mays
caacattgtattctgtaatcagaaaatacatcatcaataagaagatttcattctcaaaggcactcaaactatttattatcaatctgcatgcttactcgacttagggtgaccactataccctactaacggagcaatcggcttaagtcgacagtgacttaagatggtgcaacatgctcacgctgactcgacccagggtgaccactataccctactaatggagcaatcgtcttaagtcggcagtgacttaagacggtgcaacatgctcacgctgactcgacttagggtgaccactataccctactaacggagcaatcggcttaagtcggcagtgacttaatacggagcaacatgctcacgcttactcgacttagggtgaccactataccctactaacggagcaatcgacttaactcgatagtgacttaagacggtgcaacatgctcacgcttactcgacttagggggaccacataccctactaactgagtaatcggcttaagtcggcagtgacttaagacggtgcaacatgctcacgcttactcgacttaggg

SEQ ID NO: 152301 - DNA, 639 bp, Zea Mays
ttacactgtcttctccaatgcttctacggacacatcatcatgacccatttcactattatcggaagatgctatgaaatagatggaagcatgtttaagcgtgtcgcagccatgccgatcggctagaaccaatgtgctagccgcgttgtccacatggagtgtccttgcaaggatgtgctcgcacatcgccttgagcctgtcaatggcatatcgatccgcggccgctagcaaatgctggaccaactctctcgtctcgtccatgcccatatggctcatggccggcaaggagtcggtgtagatgaaatggagcaacgccctgaaagtgtcaggccgcatgtcacctaccacgacagtgcgcgcgtctgtcgtctccgcagtgcaagtggagctgtagagctccgcctcaaagaccggcgaccgtgcggcgaggatgatcctgtgagctgcaaatgcctcgccatccacaccgaaggtcacgtccgcgccttccttggacacgagcagctcgccgatgtgcaggtgcaggttgcccccgggcacccggatctccggcgcgccacgggacgtcagcgccgtcccggtgacggccgtcacgacgcacgcgacggtgacggcgtcgtcgcggaggtacgcctccagatc

SEQ ID NO: 152302 - DNA, 631 bp, Zea Mays
tggagttatggacacaaatgtggagcggcagcttagttgaatgcaatggaggaagtgtggaaattatgtgttgatgaggagtgcccatcacctgtggaggagcctattgaagttcaatctgaacaactcttcatgtctatttctcaatcagcttggtcaggttccacgcatcatcagacactgaaatttcaaggatgtattcagcaacagtcgttactcatccttctggacagtggcagttcacatacatttctcagtgataaattgctacctgttctgcaaggagtccaacctgtgtctcgtgctttccaagtgcaagtggctaatggttctgttgtgtcttgtcagcatcaactattaagagcatcctggacaatacaaggctgtgaattcgtgtctgatatgatatttctgcccctaccgtgttatgacatggtactaggcatggattggttggcatcttttagtcctatgcgagtggattgggaacagaaatggttggctattcccttccaaggatctactatggtgctacatggtcagtcatccggaattcctagctgcactgtggtggaactctgtgtgttgaatactgctacggcaccaatgactcagtcagttttgcatcccc

SEQ ID NO: 152303 - DNA, 324 bp, Zea Mays
tccgcagtgccaatatgcatttgctagtggttggttgcttgcaaccgagggggcctgaaaggagctctgactttgctgactgaaacgtgacggagtgggtccagctggtctattgaagcttggtcccttgggtggaaacccaaaggatcgagttctctggtgccggtcttgttgctgagctcggaggacttggaatttcctcttgaggtgacctttttcttcttcccttgccctttccacttgtatggctttgtttgagaggtgcgagaagctgaggaaatcttggctggctaggatggtcttgagttctggtctgagcccttt

SEQ ID NO: 152304 - DNA, 315 bp, Zea Mays
ccctcaatttctccctcttctccctcctctctccgacggtagcaggccgacacaggtagcaacaattccatctccatcccatggcgctgtcccttcctctggtcgtcggcacagactcccccgccaaaggccaccgcacccggtagtagcaggtgccgtcggcgcggacccccaccctccgtgatcgccagtcccgtcgcgcccggtagcagcaggcgccgccgacgtggaaccccaccctccgtcgccagccactgctctacgaccgccggatttgcgccccctccgtgccgccacatcgaacatgcgggtgca

SEQ ID NO: 152305 - DNA, 754 bp, Zea Mays
gcagcgcagatcacgctgctcccgtccatgatccatccaccctcttctccctttctcatcaggccttgactgttctcgactcccctaatcaccagctcggtctattctcctcttcctcgccgcgctccgtcctgtctccgacacacacacgccatctgctgccgcgtaaacaccgggaaataccaggccttcctttcctgctataagcaagtttcaactccccaagttcgctgcttttggtcaatcttatctgcgctcccaggtctcagcgtcgccggtccccttttacttcgatccctctatccgatcactgcaattctaagcttcaattacctcctttctgggaaaattcactctctgataaagcaagccgttgagcggctcacgcaccacaccaccagtagctagcttcagctaagatctccatcttcccccatgctacaagctcctccaggaccgtcagccatggcagagctatagcggttgctccagttggcccgctcaagccgcgaaattcgggaccccttcccggctcccgcgccatggacggcctccccgacgccgacgcggcgccgttggcggccgcgccgccgcagaagcgcgacgagtggagcgagagcggcatcgcgcgcctgctcgaggcctacgaggccaagtggctgctgcggaaccgcgccaagctcaagtggagcgactgggtcgacatcgcccgcgaggtgtccgtgcattgcgccgacgacgccgcggccgcggg

SEQ ID NO: 152306 - DNA, 627 bp, Zea Mays
aaacacatcaaacatttgcagtacatgccctactggatcgaccccaataaaccatctggttgttcaaagagggcccctagaatgtctgaaggctagggtgcctccacttcctttgatgagcttgctcctcagccatcgccttcacatgatgttgccgcatctctccccatgaaccatgtcgagagaagaagaaagggaggaattcgagcttttctcatgaagggcttcaatgcaatctttgctatgtgtcgtgagaagtcgattaataattctgagctagcatgacaacatatcttgaaacatatgataatgttcgtcgtgtggtggcctcaatgggagtggaaccaacaaaattatggtgtcccatttctgatcccagaggacatggaagatgacgaggatgagattcgaggaggtcatgcaaaccctcaataccatcctcatcatcaccagcagcatcaggctcctcctcatcctatcgacgaccctctagcttacactcaggacccaaccctcatgctgatgatcctcaatcatttgcggtggaccttgttgcgtagttctttgcacctcctcctagtgctgaatcttatggcggttggtgatgatttcctcttctttttggtg

SEQ ID NO: 152307 - DNA, 364 bp, Zea Mays
cttgcacactttttctggtgaaacaactttgctgtctgttgcacaagcatgaaattatccagaatggatctgcctttaataaacgcactttgattctgcgaaaccatattatccaggtgttgggccagcctatttgccaaaagatttgtaataagcttagcaaaggagtggaccaagcttataggccgaaaatctttgacatgacatacatcatcttttttgggtagaagaataatgtatgctgaattgagaagttccagatttccccgatttccgttccaaacagccatagcagctgccataatatctcctttaataatatgccagcacgacttataaaacttcccagtaaaaccatccgggc

SEQ ID NO: 152308 - DNA, 441 bp, Zea Mays
ggcgaagtcgtgcccgatcatgcgctcgtcctcaacccccttaaaggtctcaacaagcagttcgagcacatgaagaccttcatcgggcgcaccacgtcgttcccactatttcaggccatccgcaacaaccttctactcgaggagctcgccatggctgaggaggcctctaccttggcttctaatgccttccatgccacctcgatgctagcacaacagcaatagtctggcgccacctccacccctgttgcgtcgaagtagccacaacagcatcttggaggctcctccagctctagcagacgccattgtcaccacaatgtcaatggtggtaatggtggtggcagctagagaggcacaccctggccatcaatctacaacccctagaccagacggatcaccatgtggcatgtaccgaccctgggtgcacggcaacagcatcacgaa

SEQ ID NO: 152309 - DNA, 1506 bp, Zea Mays
attccctctgtcgttgtttacctagttaggtcggaatggtgtggactcagctgcagcgaatcgcactccatcaacaggaaggtcaacctttgcacctccagttggcgttagtgtgaggcctctacaagctgtggaaattcccaatgggacacctagggatagaaggtgaattgtcaagctttttgagatatttctcttgctaatgcattgtcacattgttagcatgtctcttcaaaacagatgtcgctctcattctattaatgattttctgccccatttcgtagtggggttcaggggttttctcgatctatgtgagattgtcttcttcatacgatgcttggggctgccttaccccaccggttgagttttttgtatataagtagcaacaagatttggattaacagttgatatttcacggtgctgtagggctgtttatcccgatcctactttcgcccagtccacacggtcacgggactcacatgacagttcaacactgacagaagaggtctctgtcgccgagcataccgctcacaccttctacattctatatttttcagatgcttttgtactgaacagttagtgaacttacacggggctttcttcagtaatagtagtacctttttccaatgaataaatctgcaaatgctgtttttcttttgcagcttgaaatgctaaaagatgagaatgtaaatcttctggagaaggtgtgctatgtttcttacttctattctaacaaattttatgaatcagaaactagaagtgtcttcgtctcatactaaacttatgtaatatactcaaattcagcttgggctagcagaagagaaacttagacaatctgaagcccggacaacagagctcgagaaacaggtatctgtttagcaattcaagtatctggtattagtgtattactgtcctagattctgcttcattcgtattataaaacttgatatagttattagttctgtagcttcttttttttagcgaacgtacatggttttgtagcttctatcagagatctgaattttaatactgtgattgatgagtttctcaacatgcataatagtaatgcttcatagtatacatattcaattgttcaatcggtacttgtagtgttaagattgtattattgcatagtggcataatcaagaggttataccagccttttgttacaaatttattattgtaccgtaataccattttccataagcgtagttttttacttcaaatgatgcctctccaaatatgaaagctccttcagtatggattgagttgaaagttaaactatttgcttttgcattacttcattcatgtgaccattgtgattggataatttgattacgaggggcacatatgatatccatttcctatctttgtcgtctgtaatatctccaggttgctaatcttggcaatgggttatctatggaagtaaagcttatgaaaaggtattcggagtgtgttttggatactttacacattgtttcccctatcacattatccatgacttgc

SEQ ID NO: 152310 - DNA, 672 bp, Zea Mays
gctggtacaaggtgagctaccgtcggtttgctcacattcttggattcactgacaatgatatttctggtgataagatcaagatccatgatttccgctaacctaccagagatgaagccagagatcttcatctctctgagtctgggaaatattgggagtccaccaacatgcacaagtattatagatacatcaactccctcagcaggatgaccctcattcctaaagggggtaatcagatgaatattcttggagagagcaaggttttgctctcattcatgaagcccagcagctcagagagtatcaatgtctttgatatgatctggcaggaaatcatccatgctgcctgctttccactgaagggatgtcttcatgcaccttttatcatgaagatgattgaagttgtgacgcagtttcgatatgataaaggtacaagacatcaatcctatacccctttctggattgatcccaacaatccagcagggcgcttgaggaaagtcccttccagctcccgtgctcatacctctgttggtccgtctgctggtcctgctgctgctgccggtgcctcgcgtccctccccttggccgcggatctcccacgccacgtggtcgtggtcgtggtcgaggtcgtggctgagggatgggtgcccgcttaggccacgggattgcggcatttttc

SEQ ID NO: 152311 - DNA, 768 bp, Zea Mays
ctcaacaatattgtatcaatatgagcaaaaagagcctaagcatgccatagcattatcatgtacacaaagaacatactactaggagcaaaatcacattctagcagttatacaagtgaagctcaatatgacatgcagatataatacaaaagaaagtgaaagcagaaaataagaagaaaagaccaaaaagggagccctctaatcaaaaagggaaacaaaaacctaattcccctcgcaaatgaacaaaagttttttgatcaaggggtttggtcaaaatgtctgcaagctggcgagtggtatcaatacagcgcaattcgatgccgcctttctcataatgatcacgaagaaagtgaaagcgaacatcaatgtgcttggtcctcgaatgtagcacaggattcttggcaacacttatggcactcgtgctatcacaaagcagaggcacatgatgaaaatccaagtcaaagtcccgtaaggtagccatcatccaaagtaactgtgaacaacagctagcggcagcaatatactcggcctctatggtagacagggcaacattagactattttcgagaagaccatgaaacaaacgaagtacccaaaaactgacaagtcctagaagtagacttgcgctccaaaaggcaacccgcaaaatcagcatcagaataaccgcacaaggacagaacggacgatgaggagtaccagagaccaaactcgggagtgaaacgtaggtacctcataatctgtttcatagccattctgtgagatgtgtgtgggg

SEQ ID NO: 152312 - DNA, 1037 bp, Zea Mays
catgaagaaggctaagcaactattacgccgaggtggtgctgatggttacattgaggcattggacaatttgtgggagaaaaagaaacaagctgatgtagacaaagaactgaagaagaaagattcaacgaatcactagaaattgagaaggagagactgagatagagcgcacaaggattgcaaatgaacaaaaatgtatgcatatgaagagaatgctagagcctagaggaagagtaatgaaagtgggcattagcggaatggatgcagatcagcagcagtactacagaagcctacgaagtgacataaaccgtcgttgtgggatcaacttttcattgtgatgatttgcttatgtagtcgtagaatcagattgcttgaatcatataccacttcttttatcaaaatttgaacttcaaatttacttgttagatgacatttctgttaaataaattacttgttggatgatatttcttctaagtaaattagttgttggatgagaataatgtatgtgaatcatgtcaggttgcagctcatgcactgtatgataataatgcaatactgaatagagtttatgatcaataactaaagtttgagataaaacacaacctccgactcgacagacaaatagctggtctggcctgattccattacctttcttctggtcatacctgcttgcagtcacataacctcagactcgacagacaaatgaagaggagctaggtggtaatgtggtatgcctgtacagcctggtgtacatgtacttcttcaaacctgctatctgaatcagcatggtgtctgaaatgccactctttcttggagcacgcctctgttgtcaccattaaagtaccagttttgacatgtttgcagtttagggactatatgagttacccttctacaccccgactgttttagttttagttattgtacttttgctattttgcttgtatattgtttattaggaattggagagagaaccgtgaaagaattattgtttattaagaattgaggagagagaaccaaagcaaatatagtgcttataagaa

SEQ ID NO: 152313 - DNA, 353 bp, Zea Mays
acggatggagtataagacaactgctacatgttagatatttgggccaaattaaaaagtcagcgaacatgaatttctggaacttgatgatcaatgcatattatgaagtatttcaatgaagaagggctataaggcttccatgactgcaaagtgaatatttgcatctaaattccaacataactaggagtataaatgtagcgcaaccagtttcttatatctatacataatatgagttgtgcttcaagaatgagtatgaaacactgccatctctgcacggtaaatgatgcacccaaaatggtaaattcaaactctaatataagtacctgattaccaagtctgcagtggacgcgtaaaaa

SEQ ID NO: 152314 - DNA, 320 bp, Zea Mays
agccaacttcgaaatgaagcagctaagggcggctagtgaccctgtgagtttctggacgtccttgactcgggtgggggcctcatcgcttcgatcgccctgatcttctctcggtttgcttcaatgcctcagtatgaaaccaggaatccaagcagcttcccggcggaaatgccaaaaacacatttgtccgggttcagcttcgtgcgggttgctcgcagcttgtcgaagaccagggttaagtcttcctctagggtcgacctcctcttggtcttgactatgatgtcgtcgacgtagacctctactttgtccctgatcaggtcccc

SEQ ID NO: 152315 - DNA, 399 bp, Zea Mays
gccactcagtgcctccatatgcttcctcatgaaggtccttatttaaggacttggagaatgacctgtgtctgtggctacattgtaagtccactatttcttgctgaaggagttgggacacagaattctccattttcctcttgaatgagccattgcaagtctgcttgagcttgtctatgttgtttcttagtcgctagagcctctgtcttcctctacaagtttttgttttgaatgtgaaggctcttcagcaaaagttgctcttggttgtttggttcaaaatctccattctcttaggaatttgtgcagtcctccatggagttggggtattgagtcatcgaccttttggtggatccctgatactagacatcaaccactagccatcaaagtgaagatgtgtgctag

SEQ ID NO: 152316 - DNA, 487 bp, Zea Mays
gtctgttcaagctgaatcagtagatgttgtactcggacgactatgcgatgaggagaaaagaatttgcagccctgttagcgcttgctgcaagcggacatgtcgggtgagctccccggtcgtgttccctgaaacgacgaggagaaaaagaaagcttcagcggtcgtcccgcttagaactggaggctgactccgctgctctagaccttggtgatgacacagcgaatgccgatcttgaagatgacatggaaagttggggtggcgctagagtcagtaggtatgttttggaggaggaggaggatgaagaggatgtgccctccttggttcatagaaatagtcgcaacaaggctagcaacgatgatacagaccaagctctctcggggctggttagcctccagggaatgacaatgtccgccattgacgacgtgctggaggaggttattctcgaggacctttcgcggtagctttctgaagctaggggtgccgacgtc

SEQ ID NO: 152317 - DNA, 569 bp, Zea Mays
cgcatctccaccatggacaggggattactccgtgttagcgcaggtgaggttactcccgatcgactcgcctcttcccctgcatggtgtagcgtctgttagtttggtaattggaacactggtgtgcgaatcaggcttccgctggccatggtccgccgtgggcgtgcgcgcgccgccgtagttcgggtcggctgggaagctgggaaagaagacagaccatagaccgttgatacgtgatggacggctcagatcgtgcgttgcgtactgccctgggcgatttgatcgtgaccgtagatccgtaggggaacgattgggatatggtgtgaacgtggcgctctgtggatcacaggatcgtgatccgagcgcatgtgtaatgtgtagcttgctataaaatccaggccgttgaatgtaatctgaacggctgtgtgcatccgataccccttcggccctggaaacttgcttaagagtccctgtgcttttctagaatcaacccgcagtactacaaatagtattctgagtcttgaaacaacttgcgcagaggcccctgtagttccctggtttattgcgcccag

SEQ ID NO: 152318 - DNA, 363 bp, Zea Mays
gggactgccgctcattagaccaagtgtatttccttccaagcagggggatctccttgacctccatatcattcaagaagcgtctgaaacttgccatcatcgctgtatccaggtttgcattgtttttgtcagcagcctgatagatgagattaaagtcacctgctactagccaagggccactgtagatcgccctgatatccctgagttcctgcaggaaggacactttctcatcgtctccctgtggtccataaactccagtgaacttccggccttcttgctcagcaaattgaatttcgttcatcctcgtgaagtttcataaactgtcaatgaatgtggcttgaaattcgtccacatgtagccattttt

SEQ ID NO: 152319 - DNA, 593 bp, Zea Mays
ggccgcgtcgtcagctcttccctctcctctcgcgcgcttgcctcctatcaccgccaggcgggccccactttccagagtcatcttccagctccgaatcgggatgaactgcaacaaacccgctggatccgcgcagttcggtggggggaaagcgtccgtgcccggccaagattctcgggccgttgtacccgcccgggtcccctgcatataaaataccagctcctcctcctaactgacccgtcgtgcatggcgatggcgcgccgtggtctacgggttctggtgggtgcgggctatccggatcgccagccttgccgtgtgcctataaagccatgcccgtgctcggattatcttctcccccctctcgcccatgggaatatataacgtgccctgtagcgtccccatgacgagcaaccccggcggctgggcttccccgtcgtgctcatgcccctgcccctctgctcgaccatgcccaagccgccaccatctccaccactcgacgcccctcctcctgctgctcgccgcgctgggcgccttcgctagcgcgcgccccctctatgctcccttccatggccggcaacgatgcatacaagtccttc

SEQ ID NO: 152320 - DNA, 386 bp, Zea Mays
gtcacttcaatggttcgatcgggaacccgaagacacttcttcaattgcgacacatggaacacattatggatagcagacagaatttcggggagttgcagtcgatatgctactggcccacattgctcaagtaccggaaatggaccaatatacctgggcgcaagtttccctttaaccccgaaacgtgatacacccttcattggtgaaactttcaagtagacataatcgcccaccagaaagcataatggttgtcgtcgtcgatctgcataactcctttatcgagtttgagctttcttcatattatgaataattttctgaaccttttcttcggcctcctttaccatatcaggcctaaagaagtacctttctccaggttcagaccaatttag

SEQ ID NO: 152321 - DNA, 412 bp, Zea Mays
ttttttaagatgttgtagtcaggaagaaggttatgttgtcttgttcattggaagcactcttccacattacttggttccttgctgataacatttgtctgttacagatgtcatgtgcattaataagcaggtatcatgcgcattaacaagcagccaagaagacactaaactacgaggaattatggccttagtcctggtactgatcacctatgtcttggtaacaagcagatatcctggatatagaagcagccaaaaatagtgtcaaattctggttcccacacccgtgtcctggtaccactattcgtgcctatgttgggctcctatatccatctgagcgagcatgaagatgctcaccaacatggcaactagagtatgcttcccactgatgtttcacccagtataactgcatttacct

SEQ ID NO: 152322 - DNA, 1004 bp, Zea Mays
agcccacaaaagcctacgaacttgtgctaacccctctaaagcgcaaggtgaccaaaagcatgacagtgactatagcttacaaaacttaaagaatcacaaatacctggaatgcacatattaagggccttggctgtaaagaaggactccatatcaaataagtagaaataattcctatcgatcagatctgacagcagctggccagcaaggcgatatagtgttgccattatgggaagagatagatgccatttcctgtaactgggaccatttataagttttgtcttcattagaggtttgtgatcatagaaccattcatagacagctgcatcttcctcctcatccaactccaactgtatagcttcaagtggttcaacatccaacaaattatcagcatagtccagtgggggctcctcatcatcaaatggaggaaagcgcattcgtttaaaatgccgcctatcccttttctctcgccgcatcataatccacattgtaccccactatgaaagcacattaaacagagagctttatgagcacaaaagaaaacagatgtatatgaaacaacaggttgttacagaattacagatgcacaaataatagcagttgctaccatgtaaacacagctgggtatgtagttatataaggatacgagtctgtagattgttacctgtgcgaggtatattggttcaacaacccatgggatttcatttataaaagtgatagccccagtgatgtgatacaagattttcacatggcgaacctgaaacaagtgtgtattaatcaaatagaatgccacacgtaatcgcaaaggataagctatttaaccatacatcaaaggacatcaacaaatatgtacctgctcccaaggcatcggcatgttctctagaagtttgtacacagcgtggggcacaaatttgagtgcaccaagataaacacgcttgtcatgcctgtacttcttggaagacatgtctccgtggtctctgttaaataaaatatggaacacattataa

SEQ ID NO: 152323 - DNA, 685 bp, Zea Mays
cacaagccataaaaataggctcaactcaggctcgctctgagcgtcaagacggtttgaggcaagccaagctactactagcccgagccagctcgtcgagctcgagcttttttcgagccctacctagaaaggtatgagttaaaaaaagagcatggtcccctttttatagctcgctcggccgcttgtcatcctttaactagtaggattgtactatgtgtgagcattgtgtttatgtgtggcttcctgtcgtattaggtttggtggtttttacgacctatctatgacataatggaccactgataaaggcttagatagttttcaggataacggccactggtaagaggagaatagacctacgcgcttcccgcgtgacgcagaacaactgtcgaaactggtgctttacaatagaagaagagattatagtagagaagatattacagtagagaagagattaatgtgtttattatcttctatgtaacaaataacttcaaaaaacaaattaagtccataaatcatttagggatttttttggaagtaacatgtttttatagttctatgataataccatggtttataggaatattatagtatttataacataaggggttttgctgcatttttaaaacctcatcttcataccatggtatttttagagcattggaaactccactccaatccaaagttttta

SEQ ID NO: 152324 - DNA, 484 bp, Zea Mays
gccggaagagcttggatgaactccctgcaactatcatagttcaactcaagttcgtatatctgagcagttcgattgtgcttcactgcggtcttctaatgatgccagcaacctaagaacatagtgcttgtaaacaccttgttgtgatatgagtcccttggctagtacaacaacatacatactcacaagagattctaccgtatcagctagagcagtgatagtagaggcatgaatattcttgcaaactacttcattgaaacactcacagttcagattatctagtgcaacaatgtttttatagttgaaaccatcaatgaagcagaacttcttgcactctttctcaagtaccttatagtactaaaatggttcaagcgtacgggtatgcacatgctctgggtatctcaattctatctcattggtcctcttcagatatgaatggaatgctgaaagaatgtcataaatgtaaggaagctgatgtttattgaac

SEQ ID NO: 152325 - DNA, 763 bp, Zea Mays
agaggtctgacttgaacgccgttagcaggtatcaccaactgcatgggtggcggccatggttgccggtgcagcactgcatcccagccacaactaaatggatgcaagcaagaactctgtatgagactgaagcaattcctcaagcacctattggttaaggtgttgagaaccatgtccttaatctgaaggtcaatatgatgttggacgagccatgctgccacgtcttctccatcacaaacaacatcatattggagtgtccagtgcccttcaatgtgcttagcattcagaactgtatttgtttctgcaagaacctcagcagcattaagatcacatactgaaacatgcatcccaccaagttctgaatcaattcctatgcaacttgtgcaaagttgttggcagctgcaatatgagtaaacatgtagctgggaatattcagagccaatgttacatgagtggagtggcgtatcagactatgtggctgctagtattctttcagtatatctcaacttggcgctggtttccaactacactccaaaatgagttgaggatcatcaactgggcctgggaaaatgattgtgttttcaactggtctgcattccagataggaactagctccttgagcttgaacgcggacggctcggtgacaaacttgtagaagctgtagagacgcagttgtgcttcctcggggatgctgatactggaggccgcgacgaaggcggatgcagcgttgaactcccgctcgtccagaaagttgaagtcgcggcgg

SEQ ID NO: 152326 - DNA, 423 bp, Zea Mays
cgctccgacagcgagggggtggaataggtggagtggcagagggactagcgatagtggtggtaggagtggcggaggctacgggtgtgatggaagttgtgggtgtagctgcggtgcaggaaagctctggagtagtggaagtggtaggggtaggagtgcaagcggagctgaggctagtggagcagaagttggtggagtaggtgaggggtctaggacagccgggggagtgcgcagacgagaagactgttgttgtatctaaatggaagttgatcagcaccaatgtgaatttgccctccctactttgctcgctctgctgctgcaagcattgctcgagtagctctatccaacatgcgattttcttgcctccttgctgctctaggtagactgccttgctgcctagtagggcaaggtgggtcctaatcatca

SEQ ID NO: 152327 - DNA, 598 bp, Zea Mays
aaattgggggacttcatccagcgaagtgacgcgaacacgaagcagggttctagagatattactccgatcctcctcccatagaatcaacctcccaaacgacccaatggcggcctgcaagaactctgaagaacgatagtccaagggaaaccccaaaagcataagccaacactcatggttgaagagaagagcacggtgattccaagcatcattgtgacggaccgtagtgaaagtagcgtctaaatattgttgggggccaagcagaaccaagttatctcgttccagaacactacggaattgcacaatcacctgccccaaatgcgagcgctgaatggctcgaacaccaaccctacgatgctcaacaagatactccctgaccacatccctaaccgcagggaacaagacctcgtgctcaggcaaaggatgaatattgataatcgcccagtcctcgtgagaaggcggcaaacgctgcgaaactgacctgaccatgatcccacgatgctggaccaccgaggcgctgaatcctggtgggaggaacggctccgggtcaacacgccggtacgccattgacagattctcagacgatcgccggagagccaag

SEQ ID NO: 152328 - DNA, 561 bp, Zea Mays
caggcccatcgcaaacggcttccgctatgctcgccaggtgcctacaaagacgccgaaagctgaagccataagcaaggacttgatgcgccgagggttccagtgcgttggccctacaacgatctactccttcatgcaggttgccgggatcgttaacgaccatctgtcatgttgcttcagatttcaggcttgcagccagcacaaggccagtgaaaagtgaaaacggtgcgagggcagagccagcattgcctgatagaaggttgggctcggcagcttcggagggttcagatatcagggaggtgtagcaagtctactagagtgaacctgagctgttttttttaatctgtgattgtcaggacagtttgacagtgcattgggatgctactgagcaagtggttcatactgtatatgcgttgtataagatcgtgcagctttctggcggtgtggagtgcttttctcacatgtatcatatttgtattgcagagtgcactttgattgggctagatgtaaaggcaactcccgctgttgttttctgaatgtacggtatctggccgtgcatgtaca

SEQ ID NO: 152329 - DNA, 326 bp, Zea Mays
tagagcttgaagcttttatcgtctccagcacatctagtacactggccatcctttttctcttgggggtcgctgctagacctttttgtgccttcggcacctccactcctgccgaagagcttagaacttctaatgtttttgtcccttcgattcttggttcctcaattttgttagtttttggcattgcagccggctcttcaatcctctgcgtaggagcaggttcttttgcttcaatagctgaagaagtttcaccgccaaatttaggcactatggccggttcaatgtagcgcggtcggtgagtaaggaccttcaactttttcctcttcggc

SEQ ID NO: 152330 - DNA, 512 bp, Zea Mays
gtaaggttgaagctaagaagaaggtccacaccacatcccttgagaaggagaggaagaagaaacttcacaatgccagcactgggaagaacatgcaaagggatgatgacgaggagggggaggaatatgagtaactctgctactaaggtgaaaagcaaggtgtccagccaattatgtaaggagacgaatgagaaaaagatgaacaaaacataccaggggaagaagatgcagaatgctgacagcaagatgaaatatgacagtggagtaaagaaggttgggtactgaattccacagaaaaataaaaagttgatgcctcaccttagatgggatgcgtggaactgttgtgtctacgactggtcaccttcaaagcattaattctgcaaagataactatgaaccgggtaagtgcttgggaataagtggcattagaaacttcagttatatgagaaagtgaaacagaatcaccaagtgagacatggaaccatctaccagcgagatgtgaaatatcaaatagcc

SEQ ID NO: 152331 - DNA, 1015 bp, Zea Mays
cgaaacactcagacagatgctgtgccgtgctgcagtgcgcccgtagcagcacagacactctgccgcacgcacctgcgcttgtcgcttcccctcttgctatatctcctgctgcttttgctaaagccggaaaccaaaaagaaagttgagcttttcgtcacaattttgctttacttattaagtgctagtccgttttgtttatacgaccttactattagcttctagcccggattcaaagtgctacagtgcgttttcactaacaacatttaggattatagcacatcaaatttgactagtgttacaaaaatatatattagcatcatacatatttagttaaagttaaaaatatttaatttgtatgaaaaacaagagtgacactctctatgggataggccgagtacgcaccatgcatgattactactattaggctatctccagcagcgttacctattctaccttctatttcaaactttacttcgtaaacagtataatttgtaatgcaaaacaatgttttatacggtcatatacacggttcgctagccacagcctaaggccaactccaatagactgttctgtactgcagacgacaatgtttacatagtaaagtttgaaatactgattgaagtacgtagtttgctggagatagcataagcctccttgataaggctctttcaaaggctcctccaacaactccttaaaaaatctatgaaacgggggctattccgctagcttctcgttgaaaatagcaaggagctgcttccaagaaacgagcaaagtcgggggctcgaaaagaggcttctaaggctccctcccatcctccattcctcccctctctcatgggttccatgttggctgaaggtgctgcatttcgtactaaatagggtgctcatcccgaaactttttgtgaaaacaagaacatagctattttcacacaagagccaaaaccagagttggagttgttgacacaaaagtctaactaaaggcgggcaaacatgcatacctggtattccgcggtgtg

SEQ ID NO: 152332 - DNA, 320 bp, Zea Mays
agaaaatgctgaagtcgtggctttgaaagacccaatggcagaccaaggtaggtgaatggcattggtccggtctgacaattgaacgttcttgagagaatctccattttctcagagttaacattgatcggatacatgcttgatttgttgtagttcactctgagaccggttgatgttgcaaatgaattgagaattccttttaggaagaataactgctttgggcaagcttccattatcaaaagagtgtcatcaacatattggacaatagagaagtcctatccacatctgtttggtagaggtagatgaagcaggttcaaatgcct

SEQ ID NO: 152333 - DNA, 486 bp, Zea Mays
ggggaggcagcggagggagatacaaagaaggggaagtcaaacacgtcgaagacaacgtgacgagagacaaggacgcggtgagtggagaggtccatacaccggtaccccttgtgattaggggagtacccaaggaagacacaatgagtggaacggggcacaagcttatgaggggcagtggcggagagactaggatagcaggtgcaccaaaaaaacgaaggtgatcgtaggagggagaggtgccaaagagagcaaagtaaggggtggggtgaggaaccgccttggtggggaggcggttgagcagataggtagcggcggccagccccttggcctagtagcgggggaaggaaggtctggaacagcagggaacacatgacgttgttcgtggtgcggatcatgcgttcaactcgactgttctgagaagaggtgtaggggcacgacatcctcagttgagtgccgtgggagaggaagaaggaacgggaggtggag

SEQ ID NO: 152334 - DNA, 337 bp, Zea Mays
cctaaaatggtttcacaaaaattaaaaatggtttacaaattaataaagatttgtttaccaatttcagggtgggggatcaggtgggtgctcctacagtcaacaaactataggtatttgtactagatcatcaagacatcaacactttggtgtgcaaagattccagcaatcgttggcaagtaccacgaaaatacggcaagcagtaaaacaccttggcaggtagtctgatgcgtgactgccacacgtacatactcatcaactgggttgagcgggcaactgtactatcggacctcttgctatctctattcaaaagaatacaactcggtgctaacagtgttgc

SEQ ID NO: 152335 - DNA, 443 bp, Zea Mays
gggatttggacgccttcggtctcggtgacacatttgagcatgggttgactgacccccttcttgtaaagctggccttcaattagtgcgaagtcctggcttcgatgtttgaggcgcttggcctcgttgatgtcggttggatggtagtacccctgtagaaacagggttattggtgcccgccagtcttcggtcataatgaggttgactatgcggtggccctcgctgtcattggttatttggagcccttcggggctgcggacggctggcgtgccgataacatggtagaacacgtcggagggcagggactcgcctctggcggcagccttggccaatgcgtcggcctcctcattcttggcccggtccacatgctgcaaggtgaaacctttgaattgtctctcgaggctacggatagtcgcgaggtattgcataagtgcggggtccttcgc

SEQ ID NO: 152336 - DNA, 1215 bp, Zea Mays
ttctctgggaggctttcaaatgcagattgggttcgtctgacttttcaggcattggttttgatctctcagaacttttaaccagtaatgagcaacttcaggggttagactcaccgttttctaaactggaaatcgatagcattataaaactcttaccttcagataaatccccgggcccagatggttttaatacaaattttatcaagaagtgctggcatgtcattgccccagatttctatgatctgtgtgataaattctatcatggtcaggtctgccttagaagtatcaacgggtccttcattgttttgataccgaagatggagagccctcagaaggtgggggattacaggccaatttctcttctaaacaatagtatgaaaatcttaacgaagctgttggcaaaccgtctgcaaccgttcatgccccggttaattcacaagaatcagtatggtttcatcaaggggaggtctattcaagactgcttggcctgggcctttgaatacattcacttatgccactcctcaaagaaagagatcattgtgctcaagctggacttcgaaaaagcctttgacactgttgagcatgagctgattatccaggttctgatccacaaaggtttcggtcctaggttgatcaactggattcggagcatccttcactctggcacgtcttcggtgttacttaatggagttcctggtaagccctttcattgcaggagaggtgttaggcagggtgaccctctttcgcctctgttgtttgtcctggcagctgaccttcttcagagcatcatcaataaagctaggctgtggaatcttcttaagctccctttaccggatattggtgaccaggatttcccgattgttcagtatgcagacgacactcttttgattttagaagcatgccctaaacaacttttcttcctcaaggcaatcctcaactcttttgcttctgctactggcctgaaggttaactataataaatcaaatatgttccctataaatgtgtcccctgaaaaaatggtgatcctgtcccgtaccttcaattgccagattggcgagatgtcattcacctatcttggcttgcctctgggccttgcgagacccagaaaggaacactatctccctcttattcaaaggattcagaagaggctgtcctgctcctcgaactttttgtctcaggctgggcgcttggaattggtaaattcagtcttctcagccc

SEQ ID NO: 152337 - DNA, 1484 bp, Zea Mays
caagtatgaacatggtgatatcgttggccaagtagataaacaaagaagaatcagcaactgaagaagaaaaaccaagctggtaaaggcgctcactaagtcgagagtaccacgccctaggggactgtttcagaccataaatggacttgtgaagcttacaaacatagtcaggtcgagaggcatcttgaaaaccggaggctattgcatgtatgctgtgtcatcaagaaaaccatgaaggaaagcattgctgatgtcaatttgcctggtgtgccatccacgagagactgcaagggaaagaacgagacgaacagtagccggtttaacaaccggactaaaagtctcatggtaatcgatgccatactgctgtgtgaatccccgagcaacgagccgagcttttaatttgtcaatggagccatcaggatgttgtttgacacgaaaaacccacttacaactgataatattttgaccagggggtttaggaaccagagtccaagtgttattctgccgaagggctagaaattcatcctgcatagcctgacaccatttgtcatctgccagggctgttttatatgacgagggtgtagtaaagaaagcccgtcgacttggattataaaggatagttccatcagcatgaatccgaggcttgtgaatattatgcttggatcgagttaccatttgtggagctgcagcatcaataccagatggaatggatacaaaagttgactcttctgccacaacttcagggggtgcaggcgcagcagatggtgaagccaagcaatttgttggtgaaatggaatgctgctcagtgtgtggtggtggaacatcgtcagttgcactggagtgttcatcgacagcagcaggtgggtcatctgaacagcgactacctgtagaacctgaaacagtggcaaaaggaggctcgagtgagccattaggtagcaataaatcaagtctgtaatgctgcatatggtcattggaaatagctggttcttcagaaggaaacaaggaagaagtggagatagaatcagagggtgtggaagatgaggcaaaaggaaaaacggcttcatcgaacacaacatctcgagaaatataaattcggccggaagatcgatctaaacatttgtagcctttgtgcatagagctatagcccagaaacacacactgggtggatcggaaagctagttttcgactgttgtaggggtgtaagtttggccaacaggcacaaccaaatatacgcaaaaaattgtagttaggtgactcatgaaacaaagcttccataggggaagaattctgaagcacacgggtgggcatgcgattgatgagataacatgcagtaaggaaggcttcatcccaaaaccgtataggaagggacgagttggcgagaagagtaagaccagtttcgactatgtgtctgtgcttgcgttctgctacgccattttgttgggaggtatgtggacaggtaattctatgatgaatgccctgtcgtgtaa

SEQ ID NO: 152338 - DNA, 474 bp, Zea Mays
gtgcatacatctttattatcataaaaaggtggttgaaatgggttttcaggtcaagccaatgggggatttatgatttaggagtaaatgtacgtatgacaactactgttcacaatagtttgattggtggaggatgtcacaataggtatgtttacaattccactgccggagacgaaattgaccatggcatcgtcctttggcttgtcctctgaagcgttctcttgatgtcactgttgagtgttcaggtcaatggataggaacttgatgaaatgaactagacaggttccgaaacttgataaaataaactagagtggcatggcacctgattaatttagcatttaggtggcgaaatggactaagatagctgatccataaaataccgtcgggtgtccacttgcattcttattagtagccctctaagaatatttcctttttaaatcccgaatctctactgacatcgatgtatggcatgctgac

SEQ ID NO: 152339 - DNA, 314 bp, Zea Mays
ctactgtgcacgtgagcagcgtggcaccagaggaaactaatctatgaacaggtaacggagaaaaacaatggaagggaagggaactcaccaaggaagagatagtttcgccggggacgcataggggcgggttgctgcatggatgcaggtgcacaggttgatggacacggtgtagccttgcaagcagggattagtggttgcacggtagcggtggccatggccgccggcgtgtggggtagacaggcggaatggggtagacaccgaggttatggtggctcggccaaggagaggtgttgttcgccgattgctagatcaac

SEQ ID NO: 152340 - DNA, 492 bp, Zea Mays
gagtcatcatcatctatttgaatatagacaaaaaaactaaaacctaaaatgaatactaatttgggacggagggagtattagtttctaccaccaattcaaatatggtaatcataaagggttacatttgtcatttgctttactgcataatatctcatagtatccctagaataggttttcaggttggagggagtatgccagatctttgacattttactgcaagcgggcaggacaactttacttacgaatcttgtgaactaaatctacaagtgttcgataaattctcaaaacattttggggtgtttatacggctgcatatcgagccagctcggctcggcccaactcgagctttgttaagctaatgagagccaagctcgagctttgttaagctaatgagagccaagctcaagctggctcgttaaactaacgagctggctcggctcgctagagaatctgctcggctcggctcgtttagctcgcgagccagaacaaaag

SEQ ID NO: 152341 - DNA, 937 bp, Zea Mays
caatagtgtctgtagcaaataatcgtcgagaactgttagttaaccaatccaaaaaataatctagtgtttgcacggggaggaaaatccatgattctaaactcttcagatgcctcaaaaaattaacggcagctccggtaagtatgaattcaagttagaaaaatggataataaaaaatagtaggatcaccgggaacaaatcgctcaccaatggttcccgctgtggaggcgggcttgatgcttcatctcgcgtgtagtcgttgttctgatgcgtatggcgtcgcacaagactcaaacaatctgaattagatcccacaaacgcaggcgacaacgcttgagagactgttgaagcaatatacgtaacaaaaaaattggtgaaggtgaagcaggttccttacatgttcttcataggctataggaagtgcgtgctaggaaactggcttacctccgtgtatcaaaacgctacttgctccttgcctgtcaacctattttgtctgccggaaagaggattagaatttgcatactgcaagtttcaaaccaaggaggcaggagattttttttccaaagaaagaaaataaaagaggggggcgctgaaacagtacaaaacaaaacaaaaatacacacataaaataaaagaaggggcactgaaacagtacaaaacaaaacaaaaatacgcacgttctttgaaccttctagtgcaaaacggtcctaataaacactttttcagacaagcagttagctcctaaaaagaaaagggaaaaaggaaccacctcaatggatgaatatgctagtgaactaaacaagcaaaatgcactggtcagctatacagtgcagctagaaacttatagcttgactttcctgatagttattacctaacttatatcgtccctggcattttgcagctgaattctagtcctactgtttgccatccatatttctag

SEQ ID NO: 152342 - DNA, 515 bp, Zea Mays
aggtgctgtattttcatggcgccaaaagggaattaattgtagttctatgatacatgtcaaaacagttgtaattgtgtacttcttatgcaaaaaatacttgtacttctctgaaatttgtttaaacctgctgctacattttgtcctacctggcaggatttgcttaggggtatgttcggttccagggaacggcctcgatcgattccagaccagattgcttgcctaattaatataagcattgatgaactagaatgaatcctggttgaattccggaacaacccaacaggtcaaacgatgacattcagcttaggtttttgggtattccagctttattctgacgactcaatcatccagccttgcaagttaactgtcgagacgattaaaccttcattccgatccagcaccagagccctgctgagcggctgcaccacggtaggctgcagactcttctgcatagcgttgcttgtcgacctgagactgctccacatatggctgcctctcctccgctacaaaattta

SEQ ID NO: 152343 - DNA, 478 bp, Zea Mays
gaaaagatcaatgctatacgcgactggatgcctccacaaaatgtgagccaagtgagaagcttccttgggctcgctgggttctaccggcggtttgtaaaagactttagtactgttgctactcccatcaacgaattgaccaaaaaagaagtacattcaaatggggagaagcacaacaaaaggcatttgaagaattgaaaacgaagttaacaacaaccccagttcttgcactctcagacttcggtaagacatttgaaattgaatgtgatgcgagtggaattgggatcggaggcgtgctcatgcaagaacgaagaccaattgcctacttcagtgaaaagctaagcggtccgactctaaattattcagtttacggtaaagaattatatgctcttgttcggagtttggaaacatggcaacactatctttttcctaagaaatttgtgatacatttagaccatgaatcattaaaacatcttaaagg

SEQ ID NO: 152344 - DNA, 1216 bp, Zea Mays
cttcctgtgtgacgaccaagccagtctcagtttgcaaggcttggatgaagttcttccttgccctagagcatgcccggagatggaaaaatcttgagttggcgtccccaaggcggatggcagtcaagcgggacctttgtctgattcgtgatttctcaacgagtgctagtcccaaggatttagctttcaatcttctgaggaggttcagttcgacgagagatagagtgcgcacttcctgagcagtttctaagcgaagaatcacttccttgactatggccagttgaagtttcgtgtctcctactttcactctcctccaagctttgatggccttggctgttcgcgctagtttgatgtgcaggcgcaagagtggttgctggacagagggtaacggcttattccaggccgagtatactgcttctttgaatccgtcaatgtgtgtccagaagttctcgaagcggaaggaggtgtttgttttgcgcattatctccccctgtaagagcagaggggtgtggtccgacatgagggagggtagggagtggatgtagcaggttgggaagaggagctcccaatcgggcgtgcagaagaatctatcaattcttgtcatggttggttcagcctgcccattgctccaggtgaattggcggccattcagacgaagttccttaaggtggatgtcatctatggtggatttgaatgaacccatgaggcgcctatttaggtttagattgttcttgtctgaagcctggtaaatgagattaaaatccccaaggactagccacctctcgtgcccctgggaggcaagggccctcaattcctgaagaaacaggagcttgtctgcatcgggttggggcccgtagaccactgtaatccaccactctgtgtcgtccgctttcatggtgatcatggctgtgatggcgttgtcggaagtagatacgttagagagtgtgaagaagtcttccgacacagcaagcaaaatgccccctctggtttggtttgctggccgagcaacatagttagtaaggaattttgaccctaaagtgtgtgcgatgacatggtggtctaccattgacagctttgtttcttggagacatacgattgtgctacctgtatcacgaacaagatcatgcatagtgtcccttctcgccccttcattgaggcctctcacattccagctcaggatttggcagtggcgttgagtcattcctgtaccagagaaaac

SEQ ID NO: 152345 - DNA, 382 bp, Zea Mays
cgatccttcccaaactaattaatcgggcgctaccatgctatgttgttaggaacaggctcaccggagtcccaattttcgccagcaccgtggtcatgatgatccctatggtgtaatggtcaaattagtgcatgggtttatgtcacattagctcaggggtgacgctcgagcacttgctatcgccggagaaggttgccggcgatgagtttcctcgatcggacacatgtgttcgatcggagtccctttgagggggtgactatgtgaaggaggataaagtcagggatttcggtgtattgtcagagagacggagaaatagtgcccctaggtcttgattgagttctcaataagccaagggtctccatgcaaagtcgggtgtgtggacgcg

SEQ ID NO: 152346 - DNA, 789 bp, Zea Mays
tgctgaatactcaatcaattcttcaacacttctgccaggactcgagagaaggaaacccctgattgcccacgcaaacttcggcagccaccatgttctttttccagtttattatgagcatttagagcacctgccagcacaaattggactatgtaccaacaacaaaaggtaatagaactgtcgaagagatttccactaggccgccgcaaaaacaaaaagaaaagattgcacatcacatcagacacaacagagcacaagacaacaaatcggtggataaatttaggtgtccacatcactgcaaactgccttgagaagtctgatcacatcgccatccgcgtgcattgagcatgtgagaaaattgctggaccaaacatggaaaacatctacaaaaaacagtttggagacaagacaagatgaggtaggaacacagtacacgagataggaacacgagaccaattcaacgacccagtggggagaaaatttgtggaaaaaaggggttacagctaggatgcaaatgcaaatcacattcgagatacctttccttgtctacttgctgttccgcatggcaatactatccacttgtcaaattccttttccgcacaacatacacatcgatatgggtagtaatcaaactcctcactgattgttaggatatgcacatagcctatcaccctcacacacgttgcaggcgcactggaacagcaatcatgtttcaggaaacatattttaggctggattagcagaatttcatatgtgatcatgtctgacaaggttatgcagtatgtttcaact

SEQ ID NO: 152347 - DNA, 561 bp, Zea Mays
gagtcagagttcctttcaggccccctcggttgcaagcaaccaaccgccagcaaatgcctgttggcactgcggagaccccagtcacttcaagaataactgcccccagttgaaggcacctagacctacctactccaactcggtgaatggccccaagatttcctcggcacttgcctccaaggcacccccctccaacagtcagcagagtaggacccagtaccagagcagagcacgagttaatcacgtcgacgctcaagaggcccaacaagctccaagagtagtgctcggtgagttccttgttgaatttactcccgctactgtgctttttgattcaggagcatcccattcatttatagccactagttttgtggaaaaacatggcattccctctacacccctagaaattcctttggtcacccgaaccccggggtcagaccttctatgccagctcaaatgctcccaagtcagaattcttttaagtgggggtagtgttcttaacagacttaaccatcttgccatcccaagggattgatgtgatcctaggaatggattggctaactaagc

SEQ ID NO: 152348 - DNA, 799 bp, Zea Mays
acggtcttcgacattcaaccaatacaaagtcaccgcgaggggcagcgctagctacccttgcgtgcgacactccgcgcaaaagtcacctaagggtgcagccagactagcacaacaagtgcgcaaaatcgaagtcttcctcaaaagactatccgcgcaaaagtcgcctaagggtgcagccggactagcacaacaagtgcgcaaaatcgaagtcttccttaaaagactatccgtgcaaaagccgcctaagggtgcagccggactagcacaacaagtgcgcaaaaatcaaagtcttcctcaaaagactatccgtgcaaaagtcgcctaagggtgcagccggactagcacaacaagtgcgcaaaatcgaagtcttcctcaaaagactacccgtgcaaaagtctacaccaagaaactgtccgcgcaaagaccgactacaggcgcagccggaccgacataataaatgtgctagaccaagtgcgcaacgcccctatggatgtagccggacgcgcgaaggcgcacagcctcatcatacaaattatagttacacacatacaacgagggcatcacaccttacataggttcaaccttcggaattattcccatctccctatagttaaatagcattatcctaagctcctcaccctcaaaaagactttgcaactccccctcacctacactcgccccaaccggcgaggataacaattcccgcttgctagccctacccacacgaagccgaccgccatccacctcactcactctacgcttcgccaccgcccttcgccgcctacgcccagcactcgga

SEQ ID NO: 152349 - DNA, 2325 bp, Zea Mays
tgacagttggtatcagaggttggagtcctgcggtggagttcaagaggacgcgacggcgccttcggcgagaccatcggtgcagtcgcgcttcgtgttggaagccatggaggagcaccagcgtacgaaccaggagaattggaatcgtgtgttcgcggcgctggaggacttgaccgggcgggtcaaggaagtggagcggacgcaggatcagctgatgacgcaatccgagttggcggctgcagtagcagagcaggcggcaatggagaggaacgagctgtacgccaaggtagaggagacaggcaaggagatgtcgcagctgcgtctggagcagatgggaagggaactgggagatacatcaggaggatcggaagaggaactccctaatcgagatcagaatcgcattcctcaacaaaacagacaggtgaagggggagcaaggaaagggaaacagagaagggcgacacccatttgatgctaacaaagaggtattgcctaaacttccttttcccaagtttggcagtggagatccagtggtttggattgatcagtgtttggattatttcactatctatcgtgttcccgagtcaatctgggtgtcagcagcaaccatgaatttggaacagaatgctgcccagtggtggagatgttataagcttagtcatggaattgggaattggcaggagtttgttgcagctgtgactgaacagtttggtgctgatgcctatccaaaagccttgaggaagttgttggctctgcgtcagactgatagtttggagacttatgtggatgaatttgaacgagccaagtatggagtagtagttcataatccaaggatgggtgaaccattttttgttactcagtttgtgcggggactcaagtttgagatacaaaatgtggttcaagttcaagtacctaccaccatgaatcgggctattctgttggcccgcatgcagcaagaggtgttggaccgcagtaaaactcgaagtatcaagtctgctagtatggtgaggcaacaaccttatcaagtcaggatggaggagaagggtgttcagaagccagtggacttgagtcgagaaaggcagatcagagattttcgaagacttaatgggttgtgctatgcttgtggagaaagatttgaacccgggcatatagcgaagtgtgctaaaagaaatcagggtcagctgaatgcattgactactgaacatttccaaatggaattaactgatgaggtgttgttgcagttggaacaagaggaagaaaaagaggaggcgtgttgtcgtttgtcaatccatgctttatatggcagagacagcagtgatagtatgtgtgtcagatccatagtcaacaaacaagtgatggttatgctcatagattctgggagttctactagctttatcagtgagcacatggtgaagcagttgggtctgactgtggtgccttgccaacctgtgcaggtgaaggttgctagtggggagaagctgctgagtgctactttgattcagaatctggaatggtggtctaatggacatttctatcatacagatatgagggtgttacctttgggagcttttgatgctattctagggtttgattggcttaagcagcacagcccaatggagtgtgattgggagcataagaagttgcagtttctggatgaaggagttcaggtgaaattgattggtgatgaagtgcaagaagttacttctgtgcctgggatatctgtgttgcaggtacagaaatggattaagggcaatgatgtgtgggcctttgtgctagtggaatcggctgctgctaacaaggaaggttctcaacattctgatatccaacttctagttgaggagttcagtgatatatttgccacacctactcaacttcctcctgttagggtttatgatcatcacatatcactggttcctggagctgttccagtcaactctaaaccctacaggtattctccattgcataagaatgagattgagaaacaggtggctgcattattagaggctggatttattactcctagtgtcagtccttttgcttcacctgttttactagtcaaaaaaaaggatgggtcatggagattttgtgtggactataggaagttaaatgacttgaccataaaaaacagatttcccatgccattggtggaagaaattttggaggaattagcaggaactcgttactttaccagtctagacctcacagctgggtatcatcagataagaatgggagagggtgaagagtttaagacagcttttaagacacatttgggacattatcagttcagagtgatgccttttgggctcactaatgctcctgctacatttca

SEQ ID NO: 152350 - DNA, 368 bp, Zea Mays
gttgacgaatttgtatatgaaacggaggctccggtcgcctacattgccacggtggttcgaaatccggagactttcgactgcttcgccacagcagctgccgatacaggattgtccgtcttgaacatcaccagtagcacggctccttcaagatttctcccttacatgctgtcttatgataggtctagtgtgcagcttcttagaattagtttgttgtcatagaacaactacagaaagttgatgtgtgcttccagtatctgtcgttacgagactcgttgtaagggcatcaatcatgtcatttgcattttaaatgcctaacagtttttttttcctaatttgcctctactactgagcatgtaataagcaacttg

SEQ ID NO: 152351 - DNA, 667 bp, Zea Mays
ctcgactagacagcctagtcgttctggtcgtccgactaatcgtcgactagatcgactagtcgtccgatttgtgtgatctggtcgtcctggctagggttcagttattgggtcttttttagcccatctatagtgactacaagtctcctttcctctcctattctaccctagccgccaaacactggctccctggcctggccaacgtctcctctcttgcgccccctgcctctcccttctcttgcactgcgccactgcccctgcgtccctgcccctcctcctagacaccggcgggcggcggcacagccggcgggcagcggcacagcagcctgcgtccctgcccctcctggagtcctgcagcggctgtggctacaaaccagtggcgagatgagcacatcatctgaaggtttctcctgctccctccacttttcttccttctttgtactgcatgtagtggatggttgctgacttgctgttgtccctcctgctcccccaattcaaccaatgctgtgttgctggcctgctgccctatacagaatttgttgctggccgtgcacaagtggaagttattatgaataatgtagaatcatcagccgcatcaggtggtgctcctggttcagcagcttctgctactttagactctgctgcttttgttgaaaaggctatagcagca

SEQ ID NO: 152352 - DNA, 309 bp, Zea Mays
actccatggtatacttcgcgtgcaaacacgtggtataggaccgatgcacgtaccatgtagtggtcttgactcttgagtatcatgcagcctaagtcatggcaacgatacacttgttaggcatataatgttgtctatcacacataatgtgttgtacatatgacttatcaattaagctaaagctaagaaccattctacatgcttttagatgtgggatcctatctccgggtcgtactatccctagaggatctcgtcattccttgtatatttatgataggattatacttaaccttgccaagttccttgcttcga

SEQ ID NO: 152353 - DNA, 610 bp, Zea Mays
tgcctcttgcttgctacatggttagtaaatattttcttttgtaaaactatgccattttgttttacatagggacatgacttgaccgtatgtcccttcttagagcatctatttttttatcatccttgttaataaccgagctattttctttaatataggggcatgacctaatcaagtgcccctcttcaaagcattcactacacttcttatttttcttagtgtgaagtgtggcttgatcattaccttggatgttaccttgtatggaggcatggttgaggcttttggtagaggtattggttttcttcttttgttccttcctcttgacattcctcaagtccttgacattttcttcaatggattttgtgcatgctacggttgttcccgtctcaagattcttcaccatgtcatcacgattatcttgagaaggttgagcaatgacttcctttttagttgtgtcaagctcatccttagcctctcattttcttccttgagctcctgatatgcaatatcatatattcttggagattctaactcaaataaggatttgcttgttggcgagcaccaagcattaggacatggcaatatagtttcaatttgaacacatgtgcatgag

SEQ ID NO: 152354 - DNA, 1201 bp, Zea Mays
ctcccaaaatcccacacccgcttcctccttttccttgtaaatcgaatcgcatatatgcctctcgcctccaggacccaggtcggcgccgaggtaatacagtggtggacaccacgatggacaggaaggaggacggaccggggtcccggtgtggccacacgctcacaacagtgccggcaaccggggaggagggctcgctcgggtacgtgggcccacgactgatactctttggtggtgccattgcgctcgagggcaactccgccacaccgccctcgtcggctgggagctctaggatccgtacgcccccttcaacctcagcttactcaatgatattatagtttttttagagctagactgctagagttcaaagcaaatcgagagggaacagtaagctatcgaatactgcccctttcttaaaaccagaggttcttcctcttgtcaaaaaaagaggggatattaggcaacgggcttgcttgttaatctcgctttggagtaggagatggggaaaaaactttgtggtttattaattgcagttagccagttacttatcaaagtgggattcttattacagttgtgggacattcttgtagagaacaattaggacattatggttctgttttatgcctattttttctgccatccttttgcttttgcattatgattgtgtggtaaaagaaatattcaacggctccatattggaatgtttctatggaatttcactgtaggcagacattatggaggtccattctccattgaacactctagggtgtcttgaggcagttacaaactagcttgaactgtactgcttcaaaagctaaacctgaactgaagtcagatgtcttccaagttctcagaggcttaaaagtgcttaacattagagtgttacactttttattctaccgactaccgactttttattgaaccactataaatcagtcaaatcaatactcgaaatggttcaatgccttagagttcaaatggaattttatctctttttgatgcaaaaattggaaaaatcttaccatagccttgtttttgtattgatctatcacaggtcttgctggtgccaatgcagatgtccactgttatgacgtgttatcaaataagtggaccaggtacaatgtttcagaaattgcctgacttctatgaatgtgttgcttagacactatgtttttctgttttcttttcctaaatttgttggatc

SEQ ID NO: 152355 - DNA, 473 bp, Zea Mays
accaacacgcagcgtcgcaacaggggctgcagtacaaaattcatcaagctctgaaacgtccctggtgcattggtaagaccaaacggcatgaccaaaaattcaaaatgaccatgatgtgtatgaaaggttgtcttctcaatgtcatccttgtgcatacggacctgatggtaccctgaacggaggtccaacttagtgtagaatcgagccccatggagttcatcttgcaactcgtcaaccactgttatagtatatttatccttgatagtgtgttcattgagggctctgtaatcaatgcaaaaacgccatgtattgtcttgcttcttcactaggaggaccggggctgagaatgtggatgtactgtatcggattataccacgacgaagcatatccgcacattgagcttctaattcatccttttgcaatcgggggtaacgatatggatgaacatctacaggtgcagtgcctggtttcag

SEQ ID NO: 152356 - DNA, 680 bp, Zea Mays
ctgggtgagtgtcaacaccatccttgagggccaagttctctacagcagccacctctaaggctgaaggtccctcaatcacttccatgggagcaggacaatccaagtcagtttcctgaccctcaagaccgcgctccaaggtcgatgaggcgcgggacgctgcccgggatgaccccaacccggcgtcgaacacatcagcacaaacatccatcgcgtcaccattcgccggctctgataacagatcctctggaaccatatcttcaagagtttgatcaaagttcgccagagacaatccttgtagaccaatgagggcagacagagcaggagaaggaactccactactttccccactggctacgtagcgccaactgttcttccgagtcagagggatctcatcttcctcctcctcctcattttcatcagcaacacagatagcacacccattggggtcagcgtcagatggatcacacccattggggtcagcatcggtaaattcaggcacgggcacttcctcaacagcaggagccgaaggaccagcatcccgatccaagctagatactcgccgaagatgtctctttttctttttctgctcatcggcaggagaatcaagttgattggctcggcaagggcgcttcgggcgaacactgacaggcctctgaatatccaaggctttaccagcttcc

SEQ ID NO: 152357 - DNA, 672 bp, Zea Mays
cctggcaagtctaccagctgcacgggatgaagaacctggcaaaccaaaattcacattcctattagtggccacgcaacaaaaagaaatcaaatatgttattggaatctgctgttaccttgcgagggacacgaggatgaagttggtgcggatagcgatcagatgaggcgggcaccgggagtccaggatggggcaagaacccccagcgatcggatggagcgggcaactgcgatggcgttgccgccagcgtgacagagaagatgaagacctagctgcgatggcgacacgaaaggacgcatgcaacagtcatcgggcacaagtaacagcagagaacgtgacgttaagaaacggtgtaagggtataaatgtccattataacaggtaattagtgtagtggggtattttagctaggaaaggggtttaagtggggtaattagccgagcgcaacgaataccggggtattttggcgagcggcaacgaagagagacctaaaaaagcaataagccccgcgtcggagggcaggtcgatgggggagccaatgactggagaacaggccggtagcggtggtgcgccctatgcccctacgcaggctgcgctcgggtgaagatatggtgtggccgcgtgggtgacaggagggtggagagggagtgggtcgaagtggttcacttgtttttga

SEQ ID NO: 152358 - DNA, 456 bp, Zea Mays
tgtgtccctgtgacgctgcctgtgcgatgctcaaaaactcccgactcttacccacagaacatctcatccttccgaactagcagaaaaacaaagcacgggcgcttaagggacaggcacgagagaagaaccaacatggatagatgatgatgatgatggcaaaaacaagagttggagagcagccgggagctgacttaacgattgacaataatatcgcacgaggaacagtgaaacaggaggtggtcctcctagacgtcacgtacccatcatcctccgtgccggtgcgcccggtgcctggtccatcaggtttgttgccgagtcctaaattttggcttcggcgtccagctgacttgatggatctcccgtctcctctctcccgtgggggtggggctttaatgaccattagccggatatccaggcaaagcatggctatagctagttttgttcccagccctcgcg

SEQ ID NO: 152359 - DNA, 366 bp, Zea Mays
cgaggatctgagagactgcgctcggctggttgtagcgttggaggaagaggtggatgaacttggcgaggaggatgacggcaagcgcttggatgattacgaggaacagcatgtcgagggccacgccggggacgcgcgtgaccaccaaggggtcgatctgcggacaaatgttgaacgatctagccattgtgcagccccggcagtcggccgccgccgccgagggcgccgatcgagtgctagatggccttgctacctccggaacttcttcgacagtaggtacggcgatcggcaagctggttcgtctcctcaggcaggcagtcgtcgactagacggattcaactccgggcgtactgcggtcttgcatgcgat

SEQ ID NO: 152360 - DNA, 697 bp, Zea Mays
gggtagtctaggtaagcccctggctaccatagaatttggtccaaaaacaaaccacactttaatggacatggtgcgtattatgttgagttactctagtttaccattggagttgtggatagaggtcttcaaattcgttatccatatacttaacagatttatagtaaatcagtgctaaaaatacatatgagatatggaatgagagaaagcccacgttgaactatctgcatatttggggttgtccaactgaggctagcatctttaatcctaaacagagaaaattagataaaaggacaagttgccattttattggctaccatgagaaatcgaaagaatttagattttactgccaaagcaaatatactaagtttgtagaaacaagacatacagtattcttagagaatgagatgatcaagtagagcatactaccttgagaaataaaccatgaggaaaagagggcgtattccgatggtataagaaccatatttctcgatacccaccaaggtttcaccactagtttctccaactgtaaatgaaaccctagctacaaatgttgattcatcgagcacgacaatcaatgagcaagttgcattagcccctatggtgtctgagcctctggcactagttgaacaagagccttcaaaaatagaaaataaacttatccttaatgatccgccactggaacaaccctagaaccctc

SEQ ID NO: 152361 - DNA, 382 bp, Zea Mays
gaatggccgactactattgcagtcttaataggtagtagagatgttgctagcatatgtgtgcggtcaattcctactaaggcgttgttcggttgggcctggaatgacctggatcacggcatgatccatgggtgtcatcccggcacggattcaatacaggcccgcaacgaagtagtcgttcgtttagcccacgcgtgttcagaaaccaggcccaatccacgcgaaaacactgaatcccggcctggaattgatccactaattaacaggtgtggaactcctcccagcgcctgggtgtggaagcgacgacgcgacggaaccgcaagcccccttccgccgtcggccgccggcatcttcaccagcaacattttctcctgtgagatcatcg

SEQ ID NO: 152362 - DNA, 708 bp, Zea Mays
tattcttgtttacagtccaacatgggaattgcacttgcaccacattgagttagtcttgcagctcttgtctcaggattcatggcaagtcaagctgtccaagtgttcttttgggcaacaggaaataacttatttgggacatgttgtcagtaagacaggagtctctactgatacttccaaagtagcaactgtggtttcgtggccagtgcctgctacaataaaagcactccgagggtttttgggactggcggggtactatcgaaagtttgtcaagaattttggagttctagcgaagcctctaacggaattattaaagaagaatgttgtatttgtgtggacatctcagcatgataatgcctttcaagccctcaagcaagccttatcctcggcaccagttttggcattgcctaattttcacaagcctttctccatagaaactgatgcttcaaggaagggtattggagctctcctgcagcaagatggtcacccgctggcatttgtgagcaaagctttgggaacaactaacatgtgccttttagcttatgaaaaagagtacttagttattcttctagttgttactcagtggcgtacttatctgcatcatgccaaattttgcttctacagtgatcaacgtagtttgatccacttaaatgagcaaagcatgcataccccttggcaacaaaaagtgtttaccaagctcttgggtctgta

SEQ ID NO: 152363 - DNA, 331 bp, Zea Mays
tagtcatctagtcaccagctcgtttaaaggattttgagtcagactcttttcattttgagtcacgagctgcggtccaacaacgcgtgaggcttgagcagagacaagtatggcgcctatgcatggaccagctgggcttatcgtgaaacacatgatgcatgaaacatgaggacgatggggtcatggggacatgcatgcatgtcgttacgttcctgccaaccaaccactgcataatgaacacgattgatccaattaagatatgtaaggagtgtttggtttgatggatcaacttattttactccacaacttattccattctacagactaaaaaaat

SEQ ID NO: 152364 - DNA, 640 bp, Zea Mays
tgacaacttctccgccgccgcatgctccaactcaactgtttcccctctacctggctaccatgcgcggccgtattaaaccatccctcacatcatcctccacccaaaccaagtcgcgccgcaaccctccacctcttctagaaccgttcgccattgcagtgtccgctgagctttgtgttgacgagagaatcgccgcgggcgtctaacggtggggtgcctcggtcgatttcgggcatgctcgtgggtgttggagcgtggcggagttggtaccggcaagtaattgcgcagtggacaatggtggcgttgtgaatctctcaccggagaggtactccgccccggttccgccttgccccgccgctcgcctatcacaatcgccctaactccggtaagaacaacctcggtatggttcgcccactcctcttctctgcaaattatacgttagttgcgaattgggggcggaatttctaaatgtgggtgatggtcggccatggctcgggttcggcgtcgtccgccattgtgggtggagcattctgctccatcaatcaccttagcagagaaccgagttgtgtcacccttgtgatctcactctgaatcaccatgcgcggggtggatctagcactcggaccgctgggccgcttctgcg

SEQ ID NO: 152365 - DNA, 496 bp, Zea Mays
gttcatgcccagtattacatctatgtcttgcccctttataacaatcatgttggtaggaaattcatgtccggccaatgttactgatatgtggaaggatacttccttagtaaatatccgtctcctaggtgagtggataataaatccctctcttgattcagtgcaaggaatgcaatgtttttccacaaaattcttgcttatgaagataggtgatgcactagaatcgaataggataactactgggtaattagcaacaaggaatgtacccatcattaccagctcgcactccggtgttgtagccacatgggtataataaattcgtccagttttcttgaaattcttgcccgttgaaatattggccgtgttccccttccctttgttggagttcccagaattctgctgaaaattggttttattttgcttcgggtatgggcagtccttgatgaagtgtctggattttccacaattgaagcaaccagtggaagaagtgggaagagca

SEQ ID NO: 152366 - DNA, 540 bp, Zea Mays
gaagaacttggtggactggtgcgtcgtcgtgggctccaaccattgcgctgtgggactgggatcgtcctgaccttcattggtgcgcgtggcgaggatcaccagtcggctccgtcgcgaatcagcatcaccgaggagcgcgctctgtcacaacaactggtgagcaccccttcctggcttgcgaggagagagagtaatgggcgtaaggtagaagatggactaggaccgtccgattgataatgagcgcctcagattaggttagcttacccctttggctgggcggaaccccgtccgtcgatcccagatccaaaggctatcaccgtgtaccagtcactttaggggaggttgaatctgcacccttgatggctgatcgaacgactcagaccgcgcactgattcttatcccgcgccaatctaatctgggacgtccatattcgatctggcggctcacgatcaccgatacctcttcggacgtgccgttttataaaagaaaccccctagtttccagtattcaacccgcagtccaccacggggtaaatctgag

SEQ ID NO: 152367 - DNA, 432 bp, Zea Mays
ctagtttttagaaactaagtctagaaaccagtttttaaaagaatagagtggacccaaacacggcctaaggctagtttcaaccggagcgataacgctcggtgatgtaatccggcgggcagacgcgtcctaatgttccggtcccaacgccgggtgattcggacgacgatgggtcgattggtcgtgtgccggtcctaatgttggcccgtttggatgatgggtcaatgagcctatcgatcagttgtttgtatcggtatcaatcgtgttagactgtgtctagttggtactgaccggtgataaaaaccacttcgctaaatggttggtttggatgatcgcgtcgataccgaccgaccgattatacgtgtccaatcctaatcggttggtttggtcggctttagcaacgtgacattttctgattagtttacatatgacaca

SEQ ID NO: 152368 - DNA, 650 bp, Zea Mays
ttcgtctggtagtgcaactcgtgcactcggcagaatgcttcggcatctgggctcatcccttggcttcggagggcccagatgaagacactaagcctaacaatggcgttaggggtcagctgattaagatatatttcaaaaaaattcaagacttcccctatcatctcattcagaggaagtcgcagtcctcctctgaaaaagctcttgaaaaccactacttcatcattcttcggtgctggggtggtctcttctccggcaaatcggacaagtttcctttcagcttccccaaagtaacctagcttcatcatcataggcatgtcagcttcagacacagtaggtttctcaaaatctagatggctgggttttgatgggatcaaaatactataatcgtcttcatcctcttcaatatcttcttcttcagcaatgatctgttcagcttcggcaataagggtaccttcgtcagtagttccctctgtcacaaccaaactgattgtttcatgactttggaaattggtgttgtctcggtgaccttggtctcttctccttcacgagtcacccttgcagtcgagccatctgatggattttttgcggtttttacgaagttgatgtttcttttttgcagttttgacgaagctcactcttttgacgaagtt

SEQ ID NO: 152369 - DNA, 610 bp, Zea Mays
cctctgtctgggttgcagctttaacatgctcacagccagatttttccaaaattgctgcacccctctggcaccagcgaaagcacaaaaatcaccacggtcgctgaggatctcttcaaaagcttcagcttcttcaccgacccattcgataatcccttcgggatcgcctttaataaatttttgctcggatgagtaagcacccacctttgcaaaactatctttcagcttcttggcacgatccaaggatttttcgtaatatctttcttttgattcccgaagctcgtctacattcttttgcaatcttgcgctagtccactcgcttatctcctgctttgccttagccacttcaaaatcttcattcttctcggcaagctttttctttaaatcttcaatttcggctctgtgagcttcggactgcgcgacaagattgacttcactagccttaactctgtccaccaaggaaagcagaattttgtccttctctgtagcttcatttctcagtctgataacctctgaccgaaggttgttaagggctatctggcaactttcatcctcagcattcttctgtgctctcaaagcgttgcttagaattaagccctgcacgaagaaggga

SEQ ID NO: 152370 - DNA, 869 bp, Zea Mays
ggtgtcagccacccagtcagagactgaggtgggtggggccagcgtcattgtggaggagttggcgagagactgcgtgtctcacccattggtccagggcccccacacaggtggggccggaggccctgggaggggaaggagcccctgctgaggctggggaggtgccgagggcgccgccggaggtggagcggcaaagaaaacctgctgaggggtggcggggcaaggggccgaggtgcccgcggacagcccgggccacatctggatggtgccagtccacgggttgtagaaggatggccactgggagccacctggtgaatggcctcggacgttgcgtccactcttgcgaccacggccatgaccacgaccgcgacctccctggagccagtaggctgccgaagagctccagacggtgggaaaccagagtgcggtgaagaggatcccccagaggcagaggggggagcccgaggagcgctgtagagcgtcgtggcgggagcggcgatcgcagtgggcggagaggcgaagctcctcaagaagcagatcgttcttggtctccgcaaaggtgggaaaaggcttcatgcgggtgaggatgggcgtcacacgatcgaagcgagggctcaagctgcggaggaggttgagcacgaggcactcgtcggtgatgggggccccgagggtgcgaagagtgtctgccatcgtcttcatctgacggcagtactcgtccacagagagatcgccctgagcaagctgacgaaaggcggtctcgaggtacagaatccaagtatggcggtggccgaggaactgagcctcaagggcaccccagatccggtgagcagtgtcgtccgatacacgaacgatgtcctgaagttcggccgtga

SEQ ID NO: 152371 - DNA, 295 bp, Zea Mays
ctactctacaagcctgtaaattcacctcaataggaagcaccgcctcttgtcaataaaccaattcaaatggtgtcactttagttgctccatgccgagatactcgatgagcccataacgcctctgacaacacttcatgccacctcttcggctgttctacaatcttcttctttatcaacctgatcaacaccttgttgctagattcaacctgcccattagctgctctcgctgtccagcagacgacgacttaaataggccaccacactctctttcccaccatgttcttgtattaaaacag

SEQ ID NO: 152372 - DNA, 363 bp, Zea Mays
ttctagtctagtctgaaaatttgtgctgcatactcagtgcatgttcttccaagtaaacgccatacactggcgttgagctgtatttccacttgttgagaacccacatgctgtacagaagatctatggacttataccatttaaacctagggatcacagataaatcacagtaggaataacgaaacacgtcgcatttgcaaggctgtgattgtgaggttgggtgcattaacaccatgaataagtggaatcttcagctgatgctgatgaggtagttctcgtcatggaagggacatgactcttctgttattaccgaaggaatggctggagccttttcttttgttctgtgcaagtacttcaaatctgagc

SEQ ID NO: 152373 - DNA, 534 bp, Zea Mays
tagaggccctttcgcaagtgtgcttcaactagaacacatgattctttcaaataaaactattaaaagagctgcttaggattatggaccaactaataggatttatcaaagaaataatgagtccactttcgtgccgggctgctagctgttgggatgctatctgacccacagcctgccaacctcccttacccattagagttccagtagcattaggaataaatgtgcatccagtttcagttccaaaccatgaaacttatacaattccttattgcaaagttcaatcatcagtgaagcaaatccatatacatcatgcaaatgccaagtgaaacccagtacacttttgatgcagaggagcctcatgccctcatgtaacattattggtcctacacattttgtacacaaactattttgctcatacagctggttatatatcataaatattcatgcaaccggagtgctctgcattgtgtgcaattggtgaaacacaatggtattttccaccttgtactgcatcttcttagggcagttgaagtctgt

SEQ ID NO: 152374 - DNA, 811 bp, Zea Mays
caaacactctataagtgcttccatatgagtgattagtaatatcttttgggttaactagtgcacaaatcacttctatgagattaatggatgaggttttatgttttttatttgtaaatttgtggtagtctattttgtgatatattgatatacactaaatctttaacaaaacattttactcatctatgtttttaatgttttatatgctacacatctatttggtaaccttgtgaagtacatttttatatcgaataagtatctttttttggctatgttgtgacctcacacggaagtaaagtagatgaagataacatgtgtgctataaagagtcggtcaacgcccacaaccgtgataaaagtgtgaagcttctatggacttatatgattttattattactttgtgaaggattaaagcactattatagccttgctaaatgaattgacaaaaaggacatcatgtttcactgagcaaaagaacaagaagtgtcctttgctctttgaaagaacatgcttaccaacacattattacaacaacttcctaattttgtaggacttttgagcatcaatgtgatgctaatggagtttgcattagtggtgtattgatgcaaggtaagctcgttgcttactttagtgagaaattaaatagacattcttaattattctatgtatggcgaagaactgtatgcagaatttcctaattactctaataactaagtcaaaataaactgaaacgtacacatgcctatgtgggttgaatttattgaatcattttcttatgtgatcaaacataagaaagaaaaagataatattattgt

SEQ ID NO: 152375 - DNA, 361 bp, Zea Mays
gtcgacaatgaagagtaacagcaactgctagagccccagtggccagtgccatcctcttccccctcgtcgttgccgccgccacgaatcccatccccctcccccacaaacgccgtcgttgtgcccatgtcgaccatcctccgcctgcacgcgccgtctcctgcagcggagcgctggctctcctccagctgccctgaaccacgggctcagaaccgcgtcaccactcgacgcgtcttggtctctcgcccgtccgtatggtcacaacaataggtttttgcagttccgtctacctcaccatgtctacctcaccatgcagtcacagcagcaggctccagcagcttcaccagattggtcgcccacttgt

SEQ ID NO: 152376 - DNA, 546 bp, Zea Mays
ataatttcataattaatatcgttgattagtggagagggggagatccatgggggcaaaattttctctcatcggtgtgagggggagggagaggatggacggtgccagggagttgttgtacaccgtcgcgagggggagctgagagtggatcgttggaggcagcctcagtactgttatcgatggcggcaagaggttggggtggctggtagcttgcaatgttgggatttggtgaggagcagggctggatgccagagggaaatgctattgtgaaagatgatgcttgctacacgtgtgcggcatgcgctttatcagttgccattggctgaaaaggactgtgatcaggcgttaggtggaatgctgattggctaggctagcaaggatagtgctatttcatattcttggaatataatatgagtgaattgtacatcagtttacgaaggataaatgtaacatcgcacgggctcccaactcaccttcacttatttttatacattgtttgatttacattgtcgtgtcatgcttataaattttatgctttgtttgatttgt

SEQ ID NO: 152377 - DNA, 519 bp, Zea Mays
gtggccgctgcattcgtctcttgctgtggatgtttgtttgattgtttcggtaggccttgcagtatataggattttggtgatttcattagcatagccaatcagctgttgatttggtttcccactgaacaaagattcaaggtgcgtgtgttgcaatcggttgtacatatttcacctttgctggctgtttatttagggaaacgacggcaaccattgaagatttgtggtttcctgtttttttttgggagtagatctcactcagctgaagtcgtctctatcaatactggtgaagcctcctagatccaaatgtagcccattgggtttgggagattccaagacatgttgggcactcgagtgcagtagaccatgcagaacttttgagaagatcatacataactttttcgtatgttttagctgaagcatgtgccagctgtgtcgatccatcagcgattacttcaaatatcacaactatcctcctcgactagaaaggcctgctatgtgcagaaggtgccaaaggcttag

SEQ ID NO: 152378 - DNA, 450 bp, Zea Mays
atctagaggagcatgcatgtatgttcttactgcaagtatattattctatggttgttttgttgtcacaagtgccaccaataatgtaggcctcgccattttctttttataatatatggatcatcacgctgcttgtctatatgtttaataagagcttcataggattttgacttcatcgtatatacttctacgcaaacactcattatattcctggaaaaagattgctcaactatattccccatagaaaagtactcatgatatatccatatgtttttttattttaataacaagagtgtggactcaatactcaattatattccatatcagtcacttagaatacaacaatacataatttatttttccctctcacaagcacaagaatcgctcctgctgtaagatgtcacactttattaccttcaggttgcaagaagtgccaatttaattaacatcttc

SEQ ID NO: 152379 - DNA, 470 bp, Zea Mays
tgaaaatcaatttcaatatattttgtacgagcatgaaacacaggatttgttgtgagataagtggcccctaaattatcacaccataaccttgctgcaggtggcgttggaacttttagttccttaagaagtgattgcacctagataacttctgctgttgcattggctagagctttatattcagcttatgtacttgaccttgacacagtggcttgtttttttgcactccatgatacaagattactgccaacgaaaattgcaaatcctcctgttgatcttctatcatcaatgtctcctgcacagtctacgtcagagaaggcactcacaagcatagatcggcacttgtttatgctcatgccaatatcacacgtgagttttacatatctaagaatccttttgactgcagaccagtgagctgtagtaggacaatgtagaaactgacagactctgttaattgcaaaagaaatatctgg

SEQ ID NO: 152380 - DNA, 427 bp, Zea Mays
ggggaagtctatccccttatttcaatccttagattcgggcaaatcctatcggactgaactttccccccaactaaattaactcttaaaggtgaaatcattggttctatggggatgttatgtgcttctacccaagatgtagaaacaaaagaatgtgtggcaacagtgtcaaataatacatttgctggatgggattcgactagaaacatacctactgccacgtcctgagaatcttggattgcttcggcctccaggtggttcacctttccacggttgtaggcctgaccacggcctcctggtgcttgttgtggtgctccttgtcttgctggggtattgagtgctggcggctgctgatttgccttctttggacagtgcttcgcccaatggttttgttcccccacaatagaagcatgcgcggcctcctacttgc

SEQ ID NO: 152381 - DNA, 471 bp, Zea Mays
gctagcataatccatgcaccgtcgcttgccaaccatcgttgctgggccaattcgacgccgtcgagcctccctcgctgccagcaacagcttacccagcatctcctcgcctctgttctactcgcctgccgctgctcgctgtcgtcgccgtcattgctgctgcatcgcttgacgtcgccggtgctccccaccgaagagcctcgtcgcattcctacacgttcttctccgcgcctgctgctgccgtcgcgccatcgccatacctaacaccgtcatcatcacgagaaagatccgtccctgcgcctagctcgtccgcaccgctaaaaccgtcgatccgctccatgtatcgtggccacgtgctgaaggtagaagacgagatctattttttgttagctacccttcgatttttatagttatcatcgtttagatccatgcgacgtttatattttctttaactgaataattgtatataaaatg

SEQ ID NO: 152382 - DNA, 460 bp, Zea Mays
gggggtggatagcctataaaattctttctctaataaaagttaacacaaaaactaaaataaaacttatatgcgaaagtgtactaagtaatagagaatacttcacaatatgatgatgaaacaatatgtaatagcaagcgtgactgtattattctgccatcaaactagtcaaacgaccaccatcagaaccaaacaccatggtccgatgcccctgttcctagtcacaacggttacctatgagtgggaccccatggtcaatagtgtgattgtattgtatgatgctgcatttttctcaattgtcgaaccaaagacaacgggtctgagcattctagagagtaacctagtcagttgtattattctggcacccactatcgaaccatagctcaaggtctgatgaaccctctgctaaagctctacacttagtggttggattgacactatactagtccgacaccatcaacag

SEQ ID NO: 152383 - DNA, 374 bp, Zea Mays
gcctccagtactggggggcaagcgcagtcaggccgattggaccactccaatcggaagaaatgaaaggtcatactgtacaattgagacctaacataccgacatggacacctccacccccttatccacctatgtcatatccatacacatatttaccttcaccatatgtcctaaatcaaatgtggggcatgccaccatacccatttgggatgccacagtaccccgcctggggggcaccccaaacatctgtttttgacaggctgacgccaccaatacaagatcgattgagcaccgctcaatccggtcaccaggcacagacccaacaggattgccggactactcggcctccaaggccgaccaatccggcaggggggcat

SEQ ID NO: 152384 - DNA, 849 bp, Zea Mays
tctccatggttaccattgcaacatctggaggtagggttggacgggcaggtagccaggagctgagggcaccagcgagggggacttgcgccagatcaggttaggctatctccagcagcagcatctgaggagctggcaccagaggtggggacacttcgactgtgaggagcaggcaggggtcagcaccatgtaagagaaaggggctggcaatggagaccaacatgcaaagcacagatgatgccaatgagaggctgcaatggcgaaagaaaggaagcatcagaaaggatatgccgaggattaatttggtaattccatgatatgattttccgtacatattttctgaaatggttttgcacctattggataacattatctaagttaaactagtggcaatctaacgggaggggattccagtggtagttttccaatatatgtttttaatggcaaatttcaaataggattcaaatcagtagcaaatatgcatttgtccttttcattatcgttaccccttcgcaagacttgaagtcacatcatatgctgtttttgccatcagctggcgcacctggtatcagtagtgttttggtttttggtttgctggtcccgagaaggaacaccactgcattcaagcaggaggttgccagcagtaaggctggctttttttgagagaatagtacatatgtgataagtggatgttcaaacacataaatatatgtttgatttagttagtgagagttgttttagattgtttggaccacgttcatcaagggctagcgaattcatgacaactttcactaggttcaattcacatgacattggcttcacgcgcgacgacacccatcggtattgttgaag

SEQ ID NO: 152385 - DNA, 409 bp, Zea Mays
cgagctggaacgccggaaacttggtcatgaaggagtcgacgtcttcccatgtagctgacgcaggggactgatccttccactggatgagcacttggcgtatgccgcgggcgactcggatcttgacgacgcgttcgggttcaggggtgaccgcaccatggtgcaggaccggcaggggaggtgttgtcgctggtggagtgccatggaacttcttgagaacgcccacgtggaacacgtcgtggatgtgggcacgggcgggcagctctaggcggacatcgacggtgttgacgatctccgtcacccggtatggcccgtagtactggggctttagtttgtcggcgacatcggtggccagcgacgatggggaacggtggcggagttggagcaacacccattcacccacctgatagat

SEQ ID NO: 152386 - DNA, 1297 bp, Zea Mays
gctttttggagggttttggccagggtatcggtggcattttgggtgtggaatcccagggtgtcttgtttgttgtggcatgataatcgtgatgcttctgcggcgcttcctttctcgattaaaaaaaggggtaactggattagctagttgtgcttgtgcctatacaaatctcgaataaggctgcgacaagactctccccaggaagcgctcgtcgctcgctgtcgccgaccgcgtcgctattcgagagccactgatttgcccatggccgctgctcaaccaaattgtcattacattgaaggtaccgcacgagaggggcgcgttggttttgggtttcggaacgaaaaacgtgatcaagcacatgcagtaagatatgttgctgcttagcaaattacacgccctacacacacatgcattttattcagccaacggctaggttactcgtgactgtaactacatgcattttgttcgagtctagtgctcaaggacagcactaaatatgcaaggaataccatctcgcacacggaaaagttagggggtgtttggtttctagggactaaacacccccttagtaaaatggacagcatgattgggaatagattcagcattcaccggagaatgggtggagtaccggagctgccagcttttctcgaatgtgctatgagcagggagaaagttttccacaagtgcagtaaacaaccaaaaggaaggcacttcggccattggatgtaggtggagttccctgtgccatggctgtggtcttgtggaaagcaaagggaaaaaaaatgttgcctgcaacgggacttcgggctccaccgtcgatgttctgtctccaatcctcgcgagtaacctgacaaagtggtgccatatcaagtctcttgtcctatccattgcactgcagtactgcgcctgctgctgctcaacctgggcggcagccgaaccaagtctttgaagacataaaaaaaaattatgtgtcgttaggaccattgcttcgtgtctaaacaaaaggcaactagaaagtgcgccactgaacacagcagccgaacaatgaaccaagacctcgtgaatatcagccattattcttgcaaaaaaaaaccaggcattattgaccgaatatacggcatctaatgtgtcatttttgttcaccagcaaaaacagttcatttctgaactatcactctccatgacctaagctaagggctaggcagcctttgcactccagagttactttccattataagtcccggttaccgactcgattggcccaagaagtggaggaatctaatgcttagcatcaacaaaag

SEQ ID NO: 152387 - DNA, 1338 bp, Zea Mays
tgcagatgctgagagcttggtttcacgtggtatgctaaagcgcagcacggctgcaacaaatgctaacagcaactcaaggcatgctcttgcagtcttgctctccttacgaatatgttcccttgttctttcgtaatgaatgtttttggtcagaatatacttgtgtaccttataaatcttttcttaatcataacagacatagtaagtgttttcactagtaagcaccactatttgtttgcttctatctaggcctttcaactaacttttaaattatgtttataaatatgatgttaaagcgaccttcattttgtattgcagtcgatcacagtgcatcattactatacgtgcagacagtgaacatctacttagtagtgctgttctgaccatagcagaccttgctggcgcagaacgggaaaagagaactagaaatcaagtctgtttctccatcagcgttactttgtaatatgaaaaaacaaaggttcgtttctgaaaaatgattaaccgtttgtttgcagggttcaaggctgttagaaagtaacttcatcaacaacacatccatggttttcagtctctgtttgagggtactgccaaatggcttttctcccgaatctcttctttcactggcaaaacactatcattcactcatttgcacctttgaattaatgaagatgtggtagcctgttcactaactctttttcgtattcgtaattgcagtctctgttagaacatcagaaaaaccagaagaaacccttggaaaagcatttcaagaattccatggtgatgtttcttaattcacttaaagtagtagtatctaagactattttataactgaaatttcactgtcagcttctgaatccttttgccatttcgatagttgacaaggtacttaagagactacctagaaggaaggaagaaaatgactttggtatgctacttggacctgaaattatcacttgtaacatagaaagtatattagtaaatttgttatgatcaacactttccaatgacaatagtttcaaaaaatgtaaacaaaaatttgcttgcaaaaagtaagtgtaaaaaatttgaaggccttgcaatatccatagctcaagcaaaaagaagggagttggttggcttttagtgctacatttgttttgtgcaagagatttttagtgctacataacactgttgctaaccctttggtgcacacgttgattcttgtgtgctttaatcttcactttatttatatgctcttatttttcagatcttgaatgtgaagccaggggatgatgattatttggatacatcatttttgcttagacaagcatctccttacatgaaaataaagtactgctactc

SEQ ID NO: 152388 - DNA, 371 bp, Zea Mays
gtagaactctctcacatcctctggaaaagcttcattattctgtagttctgggtactcattcctaatatcatccaacatctcttccattcgatctacatccaagtccccatctgactcaatagtatggtccacctctccatgctcatgccatacgagatagttcggcataaagccatgtttgaaaacatgatacgagagctccacttttttcaaccgaaccaagttccgacattttatacacgggcacctcgctaaacgagcatcaccagcaaatgcgagtgccacgaattcatctgcaactctcacccatgcattagagtgcccatgactgacactatcgaatccatcgtacatcgcccttcttcgatcgt

SEQ ID NO: 152389 - DNA, 946 bp, Zea Mays
tatggttttacagggtctctttagcaaatattacatcgcgaaggggtaccggtgaagatcggtcgtccgatcactgatcaagggcccatattagatcgcacatccctgcaaaccggtacgactcggtatccttggatcataaatgaacggcctagattttatgaggcttgatctgcatcggacggccgagaagggttcaggccgaaccgatacccaagatttaatccctgccctacaactctgatctaacgaccatccacacgtcttcaacctccagacgcacacaatggccgcgcagggtgacagccgctgggctacctcgaggaggagcacagccatcagctcgccccacacgcgggacaggcgtcgaggcagcagcggacgcctggccgttgcccaaggcgagagcacacccaggtaaaaaaatatcgttgcatggacataactactcctgacctttacgaatctcgacggagggggaggtacctgcacgattcggtggtggccaggcccaggctttcccgaaatgatggcgtcgatgttgctacccacagtacaagcagcgtttgcggagtagacgaactccggcgagatcctccatggcacaggttcgatctccagagccggcgcccgggaccctggtgacggtgtgtccgattcctttggtggctgcttttagttctctctcggcaagggtacgagcggtagatggtgatggctgtatgcctcaagtatttatgcaccagagggggagatcggctggtggtacctggctagcatcttgtgcggcatgcagcgatttggtcgcaaggttgttacgaggatagagatgctacagcagagccccacatgtccacgagccggtgcccgcgagcgtccttccgcccgacatgcatggccctgtacgtgccgatagcaaacggatgcatgcaagagaattcaacga

SEQ ID NO: 152390 - DNA, 675 bp, Zea Mays
gggcaacagccttctgctgccatgcgtttgccactgctgcgacggcgtggtcaacgaggtcggagcaggcgccaagatcaggaagaggatcaggaagcagcggaggcctgctgacagcagcagcggcaggagcgtcgtcgtcagagctgcacggcccagacacgtggtgccggtcgtggacgcgccggaggacggcgacggcgacagcggctgggagcgggagcgggaggcgtggcccgagtgccgcgtggaggcgccggccgccgccggccacggcgaggacggcggggtgctggtgaggatcgtgatgaagaggaaggacatcgcgcagctggtggcgaggctggagcggcagcgcggcgccggggtggaggcggaggtcggcagcagcatcgaactcgacggcggcggcgtcacgatgagcccgtgccgaggcgcgtggagcccgcggctctccatcataccggagaactactagccagcccagggcccagggagatccatgcgtgctgtgccaccgtacctccgcgccgcgcatgcatgcatggtttgttctgttctgttcgcgcggtagtttactatacttcgccaagctagcagttgtacatatattgtaaacgaacaaggtattttgctttcgatttttttttttggttttacctccgttggatttct

SEQ ID NO: 152391 - DNA, 420 bp, Zea Mays
ttaaaatataataacatcagaaagatgtttacagcattcaaaagacacgtaaatgagttaacaggtaaaataagagcagacatacattgaagtactaaagtaaccaagaattactaaatgatcagaagcagcagaatttccactcacgtcacttgaagcgaatgcgctcttgggctatgctccttattccggtagatatttgcacccacatcacaacaagaacaaaccaactctgaatcagcaatgggccaataacaacaaatttcaggagataaaatgaagacagagaaatgacaggtcgacaacttttgatcagtttataaaatgcaacagggttagtggtgctcccatgttaattacctctatgttttcagattcagactgatgacggtgtacactggtcagatcatatcagtgttt

SEQ ID NO: 152392 - DNA, 292 bp, Zea Mays
tcctcatggactgcccccaggatctcctgtaatagcggggaggtaggaggaatgtacaggcgccccgcgaattgcaccatgccgtcgacgatggaccagggtgctgctcggtcccctgaagtgatcgcagtatggagagctacgagggtcggatcctcgagctgagcctgccggagttggtcgatgaagtcaaaccgtggagtggacatggcgagcagctctccctctattgtgtcacgcctggacaaagcatccgcgacagcatttgttgcgcctggcttgtattcaacgg

SEQ ID NO: 152393 - DNA, 1597 bp, Zea Mays
gggcaacaactactatggctagtgagtggggatcggggagccgttcaattggtggcttggtgcgaatggtagctcgcagatgtcgtgctcgggtgctcggtggctaccggagtatggaggcgaatagtctgacaagtgatggagacggatgttgggggttgggggctggcgtcttgtgctgttgtgcaaataaaaggtggcccttggcaagggttctaaattttggatggatggtcgatatttggtagactgaaatgtaatggtccaaaagaatatatggaaaaataattggaaaaatgctttgtagagaaccgatatcaacacgacatgtatgcttgagacaggagacaaccatcacagaagctaaacttatttcatgtctcactggttgttttggtattatcgttctgttatcgttccaaaatgtcatggtccacgtttcactagtcaaaaaaatatgacaaggtttaccccctttgtaccatggttccaaaaaataatgttccttgatttgtgttcctgttcctcgatcccgtcgtttcagaaacatgacttcttagcccaggtctaactacatctgatgggcccaacacatcattctgccttgagataggtcaaacttagccaacccgagtcctcaacttctccgtggaacccttgggtcctagaggacatgggtcccaatcggcgtcgaagtataaggtcgaaaacccaagggccctgagtagctgagcatagatggggggtggtatgcacttaggaccaatcttactactgtgggacacgaggggccctagggccgtataattttaggtgccctatggcttaagaggccttggggtcataccccagagcatgtggggccccgagggcttatatcatctggtgccccagggcacaagggggcctgagagtgtataccattagatgcctcggggcaccaagggccttaggagcttatatagtcaaatgcatcttggcaccacagccccgaaggcttatattgtcaggtgtcctagggctagaggagccttgagggattataacattagatgccctaggctttaggagcttatatttgcttgtcatggaatgtgctgccctatggacaaccctaaggatgtccttccataatttgactgagttgtgcccctctctggctggggccaagaagggtaccgagggaactaggccctaggtgcagtggtatttccatggtggaccccaaagtcagcctcctaagtcagcatctttgagcatgtcttggtaggggtcgtggatatggccttccttggacgttgacggaggctcccaggctcgttgctggaatggtcctggtcctgcaagcaggcccactttcctacctacacgcctcatggatcaacttcaagaatgttggccccaaggatgtacatcttaccgctcgggaacaagcgtgcaccttgaccactaagcccctggggcaatcggacgcaagggggattaaacttagtttaggaaaataaatatgacccactagggcttagcagacttatatgacaattctagacaatcctctaggttccgcctcttactcctatcctgcgctatgacacca

SEQ ID NO: 152394 - DNA, 393 bp, Zea Mays
tctataattttttgaaaaaaaatataacttttgatactttgattatacaacgattgcatcacaagctcgattggataatggttttggatggttaaagtcatgtatgtgtactacaaatatccctttgtcgagcatcgagtttcaccgagagcttgacacttgataaagtcttctttaccgagagttaaagtatgccgagagttttgtgcttggcaaaggatgtctataccgaatgtctttgtttgtcgagaatgtcactcagcaaagcatattttgctgggtgtccgattaattgttctcgaaagagagctgggcacttgacaaagagccggattccgatagtgtaattgtctcgtacataatatcttgcttttgacggatttctaagttagt

SEQ ID NO: 152395 - DNA, 480 bp, Zea Mays
gtgatgcttgtgtcattgtggttgtgggcatgtcgttttagttgattgtgtgcatgtggttgttagatgtcattttagaagttgccgttttagttgattgtgtgcttgtgattatggatatgtcatcttagaacttgttttatgggagattggtatttcccttgatattattatgtgagcttatgttatgttgacattttggtcatgtttaaaaagacgttttaaagcttacttaaatgttttaaagtaaaaaagcaatcatgattgcttcaacgttttatcgctttaataaccatggaatacagaatccatcgagtcatcgcgatggtaggaatctgctgtttcctaaaccgtgtagaccccgctcccatattccttcgctcgcaagttccgcgatattcagattctgatgacaattggattacacatgaacctagattctcaaaaaagctcttcaggaaaaagctgcctcaaacaggc

SEQ ID NO: 152396 - DNA, 313 bp, Zea Mays
gcatggaaacactttgatgccatttaccgtgagaaagccaaagagtctcgtaatgtacgggttaggccacagatgggttcaatccctatggaatgaccactgccccatacacatattggctcatgtttgttatcccatcaatctcccctaggagtatggtttcaaagacaaaacatactcgtgttgttgataatttctggacacctggggaataaaatgtgcgtgtacatggaacctttgattgatgaattggtccatgcttgggaggaaggggtatggacgtatgaccgagctacgaagacaaacttcaaaa

SEQ ID NO: 152397 - DNA, 417 bp, Zea Mays
gtatgcacggatatggctgcttcaaacatacaagtgcataagaattctcaaagctactagacacctttaccaacattatccatatcattttgctatgatgtatggcactacagctctgcatggtttgaaggataagacataagtgcaaagcactacggtgatatggcttccacttcacaaaaggagcaccatagaatttccacaaatatggtttcatcctgcaaagctagctaagaacaccagagtccaaagcatttcatctcatctagctccaccactaaaactcaatgacatcaaaataaatacacctcctcaccacctcaccagtaacaccaaaatgagcacatatgaatttggtcacctgaagtcctgaacaacccgtgtatgacattttaaggatgtaaaccaatactgcca

SEQ ID NO: 152398 - DNA, 333 bp, Zea Mays
tgaattgttgcagtttcaacttctgcctgcttagtatcagctttgggttgcgctttggcaacttcgttaattttccttgtgggagcgggactcaaggtttttgttgtttctaacacaacatccaacacattcgccatccttcttctcttaggagttgcggtggaacccttttgtgccttcagcactgttgcctctgttggagggctcaagatctcttgcattctcgttatttcttcaattttcggccctttagccttatcagccttcgtctcaactagctcgactgaaggtaacttcgatattacaaccgactgttcagtgctctgcgcagac

SEQ ID NO: 152399 - DNA, 411 bp, Zea Mays
gcctgctgctctagccgcgtgggccgctcggccggtcccaattgcacgcgtgcgcagggcactgcccggtggggtccactggtcggactcacgaaatgtgcgctcgactccgatgactgtttagtggtcccgtgttgtcatccctttccccgtttcctcgcgtagatcgggtacgatctcaacggagaccgcgtgattcccggactcggttgccagctgccatgatctacggaccttgtgcggagctataagattgggcgcctgggctgtcgtctcttcctcctatcaacgcgtgctacccgcgaccgaccgtgagagagaaccagagaccggaagagggattgctgccgccgccataagtcgacccgtgcgctcatcgccaccgcgtcctcgatgtcgtgcctgggggtt

SEQ ID NO: 152400 - DNA, 430 bp, Zea Mays
gtcgtgtcatcgggataggagcaatcgtcgctttctatatcttaaacactatggaccacttcaccttacttcgtatataatccccacgatacttagattctctccgcaaccagattctgtccataaccagaacgattctaaaaaaaactcataataaaaaagccgaacatcaaacgggctgtagctaggttgtgtagtttccgtacagtccatattcacataccatatgtttggtttccccgatgcagacgtgtagccccatccaaacctacatggtgggatacgggaccttacccacatctccgcggtgcaacccatgtctcctaaaatggctttctttgtatccgtgtgcgcagttcagagctccatcatacaaccaaccatgcaggtgcacttcctcggtcaacggatgacacagacctagacgcgt

SEQ ID NO: 152401 - DNA, 302 bp, Zea Mays
cacacacatgtccatacatagtttcaaacaaacataggtccttacatagatccatacaaattgtccaatgtcttattagattaccataaagcctaaaacttctcattaacgaagtcggtaatcatagagaccttgtaaagcaatggcacatccatgaaagcatgtgcaatgtcaggattagaaaccaaatgagaataatacttggacttgtgcgcaatctcaaatcctggaatattgtctacagcttcaaacaaaccagctggcaaaggtttgtttgctgcctccttgatggcactggctag

SEQ ID NO: 152402 - DNA, 1049 bp, Zea Mays
aggtgaatattagggtatccaaacaaaaacaaggcctgcatgggttactcctttaccttttctttccctgttgtgctactgcttggttcatgaatggctctggtacgggtcgtaatccgattcccagaatgtgctgtcttgatatgcacttgttgggcgagcacgtctgcactgggagtgggagttggtctgagccctgggttgcaagttggacggacgatcttgacagcctgcacctaggcttctgctgatggaagcggccacttggcctgctgtgggtgtcatgcccggtagtgagctggagaagcctgccatgcagtgggagctgtccgcttcatgggaagaaaggaaaaaaaggtgacactcaagttatgtccctgtagctacattcttgcaattgcaaagcggactacagtactgcccagaatctgaaattttgaatccttcagcgctggcagctgcagcacctctagattagcacggcagtgtccgagtcacttcagcattcagaaaagcgaggaacagatcagtccctttggctttgctgctctgccaagctagatggttgtagagcgcccgggatctaaggctgtacagtatattgttgttagttaaccaaggcgcttgatccattgaacgcacgcagatttttttcatggagacactgcaacagcaggctacacgtgtgatctggggcagttccattgaagcttcaggttgaggcattgcctagatctggggcgaccactagtgatggacaccgttgcgatggcccatgatcatgcaggatggagtatttggtatcgtggccgtttggtgagatctgatggggttggaaagaaaggaacaggcacttggatatggccaggcaggagcaaggaacgaaggctggggctggtgatctttgcctcttcgtatattcagacaaattaaaggtgccgaaacttgtcttggaggtgctgttacctgacactgagctccatcagtttcccgcccaaaccatgcaggaactgacttgtttctcccctgtaaattgtacagtcgcagcg

SEQ ID NO: 152403 - DNA, 868 bp, Zea Mays
agtgaatgagcacttgtcgaccaccgggcgcctggcggaaacggacaacccgttctggctctggtgtcacaacccccccatgaagcaatggtggcagcggtggcggcctcgctggtggatcacctatgaacttcttaagaagcccgacatggaagacatcatgcagcttggcacgtgggggcaattcgaggcggacagcaacctcgttgatgcactcggtgatgcgatatggcccaacgaaccgtggtttgagcttgcccttggacagctgcggtagtgaagaggcagcgcgctgtcggaggcgtagaagcacccagtcgcccacggcataggagaccggctggtgcagcttgtcatagaaccttttctggatggcttgagcttgttccagccgcgtgcggacgtcagcgagaagttcctcccgagcaaccatggtcttggccaccgcagccacccgcgtctcgcctggttcataggaccggatagatggggggtcccttccatacactaccttgaagggggtgtcccggagcgatgattggtatgccgtgttgtagatgtactccgcccatggcagccaacgcagccactgcttgggccggtcccctgtgaagcaccgaaggtacatgacgatgactttgttggcagcctctgtttggccgtccgactgtgggtggaaggctgacgtcatatggagtttggcccctgataacctcatcaactcccgccaaaatgttgaagtgaacacggaatccctgtccgacaccatggattgaggcatcccatggaggcgaacaatctctttgaagaacgcttgtgccacagactcgtcactgtaggggtgagccagcggaatgaaatggcaata

SEQ ID NO: 152404 - DNA, 510 bp, Zea Mays
gcaggcttctgatgttcggcctttgttcgctggcaggtgtcacaccgggccacatactgtgctatctccttcttcattcctctccaccagtatctggctttgaggtctaggtacatcttggtggttcctgggtggatggagtaagctgagttgtgggcttcattgagtaggacttctcgtgcctctcccattggtacacacagacggttcttgaaccaaaggactccttgttcatctgtcctaagatccggaagttgctccttgcgagctctctccataagtctggctgtctctgcgtccaggcattgagccttgcatatgagatcttctagcattggcttgacttccaggctaccgttgtctcccagacatgcatttagctgagctgattccttcttccaatcttctaaaaagttggtccccttaatcccaaaaggttttcggctgagggcgtctgctaccacgttggccttcccggggtggtaatggatttcgaggtcataatccttg

SEQ ID NO: 152405 - DNA, 284 bp, Zea Mays
tgcggatcgatgctgagcaaacatgcattatacagttgctgcttatgtaaattattttttgtcgcataggggttggaagtcgcatcaaagagcaatcttattgtcctgctttgtcattgcgcccagtagtggttgatcctttttgacgcaggcacagtgagtagctggtttgctgttcgtcgtagtttgtcggctcaccactcctaagattcagcttaccagaccatgatctacctcctgttctcgttgtggacctgctagttacagccaagaggttcagcagg

SEQ ID NO: 152406 - DNA, 434 bp, Zea Mays
gaacaacattgtagggtaacacctgctgagcagcctcaatgatatgatcctcgcactgaataggtgtcatactgcatttatttatgtttgtgatcaaccccgatgccttgccaaacacccttagcagctccttgaccacacccagctcattactgttaggctgaacaaataacacaacatcatccgcataaagagagacacgctgccccacaccccttcttaacgaaggttccagcagccccaaatcatttgctttttgaaatagagagttcagcacatccattactaggataaaaaagcattggggagagaggatccccctgccgcaggccttgctggtgacaaatgaagtctccaggttccccatttactaacacccgagtagaggaggaactcaacagcttagcaattagattacgccatagtagaccaaa

SEQ ID NO: 152407 - DNA, 637 bp, Zea Mays
ctctcgactctacgtcgtctccaacccccaatcttcatccctcttgactctatgtcgtctagggatgtccagaggcacatatagaactcttctctctaataggtccctcctgggaggtaagatttagggttcttagaccctttgcacgcacaaacagtccagccccgaagctcggacccaaccagaggagaccgactcctgcagcagggtcacggaccatcggcaccaccgcatagagcaccaccagaagatacaatccctagtgtttggcccgaatcgaaaccaacagtgctcttttggttattctgtttttcaggttctagaagtcccttggttcatcaaatcatcagatggctcttggcagtcttataaatcaggtcataaactggctctcgtaatacaaatcaaattggctcttggcctgttgccattgtcagcacaatcaggcagtaaacgctctacattaatcagcaaataatagctcctggtacattattctcataatgcataagtttggcctctggataccatttttccatgacgaggtgtaacacacaaacttgcggacagagattttatgcttcaacaaatagaatatcagaatctgaaatactaatggggtgttaggtttaaagaa

SEQ ID NO: 152408 - DNA, 440 bp, Zea Mays
acgggtctgtgggcttcgtgatgacctaacgcggctgcctgggggctcaatttataggcagcttcgtcggtggccagtgaatttagggaggacgcgcggcggccggagggggagaagaacgctggtgcagtgaacacgtgttcaccgtcgtggcagtaactccgggtcgacggggagtttagaggaagtcacggcgatgcggtggcgcagttaggacacgcggtggacaaaggagatggcacgacgacggtgaccaactttacccgcgggcggtgagccaggggagatgaactacggctagccggagtggcttccaggtcaccggcggcgaagatatttgaccccgcgacactatccaaccatccagagcacaaagtgggctggcggtcgcacgaatcacggcggcaatcggtcgccggcggtaaggtggctgcgctggc

SEQ ID NO: 152409 - DNA, 272 bp, Zea Mays
aggaagacaggtaaggtcgcatgggtgccttaccgtgatccatgccgaggcagttctccgctcccacatggtgcgacccacggcaccagcagcatcgaagcactaggtagccatcttattccctctggatctctccctgcgctcgaccatggtggctgtggctacgacgcttggagccgggacgcggtagccgataccctgcgcatggcccggcagcaaggagtggcaatgggaagatgcagcacgcgacgaagtggtggcccgggtctgtg

SEQ ID NO: 152410 - DNA, 485 bp, Zea Mays
tgtggagcatgaactgattatccaggttctgatccacaaaggtttcggtcctaggtggaccaactggattcggagcattcttctctccggcacgtcttcggtgttactcaatggtgttcctggtaagccctttcattgcaagagaggtgttagacagggtgatcccctctcgcctctgctgtttgtcctggcagctgaccttcttcagagcatcataaataaagctaggctgcgaaatcttcttaagctccctttaccgggatattggtgatcaggatttcccgattgttcagtatgcagacgacactcttttgattttggaggcatgccctaaacagcttttcttcctcaaggcaatcctcaactcttttgcttcttctactggcctgaaggttaactataataaatcaaatatgtaccctattaacgtgccccctggaaaaatggcgatcttgtcccgtaccttcaattgtcagattggagag

SEQ ID NO: 152411 - DNA, 391 bp, Zea Mays
aacatcataaattcatatttttttacccatcaggcaactgaactctcccccattgtaaaacggctgcagattcgctgcacatgtgttctactgcctgtacgacgaggtgatgagcacgtctgcgcgagggctgggcaccgcctcatgccctcatgctccgggtgcagcagctggaggcggagctgccgctgctagaggaagactcctgccagagaaactacctgcacgcctctaacaagggaaccgaggaggcaaggagcggcggttggctgggcggtgttcgtagtcgcggactcgcggaacggcggaagtcggaagagaatgagcggactagcggagaaactgagggaggaggagaactgaagggaccgagagcagctgcggcgccgcc

SEQ ID NO: 152412 - DNA, 450 bp, Zea Mays
cctatcgttaatggctatgggggagaaattaactacacgttcatggtggtgggagcaaaaacgggcgaagttaatgggggatgaagagaaacggctagcgtggtgatgactcaattggatggtgagaggaggcgagtagccaacgtagtgtgaaacagcggtggcggcgctcatcccacctaggcgaggcttctagcgcgaactgaaaaggaaatggggaagaggagacgccggtggaagaaacaatcgactagtgggagaagagaaagcaaaacgggtttcacggcggtagtcttcatctagtcggggagcacgagaatgcgtaggagtggctcagcgacgggaagcgcatgcgacggcgccgatctacccgggcggagctggcagcgtcctcaccatccgagcgagcgaacacgagaagaagcagagttcctggcagctgggtccgca

SEQ ID NO: 152413 - DNA, 283 bp, Zea Mays
caagaagtaccgcgtgcacgtgaggctcgtgcctggtgaaaccgctgggtgcgaggagttgtggtggcgcctgatgtgcttgtcatcgatcatccgctgcctcaatgccgctgtcatcatcatgggtcgccgcacccggacctcgccatgaccgggcctctgctctcgttgggtggtcgtggggattcgttgatgcacgtggaggctggtcgtggtatcgtcgaagagaagggccttctgtgcggctgctattgctcgttggagacactcatccgccgagatg

SEQ ID NO: 152414 - DNA, 1262 bp, Zea Mays
caagataggtgaatggcatttctccaatctggcaattgagagttcgagagaggatctccatcttctcagaaggcacatttattggatacatatttgatttgttatagtcaacctttaggccagtagaagatgcaaatgagttgagaattgccttaaggaagaaaagttgctttggacaagcctccagaatcaaaagagtatcatctgcatactgaacaatcgagaaatcctggtcaccaatagcaggtaaaggaagcttaagaagattcaaaagcctggccttattaataatgctctgaagaaggtcggccgccaagacgaacaacagtggcgaaagagggtctccttgtctaacacctcgtttgcaatggaaggatttaccagggacgccattgagtaacaccgaagaagtgccagaaagtaggatgctccgaacccagttaatctacttaggaccaaagcctttgtggatcaaaacctgaagaatcagttcatgctctacagtgtcaaaagccttttcgaagtctagtttaagcacaatgatttctttctttgaggagtggcataagtgaatgtatccataagcccaagccaagaaatcctgaatagatctacccttgatgaaaccatattggttcctatgaattaatcgagacatgaacggttgcagacgatttgccaaaagcttcgttaagattttcatactattgtttaataacgaaattggcctataatctcccaccttctgcggattctccttcttcgggatcaaaacaatgaaggacccattaatacttcttaggcaaacttcatcatgatagaatttttcacaaagatcatataagtcttgagcaatgatatgccaacacttcttaatgaagttggtattgaaaccatcaggaccaggtgatttatccgaaggtaatgattttataatgctgtcaatctccatcttagtgaacggggtgtctaactcgtgaagctcctcattacggattaaaagctctggaaggtcaaaatcaatgcctgagaaatcaaacgatcccaatctgcacttgaaagcatcccagagaagaccagatttatgttcgtgctcaaaatgtatgatcccattctcgtcagtcaaagtggcaattgaatttttcctgtgtttaatggtggcatgagcatggaagaaacgagagcaaatgtcaccatcagttacccacttaatagccgcccgctgcttccaataaattttctgaatgtttagcagatcggcc

SEQ ID NO: 152415 - DNA, 410 bp, Zea Mays
tggataggatgggggtgtccaccatggaagaagaagaggagaaagtgggtttgattaccttagaacgagacttgacagaaatggagagcgcttccgtgcatagatggcaaggtgatgctccggtgaggtgaggacgacttcgtgcatggcgggaagagatcgacgcaggtgggggctacctaggcgagggcaactctgagcattgcgtgtgtgggcattagcggtctgggcgatgggcggtggaggtggtttctgcgcatggaagggggcaattggggggttgaactggccgagatgtgaggcgggcactgctcttcctggcggcatgggcacaggaagttggagaagatgctcctggccggtggggctagggcatggtggtggatgggggcactgggcgtggctgggcc

SEQ ID NO: 152416 - DNA, 324 bp, Zea Mays
agagcttgtgctttaacatcttgaacatagctgtcagcaacctgaagtagccattgaggaactgcagtagatagactgaacaaggcgaattcaacaagtggcatgcgagacaaggcatcagctgccccattttccacccctttcttgtacaccaccttatattggagacccaataacttggagaacactctctgttgccaaggagtgttgagcttttgttcagataaatgagacaaacttctgtgattagtaaagataataaattcggcatgttgtaagtattgtctccattgattgactgcaaggagaatagcaagatactcc

SEQ ID NO: 152417 - DNA, 855 bp, Zea Mays
cgaaggccgtcggagcggtctttttcgacatggtgatacttgaaatattttgcaggggattttcactggtatattacatggctccgcctcgttaaaaacctcaccccccgggaggaaaagagtgtgggcctgaacaacattgtttgtagaattacaaaggcgcataggccctgggacttaaacaaaaaatttccgaagattattgatgttccaggaatgttctaagtcctcaccggatgatgttgccaacctgtaagcactgggggatgactttgtcttgactatgaatgggcctacccacttcgtttttagcttgccccatgactctgtccgggtggttcttacgagtatgaggtcccctttgctgaattctcctgggacgactgtgttgtcgcgccaagccttggtttgaacttgatatttatcgagggcctgcaaggcgaggacacgacctccatcgatgagatctttggaagttggttcatcgacgtcggggacggctgatttgtttgtttggggggactcgtgctttaactcttgcagcgtcatggcctcagatctatacaataggcggaagggtgtgaacctggttgcccggctctctgtcgtgttcagggcccatataacttcaggtaattggtcagtccatttgccctttttgtcgtcaagaagccttttcttgatggcactaaaaatcttgccattggcgcgctcaacaatgccgttggattgtgggtggtacacagaggcgaagacaggcttggtgccgatggaaaagcagaaatccctgaagtcttggctgtcgaactgtttgctgttgtcgactgtgagttcggacgggactccgaagcgaca

SEQ ID NO: 152418 - DNA, 989 bp, Zea Mays
tgccttcattgccgcgtctccctgcgactgattcgtccgacagtgaggcagtctgctcgccgggctaccaattccctttcaagtcggagggggtcttgagttctggctgtgtgttgtcccatcgccgtgctagaggtgtccctgccgcgccgtgtgtgagcagtcagctaccccctgcagctccaaatgtcaacgtggggggatggtcggttgtccggccgcggcattggtggcgcaagatcttgcaggatcctgatggcgcttcacggaacctccaatcggacaagacaggcactagtcatttcaaattgaagctcaagggtaaatgctacaactgcttctcatcagcgcatctcgcgttcagctgttcggccccttcgcgttgttggctctgtctgaaatctgggcaccgggcgagatcttgcagccaaaaaggctaccagggaccattcaatgctgcgctcttcaacactggaccaaccaagcattcatcaaagagtaccaactaccaggagttactgccaaagtccaacttcctccataagtaccaggccctttcccaggaatcctctcacggtctgctgcacccaatcctcaagaagtcctaccttcaggctgttcaggagggacccgatatggaggcgcgttacccaggagatcccagggggaggcctgcgcgtgctttctgcgcggtctcggcgactggttccattcgtcgccggagagatgagttgatcgacaaggccatcgtctgctccttcgacggcaacagccatgaggtggacactctgtccgcaggggacatgctgagggaaaagttcaacctgcaccacggtcagtaccagcttgtcaagcacttccctgagcaattctttatagttttctcggacccaaggtcgaagcagtggccgctggacaagagatcggtctcgtatcgaggccggattttccattttggtgattggtcggaggacagctatgctaggaag

SEQ ID NO: 152419 - DNA, 1113 bp, Zea Mays
ttggagcgccccgaagacggcgcgcaagtggcgtaggtgatccacccacgtgcgactgtaaatcagaatgtcgtcaaagaacacaagcacaaagcggcgtaggaagggccgaaggacgtcgttcatcagagcttggaacgtggcgggggcgttgcacagcccgaacgccatgaccaagaactcgtacaggccatcatgagtcctgaacgttgtcttgtggatgtcggctgggcgcatgcggacttggtgataccccgaacgcagatcgagcttggtgaagaagcacgccccatggagctcgtccagcagctcgtcgacgacgggaatggggaatgtgtccttgacggtgagcgcgttgagcgcccggtagtcgacgcagaagcgccacgacccgtccggcttcttgacgaggaggaccgaggatgagaatgcggagtcgctgcggcgcattgcctctctaattcgtccttgtgggccgtcgggtacctgtacagccggacagccaccggtagcgtgtccgttttgaggacgatgctgtggtcacgggcgctgtggcggcagcccggttggctcggtgaagagaccgccaaaggcgatcagtagctcctccaataaagccgatggcgatgtgacggcggtgaggtgcggctcctgtcacgcggatatgtccttccagcagatggggcggccatggcgagtgaaggccacggttcgggaggtgaagtcccacaccatctttcccaacgtcaccagccattgtgtgccgaggacgacgtcataaccggcgagcggcataacgtagaggtcgacgcagaaatcctcgttggcgatggtgattggcgcctgacggagtaccccggggcacgcgatccgttcgccgttggccacggtggccgagaggcgtggcctggagtggacggagaggcctgtacgggctgtgccgtctccgctatgaagttatgtgtggagcccgtatccaggagggttgtgaacgttgctgcggccaccgtcacgcgcacctgcatcgagtcacagatcggcatacccgcgacgacccggagagagaacagtggcgcctcctgttcggctggggcgtcagccgctgcgtcgtcg

SEQ ID NO: 152420 - DNA, 719 bp, Zea Mays
acgatccatattcagcataaccacactctattcatgttcgcccgatcacaaatctacggtccagaacccatcacgcgaaggagaatatggttgtctaatcatgaccgtccccagaccgatcaatggcacccatggatcttctccaccaggttaccctgtacgcggcggcgcccagcgccctccggcggtgatcacactggagacacacgactaggcgtgaatggtggccacactatacacggataagtcctatacgactggaatgctcttgcgaacacaactaaacgcttatccctagcaatggtgaagaggggtagccaggactcgacgcaaggcaacccgcggggtgaagaactccggccagcaattactggccgacatgcgacaaacacattactccgtggggttctacaaattctaggagggtaaagcaattaattcaggcgataaattaccctatgtcgaggtgtcgatggagtggtccacgccacgcagcggtcgcacggcgaaaggccaacctcagcgagaaatctagcctttctcggccgcccgaccatcctgtagtgaccatcactgctatcctggtgccgcaacgaaacccttggagtcccgcccttgcccttggcgatggtcgagaagagaggcgacgtcggcgaccaaatctttctcctcttcttttcttctcttcgacgatggtgttcctttgcgcaggagctggg

SEQ ID NO: 152421 - DNA, 676 bp, Zea Mays
aaaagccattgctctggaaaacaagaggtttgagtttggagagaagagaagggctactaaccagggacaggctggaagtagttcccgtccccgttatactactattcaaagtacacctgctcgtggcagttccgggcaacagactcaacagacacaagctactcctcaagcaagcactccagcaggatctgttgctcctaatacatccacaaacaggttatgcttcaagtgtggacagtctggacacaatgccaactactgtcccaatagggctgcttatactactccgtctccgatgaagcagggtcagcctcggcaagaaagagtcagcccttatctatcaatcaggggcaggtcaaccatgtggaagtagaagctgaacccggtgaacccaaaaaccaagaagagaagccggtgaagaagtcaacgagcagcaagaatatggtgtatacatatatatacacataaatatagatatatataggaagtagtatttgtacgacctaaataatactttcggtagaaactagtattttactattttatgaataataataaggtctatttgaccctatgttttactaataagttatgcatcatgctgaaattcttgcttgtgcatgtgttgagacaagattgggatacatcctttttcttactaatctcgaggacgaga

SEQ ID NO: 152422 - DNA, 610 bp, Zea Mays
cccatacaagggtgtcactcccccttggtccatacaaggaccaagtgttatccatgagttggttttttgccgctctaatacgatgaagaactcacaattgtgtacaacctgagtaaccaataaactctgcagtgatcaccgcactcacaatcaccgttgagtcatctcaatgccaatcaccaagagtgcgaagtactagactctcacttctatgacaaccctaatgtgagtggtggatgcacacaagtctctctctatgcactaacgagattgccaaaccaaaagattatcacttctccaatctcgtcactatgcaaagggtctttctttctctcaagggattgcttcaactattataagggcaagacatctcaacaagctaagttggggtataaattgcccaagggcttaaaacaggcatcagaaatccacttagcattttttgggggcaacgggtgtgtctagtgccaactttccgattgcatcggacatgatggtaccctagcaattactatacttcacatctggtgtcagcaccagtgctatattagatacatttgtgagtgtaaaccgaaaataaacaaaaaaatgctctaggtgcctatccagc

SEQ ID NO: 152423 - DNA, 337 bp, Zea Mays
gacctcgtcgggataagtgtgccgcgtggaacgagttggtcggggagcttcgcctcggctcggcaattgattccgcggcagcggcatcgggttgggagcgtccggcgccggcgaatttctcaccagagtgcgtccgcggcggagaacaacacctcttcgtggccaaggcactgcgggtcgcaattgtcggtgagcagctgtccgaactcttccctttagcttgtgcatcgtgtagcgccgattgaattcgagtttaggtcacgctagcgtcgtatcgtcgtgtgccggcaatggtgccgcggcggcgctcggatttctgtcgcccgccgccggtgaa

SEQ ID NO: 152424 - DNA, 322 bp, Zea Mays
agaggaaggagatggcttcaaggtctgagatgtggcaacattttatcaaggtcaaggatgacaaagggtttctgagggctggaaggtgcaaatattgtcaccgtgaaattaaggctgacacaaggggacatggaacatctgcattgaagaaacactttggtacatgcaaacgcaatcctcatgttttcaacaaggactcgaagcaaggcaccttgcaagcatgtcatggggaagctcctgccacttggaggtttgatcaagaagcacttagagatgcctttgctgagatggtaattgaagatgagcagcccttttgttttgg

SEQ ID NO: 152425 - DNA, 671 bp, Zea Mays
cctctccatatccgtctgcatcgacgctgtcgaccacaatcgttgccgcaaagcgccgctgcgacttcacctcaacattgtgggagctcggagtcgaccaactgtgcaggaaggttcactggaaggtgaagatcgcgggcgtgagggatttggacctcgggaggtctcggtggctcagtgattgctcgccagaaatattctccaccacggattcgccccccatcgcggtcagagaccatcgtttcgttacctccggtgcgtagtctttgaccgtactcatcatagtctccacatcgtgtaccaccgtttgattccatggttgggacaagaactagctgggcggatgcttcgccagtggcaccgtcgtgctcgtgccccggcgttgtgtgccggcggtcgaaggagcaagatgagagagagatgcgagggctgtccatggccgttgatctggccggggccggctgagatcaagtcgagggataatgattcagcgttcggaatctcgaccgtccgatcgtggtggggtgtgtgagattagatcgtgaagtaatgaacccgagtcgttggatattgatgggtggtccagattaaatccagccatacccttcacctcgtcgcttactaaccattgatcctagaataggcggtggagattagtgtgaggataacgt

SEQ ID NO: 152426 - DNA, 352 bp, Zea Mays
accgtctagcgaaatggaacattctgtgccaacccaaagaccaaggaggcttaggaattagggatctagatattcaaaacaaggctttgctcagcaaatggctttatagacttttgacaactgatggaacttggcaacaactgatccacaacaaatacttgaatgtgaaaactatctcccaaaccttttggaaattaggggattcccatttttgggctgggctaataaaagtgaaacacgactttttgaggtttgggactttcacaataagaaatggttctcaggttaggttctgggaggacatctggctgggtacgtcgacccttcgtgaccaatacccttgtttgtacca

SEQ ID NO: 152427 - DNA, 376 bp, Zea Mays
ttctcaattctagcccataaaccctccttcctctgccctgtgctaatgactgggtcactactaatctctagccatgttttgcaaagcaacaggtcttcatctggtttgaagttctgttcctttgtcctcctaaatgtcccaggtgtatctgaaggtttgctagggctgttaacttcctggacactgtgttctgcttcggattcaaaatttatagggtcagtctggttgggaacatgggtggaaacctgtggacatgtaatgggtggtaccaactgtggttgaccgaatgatgtttgtgtaggaggacccccaggattcgtcataccaaaaaatgggttccatggattacgaaaggtatatgaagatgggtcatgag

SEQ ID NO: 152428 - DNA, 330 bp, Zea Mays
aaagaatccgctgttctcttcaacttagagaaatcaacagaaaggagttccttttcttctccattgagtaggacaataggtgatatgatatacgctaactcaataaacgacaaccagaaaaggaaatatctcaaattactcaccgaattttgctgacatatagatggctcatcttacaactatagactttctatgtatggagagaaggatattatagaatatctatggtccttaaattgttgatagtgttgaggaagtatagatggctaatcttacaactggctgcatttttgtaaacaatgatatgttaatacaaaaaatgatggtaaa

SEQ ID NO: 152429 - DNA, 1590 bp, Zea Mays
ctagtcatatgatcctctccccgccctcccaaccgcccccgtggcccctcccctcactctgtgagaccaatgcccgcagtgcttgccgccgcccaaccatggagatagggcagtacgccacgaccagctgctccaaggagcatcagaagatttccgctcgtggacgcatgtttgattttgtcccccctactatgtttccttcgatccccaatccccttcccaggtaagaaacacacgtctccacaggcggccaccactgattcggtctagctggaggtaacagtggcgatggagatggcggtcacagagccatgaactcatgggcgggggagcgtgtcaagaaaagaattacttcgccgagaaaagaaatctggtgagttggttcgttcgtgtacccgatccctccttgcttgtgctacaaatttcatacacgcatatcagaatgggtgattgtgatgcgattctttagtgatttgtgtgcctgcacacttggtctggaatgtgtcgtctaattgatgtggctcggtaggctttcttaatgcaacctcatcgtccgattcacatctactttgctttggcatcatagttggagagtgttgtcgtatagtatctccttggtggtttatatttcaccaaaatatgtagtatgcttatgtagttctgtaatatgaaaccatggacatggagactgaaggtacaagttgtaaagagagaatcacattgccgtggaagaggaagactaatcgaattggtctaatatcatttaccaagtctcgtgtgtccctccattaacaattcagtgaactgcatctgtgtagatcttgataaactttattgtgtgttttgttatatcggtatttatcttgggtatggtacatatatctgtcatttttaagcttagatatttttcaaaacatttacttaaaatgaggcaatgttactcctgcttggtgtcatttctttgatgaacaacaacatcacgattttgtactatggaagctgtgacagtcacatatttaggaatcatacttatagagtggggacaatgcaatatcatagttaaaaaaagacccaccaatccgcaaaactagcgttgtttatagaatttttttacctttgaaaccaagaatctaaataagcagtctccagtctatagcattaaaatgaactaaccagcaatacaagtgccttattgaagcttccaagaaaatcaatctattagaagtactactgtactatactactatcagtaccactctcatagtgtccacttgggctcactttgtttgcttgcacatcgtattcccttattctttcttcattgcctgtctaaactggggtctgcaaaaagtatgccttcagttatgttgctttaccagaacgatgtttgttggatcgggacaaatggacaatgttttgtaggttgccttgttctgagtagttaggctgcaccagtgtaccactctgatttgatcgttgcccgacctgcatctatctatctcatgttgaaactacaactaccacatctggaaagatctctccttgccgacctgtgaggctgtgagtaggtgttgcgctgttgctacacct

SEQ ID NO: 152430 - DNA, 357 bp, Zea Mays
tcgctgagtttatttcacatgatttgatcgatgcagccgctcgctgaacactgatctctcgtcgagagggtttgcatcacaatgtgccatgtccagtcagttttggacgtctgaaatgacctgcagactgatgtaaagcggacaggcactagcgttgccatccatgtccgcagttttgctatgacactgtgacagatttaaaatgtagcggccaatacgaaatgaaaatgtggtgaaggatatcaatagatcatcaggtgaatcaagggtaagcttcttctctaatttccaagtcacagaaggaaggaaggcagcacagaacaatatgactataaagctgaaactggacaacatcat

SEQ ID NO: 152431 - DNA, 314 bp, Zea Mays
cacaaggttcaacgctcctaagttcaatggccatcggaccaacaaccacaccaatctgatgtgttctaaagagctcctagagtcgctcctaggccatcgggccaatgcccacaacgtgatgtctcttcaaccgttatccaacactaacaagtggggccaaccgaggaacagtggaaccgaatgatctgacgctagtcaaatgtcatcagaccatacctctcagtctgatgcatcctagttcgccttcatcgctagggttagccatcagactggtcagccctgctggtttggtgctctctacagggtctggtgcc

SEQ ID NO: 152432 - DNA, 295 bp, Zea Mays
ttcagcaaaccccaggtctaagctgtagtctcactatcctatatactaaagtgacatggctgcaagcgaatgccatccagttctgccattagcaaaataagttatgcgtaaaaactttgcttcatatgtacatttttctatgttttgttgattgttatcactattcaaagggttgaagtgtacacacctagtaaatggttagccctacatgaatattgtcctgcgatttacttattgtggcttccttcttatagagccatgtatgaaacttgttaccttgcaaatggaacctgtt

SEQ ID NO: 152433 - DNA, 471 bp, Zea Mays
gtcaacaccatcctcgaggcccaagttctctacggtagccgcctctaaggctgaaggtccctcagctacttccatgggagcaagacgattcacgtcagtttcctgaccctcaagaccgcgctccaaggtcgatgaggcgcgggacgctgcccgggatgaccccaacccggcgtcgaacacatcagcacaaacatccatcgtgtcaccatccgctggctctgataacagatcctctggaaccatatcttcaagagtctgatcaaagttcgccagagacaattcttgtagaccaatgagggcagacagggcaggagaaggaactccactactttccccactagcaacatattgccgactgttcttccgagtcaaagggacctcatcttcttcctccccgtcgttttcattagcaacacagacagcacccccattgggatcagcgacagatggagcacacccattgggatcagc

SEQ ID NO: 152434 - DNA, 518 bp, Zea Mays
gctcatactgcccgcaccacgaagggacacgaaccagcaaccagacaaacgctgggagaagaggccccgcgaggaggtgcacaccgccgagccacctgccgctcgagcccgcggcgcacctcgtggtggggtacgaacactgaacgagatcctccattcccagtgtctgtatcacaaagacatgcggcacaccctgcggaactgcagggacttcaaaaactccgtcgggcacgaccgaccattccagccactgccacctcccccgcctcgaggagagcctaatgagcctaggcagcctcaacagtaagaaggggggagaggtgggctttcttgcacgttgacagggaggtcaacgtcatattcggaagccacggagcacaagaaagcagaaggcaacaaaagcttaatgatcggcaagttctagtggccacaaatagtgctccggctccttaccgatggttggagcacacaatatccttcagtcgaactgattcagtggcttaacttcgatcacctcg

SEQ ID NO: 152435 - DNA, 402 bp, Zea Mays
ggcgggtcttcggttcccattgagaaaatttttggttgaagtgttgaagatatttctgatctttcttcatcaaattaatcctgaggctataattagaatgggtttgtttgtttgggctgtgagaagcctaaggctggaaccgagcgtgaagtgtgtttgcaatatgcacgaactattgtacgagacaaaggccactggcaaagagcagtatcacaacaacttcggttgttatggattcattgctcgttctaatgcaagctactcggttccaacatttcggaaaaggtggcccgggtcctggatagaggaatggttttatgttaagaataatctgattgaaagggaggacataaaggggattatccaacgccccatctggtctcgcttcggccttcaaaggcc

SEQ ID NO: 152436 - DNA, 398 bp, Zea Mays
atctacatggccggatatctccacacccttgacacccactttgatgaccttttctcccattgcacccacctaaactcccgggtggaaagcctagagcagcggatcaaagaattgaaggaacaaaatgcaactcttcaaaacagtctcgagatggtagaaggcgaggaagccaacactcgtgaggcatactggaccctgaagatggactatgccaggagaatgaagaggttcgccctagtcaagaagattcggaagcgtttcaaaagccaaggatgccagactgacccgaaggaagaatccctgcccgcactaccttccctagggatagaaaacctttctaacgtcgaggaagtgtccctggctagccttgatgatcttctcagggagtttggggacac

SEQ ID NO: 152437 - DNA, 601 bp, Zea Mays
tttggcatcatttataatgtgacagattttaaagatactcattgtagaatacagttctttttagatatttctcgtgcatagaaaaccggctctacttccttaacaactcagctgctagcttttactaacaggatctttttttgtttcttgcgcacattgagcccacgggcccaaccaacagagagggagagagaggagttgtgaaagcccagcaggcaaagaacggaatgacgaaatccacagcccagttattagcatagcaagaagttgtgtggtgggcatcagcgtgtcgtcacccggtcgtcctcgctcactctccaacgacaattccattccatggcatgtcgaagttgaaatcccaccactgcacgcacgcctgtctcctccctccgcttgtctgtacgtacattcgtgagcaacgctgttctttcagttcagcagcgacaaagttcctgctgtgtttgcctagctgtgtgtctgtctgtctgtgcagctgatataccaatactgacaggggtggcaagtctttgtttttgtccacgaaagaaaaaagagatatatatacttggtgaagcagtagtgaaaatggatgatgcatctg

SEQ ID NO: 152438 - DNA, 572 bp, Zea Mays
cggagccgacggacgaacgctgagacagaggtatttttgggctgcaactcacgcgcagttttctgatgcattaacagagtcttattacacagagtgatccgacttccccgccactccccgcagctgcacgaagcccctcattttcggtggcccgtgcgacatgcacggcatacaggtggtggcggcgaatacccgaacgacgcggtcacgacgcagactgtgcagtctccagctcgccgtgatctacgctaaaacaaatatgccatgcagtaacacacgcgacagactaatgcatctacgtgcaactaatgcaagtactgctgacgcactacaagattacagcaacactattggaggccgggtttgacaggagacgtgtggattgcgggggtttatatactccgtattagcgaaggagcggggcacggtggcgacgagttgtctcggctcgccgcgggtgcgggtggttgcattggtttggtaatccggcgggccggccggtggagagggtggcgtctcgtctgaaaccgccgtcttgaccggatctagctagcagatggatgcattgggcc

SEQ ID NO: 152439 - DNA, 684 bp, Zea Mays
atcagttcacatacaacaatgggataattaaacacaagaatcgagtgtggctaggtgccaactgtgaggtccagactagggtcatgacaacgttacatgacagtgcaacaggtggtcactcgggttttcagtgacctaccaacgcatcaaagcaatattcagttggcctggtatgaaaaaacacattgaggagtttgtgcaatcttgccttgtctttcagccagcgaaactagagaggagtggatatccagggctgctatttcccttgcctatacctgaacattcatggcaagtgattagtacagacttcatttctgggttacctttatcacatcattacaactgtgtcatggtggttgttgacaagctatcgaagtatgcccatttccttgctctggcacatcccttttcagcactatcggttgcaaaactgtacatgaaggagacttatagactgcatggtatgccatcttcgattatctctgaccgagacgccatctttacaagcaagttatggcaagaattgttcaaactatctggtaccaagttatgtctaagcagcgcgtaccatccgcagtcggatggccaaacggaaagagtcaatcagtgtttggaagcatatttgcattgcttcgtccattcttgcccccgacaatggtatgcatggttgtcactagcagagtt

SEQ ID NO: 152440 - DNA, 421 bp, Zea Mays
atcaaggttcaagaatatatgttttggaaatggtggcatttgaactgggacagcgtatggctctatgacagtttgttgggtcatatacaactccatggtaccatttagatgtcgaaaattaaatgcacccggattaagaccaaacactacgttgtgcatcttgtggacatgcttttcatggagcaaattgttgaagtctttgactatctcataccgagttgcaatggcctcgatcttggctccctaatttgatttcagcacaaaagagagtgtggtacgaatattatatatagttatataaatgaaacttaaagagatgttgtcttacattgatgtcagacaaaatgtaatgttgcctgtcacgataatgtggttccatcggaaatttaacttcaactcgagcgacaatactatacttccg

SEQ ID NO: 152441 - DNA, 573 bp, Zea Mays
cccctaaagtacttgtttgccctttagtacaacactttaatttgaggttgttacagtccaagtattacatgcacccatttctgtaccttgtttagtgtaatagagtgcacgatgccgactgatgcccccacaacaggtggcccatcgcttacatctcttcgacgctatttctaagtgtggacactctttgcttgagatccaagcctaaggcctcccgcaatccgtatccaggccttgcctgcctgtccagtgagcggtgaactttctcatgatgcgatcttcgtcatggccttcacaactcacgttggagaagtggcggtcatagacgtcgacaaccatcaaagggttttgctgtgttgggcgaagtctgatggaataagccttgtggcctcttgtggaggactgcaatatcagtcttttgcatgtctttgctgcagccttgggtagaggacaacatctcagtcaggacatcatctcagtcttcagtctttgttgccttggtggaggactgcaatctttgggacgtggaggcgatcgcgctaagcccaggcgaggagcagtagacacaggagg

SEQ ID NO: 152442 - DNA, 669 bp, Zea Mays
tggatatatgaatatgttttgtattgaagtgagtactttgtaagagtcgttggatgttgcatatggtatcttctgtgttggctgctagtagtaattttttatgtttgagttacttaagatcagctgggcggtagatgaacaacacattataccaaagaatatgatacatcatacagagtgtgccttcatgggtttgcgaacaaaataaatgtgtagatatttttgagcatcgaacagtccctaaatgtcagataaggagagcaaaacaaatacattcatgttcgaactcgaagacctagatgactgcaatctaaattttaatggtgtgttcctcacacatgtgtgacatgcatgaagccaaatgttttcagtagattaaagtagcccgagcagaagcgtatactgaccttgacgagccacggagaggttgaggggctcagctgtctccctctccggctgcggctactgctgggccatagaagccttgagcggcaacaccagaggtccagcggtccctggggagcctagatgtggccatcccgtcagtggtcctcactcctctaacaacagagctagcggctgcttagcatcatggtcgaccctgcccaccacggcagcggcactccgtcggcagcgacggcatggtcgaaatcgaacctgttgtggctg

SEQ ID NO: 152443 - DNA, 528 bp, Zea Mays
ctctcttcctcccgcgtcccagaccaccgtgctcggccacgacaacgccctgctcttgcccctggtttttcccggtggcgccattggcacgaccgtctacagccagccgtccgctatcacctctacactgcgtgctccttccccttcggatgacgctgcagccatcctcgctgccacccgtgctgccgttacggcggctcgccagcaggcccaggacgccgcccgtgcccttgagcaggaacaggcggttgtcgacgccatcgagcgccagtacgccgagacctaccgtcgcctcgctggcaagggcgtgtcggatggttctcccatgtccgctcatcacagcgccgacactttcgagcccgcgcccgtcctagccttgacccttcgcgcttctcttcacgcccaggcggcggccctcaccagcatccgagccactgtcaccgacgttctcgcgccggactccacccagtatcctcggtggcgcgaccaggtcctgcagaccctcggccgctacgccctcgccgacca

SEQ ID NO: 152444 - DNA, 643 bp, Zea Mays
cggcgtgcctctttgctcggctgttgggtgcgaccgtgggaggtaaatttgttaggaggacaattggcgctggcttgatcccgtcacagcatcgtgcggtagctgcagaagtgcagattcgctggtggagcgaacaggtgaagcgccttggagtcgaattcatgaagcttgggacctgcgaagctgcactctgcacatcgtagctgcagaagatgcttcatgacccaaatgtcgatacttgcgaagctacactctgcaaagtccatggttcgctgtaattttttttatttttttattttttgttgtctcaaactctcagggcccctcgcatcgtaggaccacatcaccttcgagtgcatgatctcgccgccgggcggtgtcgtgttctccggccgatcgggcatctgatgagacatcacataactaaaaggtgagaagcgacatgcacgaccgcgcagcctccatcggtaattccttccgccaacaagcaaatatccaatgaaaacgttttttcatgcgaaagcaccagacatcgtccatttaattaaaactttttaaaatgcagcacgccagaagaactgggaatatgaaactgccacaccggtggtaggattactgacatctactcttttctattgtagaa

SEQ ID NO: 152445 - DNA, 389 bp, Zea Mays
atatggaaaaatagatgtcgaactccagttaaacccttcttcctcgcctatctccttcttcctcaagtagttcgtctcccgatctagagtaggctgctaacaagtggtatcagactatcgatcttggtcctggaggttcctccttacttcactcgtgctgcaaaaatggcgggcgcatccgatcccagccttgcggcggctctgactgcataatccaagcaaatagaggcccaatcgaagaacatctccaaccaatccaaactgctgcagcagttgtgtgatcgattggagacccaagacgcaaggtggcgtactctggagaagtccgtggttgccaactccgacgaaattgctgcgatccagacacagctcgcaaatcgtgattccgc

SEQ ID NO: 152446 - DNA, 580 bp, Zea Mays
tgcagtggccaggtgtgggcgatgaacttcgtaaattgcgagggggcacccatccgaggtgatgaggacatcctccactattacccgttggcaaagacgcaattggcccagttggcccaattgtagtcgaacggtgaccgtgtgagcctcagatttatcccacctcgcttaacttgggaggaggaagccactttaaaatggagagccacccttccccattggactactcttttggggcgattgggcctttcccttagttgggtgtgcttaatgaactgttgggctccgggcaaccctaatttgttgggcctcggccaaccccacctgggctaggtgtatcatctggtatcagagctagggcccattttaagaaggtgggaatgatgaggacatcctccactattacccattggcaaagacgcaattggcccagttggcccaattgtagtcggacggtgaccgtgtgagcctcagatttatcccacctcgcttaacttgggaggaggaagccactttaaaatggagagccacccttccccattggactagtcttttggggcgattgggcctttccctgagt

SEQ ID NO: 152447 - DNA, 670 bp, Zea Mays
catttttcaacacttgaagctccttcaagagacccttcaaccatatcatttcacacactgctagagccattgctctatgttcagcctctgcagtggaccgggacaccactgcttgcttcttgcttctccatgaaaccagatttcctcccacaaatacacagtacccagaagtggatctccaatcatccctactgcttgcccagtccgcatcacaatacccctccaaattcatatgttggtttggtctaaaccacaatcccttgccagggattcccttcaggtatctcgggatttgataaactatcttcatatgcccagttctaggatcatgcatatacctactcaccacacttactgcataagcaatgtccggtcttgtatgacaaaggtatatcaaacggccaactaccctctgatatctttcccgatctatagggtcacctaactcagcacaagtttggtgattcctatcaatgggtgagccacatgggcgacacccaagcattcctgtctctgacaaaaggttgaggacatactttctttgggagagaataattccctgagatgatctagctatctcaatcccaaggaagtatcggagtggtccgaggtcctttacctcaaaggctctacttagactttcctttagtttcttgatctcctttgcatc

SEQ ID NO: 152448 - DNA, 915 bp, Zea Mays
ggtcaggatggtgcggacgaagaatatcacaccatcaggggaggagacgactaggaccctccttgtcccttcaggcaggtcaaggggaagaccgtatatcttgagcagctagagggcaggaagaagagatgtatggatagagccgcacttgcagcggtagcagcagcagactaggctgtggggggaggccagctacagatttcatctgattagattgcatatcgggtttctctcctcgcgtctcgaccttgctccactgctcccccgctccttctgccacattttccactccacctcccacttcgccaactcctgtcgctcctgagtcatccaccaagcccgctgtgtccaccaactccactactccatcttccactgctcctgctcctgctcccgctccctctcccacttctgctccacccattcctccacctcgcttcagggagcgtgacaagactgagctgagactgttggttgttgatccgcatcttcttgaccttcagcgtgccactgttgcccgggtatgtcggttcagacacgtacccgtggagtcttggttgccagcccagagggacccagcagatgcgcctctcttcaacaccaggacttaggagtccttcaaggcgcagttgtcagctcagattgctttgagagcgcaccggctcttggatcttcctacttttctgtcaaccgccggtgccgagtcagagggtcacctctcttatctgccaggtttgatttcacttttgacctctagtggcagatacattgaggagtgggtcagagtattctatgcaaccgtttggattgaccctcatcattagtcgttgaggttccgctttgagcgcgaggatgtcattctgcattccactcatatcagacaactctttggatttcctgagtcgacgaccaggc

SEQ ID NO: 152449 - DNA, 528 bp, Zea Mays
gtggaatgaggttgtacactcaaaactcaaaagggtgtcctagaaaggcattttgttcgatcccaattctgtaacctgggaaatctcgaaggagcgaaatgcaagaatttcaatcggagacactctttggcaatctatcttgtgacaaagataaaggagcaggccacgacttggggcagtgcaggtgcaagacaccttaaggagatcctacagagcacttagctttttgctgtaaattcttgttagtctttccttcctctcgtatttatgcatgtttaacaatgtatacagttgttggcttaagcctcttcccctatttttaaataaatggcagatcctgcctgtctacgttcaaaaaatatatatttacacttcatcatgcccttggacgatctactaatctcctttagttccttctaaagttattatgttcatctttgtcttaatcactaagaataaatcattcgtttttgaagttttccattctaatcaatgttatcaatttgatgttctcatgctgctttcaag

SEQ ID NO: 152450 - DNA, 706 bp, Zea Mays
gaacaattagggcatgtttggaccacagctaaaaattgagccattttgcaagacgatactgtagactgcccccgccaaatacataggaggtgagcaaatgttgtatgttctcctcttcttgatcatacaatggacaactctcatgatgctcaagtccccagtgagctaacctgactgcagtccaacactgatttagagcagctaaccaaatgaaaaacttgcattggaggtgcagtccaaaacttctagatttctttccatgggtcaaaatcaacagccccgagcccccgacaaagaaactacaataagcagatttggttgagaattctcctataatggatggtgatcaaatgtgccagtaggtcgtgtattcccgggtgaagatcaatttctgctataatatcccttagatcgatggaggtattccatcaaggttgtagctgacagccccctgatgtaccatactcaagcattactgtccaatgcatcctgcaccattcttcttttgattgctctctttgccacatgtgtgaacggtagattttctctgaaaccatttatcacaccaaaaaggttttcgaagcctcaagtaacaagtaagaaaacacgacaaaacttatatcttagtaaataaacagtgtacaaaactgcaatatatataagtgtagatcacttctgcttaaagccaaactaattactgctctgc

SEQ ID NO: 152451 - DNA, 352 bp, Zea Mays
tggactacggcatgccgtgcaggcgcacgatgtcaatgaagaacgcctgggccatggtgtcgacggtgtatggatgcgccagggggatgaagtgacaatatttgctgaagcggtcaacgacggagaggatcaccgatttgccgttcacccacggcaaagcttccacgaaatcgaggccaatgttggcccagacctcggtaggtactggcagcggtaagaggagaccggtagggtggaggtgctctgttttggaccgctggcaagtgaggcattcccgcacccagtcctgcacacaccgacgcatattgggaaagtgaaagtcatggcgaaggcgatgcagtgtgcgctggac

SEQ ID NO: 152452 - DNA, 371 bp, Zea Mays
ctctcctcccttcatttctcttcagccgtcgcgccctagttctctgctcggccatggaggtcgcggttccctgatctcctgctcgcctggccacgccgagctccatccagggccggagtctctttgctcggatttcgtcgggcccgcgagctcccctacgcgctcgtactccagctcggttttccttcaccgcggctctccctgacccagcttctctctccccatggccacggcacccctgctccctggtacagcgcgcagcttgcctgctcggctgtagccaccgcgcgttcccctgccctcggcttcctgcatcgcgtggtcgcacccctcccttgcttctccagctcgaccgttcctcctctcttttc

SEQ ID NO: 152453 - DNA, 1855 bp, Zea Mays
ttcgttttcaggtatgtgtccactgggacaaatgtcccaagatcgcgagaacggagtggtggaagcttagaggggaaccgacacaaatgtttaaggataggatgctaggtgaggagccttgggaagaaggagaagatgcaaacatgtggctaaagatggcaacatgttttcaaaaggtggctttggaagtgtggtgtgagtagggaaggcaaacaggaggcgaaagacacctggtggtggaatgacgaagtgcaaagggctattaaggatacgaaggtttgtttcaagtgcctcctccttgacaaaggtgcagccaacatcaagggatttaaaatagagaagagggttgcaaagcgagctatgagtgtggcaaagggaccgacgtatgatgatctttatcagcgactaggcacaaaggaggaagagaatgacatttataggatggctaggatacatgagaggaagacaagggacatcaaacaaatcaaatgcgttaaggatgagacagatggacttctagtgaaggataaggagatcaaggacaaatggtgagagtacttcgacaagttgtttaatggggagaatgatggtcctaccctcgagttggatgactcatttgatgatacgaacaaacgctttgtaaggataaatcaggaggcgaagatcatggaggctttgaaaagcatgaagtggggtaaagcgatggccctgatggcatccctattgaggtgtggagatgcctaggtaccagagtgataatatggttatctaagctttttaacctcatctttcagtcaaacaagatgcctaaagaatggatgtagcatatgaagcttccactagagaaactcaaatggtaatggacacaacaagttagtgaatgttaaagctctgggaccagtgttctacggagagagcacacagcagcatagtaagcatcgatcagaggcaaggcgtgcgtctcgtccagtccttagtgtgtacccgctgctggagtttcacgtgagggaccaaccaacggcaggggcagcaggaccatatggtattattatggctcttgttgctcatgcttaattaatcgcacaatggcctgctcttcgccaacaactcctcagcttcaactcggaagtcagctgttctaaagtatacatcacgatggcggagcggcgctccggctaggttgcccttgctgtccggcgttgtgccccccaactcttggccatggggggcctcccggttggctctggtccacctgttctagatttctccgtcgaccttcactttcaagattggatcattcgcaagtttaatcgcctgatcaatattctcccgggtaaatttgactgtcatgagttctttttagtaatctctttcggcaggtgttccttgcgcctgtgtgaagagtcagtgggctttcttcttcaatccttcatcggtggttcagcggagcttttcagaatttctcctctgtcagaccgggtttttcgattctcgcttttttgtaaggatgttggtttcgcagtctatagacgtcactcatttatttgttcatcattcaaagcgtatcttcatctttggaactctggtggccctaattggatcaaagaatggcacctttactctgacgaagaatcaagttcttggactctggtttcccgccgccgtaattcgcaggcctcatttggtgatgtcgttcgaaagccagctttgtctggcgcaaatttggtccctctgggcgatccggtcagggtcgggcttttgccctcaggtatgcagcaaagatcttcggtgtttaatcggatttcttatcctattcatcaccccgtcgatcagttggcctctcgttcaaattccc

SEQ ID NO: 152454 - DNA, 312 bp, Zea Mays
agggaccatagacaattgttaacttccagtgatctgcgaaaaggcgagaggcaaaatccactgtaatggagaaaagattaacctcctggatcattccctgaagcaaggagtcattccaaccaatcaaaatacccccacccgagacacctctagagggattaaaggcaaatttggtgaaacgcttgggggcaagtcttctaaaagaatgagggttgatgtcctccatttttgtttcatggatgcagaagacaaagcaacaactctcttcaattttttgtcgcattgcacggcctttgccctcatcattcaaag

SEQ ID NO: 152455 - DNA, 694 bp, Zea Mays
gcccgaccgtgcgattggagcgggtagggtagagatttggcgcgcattggacatcgggatggtctgatttcttcaccgtcacccaaactaccgcaatgctgcactgccgcatggtcacgcgatttggcgctgccaccgtaggtaaggatttccctaatgcattcaccactcttcggacatcgcgtaggagtaatcgtagcgggctttggttgaggaagcgccgaattggggccgctccggccaggggcgccgccgtgaagatgggggatgccgtggttgagttgagttggggaagatgatcatctgaccgctcatctcaaaacggacgaccgtgatgacaacgccgcatatttgctcgcgttgttacatcctgaccgtagatcgtcttatggagggatgagaggtgatcctggcaatttaaaatctagtgcattgatttcagatccagggggctcctactgcttaccggttcactggaatcgcgatttaatctgggtgctcggcttttgatcggacgaccctgattgactcgtaccccttcacgagtgaacttttacgtatgagaccctaagaaatcctgtattaaacctgcagtccttcccagtgttagctctgagtctagggaagttttgtagatcaacccctgcactattcgttattcgatgcgcagtctagtgaccaaggaaattgagaa

SEQ ID NO: 152456 - DNA, 719 bp, Zea Mays
ccgccacggttcttgttgagtgtttgacgctccggaaaggcgtcaacagttttcatattttttatcggaaacaaaatcgaaaacggtaactccggaaacggaaacgatatcggtatttcagaaatatcgaaaacgaaagtttagtgcggaaatacatcggtaacgatcgaatataaaatacgatcggtaaacatatcaaacttcataatacaacaaagttgataaaagaccacaagttcacaattcatgatataacaagttcacaattcatgatataacaagttcacaatataaaaagttcacaaggatcacaaatttataatataacaaattcacagtataacaagttcataaagatcacaagttcacaattcacaatatccactcgatctagctgacatgtcatgcttacttataaaatattttttcctcacataaagaatttttcgcaatctcacaagaaaaccctaaaacctagtgtgtggaaaagaccaaatcgttaatctcagctgccttccaataccatctattccaaaaaaaatcttaagacgtgcaaaaatacaaaaataagtaatccttatctagaggcgtataggcgatgcgaaaaatcacatcctggaaaatttcgaaaatttttgagacacaaatccgaaaaattctgagacacaattccgaaaaattccgacaaaaaccggtaatcgaagaaaacggtcgataaa

SEQ ID NO: 152457 - DNA, 582 bp, Zea Mays
gtcacgataacgtggttccatcgggaatttaacttcaactcgagcgacaatactatacttccgttgtagcccataaaaatcttcatcgctatagtcgtcgaacaacctgaagctatattaaacatgcgactaaataacgttcataaatgtgatagctattgtgttaactattgtttataatataacttacataggcatcctttttttcttgtccaatgcaactctttcacggttcaatacggctggctccatcaaaaccttttatcatttgaaaatatttaaaactaaattgtaaaatggtccagtgcattgatatagcacgacgtaggagcagtgtgggttggttggttgagcacttattttggactataggtgtgactgtgattaaggcttgtagttcatgagtctgcagctcatggagaggtggatggcatgcatgattgcgtctgaaggatttgtatagccctgttggtgcacaagtacggcgtctaccggactcttttaagttgcaagtttttttcctaggcacccaggactttctttttatgagaattcgacaattttttgcactgtctaggtggc

SEQ ID NO: 152458 - DNA, 384 bp, Zea Mays
gggagagcggtagcataggacatcacaagtgatgacgatgccaacgtggctgtgcaacaagagccacacttggtagtgtttagggttccatgatcagggtgaccacatcgggtcggctatgcctatgaaaatggtgcgtgagggagcaacacctatggaggccacgctagaggacctgcaggaaggatacatagtgttgagtcaatgctgcgacatagattagcctgttcatgcaagaatgcaaggtccgttaggagatggtgtagcaaaaggaaaaatggactcattgaacacgacatgtcaaaagatgatgatcctattggattgcaagttgaggcaccgatatcctttaggctccgtttggatgtcgatattggagggcaa

SEQ ID NO: 152459 - DNA, 394 bp, Zea Mays
ggcggcgttggaggggaataggaaattagggccctggccataggatttgagttggacggcagagatgttgtcccgcatacccgttcacgtgaatggatcagtgcctttagatcttgatcgcgcagttcagagaaaatcaatcctcataaaatctaggccgtccatttataatccaagggatcccgagccataccggttcgattctaatcagagccgcacgtgtctgatccaacggctctggttgctccttaccccttcgctggttcctttttgcataagaaaccctaggaaacctagaaactcacctgcagtccacactgtgggaatactgagccttaggaatgtttctgttttagtcccgaacttctcggtaatattgcgcccagtccaggac

SEQ ID NO: 152460 - DNA, 373 bp, Zea Mays
ggcagaggtgctctaggcagtgacaaggctgtttcacattctctgtcagcgtctgaagtcattcctgaagtttcaccaccgcatttaacatctcgggttttggccttctcggatggtatggcaagggaagaattaaacttgagaagggccttgcttgttaccgttactggtacaaggccggaggtccttggttcagaggtattagaagaagtggcacattgtttcagcattaagttggaagacatgacaatccattctgcaaagcctgaggattttcttctattctttcctaatgaagagactgcagtgagggttcttaatgatggtaaagtgctccgaggacctcggttcagcttggtttttaaaagatggt

SEQ ID NO: 152461 - DNA, 496 bp, Zea Mays
tgatctaatgacgagtagtgcgccaattttggggttttttttgttcgggctactgtggatttattctccagtcacttatttgatggcgagatgttagatcaagttcggatgtgtatcgggtgttcttttctttgttgtgaagtatgcccctcctcgttatttccaccagcaatcgaggtcagctctggtgttgtggcgatgttgttgatcgagttttggggcaatatatcggctgtcgattgagtttttgggcaatatatcagcatgttgattgttgaatataactcgtttatatgcgctctactctggtcgatgcttttgtcgtctgtgggacatacatgccattttttttgtttaaccttttctagctgattagcagccatctgagaacgtgagaagataggtgaaattaatcttggagttctgaatccatcctatcttgtagcttcacatttgcacattgactcctggtaccatcctattggtaacaacgtcc

SEQ ID NO: 152462 - DNA, 531 bp, Zea Mays
attcaccgtgagaaagccgaagaggctcgtaatgtacgtgttgcgctggccacagatgggttcaatccctatggaatgagtgctgccccgtacacatgttggcacatgtttgttatcccaaacaatctcccctcggtgtgtgctttcaaaggcaggacatatttgtgtcattgataattcccggacacccgaggaataaatgggtgtgtacatggagcctttgttttatgaattggtacgttcttgggaggaaggggtatggacgtatgaccgagctacgaagataaacttcaaaatgcatgtttggtaccagtactccatgcatgacttaccggcgtatgggctattctgcgcctggtgtgttcacggtaagttcccatgcccagtttgcaaggaagctcttagattcatttggttgaaaaagggtggaaaatattcgtcgctcgataaacatcaacaatttatccctcctgaccatccattccgcctagacatcaaaaactttatgaaaggtgtcatagtgatggacca

SEQ ID NO: 152463 - DNA, 372 bp, Zea Mays
tcttcttcggctgcctatatataagtgctacatgcgtatgcagtgttcctcgcccggtttatttgccgatggactcttggtggtgagcagcgagcgagagatagagagggtgaaactacatatgcatatacaaatacatgtagctagcggcgtagtactggatactgtgccatacggagtatagtatatatactcgctgtattagcagtagaggcggccgtgcagcgatcggtcgacgatggttgttgccgccatgagagacgagggagaggagggacgacgacgggcggtggtggcgatacgggactacgatcccaagacggaccgcgacggcacggaggccgtcgagcgggagtgcgaggtcggcccggc

SEQ ID NO: 152464 - DNA, 502 bp, Zea Mays
gttagatttcagcaacacttatcacccccagtcagatggtcaaacggaaagagtcaacaaggtcctcgaagatttactaagagcctatatgttgacgttcgacaggaattgggagtccagtttgccgtataccgaattctcatataacaacagccatcatgccagcatcaaaatgtcactgttcgaagcattgtatggacgaaagtgccagacccccctaatgtggtccaatgtaggggaaaggatactagaaggactcgactttgttaaagaagccgaagagaaagttgccttgatccgcaagaggttacttgaagctcagagtcgacagaaaagttatgcagacaacagacgaagagaactcagatttgaggaaggagatttcgtatacctcaaggtctccctgatgcgtggtgtcaaaaggttccaaataaaaggaaagctagcaccgcgtttcgtcggcccttatcccgtcattaacagagtgggacccgcagcacac

SEQ ID NO: 152465 - DNA, 495 bp, Zea Mays
cataaatcccctcccatctagtgccttctccaaaccaaactccgatggatccattggatgtgcaggggaggaaggcatccgcggcgccgtcatttgtgctggatgcggcggggatgcaggaacttctagatgcggcggcggcgcggaagcagactggcgatgcagcaccgtcggtggctaagaggaccggcatggggaaggcggcagcagcagggtcgacacgcttgcaacgtgctatggaggcggactttcaaggagcaggcacagcggagggccgccagcggccaggcacagctttgggattgaagcggaaggtggccgccatggcagctgctccatccgtggtggctccacctgttcatgatttcacgaccttctgtagcacagcttcatccatcgctgggagccaagccttcagcagcatcccaaacttcacgagtggacatgcaatttcttcaccgacaactcctccatgggtacgaagtgaagcaacgg

SEQ ID NO: 152466 - DNA, 367 bp, Zea Mays
tggacactggtggtagaagatgatctctggaccgtaggatcaaaatccagcgatcaggggcgtaccgagtcgtgggggtatctgagtcgtagatctaagtggctacggttcagatcaatgagggggaaacatttcactattttaaatctaggccatcgatttgagatccgatgacgcgaattagtgcgtggtgtgggtaatatgggggccatagatctatgatccatgggccacggtcgctcgttgtctcatttaagcgctgatgtaatccaaaccataggatctgatctgaacgaccctcatcagcggatacccctttgggtttgggtttttcacatatgagcccctggttcttgtcgaaataaac

SEQ ID NO: 152467 - DNA, 611 bp, Zea Mays
gacaattatatgcatgtttgagtcggttacatgttgcatatcagggacggttatctgatatggataatcgtctaactaactgaatctatctccgttacaatatatcaattggctgcttagtgccaagtcattagttttatacagagtttctaagtcgtgggttgagcagaccgtataaacgatcatataaaatattactttacactataaaatatactatttatagagtagagtttaaaatattgagtgagctaaaagtgcgatagaaagcgcgcgcagaaaatagctgtgtgcagtggcctaaatttatgtatggtaataataacgttaccgatccatgtatgcgcgattcaatgctagtgtgtgtgtttaggtagcaccaatctgctgcttgaagaccttattacgatatgggctaattattgatcaggagctaaaccttacaatatctagtaccttttttttttgcgaacaagtagtactactttgtatcgtctttttccgacagtgcgtgtgatcaattgccaacattagccaaacaaattatggacatacgtaacaaagaattctacgaataatcatgtgggtgggggttggggggagggggggaa

SEQ ID NO: 152468 - DNA, 442 bp, Zea Mays
aagagacaccacgaccagcttcggcttcaaaagcaccaactgttgagagcgctacagctatcgaagctgcaccggccgaagctgcaactgccaaagctgaacctattgaagatgcaaatctagaaagcacactttctaacattgataagatacttctggacatggccacagaagaagctgctgcagccgctgaagaaaccatggctacagtacctgagaaggagaaggaaatagctgaagatgcttcagaagaagaaaactttaactttcaaaacttaattgggaaagatttgtcgaaggctgagaaagaagagttgagagaatacgccatatcctgcgggtatcaaccaggggcactactcttcggcggtgttgacgatgaaaggttaggctgcgtccgagatcaaaccgtagcgaaggttatcggtactctatcaaagag

SEQ ID NO: 152469 - DNA, 540 bp, Zea Mays
ttcgagcaggcgtcttatacaaccactgcataggggacccaccaaccaacctgcatgagttgtaccagctcttcaaaaagtatgcccgatcagaagaactccaccaaagaaaagtcgagtgtcagcaaaaaccaaaagggactctgcaatccagcaggacatggattaggcctacgcagcaggatccattccaacaagagtgtggtcaacgccaggtgcataacattgcaaaccaacagtaactaggagagaacccccctcgtcgtcaaagctacccctccccaccccccgcaacaaggtcgtggtgttaacacaaccaggggcagaggtaaaggtcgaggccctcagcaatcgagaagattttaatgtgtcttccatggcgaagactcagtgcacccaaccaaggattgccccaagaccagggcgacaaaggaccgaatggctagggtcgtcccggcagaccaccaacgagttatcgctcatacctatcaaccgcaacagtaccaccagcatcaataccaaaacgagcacccatactac

SEQ ID NO: 152470 - DNA, 451 bp, Zea Mays
acgggcggcactactgccaatttactgaggagcaaacaacttaaaaatactgctttcttttacgattgtagtcttgtaggctgtagccaactgaagcagaaaagacacacagagcgtcgttgctcacctcccctgggcgccgacgggcaagatgaatgtccaccgcctctccatggagaaccttttcgcataccacaggtgcgtgcgcagccgccgcgcaccgtcgccggcgaccgagaacccctccgcggggttggcagcgagctcccgccgccgcctcaccctcctggactgtttccgcgccgggaggccatcgtcatccccggggcccacctctccggctccccggcggcggcgcttgctgggtaggtgccctgtggtgcggcggcgcgccgaacggggctgatgccggccgccggcgtcgtcgagtcgggacgatacggctgcgtag

SEQ ID NO: 152471 - DNA, 842 bp, Zea Mays
ccaacaaggattctatgactatttcaggttgtgggatattctgcaaggggtgcatctctcccctgaagtagatgatcaacatatttggaccccctcggcttctggtgtttattctgctaaatctgcttatgacagattgttagtgggtgctaccagttttgatccgacaaaacgtatatggaaatgttgggcgcctcctaggtgcaattattttcctctggttggcttctttaagccgatgttggacagcggaccgtcttgcaaggcatggtttggatcatccggagtactgccccctatgtgaccaggaaaaggaaacagtgcaacatctcctagtggcttgtgttgttgcttgacaagtgtgttttttccatcctgggtttgagtggcctccaactcctcactcctgggattgctgatgaagtattccaagattggtggaaagcagctgaagcaagagtttgtaaggagaagaaaaaaggctttaactcgctggtggcgctttcttcttggaggatttggaaacatcgaaatgcttgtgtctttgatggggtgcccccaagtgtatctaaagtcattcaggacattaaggaggaggccagaatatggtgcttggcgggtgctgctggcatggttcttaggcgataaggcaagataaggcgttggaccaccgcctagacgcctatcttttccaatacagacatctatcagtccagattaaagtggcagtggcaccaatactcaagccaacatctaatcgataagagggccactatcagccaaaaagggaaaacagaataatacttcttttctaagcatccaacaaacaatttgtgtttaaa

SEQ ID NO: 152472 - DNA, 513 bp, Zea Mays
atgggtatatatatgtatagtcattttattatagaagatgggtaggttagggtaagaatagccaggggtaagaaagtttatggtgagaaagaactccttgttgggtggtaatgcctctgaaggttgagtttgtcttggtctcattgattcgaagttagtgtatatcatcggagttggggaatatggttaagacatatatggatgagatagactacatgaggtagatcaaggtcttgtttgatgttaggtggggattgtcaaattatgcaattcatcatgactctactggttgagttagatttcatgcatgtggctgagttggtttaaggcactagtttagttttaagtgcatgaggggtatggccttatcttttgaaccatcattaagtaacttactctagattagatcataatagattagatagaatctatattaggttggatatgactagattagactagttaagatttaattaatttgcattggatcatggttgttaaactagggtggat

SEQ ID NO: 152473 - DNA, 861 bp, Zea Mays
tcagagaggtggtataggaatccttcgttcgaaaagctatcacaaacagataagctcgaaaacctccctatacttgagcaactcctccccgcttgtccctttcacgtaggattctcacacactagcttccttaattaattagccaagacgaaactcataatactccttgtggttgcaccgtttttccgggtggtcgctccatatttcaattaaacaaaggatcagggttgtacatgtaacattatcatgatcagtggtcgctccatatcatgcctaagtaaaccatcaataataaatcatgatcagtgttatacatgtaacattatcccataaccaaatagagcaatagcaaatatacccaataatagagttgtggttcgttggtggtgacgtttccttgcaccaagtctccgatgtatcctcaccatcatctcatggctaaggaactttccaaatacttcttcgggagtcattttcttgtacctgggattctcacgaaccaaagatacaagagtagcattgcgagaagtaaatgatcttaacataagttttaccacttcatgattagagtattagaccacttcttgctcccgagattgtagatttgattcactaggctcttaaggcgattgtatatctcttgcatgccttctctcttgaggatggcaaatctcccgagatcccattctaggagcccccttttgatgatctttgtaattttgtcaccttcatgcacttttagtgtcccaaatatcttaggcgctttccaagccattcaccttattgtattcttccctgcagagagaaacaagtaataccgtggtggcttgggagttgcggtgtaaaatttctccacctcca

SEQ ID NO: 152474 - DNA, 1033 bp, Zea Mays
atgtgattgaactttattaatgtttgttttagcacctaaacaggctcttagatcatggctactactaatagttaactactagctaatatgtcataactactatgtaactactattacccctattaggactagtttaggaacttcattttcttaaggaatttctatttttcaagaggacttggataaatgaggttcccaaactagtccttaacaaatttcactcgactagtaaaatagtactattattagctactagaaaaatattgctaacaatcagttaaactattagcaacatgtatttggattcaagaaaataattatgagtagctaattagtaattactatctttcttgaacctaagtaggatcataattaataaaaatcctatagtttttagagagccaagataggatcataattaacataaataatgtagtttaattttttgatagacagtactagggcatgtttagtttcattgtgctaaactttagcatcacttaaagagataaagtgctaatgtatgttaaactttagcattttacttttaatatcttctagtatattttagcactcatgtttggatttacaagagctaaagtttactaaagatgtagtgctaaactttagcattatggaatcaaacatgcccttagagtgtacataataagaactgcacattaggccttagactgccttcaacaactaccttattttattctatattttaaactttactctgcaatcagtataatccatagtataaataataaatctcttattttacatgatctagtgtacataataagaactgcatattaggccttagctatcttcaacaactatctcatttcattctatatgtcaaattttactctgcaatcagtataatctatagtataaatctcttattttacatgatttgttgtggacaatctttacatggatggcacatggacctgagacaacattggacgacatgtgaaactttctttggacaatattggacaacaggagaaagctagaaggagca

SEQ ID NO: 152475 - DNA, 328 bp, Zea Mays
tctgagtactgatttctgaatatatatatgtcatgtacggtcgcacgtacaggcgtgcccgggatacgcgttgggcggcagagcgcgccgatctcgcgcgcgaggagcgcgagctgggtgctgccagcggctaagaagggaagtcggatctccctttcctagaataaagagattccctgctgcagttgggataagaaggaaagtaggatttctattactatctttgtagtcctagaattatggagggggttccctcgatcggttggcccttgggctatataagctgtaaccagtcgactggtaaggggagcaaaaaagattattgtcc

SEQ ID NO: 152476 - DNA, 517 bp, Zea Mays
cgccaaggttgatctttgaaaacatagcagaagccgaggctactaggctggaggatgttgatatactcgaagaagaatggttgaacacggtaattcaatcagcatggtaccaacaaactctgaggcgctatcacgataagaccatgcgacatcgatccttcacagtaggagatctcgtcctccgccgaattctaacgggggaaggacgacacaagttgtcacctctatgggaaggaccgttcatagtagcagaagtcactcggtcgggatcatatcgcctcactcagatggacgacacggaaatcaggaactcatggaacatagaacacctcaggaagttttacccctagccatatttcaaaagctattgggacgacaatgtactctgtaaactgggaaatatatcatcaataaaaagacttcaagagcgctcaaattattgtcgacctgcattcttacttaactcggggtgaccactataccctactaacggagcaatcggcttaagtcggcgatg

SEQ ID NO: 152477 - DNA, 551 bp, Zea Mays
agtaaacatcctccctggacggcgggtttatttctgtgaaagtagggggctcatttgcataatcgcacggccaaaagggtatcaatgaatcctagccgtccgatctggttttagcgtgcaggattagatctagcctgttatgaaacgatacgcgacgatcaccgcacgatctcatctctacgctccagatttaataacccctgaaccactctcgcccgtccgacccgaaacgggcggccctcgttacaccaacccaaccggtatgcttcttctaatttgggccgtagatcgtgcaatcgacggacccagcgtaacccggcctcctccgaccggcactggcggcgccgcccaccaaattgcggcgggcatcgctggagcagggccgactaccatcctggtgcgctaaacccaaagggaataggtgctatacgaaggtggggcaatgcgaacaatcatgagggagatttcatcttcaatcccggtgcagaaatcctaggcgacgacggggcgcggcttcacgacggagggaatacgccggtgcgcaattcgcg

SEQ ID NO: 152478 - DNA, 646 bp, Zea Mays
cggacgacagggcagtataagggaaattaagggagtgggggagttgctcacctcgagaaggaaatatggagcgcctgagaacgacggggatgcagggatgccttgggtcgatggcgatggagcttcggctgcacggggagaaggccggtgagcgcggaccgggcaaaacagaggagttgggggaaaaccagagggtgcctcgtgttgttggcgaataggcggagctcatcgaggcaacagacacgcagacactcaacgacggccatagaacgggcgccgaatcacagcggagctccacgggcgcgcacacagagcgagggtgttcggctgagggcgcaactgagcgaggggagcatgtgagtgggtgtgggctctagaaaaggactagtgtggtgggggtgtggctgggaaacgtgatcgtgggcgcgtccacgacggagatcgcgggcgggaggttagggaagggatagtggctaacaggtggggttcgtaggccagctagggcgaccgtgcgaacgggcagtcagcgctgagagggtggtcccaccgagcagcgagagagaacaggtgcgtgcgcgaaaggattggcgccgataggccggtcccaccgggcagcaggagggagagagggagagagagcgcgcgt

SEQ ID NO: 152479 - DNA, 336 bp, Zea Mays
cacccctgtgccatctctcaatgcctcttgcatttgggaattcaggctaccgccatgctaatttcgctgtgattgcaaactgtggatgaagtcgatcctctgatataccattgttacagcctgggtttagctgctgcaatatatctgtgctcaaccttgattgtgatgacaatggtttggcagtaaacattattatgcagatctgtgaaccacaaagattacacatacctcaaataaattgtcttccttaaagtcataataagttattttttctcatattttctagcatatggctagcacccagcactagcagacctcatcacttctgaattattg

SEQ ID NO: 152480 - DNA, 622 bp, Zea Mays
tcctgactgaatcgctggcacaacaggagcctgaagcggaggaggtggagcagactgaaccggaggaactgagacaccagaatgctgtagcataagagccatgaatgccctgctcttagcccgatcctggagtagctgctgctgaagtgaatcctgcatgtcctatatggtctgaaacatcgagagcatcctcttggataaccgggtctgctcggctgccaggtgagcctgctgttgagtgagagactggagaatcgaagcaatagcagggtcaatagccggaggggcagcaagggtagcactagaactcccagcctcatgatcatgtgagcgtggaggcataggaggcggaggcggaggaggaaccccaaaatcatcatcatcatcatcatcatcatcaactgctgcatcctgagcttcaaactgacgaagaacagcatcctcggcctgagagtcaaaaactggagcagaagctggcacaggagcctcaggcgcaggacggtaggatccaaaaacaaggcgtgaggcctcaagtgtgccctgaaactgtggaggccgaatcagctgcgcaaaaatgtggcacaggtagtgagcatatggcaactgtcgatgagcacgtatg

SEQ ID NO: 152481 - DNA, 2839 bp, Zea Mays
ggatcggctggccacactagctaatttaatgttaaaaggagccaacgtttcgagccagtctttcgagccagccgtagacaagcaaacaaacagaggcgaactctgaagctagttacagctactgcatttttcagcataagtaatcgtcaccatcacaaaggattctacgtgcaatgttaattacaaagctgacaacgtcaggttgctgagtgtattatgaatacttagtccttaaatgttacatggtttgctacatcaaaatttaatttccgagcagccgatgcatcttgatcaactccaagcagaagcctggtgtatcctccttgcattaatggagcctccattgatgaaaaatccacatacatattgttggtgaaagcatttgatattcccatattagcattattgctctggctcaaattttttggatcatgttcatgctctctattgtctgttactttgcttaaaccttctcctgtgtcatacacaaaaatgacagaaataaatcactatcaacaatattagaataagatttggcgggcatagtgatgagtacctttctcctgagaaaatttcttttttttccatgctttcttttcaactatattctttgctcgcttactttttgcacctttaatcacacgaggaactcgaaatgatatggcactttttattatatctacattggagtcatttaaaaccataggaatatcatttactctcgaagaagatagagatgccataggaacatcattttctctcagattacttagagaagcatctgattccatctccaacttctctaatgctttctctaaataatcaagaagtggccttgacactgagcacttcaatgcaagggatgttgcctttcgagacatgcgtgcagcatgtgctttcaaggtttcattctgatttgtttttctttcaatatgaaatcccttttttgcatattttgtccacctatttaatatatatttcggtggtaaaatgaaaacatcgttcatattaaatactttgaaggcatgcttgcacaatatacctataagatatgaaagttttggttagcaacttgtattagaaccaaaactatagtttcaaatgaaaatacatacctatggattcaaacttcctgcaagaacatgtaatggtcaaatctgcaacattgaatgttactgttgctccataatttgaatgcatatgtgtaaccatgaatgttgatattgacccctcagattgtaacaatttacatgaatatgaaaactgacatttaaattcttcctcaaactccatatacatcctccttgtatatgattcagcagcatacttcaacaaaggtaaattttggatgtaattaactggattcttcatacgtgatttgaaatcttcatccaactcattttcgcgaagagaagcagaaaccttctcgcattcgacgatgagttcggaaagcccaagtttcctacggaatctcttcttaaatacattattcataccttcactcctttgagtagttgtcatatccgctgtaaaagagtcacgataaacagcagcccacttttctcttaaattatatagatttagcatccacaagttctcctcaaggctatattcaatcaacagttcattccacttccttttgaaacaatcctctgatctatcttcatagacacaatttttaaatgcaggtagaaacttcttaggatggttatgaatgatatgacttagatgtttagcggcattaagataaatatgccataaacaaagtcgatgtcttgtatttgggaacacataagcaattgcacatgccatggctgcatcttgatcagtgaaaattgtacttggatgtttccctgacattgctgtcaaaaaggtttgaaagagccaaacaaatgattcaatagtttcattaaataacagtgcagccccaaagactattgtctgcttatgatggttggttccaagtagtggagcaaaaggcatttcaaacttatttgtttgaaatgtggtgtcaaatgaaacatcatctccaaagcatgcataatctaatatagattgaccatcagcccaaaagaaattagctatccgaccatattgctcaccttcttccaaatctatttcaatggcataaaaaaatgcatgatcctctatttgcttattcttcaagtattccaatagtgtttgtgcatcattggattctaaatatttctttcgttcgcgaccgatctcattattacaatccatcctcgagaatggaactttatcagcacctccataaaattgcttcataaattcatacacttgcgttggtctcattccagcttcccgtatttggctaatgagttgtctgtccgcttcaataacatgtcgttgggaccttaacttgtgtgccttgttcggactagcgagggtatgattgtgttcaagttcaactttttgcactgtccaaaccccttccctgctaatgctaaactggacacgagctttgcaacctgtccttgtagttgattgtgatggctcattttttctattaccttggttgctgcaaactatatgtttctgaaatatagttttatctggtcgacgtcttgtatcactctttctaatactaaacccaaccatacatgcataagcattgtacatctcataagcttctttctcagagtcaaaatacattcctactttaggaacaatcacagctggtccaactggatcaaccttctattgcaaaatacgtttagaataaagtcacgttacaacagtacggaaatttattgcaaaatacgtttagaataaaatcaccttatatgtcaccacttctggaatcgtgttctccttg

SEQ ID NO: 152482 - DNA, 491 bp, Zea Mays
cgtacgtttaccgagactcataactctatttgcagtactgcgggttgattctagaaaagcacaaggactcttatgcaagtttctagggccgaaggggtatcttcaaatcgaagccctacgatcgcagatggacgtggcagattagctccgagccacggtgaatcggtatccgaacacaaccatccgatctgcagcgaacgtcctagatttaaagcaaccagatccaatcgcgcacgcccgatcacaaacggacgcctcagatcgatcctacgaaccggtacacacgcgatctaatcggagccgcacctggaggatcccacggtcagccataactccccccaatacccactcccgactgtcggacctgagcggcgccgccacgattccacggtggcgcgcacaccggagtttcccccaatcacgcaccagagcccccggttcccaatccgcgagtcctacagcgcgtatatgtgacaaggaatcgaccgagg

SEQ ID NO: 152483 - DNA, 476 bp, Zea Mays
atcccgagcggcgcccaaagcctgggcgaggtcgcatccgcggtcgacgttgctggctacacgattctctcccccatggcagcacggttgcccgacctggtgatcccagcaccacaacgcgtatgtcttgcgaggcacccgatgagtatggccctgaggcgcctcgcctcgggatttatacccccatgacccaggtccaacagaaaccgagcggagagggccaaccccgcaaggttcgcgcgacgggttcggcgcagggaggttggagagttctgacgaagatggcccacacgtaagcgtttctgggagagagcgagagtagcctgggtgagtgatgcgcgcggcgaagagagcggctgacggcgcgggccccataggacggtgagaacgtcagggagcagtgggctggcgaggaggcgagaagtgggaaggccggctgaagattgggcccaacagaggtttgtttttctttttct

SEQ ID NO: 152484 - DNA, 651 bp, Zea Mays
gtcatcttaacggtcgtggaccgtttctccaagtacgcccacttcattgccctaggacacccctacaccaccacctccatcgcacgcaccttctttgtcgatatcgtctgcctccatggattcccaattccatcgtgaacgaccaggacccggtcttcaccagcgccgtatggcgcgacctcttcaaaatggcaggcgtcaagctgtgtatgagcaccgctttccaccctcagacggacgaccaatctgaggtcgtcaacaagtgcatcgccatgtacctacactgcttcaacggtgaccgcccgcgctcctaggtggactggttaccgtgggtagagtactgctacaacacctccttccacacagccctgcgcacgactccgttccaagtggtttacgatcgagaaccaccgatgctggcccctttgtgacgggcacatcacagacccagaccatggacaacatgctgcaacaacgggacatcttcttggcggaagtccgcgaccgcctcctgcaagcacaagcctacgccaagtgctactacgacgccaactatcgtgacttggagttcatcgtgggagactgggtctggctgcggctgctccatcgtcaagcagcgtcccttgtcgcccgccccaacgtcaagctcgg

SEQ ID NO: 152485 - DNA, 600 bp, Zea Mays
atttgccatggtacagtactgaagatgatcagaacgccagcgcgacagtctctcaccgccgacggctctctccgccgtgattcgtgtcgtcggcgtcgagattagtgcctgggtgttggacagcgctgctgggtcgcgaaaatatcgtcgccgtggataactccgggcagtaaaacaattccggtcgccgtaccgcacttaccacggcgggtgtggatatgctcgccggcgacagccgcctcccggccttgtgccgcgtggctcagcccctccaccgcatcgccgtgaacccttgtgcctcttcgtggctcgtcggagtaactgccacggtagatgccacgaattcacgtgcgccagtatcttctccacctccggccgccgcgcgtccatcgtaaaattcctggccaccgcttgcgacgcctataaattgagccctcccttagctgcgttagattatcgcgaacccagacacgaagaatcgttagctatcatcccccagtgagccccaatttccaatttcccccaattcaagcttccgccaccgtgaaacgagcttcaccgtcgccagccctttcccggttagcccccgtcccctgcttc

SEQ ID NO: 152486 - DNA, 723 bp, Zea Mays
gctaaactttagttggactaaaccatataaatttcgtctggtgaagtttacggcagtacagcgctgtgttggcgcccagttttgtcttgctcatatggacagcagagacaggtcccgctctcctgtggtggacctaaacctaaacagcgtaggttcagatcgttcctggagcgatcgacgctgtggcaagcgatcctaatgcgatgctctggtgacatgtcctgtttctgtttacgccggaacatcttgctcggtggggacaattctcaatcattgatcactttgtcttctgctttaaattgcagactttgtaggttaatagtaagttgtcagccagtgagccaacagattctcagctttctgtttaccgtctgtgtggtccaggcttgacaggtcttatagtattttcctgtctctaataagcatggacaaggaacattggtccctggtgtgatgtgtattaactataacaagcatgtatgtgcgccacagtacattaactattctgacaataattacgttgctgtttcttcagtgaggaccatcttagcataccgttggatcatgtgcccaccctactacctaggaccatctattcttctaaaaaaaactgagtatcttatacttgtttagaattatcctaattcaaagaatcctgtggtcctaatcgattatgccatcattcattggtcagcatattacactgcaactttctcgtttgcc

SEQ ID NO: 152487 - DNA, 515 bp, Zea Mays
accaggaggacgtgagcgattcagagccgtaggccccagatcttcgcgctaatctacaagtacactagtgcaccgcctgccgtcaaatacatgcattcgcctgctcgatcatcagtcactaccgtatgaggtccatcaagcatgaaacatcgggttaggttaggtcccgtccatgcggccgaccatcatcatcatgcaatgcacggggggcaccgtaggcaacagacagagccatgcatgcagaacggattatcgctgctgagctagctccctgcctgccttcccgagccagacgcgcacgcaacaggcacgggagggaaaatggtccggccgtgcaggattgaccctcaggtccccgactccggaccaagctggcaagctttagcttacggtgcacccccaacgcggcacggcgaggagtctggatggatggtgtctgccatcgtctgctcattcatttctgcctcgccgccactcgccagtgcgtcagggtgaaccgctcagcccgatccgat

SEQ ID NO: 152488 - DNA, 432 bp, Zea Mays
cgcaaagcagtgaagactcaaacattagttgacttcatatcagagtggaccaagcaacaagtccctgacaacccggaggctaccgaagtatggcggatgtatttcgatggctcgctgaaactgcagggagcaggcgcaggaatcctcttcattgcccctagaggtgaacaactcaagtacgcgtttcagctattattcccggcatcgaataatgtagcagaatatgaggcactgatccatgggttgaacatcgccatatcgctagacattaagaggctgatggtatacggagattcactagtggtcataagccagataaataaagattgggattgctcgactgattccatgggcaaatactgtacgaccatccgaaaattggaagacaagtttgaaggcttggaattccatcacgtggaaagagaccacaac

SEQ ID NO: 152489 - DNA, 1597 bp, Zea Mays
ggcaaatcggcgcaggagcaggagctgctggcctccgcggccggttccgtcgtcctcggtgagggcgatccgtccggtgatgtcgccatcgcgctcgcctacgagagcgcgggcttcgacgccgccgcgtacatgagcgcgctccgggcgcgccggttcgggaggtggatgctctggacgcccaggattggttccacgcaggatctcatcacgcggtgagtgccatgtctggtttcgcgccggggagggatttgggttttcgttttatcttatttttactttgtttgacttggcgtcagctcgtgttcgcaggaactttgcaaagctaccggtgggcgttgtgtgcgttgccgacgtgcagttcaaagggagaggtgcgcgtgattaggggctggcttgttgctcttagtgttttagtcctgatgaatttgcaactttgattacaaagctctcgaattttatttcaggcgagattgatgctctcttatacttatgatctcattgataaaactgatgaaactatctgctgaatgctgtgtaacctttaagattaagtgcttgaaaaatgcagtctgactgaacacaagtagaatcttactgtagtgtgacaactctttatcaaaataactgttttaattgattctacttttttgtggcaacacattcttaaccagttggctaaaccagatcatacatagcattcccttttttctttcatctttctaatcacataattttagtatgcactaggtgctattaagagataacaaatttaatctttgctcacgtatcatgcaggccgttcaaagaatgtgtgggaatcgccaccaggctgtctcatgttctctttcacatcacagatgcaggatgcacggaagttgccccttatgcaatatgttgtctgcctttcgataactgaagctatcaaggagctgtgccgtgccaaggttaggttatagttcagtgttgtcatgtttgctgcttattgattgcattttgagtcccctgtttcctttatgctaactacctcagttgccatttcattctgcctttgtgataaaactcagggactaccagaacttgatgtgagaataaaatggcctaatgatctctatctgaaaggattaaaagttggtggcattctatgtacctcatcttatgaacccaaagtgtacaatatttgtactggtaaaatgcatttccaatgttgcccattctaagcatttgatctctttttttttttcttttgacaaggatgggattcctttgatcttaatcaggtgttggtttgaatgttgacaatgagaagcctaccacatgcttgaatgctgcacttcaagaggcaaatcatacatcacccatattgaaacgagaagacatattggcatacttcttcaataaatttgaaaaccttttcgagatcttcatgaaccatggtactcggattccatttccccccatttttgcagtacataaccacatgctcattagaaccgtggctgttgatgtgtatgcagagctggttcctttactgacaatgcattaaatgataattttgttttgctgtagagacttactgttttcctatagctgattt

SEQ ID NO: 152490 - DNA, 273 bp, Zea Mays
gcgcgcgcggacaaggacgagccgtgccggcctgccggtggcagaacggctagcgcgattgacccgtccccgtttgaacggcgcgtcaacacaaacacaccaccgccgcggaactccgaattgaattgaatggaatgtccgctttgattttgaagcggtcgggtgtttggttcggtcgtttctcccagacaagcccgatcgatgccccccggcggccggcaacccggcccaggaaggttgcaggcagctggctcatctcgctttcattcgggt

SEQ ID NO: 152491 - DNA, 605 bp, Zea Mays
ccgttaatgagcacagaggaggtggtcgtgaagaagagaatggacacccattcgcgccaccgctgaccaaagcccagagcacgcagtacttcgatgaggtagctccaattgattgtgtcaaaagccttatggatgtcgagcttcatgaagagtgcaggcgtcttatgtctgtgcatttccctaatggtggattgcacgtagaggaaattatcatggatgcttctcttcttgatgaaagcactctgacagttggaaaccatatcatttaggtgggggcgagtctgttggccagtagcttggtgaaaatttagtgatgttgtgaataaggctgatgggcctatagtctgtgattctgagagcctcaaccttctttgggagcaggacaatattaactgaatttaagatctcgaagccttgggagtttagttggtacagacagttgagtgcgactgtcaaatcgttcccgatagtgtcccagcatgccttaaagaaggcacccgtgtagccatcagggcctggcgccttgtcggacggcatggagaagacggtgcgccgaatttcgatataagagaaaggtaattctaggtgttggaggtccctcgtct

SEQ ID NO: 152492 - DNA, 499 bp, Zea Mays
aattagctggtcggaggtagctagaaaattatcgttagttggattgttggctttttattagctaatatgtgagcgttgacttatttttttggatcatctacaactttattttattagttttgattggcccatactagctgtaaaatagttctactcatttttattacttactaagtctgattattattactccctaaattaagtcatgtttggcaggatactttttttaattgattttaactttggagtaaaagaattgggctgcttcacccttttatagtaaagaaacaacttctcttccctatacaacttctctcacagaaccgtttttataaaatgaatgtttagcgaaactttattataaaagcttgaagtatgaaatccctcaagaagtctggctaagctcgtaaacatcactcgataaaatagtgcaatttactatatatacacgatctgctggccatagtatgcatatagttttagctataatactccaaac

SEQ ID NO: 152493 - DNA, 789 bp, Zea Mays
gccggacctgtcagggttgatggtttttctgaacccttcaaatcgcctgtgcccttgcacggcccttgccatgttgccgtcgtacgtgtacacgaacacgtcgctctgcagggccacgatgtagtccacggcggcgagcctgttctggtacagctccagcggctccagctcgtccaccgtggcgaggctgtagtgcgtgtagatgttggggtactcggcccggagcgcgtccaggctgtgcgccccgtagatctcgccggcgacgatgtagatcttggtggccgaggggtaccccatggccttgaggaacacggccgcctcgcggggcgtcatggggcacccgccctgtagccgcctctcctcgctgttgatgtccttctccttccagtgccgcaccttgaaccgcatgtccgtcagctccgccgcctcatccagcgtcaggttgtggttgcacccggtgaaggccagcatgtccttctcgtatctgacgacgatcaaggcaaaccaatgcaagttcatccattgattgatctgcagataatagccggccaccgaacgctgtgaactctcagctacctcaggtgaagcgcgatgtaatgctgggactcgtttctcagccgatcaaccagcgtgttgccgagctcttcgatctccttcctgtactggagcgcctcgtagttcgcgcggcaccgaagcttttgcagcgaaggagcgaggccgttgttcacgatccgtgaatccgtgtgtgtaaacctcaccactttgaacttcctcaggattttcgcaaag

SEQ ID NO: 152494 - DNA, 317 bp, Zea Mays
tgagtatcagacattggtatctgtttatatctcaccagtatctcaatttcatccaaagcatgaaccaccctattattccatacaataagagctgggatgtttatggattgtcccagccttccgatgcgatcaacctagattccattccaacaacgtgtgttgatggttgcattcagacgagaaatcgcatgaaatgcctacataattcaaactctccagtagggacaaattgatgtcgcaaacaaacagtcgcgacccagcgaaatcaaacgcattcacgtaaatcgaatcgcttccgcactatcacgacgcagcac

SEQ ID NO: 152495 - DNA, 274 bp, Zea Mays
caaaagctgatcgcacacaagctgctagtgttttgaggccgaagactgcctccaggctccagccatataaagtgataaagagtggggaggaggttgtcctagaaattatgcaagggcaagaatgcgacagcaaagaaggcatgtctgcatcactgctactactagctagtgaataaactgatacaatgcctgaacatgtagcagatgagcaccaaagtccaaaaatacaataagacttgagattgtactcctgcaacttcactgtaatccaaaa

SEQ ID NO: 152496 - DNA, 536 bp, Zea Mays
gtgagattatacctagaatcgtttcaactgatcaaaatttatacaaattaaataaacaatccgggtagaatttgatctgagacaagtctaatgattggttttttggagtatgatttttggaccaatcaagtttcgccgtctcaacacgcattgctttgttcgcatctcgcattcgcacctgagtgaggacgtgaggtccgtcatatggacacacgtgctcaccgaccagccgaccacgcttctctagcttgggcttggcagtgccaatccgatccacacaccccagtttcttccttccttcctcggtctaaagaagcaagcagccatggacggcgacgtcgcgaccggcggcggcgggggcaccagcatccacatcacggcgctggacggcatcgtgaacgtgaattcgctcttcaccctggccgccttcctgggcctggcgtggcggccctcctccgacgggccggggctcgccgacggcgccgaccgcacgggcaacccctgcgccgcgggggaccgcgccgagtcggacctcg

SEQ ID NO: 152497 - DNA, 795 bp, Zea Mays
aagtcgcccaagggtgcagccggaatagcacaacaactgcatcaatcaaagtcttttatttaaaagacactccgcgcaaaagtcacccacgggtgcagccggatcaacacaggcgtacgaatacggccaacacgccacattaccatacaaattatagttacatacacacggcgagggcatcacatattacataggctcaaccttcgggatgatacccatctccctgtaattaatcagcattatcctcaattcctcaccctcaaaaagattccgaagatccccctcgcctatgctcgccccaatcggcgaggacaacaattctcgtttaccaacccggtctactcggagacggccacgctccatccccatacgacggtgcctaccactttgcgaaaagtcacccacactacgttttcccaccacccttcgccgcctacaaccagtactcgcactaggaagttccccggcaccctccacacacggtgaagtctccaccgcagccacatccaatgcaacaaaataatccaagccttcatcagaggactcctccgtccatggaaacgaactcccagattcaccatcagactcaaaacactcagacacagaaccaaacaaactatcatcggcaggcactatggttgaggctgccacaaaatcatcattgtcagcagcagttgcttgcgcatgcccaaacgtcggaacctgcgcagcaaccgaggttcagtatcacacagacaaaagtttacacttaaaatccctaacccctattctgccacatgcgaaggcccggccgcc

SEQ ID NO: 152498 - DNA, 278 bp, Zea Mays
caatgaatggcccttcccatagtggtgacagcttgtgtcgtccttcccccgttagaattcggcgaaggaccaagtctcccactacaaaggatcggtgtcgtatggctttatcatgatagcgcctcaaggtctgctggtatctggctgactgaattactgtgttcaatcgctcttcctccagcacatcaatatcctctagcctggtagcttctgcttcaactatgctttcgaagaccagcctcggtgccccgaacctgaggtcggcgggtagcactgcc

SEQ ID NO: 152499 - DNA, 518 bp, Zea Mays
caatgtctaagtctcggagaaaaagcaatcgagctccaacgctgtggatggaaagatctttcagtcatcgagaaagtgacaaagtgtagtagcagaagagctgaacgtccgaaaatggagggtcatcgctgagcaatccagccctcactcccgtttcgtccttgaggctgtacatgcacacgttgtaccacggttccaccaggacgtagtatatgcagttggcttccacggacgcgaatttgtcagcatccacggccaggcacctgcgctctccgacaaagagagctaggctgcctaggttcttcacccgttcgagcaaaccgctcccggtgtcgatcttgaatacatcgacgcgatgacgacgctggaagacgacgaccagcctttcctctgcagattgaacttggaaacatcgattgttcaagactggccattcagcgttgccggtgagatactgagggacgggcgcctcaagaacggagaacgactccaacggtacaccctcccgtgcaccagcg

SEQ ID NO: 152500 - DNA, 419 bp, Zea Mays
tctagagtagggagtccgcggatcctaggcgcgctcgatgttctaggattttgattcgaggtcatttgtttgtgagctgtggtgatatctgttccgttataaggacatggtcaagggttttagaaatatggatatatctagtcatatgcgtctcctgtatatttacatgttgaatttagaatatcaactaagaatagcgagatacattaacactttaacagtgattttggcatctgtatctgctagttgaatctaccttcatctctgattggattaacatgatactaaaaaaagttaccccatataggctcctgactgatgtgttacgcgccttttcatgcccgcttaatttcccagtgtccctacacctatttcaaccttgctattagaggaggcgagtatacagtggcaggctcctc

SEQ ID NO: 152501 - DNA, 490 bp, Zea Mays
cacgaacagccccggccacgacaaagtgtggttccgcggcggtgctagatctccggcgaggaattaaagacgtcccgagggacaccccattatggcgcggccatagaaacgttcctcgcgccatggcgaatctccccgactggtccccgatgattcgacgtacgcttgaccgcgaatcagccatggcggccgcagttctctcctctctctcgcgttctttctaccggtgttaacgatgacctggggttttggggaggcgcgacggctagtgcagtacgcggctcccctggcggcgtggatttatacagcgcctgggtagcggccaaaccggagggtcgcaacgaccgtgacatgcctggcggcaggttcgacttcggttacgcgcgagcttgctgagagggagaagaaagcgctgacggaaggggcccacaaacagagagacctgtgtccgcgcacggctgagacggccaggcgtggcccacacgtcggc

SEQ ID NO: 152502 - DNA, 403 bp, Zea Mays
actacatcatgggtagaagtgcataatctcccaataaccaccatgtcaacaccatttcaaattgattcagccggtggaaaagtccgagccgatagtgtatgctggaatgtagagtggaaataagggggatagagttttccgctaacctcataatgatggtactcagggaatagatgttatcctagggataaattggctagataagtaccaagcagttatcagctgtgataagaggacggtgaagttggtgtccccactaggagaggaagtggtgactgagctagtctcccgagccaaagaaaggaggttgtcactagatgactattaatagcaaagagactgaaccactcgaggctatcgaggctatgtcagaatttccggatgtgctccctaaagatctacc

SEQ ID NO: 152503 - DNA, 449 bp, Zea Mays
ttaagaccgcgctctaaggtcgatgaggcacgagacgctgcttgagataactccaatccggcatcaggcacatcagcgcaaacgtccatcattccaccatctgccggctctgacaatagatcttctgggaccatgtcttcaagagtctgatcaatgtttgccagagacaattcttgtagaccaatgagggcagacaaagctggagaaggaacaccactactttccctgctagctatgtagcgccggctgttcttccgaattagagggacttcattctcctcttcctcatcttcatcaataatgcggacggtacacccattgggatcagctgtggctagattacacccattgggatcagcatcatcaaggtcacacccattgggatcagcatcagtcgggtcacacccattgggatcagcttcagcaaaaactggcatcggcacttcccc

SEQ ID NO: 152504 - DNA, 302 bp, Zea Mays
actgggcccaggtatcactagccaccatgtatgtcaagagatactggtacgaaatcagcccatccatctttgcaacagtcatcgctttccttagaagggtcacgttttctggacagctgatgagaaacaggatgaagcagcactcattgatgagaaacgggataaaacagcaagatccagtggaggtttctgatgcagtgaagagagctgttgctagatcgctcatatcaacgtatggcggcaacgacccaaccaaggacgacgacgccgtagaaacatcgcaatggcaggaccagatgccg

SEQ ID NO: 152505 - DNA, 761 bp, Zea Mays
cttctcgttcttcttacgccgagaggtggatccattggatggattactggcggtcatgcgtctgctattgctgccttctgatttgaagtactggagtttgtgatttcgtcgctcccgttgctactcaactccatttttatcctcctatatagagctttcttttttcttgtaatctgtcgtttggaaaatgaaaccgtctttgaatctggattgcccttggatcacagtttgccagaacttatctgcagttcttttactccttttcttgagcgggctgtgtagaattctgatcaaaattttgatccattttaaatttaattatgacagttggcatcattgagcctttccattccatcatgttagcgtcgctattggcagtttagtaataatatgctattattaggtgcccttcattattggggtttgagagatggtgagggctgagccaactcccatttatttgacaggtgcaccaacaatacggtgcctgcactgaaggattcctgtatattggttaggttagcgtcgcacatttcagccctcaaatctagttcagttggagttccttgaccgcttttgcatttgtgaaacagaaactaactttttggtactttaatcaaatggcctatgtgtttttttacatctatccctttgatccatcgatgaaggacaattattagctgcataatatcagcatgatgctatgtctgttgatcactgtgctgtggttggctggccactcgtggtggcggacaatgacc

SEQ ID NO: 152506 - DNA, 383 bp, Zea Mays
atgtctcataaacaaatgaggatcctaaagttttgagtcagctcttgaccttactggtggggttaggtcagattcaggacgctcttcaaaatagagctgtctctgtctcccagtagtaaaggtaaaatggtcgacaagacaggatacattatatttattacgcattgatttacaagaaacggactcaggtgatttcacaaaactttcctaacctacagattacccttctactttacaataattggatagtcactgagacatcaaataccgctgcaggcattcctttatattctgaaagttcacaggcttagatatgtaggaatccatgcctgcagcaaggcattcctcggaactctctgcgaatgaatttgctgtcatctgca

SEQ ID NO: 152507 - DNA, 679 bp, Zea Mays
gcatgtagctatgttatgctaactttgaattgaaatgtagcattgcagtgttctcacccttgatgtacattgttttgattaattgcagtgttctcaccctttatgtagtgatgtgtgattcctagcacattgcaggtgccctccactaacgtgccttgctgatatattgtaggttctgtgaattgaagcgtagttttagacattggtccaacctatctaacttcttgtgaattgaagtgtgaggtgcatcgagctgacgagggagatagctatgcaggcgcccctgtcgtgccacataagcagctgttgcacccaccgaccaatcatcttgtgtgaattttgcagtctacggtggagttatagttttgttctccctttgtttctatgcaaaataatcaagtggcgagaagacaaatatcgaatcaacgatgagttatttatgtacaaccgtaggggctaaattgacgtgaatgaaaactatcgtattgtaatctgaatgtggcaggtcaaccattgatcacctttggccttgctggtcagtgttttctgtcttcggcttgactagcctttctcactaatatttagtgcacattgcaaccacacaccacttgcgatgttttgttttaaggttttacaaaggtagtttttagttctcggtttagtatttgttgcactagct

SEQ ID NO: 152508 - DNA, 1020 bp, Zea Mays
agcagacagcccactaccgcgttctggcactggcgcgtgggcccggcaaatcagtcacgcgcgcgcggtacctgagtgcgggatacactgtctggcgggccccttttgccagccgccctccgcaactccggcgtcgtcatcttcttcctcaactgaatcccgcacatggcgggcggtctcctccccttcttccggagctgctggccaaggcttcacctcaaatagcgtgcgccggggtcttcgccactaatccctacctccatctccgcaatacccgtgggtttcggctgttgaattgggagctggtcgcagtgcgcttacgtcgtcgtcgtgcgccgtagcagagagggagagagagggaattggagagcccagcgcccccaccaacgcctcgccttgtggaatcaccatcgagttcgcctggagaccaccggcaacgaagacaattggaaggctgagcggaattccacgttgtcctcgcccgccgccgtacaattccaccgcagccgggcactgcatcaatcaggcaccgattcatggtatggatcacacccatcacgttcgccttcctctcaacgtcgtataggatcgttcggattgagtcttggtggtgaatttgggctaacagcgtcggcacggctgcaaatcgaggcctccgccatgggcagggatctgtgctcgatggcggatgcaattggttgaggaattagattcagggagtcatcgatttggcaagggttgagctaattggagaatggtgctcgggatggtcggattcgcagtcccgacgatctcgccgccgcgcggtggctttgctctggtgctctgctgctcggggtagacgatggattagagccgcccgtttgatgatgtgtggttctgattagaacacgtgtacccgttgcgcgattcgatcccgaccgatggatcgagatcggatgggttacatcagaacgagcttaatccaatatgggtcgtagatctcgtatcctgtggtcataaatagatatcggttcagcg

SEQ ID NO: 152509 - DNA, 520 bp, Zea Mays
ttcttgcaagagcatattaggttaaatatctaagtagtgttgtcttgtttctcttttcgtctgatctgaaatttgtgctgcataccttagtgtttgttcttccgcggttccacgtaaacaccatacactgtccttgagttgtatttcccgttgttgagaacccacatgttgtacagaagatctatctatgggacttgtactatttaaacctagggatcgcagataaattacagtaggaataacaaaacacgtcccctttgcaaagcttcgactgtgatattgggtgcattaacaccatgtatgactggaagttcttcaactgatgctgacgaggtagttctcgtcatggaagggacatgactcttctgttaacaccaaatgaattgctgaagcctttgcttttgttgtgtgcaacttctgcagatctgaggtagtgtgatactagttagtagttactgccttttttgtgctctctttgttgcatgggtgttgtttcttcatttgaattcagaagttgtag

SEQ ID NO: 152510 - DNA, 552 bp, Zea Mays
gctgcatagagacacagaagccattgtttgctgcccaacagctaagagggcctgatggtacatggtgggtaaattttgtagcaattcaaccggctggacaccagatcacttgggaggaattcaagctagccttccgagagcattatgttccagagggagtgctccatatgaagcaagaagagttcatccggttaaagcaagggggagatacagtcatgcagtatctcaataaattcaaccatctgtcccaatatgccatcgaccaagtaactaccgatctgaagaaaaagaattgttttatgaggggactcaatgacaggcttcaacgaaaaatggcaacatgcttggatcttacctacagtagggctgtcagtaccgcactggcagtagaagccaagaatatcggacatggaaaatccaaggggtttggaggtgacaggtcaaatcaagggcctgaaaagagaaccaggttggtgatccgaccttttaatcaaaatcattcttcacctcgcccaccttcctatcccttcaagcagcctattttcattcgtc

SEQ ID NO: 152511 - DNA, 297 bp, Zea Mays
cggctgggcgcactagcgtctggcggtcaggcccaagcgtgagcaagccggggcgtcgggcgaccgggcacggtggcgtcgcctacctaggtgcgcgattaatctgagcaaaggtgtgggaggagggactagaggcacgcacgggcagtggccaatgctgaaggcgtgggaagaggaagagcaggcagaagtgagagatcggcgttggcgtggctccattaatttatagccggtggatttccaccttccatcaattgagaatttttgaaggaaagagaatggcacatttgaggaaac

SEQ ID NO: 152512 - DNA, 1668 bp, Zea Mays
cagtcaatcgtcatgggttgaagccacttcagatgtatgtaaagaagacaaacaccacatttggttctgctaacaagccggttggttcaattggtgttcctgaatgtcctgtagggaagaatagaattgagctagacaaagcttctattttagcatcgccaacttctacttggtcccattcatcagctcaaaaacctatagcttctgctcatttgcatcaaatgagagcaccacatgaatccatccttggtaagaagcctaacatatcagttgagttgcatcaagtgaaagtaccacatgaaaccatccttgatgagaagtctagcatatcagttgagttagtgagagtaccacatgagtccatccttagtaaaaagcctagcccatcagctgagcatgcatcaagtagggcgcatgattctgaagtttgtggcatcaattataatccaacatgtcagcaattcaaatcttctgaagcccagaataagctccactcttgctctaatgtcggtgatagcagtgggaggttaggaaatgaatataagaccaataaagagcaaccatatgcagaatgtataaatattttcacaacttcagcaagcaatgaaataaatccgtctactagaacttttgataattctaacggaagtactttgagatatccaaaacaatctttgtcagcatcgtcaagctctaaattgcttcagagtgcaaaggtgaatggctcaaatctgatgttatcggatcatatatctttacttgctgataatttgcatcaggatggagcaacaaccatttttggtaagaatagcacatcatttcagtgcactgccaaaagtagaacttttgtttttggtgctagtagtggccagtaccatcagacatatcagcaatcccagtcttctctgctatcagagcaacataattcaggtactagtatggagcatggtcattctgactcaataaattcgcatagaggcagcgctgcttcgccatcagtagagcataatggtgttccttttgcacaaacacgaacattctccagtggctcagcttttgaaggtttggatgatatttgcaatggttttactacactgaatatttctgaatgccctcaaggaactactgagaccagggctcaagatccacctactaatggtccttcaatgtgcatgctagataattatgaacatcctgtagtttttcgcgagaacagatcaacttttgacttggattctaaccccagctgctatcagaatcactctagtgatcctcaaagtggccaacctcctttcagcgactatatttggcaccaacctaatctgtccagtgatatgcaaagctcctctgagctctctggagataagccaagacatctgccaaattctactgagcctaaagttggaataatattgcaagctttgggcatattgaagactgagaagatattcccaacagaaactaacattgcagactgtatatgttacggagagctgaatttaacaggttttgatgttaagaaggctcttgaacttgccattcgccatgaagctgtcgttatgaagaaattactaaacgacatgccgttatttgttgcaaaagacgagagcctctggaaatgcgtgaacgtaacaaataccaaatcaaagaatcccatagaggagctag

SEQ ID NO: 152513 - DNA, 286 bp, Zea Mays
acaaagaaaaggcaagctactttcttgaccaaatgtgtggtgttaaccaagagatcagtaatcaacatgcatcgagacatgggctactactggttgcggttcggtatttatatagccatctgtgtgagcattggcaccatcttcttcaacgttggctatggttttgcatcgatccaagtaagctcaaatcattcgatatataaatattagaacatgatgaagtatttgatgccaacgcactcccttgatttcaggcaagagcgtctatgttaatgtttacatcaac

SEQ ID NO: 152514 - DNA, 518 bp, Zea Mays
tttttcaccagtagtttgggtagcttcaactgcatctttttcaagtgtgaggttttgctctttcggcttttcttctgccttctcatgccccgaagatctgtcaccctccgcagttttctttatgccatcttcttcggaggatgatgcaccctgaaggcagcacttccaagaccagaatatgcgggctctctacttcccctccagataaaatttccttgcccttagaaaacaccaccttcgttggtaccctttgtagatggcacgaaccgagtcaatgtcggtcccaagggacttagaatggaaaatggtaatggttgggtcattaccttgagaatccgggtgcaaccgaatgatgaagtagtggtggtgctatctttctcttgctcttgggcagccatagttttcttcgaagccaaagttttcttcgcaattgtacttttctgaacagaaattttgacattcttctttgccaggcctcaaggtggctctacatcattcttggactcatcatcatcctc

SEQ ID NO: 152515 - DNA, 568 bp, Zea Mays
cttggcgttggggagcccgtatatatgccttggcgttggggagcccgtatatatgtttccaatggtaaatcttactagtggatggcgcgcgcccgcgcgttgtaaaatttcattctagaatacttctaggtagagaagcgacaaccaaacctaaatttgattctagaatacttctaggcaaagtataactgtatctctgttgacacatctgacatagattgtttctcaattttaaacagccttaaaacatgtgaattgaagaatactactattgcatcacggtatgtgcaagctactttctacaaaagaagtgccaagacgtccatgtggaaacagagttcagtaagttgtcttaaacagagtgatggcgaccaattagctcattcttctcccgacattgatgcaagacataatatatgtatatgaaacccatatgtgattatcccatgatatttcccataaactgatgctgaacagaatgtataaaatatcaacatttatgttgcactaataggacaaacaataatatttgtgttatccgctagtttggcagtaagctgaattttag

SEQ ID NO: 152516 - DNA, 955 bp, Zea Mays
cgagagtgctgtgaaggagttggtgttgactgtgttggtcttcaaaatgtttgcctgaacagtcctgcacagttcaatgattttctatgacccacctagcaaattgttgtatgcatagttcttatacgacaatgagtatattccgttcaaaacaatctttttttgcaaaaaaaagtcatccaaaacagactttggatcatgccccattgaattcatacatgcggaaccctatcggatttagatgctcattcttgttggtcggacgacgttctgtacctgatggccactcgtcacatttcgctgaaacgaatcgtggtttgggatgctcctgggcctcttcttgccaaaactgctgatggagctagcccttagtacatcctcttccttggtccttctaattggattattgttctcaggaaaatgtccattctcatgtcaattttgggtgattattggataagttgcaatgttggactaaccttctgggtggttagaagggcgtttctaaaaggtcgcaaccaatggagatacattgaagctgatgatatatataacatttattaaatagaaaatgttgacgatatataagaggaacctggatagtatgcctcttgagggaaggatcatccaatgcaggttgcttggagatgtgaacatagtcgatgatatctccatcgaggctatggtaattaattgtccaaaaaaatgtttgtcattcagtgaccgatgtgtcttaaaagtttactgacctaaagtgagtatcatgtaagtttaattcgtgtgctgtgatttgttccctcataatattatgttctttaatacataaagtgttttagattttatatagtttttcgacaagatagcaaaatctttgttattgttttattagaaaagattgacccattttaaaggtgaaaatcttgccctaaaacctttttagattttatatagtgat

SEQ ID NO: 152517 - DNA, 352 bp, Zea Mays
tcagttaggctgaaacagacaagtgtagccaagctcccaaatcaaatggtccaggtccagggtatcgaatggccagcaaacccttggaataattgaagctggtcctcgtgttgccacccaactgatggattaagatggcggtaccagctctgctaccaccagtgtcgctgcaaccaacggcaaaacaggcgtgtctgatagaactgatgacgcaaactcttgtttgggaccgggaccaggaaccgtaattgacaccggacaaaaaccctgaaaataggaaggctatcagtcatatatcccatcatgctagtcattttctcatacagaaactagaattcggtagcaagacaag

SEQ ID NO: 152518 - DNA, 946 bp, Zea Mays
gtgctccatggtacagtgaccgaattaaattcagagcacttcaccgtcgtcaatcacccctccgcctggattcgtgccgctggcgttaggactcgcgctcggggtgggtggataaggacgtgcggtgaaagatccttgccggcggtgagctggaggtcactccggtgactcaccgtggctttcttttctactttgcggctgggcagataacctcgccggtgcaccgccaccttccggccttgtgccgcgtgtcctaatcgcgccaccgcatcgccgtgactccctctaaactccccgtcgaccaccggagttactgccacgacgatgaacacgtgttcactgcaccagcgttcttcctcacttccgaccgccgcacatcaacgcccaaattcacggtcaccgccgaagagccctataaattgaagcccccgctagctccgcaaggtcatcctccacccggccaccgctaatcgctagcagtccttcgccagagctcgcaaattttgaattcgccccaaatccctctccgccgctgagaaccacaccctaccgtgggccagccttccccaggtctgctcattcccttcttgttcctgttctagcatccttacatgatggtgatgctccctgacccctttaattgaaccggaccgctagggattgccgggaacacgtaccatttcttcatcgtccgcggttcacgtggacagagcaggatagtttaccaaatgagaaattaacttaggggaatcattcggggagagttcaattgagtgttagccgctcgggagcgccggtcatagcccccattcggccagtacaggagctcgccggagcctctccgcgctcgacaccgtcgaggacctccctctgcgaagaaaaagaaaccgagggagctttctgtaaactgtcagtgacacaagaaacagtaataggaactcgtttt

SEQ ID NO: 152519 - DNA, 699 bp, Zea Mays
tccttcgatattaacgaaaactcacgctttgccagttttcgaccaaaaatgctggccatatgaccattgatcatgagtgagtctcctattagttaccccacacatgtttccttgacataaaccatattatttggtttttggtggagaccattgatcggtcaaatccataggtgttaaccatcgatattatgaaactcacaattttgttgtttttcagcagaaaatgttggccatatgccaattgatcgtgtgtgagagacccctattacttatcccacacatgtttccttgacataaaccacgttatttggtttttggtggaaaccattaatcgttcaaaaaaacatagattccttcgatactaacgaaaactcacgctttgccagttttcgaccaaaatgttgtccatatgaccattgatcatgagtgagtctcctattagttaccccacacatgtttccttgacataaaccatattatttggtttttggtggagaccgttaatcggtcaaaaatccataggttttatccatcgatattatgaaactcacaattttgttgttttcagcagaaaatgttggccatatgccaattgatcgtgtgtgagagacccctattacttatcccacacatgtttccttgacataaaccacattatttggtttttggtggaaaccattaatctttcaaaaaaacata

SEQ ID NO: 152520 - DNA, 371 bp, Zea Mays
gccgaagttggtttgttgaaggagagaggtctgactgccgaagctgtagttgcagactttgtttttaagaacattcagccactaaaggacagagcatacctggcttatttgtatagtggtgtcactaactcaactcgggttaccaacaggaggattcctgctatggatttggtaagccggctggagatgatccttagaggcaaagtgtcgaatattggtgctcctgttgcatattctgcctggaatctgccaccttccaagactttttttcagttttgtgtccaatcctcctactagcgacagtggcctgggtcttagagtgcgaccctctcccgaagaagtcgaggctctggttgcttcacttggtgatc

SEQ ID NO: 152521 - DNA, 413 bp, Zea Mays
cagcaacaatcgaaggcaggtccgccatggccttcgtcaaagaaaccgaagtgggtgcccgcgccgctgctcgctgtcaaacacatgctcgcaatgcccatctctgacctccattgcttgcgcctccagcttcgtcaagtcgcgcatggtcgaagtgctccacgggcccagtaacaaggcgtaatgtctggaggtcgccgcaagcctgctgttttttcatggtgggatctagattttggaggtagttgttgactgatttgctcaatccttagctaaaattatgatttttttatgatgagtgatctcgaagttagaggcctcgattgttttaatactacaaatatgtgccacagcttccgctaattatatttcttcgcctaagtcagagagataaagaaggaccaatagaaagc

SEQ ID NO: 152522 - DNA, 784 bp, Zea Mays
gcacgggcggaggctggcgattctaagggtaggctcaattcggccggagagggttgggagggggctgcccacggggagggggcggagttccacggtggggatcaccgccggtgggctctgggtgggggacgggggctgggaagtggtgctttgggttcgtggcctcgtgagggagctgctcggctcacttaatttcttgctggaccaacggagagggagagggaggaggaggaaaggactcaccggagaggaggacgacgacggcgcttcgcgaattgagctcggggaaggggaggagagggatggccgaggctggtgcgaggaagaaggagctcggggcgagccttttataggcgcgcgagggaagggggggcggtggagcttcttggctccggcgagcaacacagtgctgcccataaatgccgcacagcgccaccgaggggacaccacggcggggcggtaccagcgaggacactggtcaaggggaggggaggacggagcggtgccaaacttccctgtgcggcgaggagacggaggggaggacggaggcgatggccggaggtgactgcggtgaagggacggcggaaggacgacgaagcagctgacaagcggggccactctgccagagggagcgagcgcgcgagagagagggcggctgacgggtggggacgctttgccagtgagagggaggcggggtgcggagcgggctggcgcgcgcgcgcggaagcaggccggagatgggccgagagaggaggagtgcgggcgcgagggggaggaggtcgcg

SEQ ID NO: 152523 - DNA, 615 bp, Zea Mays
gcgacagacagcagaacacacatgtagaatcaattatttatttgatatcacatctgtttcacctgtagtttggtcatttatggtctacgcaaaaaatataatacttgttcaggaagagcagacacgtaaagcaacttcgatgactactagtgcaaaagatcaggctaatgacatatcaatacctgaagatacagaggtaatagaactatgcataacaattcttttgtattgtaatagaacttttattctgaacgcattttaataggtggtagatgatgctgaaccaactctgatcgttcctcaaattgggatgtcttttgactctgaaaagaatgcttatgacatgtataacacatatgctggtcaggttgggttcagtataagaaagcatgatacaaagcgtcgagctgataaaactgtgtattccaaatagatagtttgctgcaaacaaggatatagaggatctgattcatcacatgccacaacaagaataggttgtaatgctggtattcaatttagtgtagcagagaagggatgtggacagttcaaaaggttaaacttcaacacaaccatactctagctagtccaaataagaagcacatgctaaggtcccaa

SEQ ID NO: 152524 - DNA, 545 bp, Zea Mays
gtgaggcccctcgccgccaggaatatcccccccagggccgtggaaacggaactcgcggacggggccggggacgtgcgcaaccgccgcgccgattttactgcctatttcacgacgaagaccgcacccaccaaaccagagactgccagagacgaaggccaccagagacaggatggcacgggcgcaaccagctgacaaccctagagttgtcacacacacatatcagcagccccctccaccatacatccacgcccccgctccgcatccaccgcaccacgcataccaacaccaccaggaagtacaaatcgtacctcccccaccccctcttccacatcagcaacaacaaaacatccaccacccccatgccccgaaacaagaggacttcgccgatcagccgtatcgcagagtcattcatatgatcactggggggtccagcaccgacttcgacacgaagcgacagaagtgggaccactaccgcagcatcaaccacgtcgccatcaccggtccggtcgtgcagacaaagtggtcccatgtaccgctgaccttcg

SEQ ID NO: 152525 - DNA, 895 bp, Zea Mays
agctaggtttttgccggaactattagctagcttgggcgctctcgtggcataaacctctactaatagattatctttcaaagtaagtgtggaaatattgagaaaattaaagaagagtcgccatatagatatattcaaatttaatgcgcatcactcttagactgcactgttttaattacatagtagacgacagtactgtttgtagagtgaaatctgaatatgagcacatgaatgggtaagctgatgaacccgaaaactggttcaagtcgacattgtagacgcatttctacctccttaaattactaccgcataatgtaaaacagacggatttgtacgtaattaatttagttactagctcattcagtagtcctggttgctggggccgggccgtgcatgcatgcaacggcctttcatgaaaatggaagctagctattgttctgtatcgatctatttggttgcagcaggcagccagcatcatgcatggcaggtccacagccacaaagcctggatgatccagtgatcattatgatgacaacatgcatctttcttcgttcctcccacacaaagacagacagacgtttctgtatacgtaataaatgatctatttggttgccgcgagtgcttagtggtttgccgagtgtatttggtagtatgtcgagtgcctcactggataaagaagctatgtcctcagagtggatgcctatatgtagagagagagagagaaagaacctatattccacggcaaataaaaccactacacactgtgcatgcatggtgcgtgcagaatataggatggtgcatgactttcactggattaggtgagacatgtccgtctatttttttttcttctcttgggagtggtaggggcagtaatatcttcaagtaaactcaacaccac

SEQ ID NO: 152526 - DNA, 321 bp, Zea Mays
cccatccaccacagccgccgccaccatccctacctgcgctgccaccccctgcacctctgccacccccacgcaaccacctgcgccgctgcctccaatatctcggcaaccaatttcctatccgtacggcatgccaatcgacccaacctcatcgtccatcgcaccaccacaggccttcactcccatccagcagatctgatttccgccgtcaccttccccaatcccatcatgggcgcagggcacgacgacggtgcctccaccggtgtactccgtggcgtccccacgaccgacgatcacgtcatccttgcccagcagcgccgcctg

SEQ ID NO: 152527 - DNA, 454 bp, Zea Mays
atttttagaaaagcccaattcaccccccctcttgggcatcgtgatcctttcagcgttttccagatttcgagagttcgagaactcaagtgacacgacacgtaaaaacaaacatgtagtcgtaagagcagtcgcaatggtgcacaatcagctctctataagaaatccatgttagcatctatcctatatggcaacaaattaaatgaataaagagagtggtgctatctatgaacttggagtaagcctatacatagaaaccgatgtggtacagagagtgtattaattattaaaaacagttatagatatctacgactatagacacaaatccatgttagcatctatcctatatggcaacaaattaaatgaataaagagaatggtgctatctatgaacctggagtaagcctatacacagaaaccgatgtggtacaaagagtgtattaagtattaaaaacaac

SEQ ID NO: 152528 - DNA, 660 bp, Zea Mays
gaaggtgaatgactggatctagagtataacggtacaagaagagatacaattatacaataaccaaccaagcaagatgtcctaaataactaaataagcattacgacaagcaaaaacaccatattgaacacaaaacatactgtaatacatggggatctagagtataaaaatacgggaaacacgcaataaagcttacaatcagcgtaatgagagaataggggaggggtatgcctaactatggaggtagtcggatcctccgagagtaggcattcaagagaagagagggaacgaaggatctacacaagaacagaagtgaatcgaagtcagcatattccaaaaggcatgaaattgataaaattagaggagagggatgtgccaaatcaccgacacagagtctagtagcaatagctacttaagtcgatgcaccagtaaggagcacaagtgagggggacatgatggataggagaggagataacaatgagaagagggtgtggagtggtgaggagaggcgcgagccacatcgtcgagtgcgggaggggaaccctagtgagatgcatggttatatgccctggtcgcgcgggagctgagttaggccaggcttgggagcgctctcattttcgaccattgttcccaagcctggctagagggaggggttgcacatgt

SEQ ID NO: 152529 - DNA, 420 bp, Zea Mays
ttagtttatttctacctaaatctcctccaatccaggaggacatttgagtttcaaaactagctctcattgattgcagataattaaatccaagaagtagatagtcgttctatttgacatgtggaaacaggtaaaaactagtgaactttacagtctcgagaatatattaatacaatccaccgatggtgtacaacatattcaatgaaacattttatatgtacaaacctaaacggctagcgtaattgtacaacgacacacattaaagaagtttgccaaaataacgaacaatgaaactaaacatttaacggccctgtagaattgtgatgctcatgttattcagcgatcttcgcgcgtgtactgacttgactgatcagtttcataattcctagtagtaaaatatacgggttctttggggtaggaagt

SEQ ID NO: 152530 - DNA, 437 bp, Zea Mays
ttccaaacctatagatcatggaatgggctttgcagatgagatggtcatggttttgcaaaaccgacacggcgacaccagaaagtcttgggcggggttgaagtgttgaacatcccattagagccgcaggctagagctcttttctctatctcagtggttacccaagttagcaatggcatgaatacactttttggggctgacatatggctgtatggttgcttcataaaagatcttgcaccgaagattgttgctgctgttcccaagaggttcctgtttaacaggacggtcgccctggcccttgagaataggtgctgggtttccaacatccagggagccttatcgttggaaggtttacagcagtatttacagcgttgggatgctctggcaaatataaccttaacccaagagacagatgaacactcctggaaacttgaagcatc

SEQ ID NO: 152531 - DNA, 644 bp, Zea Mays
cacagattttgggaagagaacttgaacattattatgccgcctcctagtctcatctgtagtgtgaataacaactcaagaggtgcaacatcaaatgaacgattgaagaaccaaaagaacacagagattaccatctgaagaggtgctcatgtcggttaagttcagaacagactagtgaagtgagcactgaactctgaagtgagcactgaacagagttcagaacagactggtgcaacactggagcagaggcgagcgccggagctgagcagaggcgagcgtgacggagcagatgttcgctagagctgaggaccaccggagcagagggcagggcagcaatggagcagagtgtgagagggggcagaggcggaggcttaggtatttagggtttctaactttctactgtgcggcacagtggcagtagagcttctttctactgtggagatagtgggccgccagcccatataacagaggagtagaggacgcattattttggaggcccaaacctggcacaagctagtcggacatggcacctatcggccgactaatcgcgattagtggcgactaggacgactagtcgccctgatcgagtcggccctgctgatcgtgctctgccaggcgataaggccgactaattgcgattagtcggc

SEQ ID NO: 152532 - DNA, 631 bp, Zea Mays
tgatatttgagtttgactcctcgaaaagcgagacacgccttctttttgggatggagtatatgcttactgagccagatacttaaatgtacgaaaggagtatgaatagggacaataagatctgttgcatcatactatcctgtttatttgtcggtgatatatgctggctgttgttactggttccagaactgaattttgcttcatattccaaagacacatgcaaaacacggtttcagtgtgtggacatacatcacattttctgtttatttgttcatatgttgtactagtcaatagaaaaaagatagatagcttcattagatgatttgatgatgaaataagtttcaataagtctgtgagcagaagaaaagttcggtaggattgctattttattgtggattcatatcaaactgtcttctaagtcacaagttggatagggttacctagttattctcgcgatcatatttgttttgcataatccccttccatcatctgtgctcttggtgaagttccaactgaattctaacatttaataagttatttagtcaaagaagtccaatggttggaacttttcacaaaatctagaaaaccatgactccatagttctgtttcacgcctttatccaatacaaacttgc

SEQ ID NO: 152533 - DNA, 376 bp, Zea Mays
cttcgtatgtcgtgtccctatacctcccagcagaatggtagagcagaacgtgtcctccgcactgttaacaacatcgtccgttccttactctttcaagctcaccttcctgctccctattgggttgaggctcttcacaccgccacataccttctcaatctccaccccaccagcaccctcaattactccactccccatcttgcactctttggtcgccccccatcttatgaccatctccgtgtctttggctataagtgctatcccaacatctctgccactgccgcccataaacttgctccccgctccaccatgtgtgtcttccttggttactcgtctgaacacaaaggctatcgctgtcttgatatctccaccaatcgta

SEQ ID NO: 152534 - DNA, 368 bp, Zea Mays
gcccgacgagcccttacgtggccgagtacggcgccggcggcggctatgctggctttccggtgcaagaaggcaggggcaaagaggatgccatcaatatcacttgtatgttcagcgatgagaacccaaacgcatgcagcatagcgtaagatccatgtgtttgcaatctgctcaaggaattcctttctgcatgattgatgccaaagaaggttgcatagctgctggctagtgccgagggggacagatcatcatgtaggctttagcctacgtacagcggctagtgtgtagctgctgtaataaggcttgggttgatgtaattaaaagggtgagaaaggtaacagaatgggaacaataagatgcttaacttgtgc

SEQ ID NO: 152535 - DNA, 283 bp, Zea Mays
gagttcctccacaaggaccgcgtgaaacctcgtatctggaattctctgagacgcgtcctccactctttgttaaagcagaagaccctcttgaagctgatgagtggataagggtaatggaagcagaagtttggattagtccgttgcacagaaacacagaagccgttatttgctgccgaacaattgagaggccctgcctgtagtagttcaaccagctggacatcaggtcacttgggatgaattcaagctagcattccgtgagcactatgttccagaaggagtgctt

SEQ ID NO: 152536 - DNA, 434 bp, Zea Mays
gtatctggtaaatggaaagctaagtgcaatgggtggagcaaactattgacagccaaaagtaaaaatggtaccagccatttacaaagccacataaatacatgttagtcatgacaagctagataaggcctaaaatagtcctccttgaaattttcacaaaatccagatgatagtttttgtctagagaagtatgcatttgatcaagatgttgctaggaaagaacttgcattaatgatatgtgtgcatgattacccgctgtctatggttgaccatgtaggctttagaaagttttgtgcttcccagcaactgttgtttaaattagtgccaagaaacaccattagaaaggatattctggatatgtatgaagttcaaaagctctctatggtgacaatgttccaacaacaacaatctcgtattgcggtcaccatagatatgtg

SEQ ID NO: 152537 - DNA, 498 bp, Zea Mays
tgggacttgatcacggttctggcaatgtagctgatgtcgagttcgttgagctcgagggaccacttcgtgatgcgcccggacgcatcccgattccggacgatctcgccaagggctgtcgtggacaccactgacatagggtgtcggtcgacgtagtggaccaaacttccgcttggcgatgaggaccgcatagagcagcttctggatctgagggtatcgtgtcttggactttgtaaacacctcgctgacgaagtacacaagcctttgtaccttgagtacatgtccctcgctttctctttccactactagtgcagcgttgacaccctgggtggtggttgcaacgtaaaggaggagggtttcacctggatcgggcgcaaccaaaaccggtggcgaggtgaggaacacttttatccgatcaagtgcctcctgggcttcggtcgtccaagagaaatggtcacttttcctcaagagcttgtagaggggcattcctatttccccgag

SEQ ID NO: 152538 - DNA, 768 bp, Zea Mays
ttgacggtaactgtgtctgcccctatataaccctgccgctcccgctcccccatccatctcgccgaaccgaaccatggacgccaggaaggagagagaaccgagagcagggtgtgctgccagcgtcgccctcgtccgcgcctggtggtcgggggtctgtgacgttcctggaagcttcgtgtggttgcgggtagaacgcccgtggccggattgggaggaagaattgccgctgcgatgacctgcgtcgccgccggaccaagataccgtgaccagtcctcgttgtcggcgcttaactccaatttggtgctctaggagtgtcaccggtgtatgtagagggtgtacgaatcatcaattcgtgggcggaggcacctaatcgtcgatgatttctcgccaccgccgccatcccgatttgcaccgcggaccaaccccgacacgccatttgcactggtgagttcccggctaccgcgttcgctctgccccactcattgtgttgagccaagcagcgatagagttaggcctttgcggtgtcgggtgcgtcatccaccggcgagtgccgccgtgtgggtgaacaggggtgctgtcgcgccgctgttctgctcggaagcgtggggaagagaagggcgtggccgtttgatccataatcaacgaccacgattggaaaggctgggaaccgttagatctgtgtctgcggccgagatcgaacctggagaacgatttgggtggagtaaccggctccgttcagatccgatcggatggatcggatgactccgg

SEQ ID NO: 152539 - DNA, 2318 bp, Zea Mays
cctctacttagcttaggggtgttaatcttcaagttaggaccctgtatgttctggatgccgtgtcagtcatcctcgacgagttcccagtttggtgcacgacgatctcgccggcgtcgacactatctctgtccgagagccccgacgatagcccggtgcacttgcactcgggagcgctatgtcaagctagggtaagagacttttcccctggtaatccatgctggaaaggacgtggtgcgcgggtgtgttgagtcacataggcgaaagtggcaaaactgtggcgtatttcaaaattcgttggcaatgtgttatggacaatctaaaactggcatttggagagttgacatccgtaaggatggcaaagagttaattatctagcttggggaacgtggtcatgttccatggcactaggtggcggcataggcgtgttatgctttggtggcggcacgggtaaggtgagcgcggcgtgacaacctctgcggtgacttgcgcgaggatttgcacaatagtttagtttgcacttgctgatgtcgatgacgagagcgcaacatgatggattcacaccgggggacgacggtctagagtctaacaaccagatctgttcaactcagatcggaatcgtttgtcggagatgtgctttcgagtgacgaccgtgaagaggcggtcctagaggagcttgtggctgactcaggtgtggtggcagttgcgtggaggcggcgggaggccacgcatgcacatcgacgactagaatgtcgtgcgagcgcagtgcctgcacgaaggccatgtgtgtgcaacgatcgtgcgaccatgatgtgaaggccgtgcatgatttgtggtgggtgtgcgtgagtggtggaggcggtaggcagtgcgtgtgctgcggtggcgtggcaatggtgcggcgaggccaggaacaacaccaacacagaggtgattgagagcacgtggtggcggtgcgaagttggcatggcgaagacacgaaacccacacatgggcaatggtggcaatgaggccgtgggtagtgaaagtgagcaggtggcagtggcacaacagcataggggccgcacatgctatggagggcgcaatggctgtgtgatctatagtggagtagcaacatgtggttgcatgggctgtggcgacttggaggctcaagagttgtcatcctcgtcgttgctattatgactgatggtttgccgacgatggtccaactcgactagatgtgaatcattggtttctctgcctcccctctgctatgatcgtgctatcaggtgctctattttggccgacaaagctaggatggttgtggtcagggcgaaatcctagatggcgacaattgtagatgtcgcttcctcttaggagacgtccactctgtcctatatgatagtttcattgtgtgaaaacactgtctatttgtgggccgacaatagcaccaccaattggtgttgcaccttcttgaaggtgttgtcttttgtgtctagcgccccatgattggtggtggcaaccacttgtggcctattagaagttggaactgctatgtccaggttgatgagcttgacaatgatggctcaaactcaaagttgtgtttggtttgtgtggtagtggttggcaaggagaaccatgtagactttttatctagtcggttattggacttggtggcatattggtgcttgacgagctctatcgcttgtcatagtgggttttggtggtaatgaccatacaattagagaattaatgagatttatcaagttgacaagcatgttaaataaaaagaggacaatacatgtgatagttttttttttgaaaaaggacacggcaagagctttgccatggccaaaaatttattagaaagggacacttacaaacactggataggaaagacaacactaggggagagggggggggcaaagaaaagaaaagaaacactagcaaaacagcccactagaaacccagcacgccacacaaacaaaatgctaaaacgctaaaactaactagaagctctttgcgggttgaaatcttctttgacgaaattggccacttctcgctcgctcttctcaagaccatgaaagattcttcgatttctttctttccaaatctcccaccaaaagtaaatacagagaccatcgaattccttgcgagcagttttctctacttttagtctgcacttcctccaccatccatagaccgacgagcactggtccaactttggcagataggagaggttgtaccacgagctgagccaactccaacacgattttgtgaatatgcaatcttttgctagatggcccaccgtctccggttctcgcttacaaagcttgcagata

SEQ ID NO: 152540 - DNA, 524 bp, Zea Mays
ggggtcaacagggggtcagggcggcagagaaggaggtgttgtgctgtggccataaaagcggtcagggcagcgctcatggcacacttttgctccagggccagggacgcgacacgctagtgctcgtgggaggcggtgacgaccacctagatggtggcgatggccgcgacgagcgaggaggatgcagatggaggagtcgtcgacgacggggcgatgttgacccacgtggtgtcggagatggtggggaagcttggcggggtatgacgacgggtactgcttctgctgcgccacgagggtagatgggtgctgctgtggcgcgtacgtagtaggggaggtgccgggaaggggccaaggccaatgatgaacggggccccaacctcggtgagcgcagtggtggccgggctgcctgcagcgggtagggggtcagggaggaggccggtagtggcagcagcgctgctggtgaagagaccgatggtgagaagagggacgacgacggcggtgatgtgcacgccggctgcccaatcagc

SEQ ID NO: 152541 - DNA, 276 bp, Zea Mays
caagaggtgtttgcaacaagatcaatagatgagaaagagagggtagaggaaaaccaaatccgaaagtcacaagcgcaaacctcacaccaaaggggatccttcaatagattgatttgggagcgagattgggtgtgaaagagaggagtgctttgtctcaagttatgtaatacctaactggtgaataataagaagagagctaatcttcttatatgtaatgtcatctatttattagaacatatgcataaccacatttaaagtgaataattaactaatgac

SEQ ID NO: 152542 - DNA, 599 bp, Zea Mays
caccaaggcagttcaatgcaacaatggttgcgaggtcaacaacttcagcgcctgcacgttcttccttggccgtggcatccatctctagatatcctgtcctaacatctcgactcgaaacatgacaaaacatatgatttgctctaaaaatgatgccattcgctccttgctcttttaggtttccattctaccttacaagattgaggccttgcaccatgccacctacctccacaacatcctaccactaagacactcaatgactccacgctccaccaaggcctcgtcagctctgcgcctgcattcgatcatcttcgtgtttttggttgcgcttgctatcccaacctttctgccagtaccgcccacaagttggctctgtgttccgcattgcacatcttccttggctgttttgataatcacaaagggtatcagtgaattgaccatatttccaatagggtcatcatttcatggtaaaaaatagggtcatcatttcttgtcatgtcatctttgatttgatgaacaatacttttgctttgcgacttagtctgactctcaggctccgaaagacttatcctttctatatgattctactaatgttgtgccgc

SEQ ID NO: 152543 - DNA, 541 bp, Zea Mays
gttttacccgacaattcgggtcggttttttcgggttattaaaaattcgggttttaagaaggcggaaccgaaatactgttcgggtatctgataaccgaaaattcggttacccgaccttaggagtcggttttcgggttctacccgaataataaccagcagcccatactcataaactgtgaacacaaatataacaagccaataagcaacaagggcataagggataaggcataagggccaataagcaccaggcagccacgccacagagacagaggcacagtcgcactcgcacagacacacagttcacgacttcacgccacactactcactacactagacatttagagttcaagacataggggccattcggccagcatggagcagcccagcaacaagccaacaacaactcggccagttaagcagcaggagtgcaggaccagcaccacgcgtcgccagtcgccaccgcccaccaggcaccaggcaccagcccagctgtacagctcaagtccaagactaaaaagacaacagattaggatgcaactcag

SEQ ID NO: 152544 - DNA, 487 bp, Zea Mays
atgaagtcaatcttcaaccagtccaaaggaaagtggccaaacgaattaataaaggtgctgtgaaaccacaacactgtcgtttcaaggtcaacgggttttactccattcaagcttgtgtttggtgacgaagcaataacaccgaaagaagcaagaaggggctcagtaagtaccttggcttcgatagaagatgatgagggttacaaaataacaaaaggcaccatagaagggaccaggctccaagcagtagacaacatcagtaagtaccagacagaaacaatcaaatggcatgaccggaaggtaaaactgaagaacattaggccatggaacctagtgctttggagggtagccaatccagatacagtgggcaagcttaagcttaagtgggaaggtcccttcttggtagtatcttcatcaagtggattgtataggttgaaagacttggatggtaatgacattccaagttcttggaatgcagatgagcttcgga

SEQ ID NO: 152545 - DNA, 1104 bp, Zea Mays
tgtgatttgtgtttggagttagtgggttggatggtgaaggctccggcttcagcttgtgaaacttatgatgcatcgacctggaatatccgaaagaattggtctctgaagtaatatgcacaaatgtcatagaactagagagggaattgtgcatgatcaagggtgaccactagagaaggatgcattgtccagtttccccctcccatctgacctaccattttttggaagttttacttgtctgcccaaaccaatttccttattacttcctggtgcaatggaagatttgaaagtgattcaggcacttttgggaacacttgtcattgatatatatattcttgatgattgtaatgtccaaaccaacataatttctggtctgcccaatgcatagcgagctacaatttccaagcttgtctcacaagagaaaatgggcctactttgtactcccttctatcagtgcaaactattggaatggcgaatgaggtgccaccatgccagcatgtttttcctgccatttagggcgtgtttggatcttttgctagtgtagcttaggcaggttgttggcaagcttttcccaacctagctgagcaaggcatggcaagtaacgttctcatgtttggttcctaacccttttcacatctctttccctttgcttcaacctcccaccaaattaaatcccaaattaaatggagcaccaaaacggaccatgggtatgtgagcatgggaatgatgacaagcatggccagcagcatgcctccactatctgcgtggcctcaactttcccatgtgcttcttcactgattctcatgcatccctccaaagactgattctgacacacataatggtagcagggcagagaccttctccagtctctacgatttgtttacctgatcattgttttgcatttcaatctgggctacatggcttcgctttttgctcctttttgtgtaacagttcatttttgtgtgtttcaatctgggttacatggcttcactttttttttgcttctcttgtgtaacagttcaattttgttgcttcggtatttcgagagatggctgagcttcaccgctgcgagatcatgctggagcatatgaagtgtggcactcgtgc

SEQ ID NO: 152546 - DNA, 783 bp, Zea Mays
agaacgaccgcacagttattgaaccaaaataaccagataacaaaacatgtttcatttcatcggattcgtctgtcaactggcctccaaccacgagtcttgttgtagatctcacacgccatctttttgattttgagacttccgagctccaccaattttcttgccttctttttttgacgaatagcccaagtattaagccaaaaacaacaagagaaaatcacgttagtcggatcatcaattcggtcagtcccaaagcaacaattattgcgacatctccagatcgcccaaatgacagcaccacagccaaacagaaccagatttttttcagtcttattaaaactgttaatccaagtaccaaacaaatcatccacattatcaggaatagaatttaggccaagagcagagtagacaattctccacgtaaatctagctaccggacactgaaaaaacaaatggtctatggattctgaaaatccacaaaagatacattccagattacccttccaatttttcttgaacaaattatccttagttaaaatcttcttgtgcataacaagccacataaaaactttgatcttatgtggaagtctagttttccacaagaaactaggagccaaaggaatctgagagcacttgatttctttgtaaaaagaattaaagaattaacagaataacctttgctacccaaaagccaaacagatttatcttcttcctcagaaataatagtattattacattgtgtaataagattgttatactcaacttccaaggcaccataaatcctcc

SEQ ID NO: 152547 - DNA, 405 bp, Zea Mays
ttgttccaaattacatcataatatgatagatgataaaggaagagaaaaaaggagtgaagtaatacttttgcacgactcaaggcaacttcatgtgaaattagaagcatcgtgaaagcatatggttattttgtaataaacaccgctaagcaagtaggatgtagttacatgaacaattcagttgtagcctatatattgaaatccttcgaactatataaagctgcctcaaatgttgtggacaaggaactaaatggattgtcgagcgcattgtcctatataatcaatggatctagttgttgaaccaagaagcaccagacaccaaaattgcaagctgactgtagcaaaataattaacgaaaaaatgggaatcaaatactaaagaacattgagatcttcaaaaggaaaaaat

SEQ ID NO: 152548 - DNA, 364 bp, Zea Mays
gacagctcgtaaaatgcgtccactcttgaaaccacaagtttcttcccccaatgattgtccttgtagtagaggtggtggcacaatagtacgagctggttctgaagcatctgttagaaaatccttgctagaacaatgttgcggaataaccatgacatgctgctctatgcggacaacaggtatacatgaaggatcagcataaatatgcatatcttgaacagacggcgtgttaatctgaagtatgctttccgttagtttcaattttctttaaaaagtaccataagtgtaggactcgaatagtattgctgacttgaagatatacccccactaaccttcatttgtgctatacttttcctgtgcagttcag

SEQ ID NO: 152549 - DNA, 352 bp, Zea Mays
cgtgcagcccaaaacagcaatcaataaatttcagctcatatataattcaagaatcgccgcgttctagagacttgaattattctaacactttaccatttgttagagttaacataaccaagggagaactaacaagtagacttactattttttatacaagtcaattcacgcgcgagaactacatacacatttaattaacgcattcaccacatgaacacagtttcacgccgcacactagtttctaacatgcttttcacataactcgtaattcaactactcactaacaataaatcacgcacgacaactaccacatcaaccgatttatttatttggaacaccgcctgcctagcgtacc

SEQ ID NO: 152550 - DNA, 562 bp, Zea Mays
aatcgtctccctactcgtgtccttgataacttgtctcccatggaacgattatttcaaagtccgccaaattattctatgctaaaaatttttgggtgtgcttgttggccccatcttcgaccttaccaccgtcataaacttgaatttcgttctaaaccttgtgtctttataggctatagctcccttcacaaaggatacaagtgccttgatatggaaaccggacgtgtctatatttctcgggatgtaatttttgatgaggctgtttttccattctctaatccttcatccaactctgctgagcaaccgggtgatagcagttttaatttgaacactaatcacttgcacaatttgcttcctgttaactctatgcctgtagctccgtccaatgcagcagcttcggccaccggtacgacagcaccatctatggagtgcacgccctgcgtgccatcactgacggcgacccagccgctcccgtgtgctgtgcccagcggtcagcaggcaccgtcaggtccacacggagcgccatcactgacggcgaaccagccgctcccgtgtgttgtgccca

SEQ ID NO: 152551 - DNA, 492 bp, Zea Mays
gcatcataactgacctgggatccaacttcaccagttcagagttcttcgatttctgcgagcaaaagagcattcagatcaaatatgcctcggtggcgcacccaagagccaacgggcaagtagaaagagccaataggatgatattagaagcactcagaaagaaagtcttcgacaagaatgagaagttcgcaggaaagtggattagagagctgccgtatgtggtttggagcctgagaactcaacctagccgagctctgcatggaaatactcccttctttatggtctacggttcagaggcagtgctacctgctgatctcaagtttggggcaccaaggttgatctttgagagcatagcagaagctgaagctactaggctagaagatgttgatgtactcgaagaagaacgactgaacacggtaatccagtcagcccgatatcaacaaactctgaggcgctaccatgacaaggccatacgacatcgatcctttgcagcgg

SEQ ID NO: 152552 - DNA, 581 bp, Zea Mays
atcattaatcaattaataacttagttaatgaaatggagattcatatatttttcttttgtttctctgtataccatgatttccacggagttgcgtttattcgtttcatatcttctaagggtactacctttcttttgcataggtacgttaaatttttattgtgtttcatttcatctaaactcattataattatgtgttcttttacatggactattaatattgccactgtaatattcattgcattacaccactttactattgtttagggacatatgtattccttaaaaattgcttccatgtaatatttgcagatatgtggttttgctaatagaccaaaaaaggtaagtactcatacattcattatttctcttggcgtcgaacatttcaatggagatacaaggtttggccaaataaatactgacaaaatatgttctacacatattaaaatatgcagcccactacctatgtgtgtctgaaaacaaatatttctaaagaatgtgtatggatttgtctataacaaatggagagagagattagttgcaacatcgagtacaaggacaacaactaaagagtctctgttatag

SEQ ID NO: 152553 - DNA, 290 bp, Zea Mays
aatttgtatagctccagtgttgtcacaacgaagaagtgtaggcgagtcacaagaaacgcctagatcagccaagagccaacgaatccagataatctcaacagtagtagtagccagggcttgaagttctgcttcagtactagatctggatatagcagcttgcttcttggatttccaagcaacaggggatgattcaagaagaattccaataaccagtaatggagcgacgatctgtaggatcactggcccaggtagcatcagagtaagcatgaagctgaagtggggaatttgag

SEQ ID NO: 152554 - DNA, 570 bp, Zea Mays
aaagaagtggtaacttccaggatgtctcgtgttgtagtctgtagactttgtgtagttgggtggccagaaagatcaattttttcaggttatctttcatccctttgttacagtttatttactctttttggtgcctgtaaaaagtgtatagcagcagccccttttgtgtgtggctaccccaaattgtttataaaatcattcggaataaatatcaaataactcctgatatctgtatcatgggccatctcgcaaagttcgtagcctgcttttacctcgagcatctttttatataatgactaaatttatctgtgtcgtggacatattgtcctttttcccactcattcgcatgcggttttagtggccaatcttagaagtgaacaagtgacttctagattcaggctgtgcaacgatctgcatcggcgtgcagcaagggcgcattaaacaaaagtcagtcatgtgtacttctagatgcttagaaataaaccggctggttgacattctcgacgagaagatccaatgcaagtccatgtacctttcacatcgacaccgtgactccacaacatacgttttaat

SEQ ID NO: 152555 - DNA, 892 bp, Zea Mays
tatctcccaaaaatgtcattgaacccgcagttttctattagagccagactaggggcagattggagttacaaccatttaggtttcagcgtaacacatttatttgacattgcctttctttcttattttccctgcagggaaaggaattcttggttactgtcactataaggaaaattgacaacaagtggtggtataactcgtgcagaaaatgtgcctgcacagctgtcactcacggagactcttacaaatgcacaaactgtgattgcgctaacattgctatgcccgtccaaaggttagatgacatgccctcgagttgagcagcactcttcccttcgtcatcttactgtaccaattttctgtgcatcaaacatgacatgaatctgtacaacaagttcatatactagattctctatcacccatcagccccacaaagacacacaaacgttctaccttctttacgtcaatgttttcctgtttacatattggtttctttacgacttacaagcctactatgttaaccacaataagtcgttgacacctcttatttcaggtataaaatacttgtcacggcaggagacgagacagctgacacagactttattctctttgggcgcatggctcaaagaattgtcaaaaggccttgcgatatgctcatagcgaacactccatcaggcttcattccagatgcaatcacaaagctgcttgaaaggacgttcatttggaacgttagcttctctgggcacacaattaactctggaaacgtctgcttccaggtcaatgctaccataaaggaactgggcaatcagaatgttgacatttcaacatcaaccgcagggacacaccagtcttcgcttatgttctcacaaggtgcaagcagcagcatggaagacactcc

SEQ ID NO: 152556 - DNA, 549 bp, Zea Mays
accgttctctatatgtggactacactcttccttatactgagtcaggggtacgcatgctggttccagttcgggaccagagacagaagactgcatggacattcctagaacctttaacagctgatctatggtttggaactggatccttcgttgtcttcacaggttttatagtttggtttatcgagcacagaacgaatcaggaattcagaggaccgccagccagtcaaattggatcagtcttctacttctccttctcaacacttgtatttgctcatagggagaggattgtgaacaatttatcaagaattgcagtagttgtttggctttttgtggttctaatattgcagcagagttataccgcaagcttaagctcaattctcacggtagaacagctccaaccaacagtcaccaatttagatgaagttatcagacgaggggattatgttggctacctcaatgattctttcatgcctaaccttttgaaaaggttgaaaattaacgaaacaaaaatgagggccttcagctctcctgaggagtacaatgacgccctat

SEQ ID NO: 152557 - DNA, 695 bp, Zea Mays
gctcaacagcttgaaaaattacctcaacggatacaaaaccgcagtatacaaaaagaatacaatcaaacattatttgaatgaaggtggaggcaagtataatatataaggagacgaatcaatcttgaagaagcaggagcactgcgtggagaaagtgacagatcgaacttggaggtttcaaacgaagaacatatagctgcaaaatgaaatcaaagcggtttcgccgtaattagcgaccaagaggcagcaaagtgacaggaacaatgagcagtattaatataattagagtaataagcaagttaaacaggagtacgtacgggttatcccgcacggtgagggtgttggatgaagagaattcgtggcctctttggatggtcccttgcagcattacgccaagaatcccttaaattttcgggtaccgtagcattcagcgagacttcctggaggctcgtgaacggcgccggctcgttgtcgtcctgggggttggctttacagatgacgttggcggaaggacaataatcgtccgtttcactgatgagatgaagtgaaacgagtcgttgcagagctgtaggcttgacttgtatgtcgggcagcgtctgcctggccacaaggcacatccgccgcagatttgcaatgtgcccagtctctatgacgaccttctcttggttatttcctcctggtgttgggttttggtcgta

SEQ ID NO: 152558 - DNA, 369 bp, Zea Mays
tgtaccagtaatactggagaagcaaaagagctcacacttggaacaatcaagcctgctttgagcaactctgccacttgtctctctatctcatctttgtgtagtggagaatatctatatggtctggcattcactggaactgaccctggcagcaaaggtatatagtggtcaaacacccttttaggaggtagggttgtatgctgagagaataaatcctgaaattctgtgagtagtgctgctaactgctccttcaccttttctttcctttgcacaacctgttccagcagcacaaaagcccaaacatcattcccttttaaccatttctgtacctgaacagcatgcacttgaggaatttttgtgaccttagcacaa

SEQ ID NO: 152559 - DNA, 621 bp, Zea Mays
gggaggtttgttcactgattgacacgctgatgcttgataacatcctctatttatacagagaggtgtactttgtctccgaagcatccagagagatatatctaataataaccatatgtataagatagtattggaaatctttcaatttcttaacttactaatctgctaaggggcaaacaacatatgccatgtgctatagcaatcttgggactttgatgcaaatgctctagccttttctgttggcgacattaggtggtggagtggcagcgatgaagcttgacagaacaacaagttcctttcctttctgaccctgcctccctagagcctatacaaacaagtcagattgagaaattgagaggtagattaggataggattcttgcctggcttattcttttatcctggcttccttttatggaggagcttgcaattgagtgatactactttgcagcaacagcttctgtggcccaccatcacaatatatgaagttgttcggtaacccactgtattagttgaaaaagtttagtttagtttactagatggaattgttggcaaataatttgtgagatattgaggatatatgtgttgtccatttccatgtaatctttgtagactaacattttatt

SEQ ID NO: 152560 - DNA, 285 bp, Zea Mays
aaaaaaacaatggacaaaatcttgcagtactctacaaggggaaaaaagaaacagtaacagcaaatctcatcgaggatattttccaacaaagaataagatgctcggaaaatcgttggatcgaggaggctcagaaggatccattggttattctcaatcagcaggtcggaaacccgcccctcagaaaatcccttatcatgaagcatcacagcctccaaacagcaagatccaagccgcaaggtaaaccaaaatcaaagtgtacacgaaaacctacataacgcatcaaac

SEQ ID NO: 152561 - DNA, 765 bp, Zea Mays
gggccggaccgtccacgacctaggtatgctctctttagatgaattcattgtttaacctttacatgggatttagccgattctccatcaactctagcattatttaacctttacatgggatttagcctatgggcgtatcgtccgtgggtcgaaccttccagtcctcagggctggaccatccagccgtgactagtgccacaaatggtgctcaatagtttgtttggtggccaaggaataggagaggattaagggcttgtttgggagatagggaaatgaaggggattagagagctaaatttcactcgctatttaaaattgaatagggggagattttagctctcaattccacttggtctcaaacatgaagttggaaatctcttcctattcaaaatattgaatagttgcgctaccaaaccagcccttagattccgccatcacatctctaataaaaattacggtttagaaaattgtaatgatgtggattcagtctgtacaattgcaggatttgaagcctgtcagtagtgcagcgcgggtgatcaataacagaggcatatcgcacacgttgacgcgtacaaattagaatacaagaagtattttcaatcaatttagcccaaaaggaaataacgacttttcgacctcgcttcccaaatctgacgctctttggtcggcccactaggcgtctaggcccaacccgccattccatgcggtcatccaatcctaaactaggtttgcctggcctcacggtcacgaggacgtgaggcgtgatgtc

SEQ ID NO: 152562 - DNA, 287 bp, Zea Mays
accaaatgcatagtcaatcattaagatttacactgatatgcgcaacactattttatccataagggtccttcaggggctcatgcataccattcgtttggagccattagttgacttcagatcaacaagtaaaatgaccatcaggatctaacgttcacaaagtcattcacaggttgcattgtgcttttaagcacataggaaaaatgtgagtgtttatattgctagtgaagtgcacgacatcagaccaatgctgccaagcaaagatttttatatgcagagatgtatagtcc

SEQ ID NO: 152563 - DNA, 354 bp, Zea Mays
ccgtctaatgatgcgctagaattcccgtccgcggtgacccatggatccgcgatggtgatggagctacgacgagtaattgctgctcctcccgtcgcccatagctccaggaatcgaaacacgcgcgtcaggtactcctcgccgacctccccggcggcggaaccttcaacccgcccggctatggcgaggaaaggtgcagcggatgagacggccgatggtggtgcacatgcttctaggatctccaattcagcgcgcacaagaccccagaattgattctgggcacagaatagaggagggaaagggccacaccggcggcagccgcaattttacacctcgcccaccactggctcacttagc

SEQ ID NO: 152564 - DNA, 276 bp, Zea Mays
ccatcttgagcatgtgagttgtgtcgaaggtttcaagtcactttgaatattcgattgatcttctacattgacaaccatcacttgattagtgcctcaactcaatgcaagtaaattttttattcacttttagctaggtccatcggctgtcaggccatcgcttgcccttcacctttcacagaagtcaggagcttgcttttgtttcgctccgatgatgccaaatgggcaattttacctatactgtgcttcttagaaaagattgcttgtagagaaaaccag

SEQ ID NO: 152565 - DNA, 367 bp, Zea Mays
ctgagcccaagccactgaaaaccgacgctctacattgatgttgacataacctagcacactcagggtagtagttgattgttggtagtcgatgcaacccattgctctagtcaaactagaagaagggacattctcaatgcttataattttggcatctgtcgtgccattgctactctccctctagtcgttgccgcctctcggtgcgacagtgttcttgctctcaccactagtgatgtgcaagcgagcgttgttcctcattgttgttcgagtcctggtttctagatcgtcgtgcatatatagtgatcaggtgcgttgactccacacgacatcggtggaatcttgtgatttcctgcactgatgtgtgttcttc

SEQ ID NO: 152566 - DNA, 282 bp, Zea Mays
tgaagaggccatgtgtgggcgattagtttcgtgaattgcgaagggcttcctgatcgaggagaaaacttctggcaggcttcgcaagaccttgtgacccgatttgcagcacagatcattgcgggccagtagaaaccttgacggatcaactttgcggctagggcccttggccctgcgtgagagccgcaagtcccgctgtggacttcgcgcaggatttggacgccttcagtctcggtgacacatttaagcattggttgactgacccccttcttgtaaagctggcct

SEQ ID NO: 152567 - DNA, 389 bp, Zea Mays
gtggaggagcccaggaccttgaaggaggccgatggtgacccaaattgggttgccgcgatggaggaggagctggcgtcgatccgtgacaacaagacatggtcgctggccgagctcccgcgtggtcaccgcgccataggcctcaagtgggtgtacaaagtcaagcgtgatgagaacggcaacatcgtcaagtacaaggcccgcctcgtcgccaagggctatgtgcagcagcctggcgtcgacttcgacgaggtcttcgcgccggttgcacgactggaatccgtgcgcctgctccttgccatcgcagcgcactacggctggggcatccatcacatggacgtgaagtcggcgtttttgaacggggagctccaggaagaagtctacgtccagca

SEQ ID NO: 152568 - DNA, 385 bp, Zea Mays
tttcctgtcgagagaagaggccggcgaagcatctgtccagactccagagcacttgcgcgtcgcatcacggtcgttacgcattgaatgtttcgtcaaacaaagggatatccgatcgatcgatgtaacacaagttgctgcccgtgctgtcacaggggacaagttgtgacaggttttacttgttactacctccaggcttctgcttcacaacaacacaaggctgaaggcacaaccgcacaagaccaaaacgtacgcgctagccccccgtcccgtcccgtcccgcctcttttcttgtttcagcgtcctcaaaccttttgctgttacctacagtatcaagtatcaacaatggaaaggcgccctgtcattgtgcccatggtggtcaaacgtt

SEQ ID NO: 152569 - DNA, 596 bp, Zea Mays
gtcatctcccgaatagggcccgcggcataccgtcttgagctaccagaatccatgtcagatattcacaatgtgttccatgtgtctcaactccgcaaatgcctaaaggtaccagaaacccgcatcgaggctgatgcaattcagattcaaaaggatctccagtaccgagaaaagctagtaaagattctcgactcagcagtcagaaggacccgcaactcagaagtgaaactctgtaaggttcagtggagtagagatggagaagaggaagccacctgggaaagtgaggactctctgaggaaggaatacccttaccttttctcgagccccgtctgaatcttgagggcgagattcctttaagtggggtcggtttgtagcatcccaaaaatcctaacccaggtttgaaaccctaatctaccctttcccctcctttcatcctctaattccaagaaccccccccccctagattttctttcatatgcatacactttgtttgatcacaagcacctcacttagattctattttctaacacctagactatctacaaaataaattgttcaaaagaaaaagatgcaaaaagggaaataggaattagaaagta

SEQ ID NO: 152570 - DNA, 588 bp, Zea Mays
gttgggatttagacgagtcaggttgagagaatagaaatcaagaaggctgcggaagaaaggagaaatcggcagacctaattctcggatcaagaagggaacgaagactaccgactgatgggtatcctctatggcgacggtaatcccctgctagatccgccaagagcatagttcctttggcgacaggaccccaatttcaacgaggtggagaagatcggactcaaaaacaacagaagcatagttgccgcaaaatagaagttagatgttagtgtcgattgggggaatgacaggggcggcggttccctacttcttcttcctgggcgccatcagaccatgcgggcaagcagggttgagcgcattcacaaagatgagcagggatttcacgacggaaaaagcaaagttagggttcactgccacgaaactgccagcgaggatgtatgggcgcacactaagtcgggtgcatcgagatggacgaagtaactcggaccagaccctcaacaaagcaaagtcatttgggctcgtcagacataggcgctaaccgatgattttagtcggtcctatcacggaactagtcagttgggattatcagaa

SEQ ID NO: 152571 - DNA, 524 bp, Zea Mays
cggagagacgcggccggggccggtgaagaataaatgtgtggtggttgcccgctcgtccgtcccggccggagcctggacaacctcgacccgtacaacgtgctgctgccgtgctgcggctgcttgtggttggccaatccctagaatctactgtcaccgtgagtcgtgtgtagtctacgtctaccctgaatgtagtagtagagggtgaatttcacaggagagtcagtcaagtgcaagagcacaaggcgcatgaactcgtgcccgcactcactagcagccccagcaatcaggagcagagcctgccgagcgaagcaaattgaatgccatgccgcggcgagaccggcaggaggaggaggagcacggttaaaaagctgcgcgagtaatggcgcgcgcgaggtgaggtcccgacccacccgctcgctcaccaaccaacacggcaacacttactactgctgctgcggtggtgcctgttcttggggaatggaaatggggagatggtgaggtactgaccggtagtcgtaggcgca

SEQ ID NO: 152572 - DNA, 551 bp, Zea Mays
agacgtctcttcttctttttctgctcatcggcaggagaagcaggctgattggcttggcaagggcgcttcgggcgaacactgacaggcctctgaatatccaaggctttactagctcccgggagaggcgccaccaccaatgttctagcaggagcggcatcagaagaatcctcggctaacatatcaagcatggcacttatctctgcatcactgggatccaaaggcacctcaaagtgaacctgccgttcatcagcaggaatttcttcaagcgaagcaaccaaagctctaacttcttcggcagagggtcacactctaaggcccaaaccgccatcaccagcaggaggatttgacacgaaatgggtaaaggccttggaaggaggcaagttccaggccgagtaggcaacaggggcaccaacatttgataccttgcctctgagtatcatttcgagccggctcaccaagtccacagcaggaattcttctattggtgacctgggtggagtcagccaggcctcggtacagataggctgggtatgccctgtccttcaatggctg

SEQ ID NO: 152573 - DNA, 600 bp, Zea Mays
gtttacgacacattttacaataggatgttaataaacatggcccaactatgaatgttcctgaagttggaatgtcttttgaatccggagaaaatgcatatgagatgtacaacacatatgccggtaaggttgggttcagcattagaaaaagcgacacaaagcgtcgagtggatcaaactatgtcatcgaaactgatagtttgtagcaaacaaggtcatggagacaccagttcatcacatggcactactaggacaggttgccatgctcgtattttgttcagtatcagcagagagggtatttggacagtgcaacaggttgaacttgaacataatcattatctggctagtccaagtaagacacacatgttgagatcccagcgacatgttatggaagcggacaggaaactcatcagccaaataagggaagccgggatgaagccatcacaagtgttcgagttcattaaacaattttatggtcgccctgaaaatgttccattcttgaagattgattgttgcaatgaaattggtcgcgaacgaaacaaatacttagaatccaatgatacacaaacactgttagaatatctaaagaacaagcaaatggagg

SEQ ID NO: 152574 - DNA, 1892 bp, Zea Mays
ccctggctagcggcggatgcccagtctagctatagacgactcaggaacaatcgtcaattttggcttgaacacttagagaacgtcctgcccatgtgcacggcggaaaccgtgacgccaagcccgcattcccgttcaaacatgcccgaattgaccaaacggttgccacgatgagcttcgtgggcacacagagctgctaaaacaacatacaagaagcgcagagtcatagcagagcggagaacttgtgttcgccggtgatagaaaaaggggaaaacgtcgttgcgacgagctctggtgaaattgggaggtgatattggggctacctggtcacaaattgctactgattcaccgtgcacactcaatttgggaagaggtggcagaggcagtgcgaattttgggcttcaatcaaattcacttggtggagatgtgaataccccaccgtggttcatggtgttatttatagccacaacagtccggctagctatccatggccacggataacttcgttagcgcatggttaccacgtaggggagagacacagtgagggaggagcaaggcatgggtgacaccacggcggaattgaataactccggccatgcccggctcagcttgcgagatggtgccacgttcgaagctatcctccccgcgatcgattcccaccacttgatcacgcgagcacatcctgttcaacagtgccccttatctttatcgcgttcatcagatatttttcagagtttgatcttccgtgttcttctgaaccgaccaccttccatcctcttaatctcttgattcttgtgagggacaaaacaatcttcattaattaagtttgttcacctatcaatcgtcttcaagcttactataggatatttgggtcaaaatcgagtgaatctaaagatatagtgcgcccaacttagctccattccactgtgaccatttcaatcttcaaattcagtttcagctattcagcataaagtctgacagagcaactttgggcaatagtttctttatttttttgtataacaactaaagaagatgtttgtatcaaggttattctcctataatagctctacaaaattgatgtggtgacctagggcaaaaaccttataacttggcagatatagggctccaaagttgagctaattacactgaaattcagacttagccaatagagtccaaataggactttttgcaaataagtccaaatctcaaggtttaacttgcaaatccacattcttgtgagccaaatgacttaaggtgccttaatttcatggtttttgcactttagtccaaaagtctaataattttgcacttagccccctagggtttaagtttagggctttctagggttctttttagggtttttggcacttctagggtttggatgttacttaggtccattcctagtgacattttatgactatttcaattgagttttaaagttttcccttcttaagccttgtttactctattatgcccaatctagggttaaatattgtaccctagcgtctcactagtaacatgtcacttcaatacaacttgtttgaaatttttgcctagtgcatgcactctaggtgtgacaaacacatgatatgccaatgcttatgatgttatgctcaagttttagtaaaagtaacaccaggggtgttacatccttccccccataaaagaatctcatccggaaattaaaagtcctagggtaagtaatggaaaaggaaacacgacacatctttatttccttatttttggtacaaggcaggggtggtttggggctcattcctttattacacaattgtatacactttacaaattacatgagggtaaaaagcctaggaaattcttttctaaaaattcctgagtttcccatgtagcctcatcttctgaatgctggttccact

SEQ ID NO: 152575 - DNA, 274 bp, Zea Mays
atgatgattggctgaaatgcatcgaagctacaagcgacgaacttcttggaccatattcaaaggcggaggataacgcactgtctgcgaccttcggaggccggaagaagaagaggttgaatagagttttcgatgctattgggtttatgtactctgattatcgctacccgctgaaagggcaaaagagaaaaagcgccacttctggaaaaggagatgtttcagttgctctaagtgaggccgcgccaaagaggaagagggtgaaggtccttactcaccg

SEQ ID NO: 152576 - DNA, 549 bp, Zea Mays
gatcgaataaatcttcaattatgggtagggggtacttgttcttgatagtaacctcattcaatgatctatagtcaatgcacatcctcttcgtgccatccttcttctccacaaattgcatgggggctgcccaaggtgaggtactccgtctaatgtagcctttatctgacaactcatcaatctgcttcttgagttccaccaactctggtccggacactcgataggctctcttggaaataagggcggtgcctggtataaggtctatggagaattcaacttttctttcaggtggcatacccggtaactcctcgggaaacacatctgggaattctgacactacattgatagcctttgatggtttaatctcttcaatatgggcggtgacttggtgacaacttccttttcttggtccagacaagaccaactccactaacacttcttccccggataaggacactaacttcatcgttctcttatcacagctaagactggcttgatacttggttagccaattcatccctaggatgacgtctatagttgtatcatggttac

SEQ ID NO: 152577 - DNA, 299 bp, Zea Mays
gggacttgatcgatcgctgcgcatcgcggacttgctcgacaaggacctaatcggtcgctctgtctcgcggacttgctcggtagagatctggctggccgccccgcttcgtagacttgctcggcatggacctgatcggtcgctccgtctggcggacttgctcgacagggacttggtcggccgctcggcctcgcggacttgctcagtaaggacctgatcggtcgctctgcctggcggacttgctcagctgggacctggtcggccgctccgcctcatggacttactcggtagggacatggtcg

SEQ ID NO: 152578 - DNA, 286 bp, Zea Mays
tgagagactctgttattagttgtttagggggagacatttgtctgtttatgccagaaaataaaatccggttctcctcttttgtagtgtcactttcgtttgtactgatttggtgacaaggaattccacagtactcacaacaacaacatgttccaaggtcacttgtctgttggtttcgttgtgcatccttttgtgtcttgaatgtctgttcatcagctgttttatttatagtgttgttttgacttgtcaacacaccacattctttgcatttagtgacatcacttgtagt

SEQ ID NO: 152579 - DNA, 448 bp, Zea Mays
tgaaatttgaaatttaacataagttggaaatgggaaataaaaatagaaaaaaagaaaaagcccaagaaccacgcctgggccgattttcctcctcccgcagcccactcactctcactgtgcggcccatcttaccaatttgcgtgtttacctgctgactggtgggcccacctcgtcatcctcggtctaccatctgcgcgtatcctctagtgcctctaccggtgggaccaaattgccagtttctgccgcgtgaacgctctcgactggtgacggacaggtgggaccatggcgtcaagcgtcttcatcctcgaatcggatttgcagcggcaacggtgtctgtggattccgcgtggattggttggcctgaggttccctcggcgagcatatataaccagggccatacccctcccctttcctcctccaattcaaagccatatccatagagagcctc

SEQ ID NO: 152580 - DNA, 620 bp, Zea Mays
gatgcgggcagtgttgcccacgaagagggcggctccacagaagtgacggcgctccggcgagaaattaaaagcgctccaaccctcaatcgagcacgacgaggccacatatacgtgcggtgggatccctcgcgaccctagtaccacttgacgaggctggaggatcgcatatgggcagatcgatggcggcagcggcaatctcttctccccgcaccccccatccatgcgcctacggcaccaatctgcacacggcttcatctggttggggagtcataatcctcgtgctttatagcgtcgcggcggaatccggccggaggggatcacggagtgggggtcagagtttgtttcgaagctcacgatggttgcggtcgagtttgttgcggcttacggttgaagatcccacacgcggggcccatgtgtcgaaccatcagcgcgtgcacggattctgtggagttcggccgaggagatatgctgcaatgttaaggaggaactcctcgcggattgtgcgcaacagagaagcttcgatctcccatcacgaggtaggaggcgagggagagatggacccaataggtgggccccacccaacggtgacacaaggcatcacggtgcgtgggatcgcggca

SEQ ID NO: 152581 - DNA, 610 bp, Zea Mays
tgtgtgtcatgaatgcatggtgctctgcactctctgctaggagctgctattgtacggtgtcctggcggtcttgaatggtctgaaacatcgatagcatccactcgaacaactactgctggatagcggcttgcctggcctgctctgctgcttgatgggcctcctctgtggccatatgagcctactgttgagtgagcgactgaagaatagcagccagggtagggtcaatagctggaggggtagcaggagcagcactggagctactggccatgtgatcatgggaacgaggtggcacaagaggcagtggcagaatccctaggtcctcatcatcatcggaagaagtatatgcagcgacaacctgagtctcgaactgtttgatggtctcatcctcaaccctgatatctgatactggagctggcgctggacctgtgtcctcaggagctatgcaatagaagccgaacagaagtcgagaggcctcgagggtagcctggaactgaggaggccgaatcagctgcgcaaatatgtgatagaggtagtgggtgtacgatagcagacggcgagcacagagaccatccaacattgtatcctcgatctcacagatcagaaagtcaac

SEQ ID NO: 152582 - DNA, 348 bp, Zea Mays
gtcaggttatctatccctgtatctatcccagtcaatgtatctggacaagtttttgaagccatagtgcaagagatacaagacatcccggttatgtgtgaatttctggatgtattccctgaagatttacccggattacctcttgagtgggacgtagagtttgtgattgagttaaaactgggtacgactcctatttctagatgatcataccgtatgcctcccaatgaattggcagaattaaagaggcaattacaagacttgttggagaaaggatttatcagaccgagttcatcgccatggggatgtccagtcatcttcatcaagaggaaggatcaaaccctacgaatttgt

SEQ ID NO: 152583 - DNA, 675 bp, Zea Mays
ggatggcagggagcaaggagaagtggtgacaggtacagtcttagtcgattcgtttgtggcccaagctcttttggactctggcgctagctatttgtttgtttcagagaattttgtgtcgcgggctggtcttttggtgcagaggttgagtcacccaattttggttagttctgctaatggctccattagtagctattcagtttgtcaggggtgctctgtcattcttgctgatgaggtcttttcggccaatcttgtggtgatttccttgggggcattcgatgttatcttgggtatggattggttatctcagtataacgcagttatatcctgtttttggaagacaatgttattgcaggcactatcgggtagggaggtggtattcttgggaagttccccaaagttcacgttatccttgttggcgcaattgcttccggatcgccggtcaaggaagtcgggaatttttttcctccatggtggtggagggtgtgactgccttgcgggtgcaggacatccgagtggtgtgtgactttgccaatgttttcccagcaaagcttctaggccttccactgaatcgcgatgcaactttcgaaatcaagctgattccgggtacgcaggctattcataaggccccgtatcggatggctccgaaggagcaggttgaattgaagcggcaattgg

SEQ ID NO: 152584 - DNA, 364 bp, Zea Mays
accattaccgttactgtattttttttgccggaatcagaaacgggaacgggaatgttggacggaaaaacgaaaccgatattacgagatattgggaacggaacattttcaatcgggaacgagtggattatgatcaggaatcggtaacacaaaaaagaaacatttgcagggttgcagccatgcataatccatatgcaaacaagagcatcacacatataaaattatattatagtaagatgtaagatcagtctcccagtagaaagatcacgatgtagtaatgtactatatcagttccacagcatgtcacggatcaaccaaattgcaaaccaagtgcccaacaggccaacgtgtcacaactattacttat

SEQ ID NO: 152585 - DNA, 443 bp, Zea Mays
gcctattgcagtattgcttatatatacatatatcatattatatatacatatgtccagaaatatataggacgattaggggacgaccagaggtcgaccaggaccgattaggtgtcctaatcatcaccctaatcgcgattaggcacctagtcggtcctctgaacgaccagctggtcgcccgacctgaaaacaatggtttgtactttgtaaacactatctatgtggctatgtttgtggatgatctttgatgtgccattttattgttattttgttggagcaaatatatttatggatttactcatttactcttgctaaaatttacatactacatactaacaattatcccttcttttgtaggtacatagcttagataaagaggacatcaaaagctttgtgtttacttcacaaaaggttagacagtaccaaaccatttagaccgtttaaac

SEQ ID NO: 152586 - DNA, 761 bp, Zea Mays
gtgaccgccgcctcctagccttgcgccgcgtggctttaacttcccatcgcgtcgccgtggcttcttactgccgtcaaatcattgccggcgagctcgccacgactgtggacacgcactcacgcggccagtgccttcttctctctttccggccgtcgcgcgtcctcctcaaaattcaccggccaccgcccttggagcctataaattgagggcggggatagttgcgccatgtaatcgtcaagctatagcacccactctcatctccaatcgttccccgtagctccccaatttgggattacccccaaatcgatcgaagaacgctgcgaaaccaagctcgccgtggtcagctcaattcgggtcagctcctcccctctgctcccttgtttaagcattcacatacatcggtgatactcgccaacccatccaattgaattaggagcccactcgtcgccgggaacgcgttcatccacccacaacatccatggtcgtcgtggccagtgcaaaccatagggtcattagtgaaattaggttggggaaatggatcagggtaggtccaattcggtgacaggcgctcgggagcgccggtcttggccccctccggccggtttagctcgccggagctaagctttccgcacggaccgccgccggggacttcactatgcaaagggaaagaagatgggggttcttagtgcaaatagtcagtgacttggttaaacagtgaaataacctgttctcggttagtaaaaacttcggggccctttctg

SEQ ID NO: 152587 - DNA, 813 bp, Zea Mays
cgcgctaaaaatcctttctcctgtgcgctgtccggtggttcaccggacagctactgtgcgctgtctggtgtgcaccggacatgcactgtagactgtccggtgcgcccatatcgcgtttaaaaaaaaggcctccagcccgagaccgagccagaggctcatttcttctccccgccagcgctctctctctctgtccctggcgatttctccccttgccggcgaccatctctccccggcggcgatcctccggcgccctgtgcctgcgctggtgcctctccctcgctcggtaagcagctctctccctctgtctattcaatccattcctctagctgtgagaggctgtgccaccccttttgtgaaattttccaattcctgtcaaatccagtaaatccaaatggtgaaatgtgttcaattgtccccattgagtatacctgcaggtttctagctccttcgggagggttttcatacctccaatggccatttccctataaccctaattcctcgccctccacgtgctcggtgaaatgcccaaaccagccaaaaatgctccaattgaacccaaatttttcaggcaccttcgcaacacttccagtaacatatttgccaaatttcacgccaatccgagattcctggcttcaatttcactcaattccccgttttgagcgatcgctttcgagccgagtgcccaaatctatttttcttcgcctaaattcaaaccaagcacacacttcactcatattcacctatataaacctattcgtgaagtatcggctcaattccctgtcgttttgtgcctcaattcaaattccaaacctc

SEQ ID NO: 152588 - DNA, 562 bp, Zea Mays
gatgcacctgtcaagtgggggcgcatgtacaggcaccgtcgtgacgtgcgcagccacagaacgcgctgcgcgcatgcaggaggaggccaccctgtgtgactaagtttggaaagagtggttagtttctatttttattccttaagtctaggagagattggttaaggccctaggccacatatattcatgtaaccacatattgagaagggcaagcaagatcattatctctaatctcccgtctctctcgcaacaagccgacaacagagggacaaaacctcgttggcgaagacagaccgtggctacgaactccaaagccaagggccagctacccaaggtcccgacgtccttgacaacctggtatcggctactcggcgtacctcgtcttcatccgctccgccgccgcaacatctccccactgctacgccaccacccagcccacccagctcgccaccattggccgctacgtcaatcacttcaaccaatggcggacccagtgccaaggcaccacaggccgatgcctgggctgccacgccaccgtcagtgcaggtaagtccaaaaaaatgcc

SEQ ID NO: 152589 - DNA, 1010 bp, Zea Mays
cgtctgcagcgtgttcagcagcctcaggtgcggcgtccgcgacgtcgagctcgaccccttacacgtagaagatgcggcgacatgtgcggttgtggccccaaaaatatttctcgttgcagttgaagtggagttcgaggaggcgaagagtccgaagcagagtccgggctagactcataaccgccgccagtgtttctgggttatggatccggacagcgtggctcagcggcggcagaagccccctgtgaagagctgaacgcgctggttctcctccagacgacctgctcatggcaggagggcctgaactcgattggcatactcctccaccgtgcccatgcgtcggcactctgtcagctcgaacagaggggcagagcacaatggcggcccgaaccgtagacttagaaggtccttgaaacgaccccacggtggtgtgccctcgtcctcttggagttgcatgaaccagagctgggcgacgtcctctagattatatgacgccatccagacgtgttcctctggtatggtgcgctgctggtggaagtacgattcacacctgctgaggaagagcatggggtcggacttgccatcgtagtggggggagagtcgagtttctggaatctggggggcgatcaagatcgcgctgcccatctgagcggccgccgatgttcgaactcgaagccggttgctccttcagagcggccatgtcggccttcatggtggacatctccgtggtgatggacttgagcatctccatcatgtccttcatagtgggatcggccatggctgcggctgcggggcggaggcagtagaggactgtggtgatggtggatggctgagtttgggcgcggcgactgtggaggactgatctgaatgagtggaagaggattgacgtgacgacgataccaggttgtcaagggagttggttcctaaggtagctggccctcgactctgcaactcgtagtctcggtttgtcttcgccggcagggttataccccttagtcgtcggcttgacaggg

SEQ ID NO: 152590 - DNA, 366 bp, Zea Mays
accactcaactttctcacaattttcgtcttaacaatgtccttgtttcaccgtctctcattaaagatttaatttctgttcgccaattcaccactgacaataattgttctgtggaatttgaccctcttggctgctctgtgaaggatcttcccactcggcgcatgatccttcggtgtgatagctccagcccactctacccactcaggagcacaacatcttctctccatgctaccacctcttcattgtggcatcaacgacttggacatccaggatctgcagtcctcactcagctagctcagtcttctgtcattccttgtaccccgaataaaaacacccccatatgccatgcctaccagctaggacgtcac

SEQ ID NO: 152591 - DNA, 506 bp, Zea Mays
aattgactttggtattccatatattaagattctaatgtgtatgcaaacccgacgggatctatgactggtatttatatagattaagattctcatttgtccgtagaggtagctatagatggtcactggtgtgtgggactggtcgtgataaccgaggccgtcgaaaatactatatagtactgttgtggatgtaaccttacacagtcacacgtgtcagcggccggacgaaactggagaggtgtatgcatatatatggtgaatatatattaattcaactaaaaaataaatcgtatgcacagcagtggagggtaaaataaaaccaaacaatctatataacgtaacgtatggaatagttatatcttctatataaacctagttcctggtcggctggcttaagccagccaataagactgatgctgcttcttccccttccctgtagatgtttacttgggtcttgtttactaggcggcccaaaatccgacacaagtttggcctagtccgaatccgac

SEQ ID NO: 152592 - DNA, 686 bp, Zea Mays
tgacgccgctcctccccccgtgctccccttcaccaacagcggtgtggcactttcccctgccctctactacgacgacgtacctcccgccctcgcccgtggcagcgcagcccccaccctctcctgcagcaccactccttggacaaccgcctccttcctctatgaccagcgtgtcgcctacaactcgttgctccttccctccactgcgtggtccttcatggcggatgcgcctcgctcggcgccggatccctcgcccacgccgagtgtcaccatccctgtgttccgtgctgcgtggattccccaccgtcttcctcgggctttgcctcgcctcccttgacgtcattgccgcttactctaccttgggcgcggcgccgctgccaaggtcgccatggctattgctcggcatcgagaatgctctgcgaccctcacctgggagcacgagcgcactgcggtaggtgcccttgcctctcaactagcggaggttgagtgacacctacacaactcctcgttcgcgaccccctccggtggccctagtgcctccctctccctctgggttcgacgttgttgtcatcgccaccctccacacttaggcgatcggtgtccagaacatctggtcgcttttctttgtcgttcttggtccgttatccacccactacgcccgctgcgcgcgaccagatgctcctcactcc

SEQ ID NO: 152593 - DNA, 314 bp, Zea Mays
atccaaaacaaaaatctgagttctctcatcctctctcctgtcccaactcccaagagtgattactgttttttgtttcgtggatgcgatctgttttacgcgacgatctgcttcgctgttcgcgtgttcgttaacggcgggcgccgacggattggagctgtcattgtcaggcttcatctttcggttttaattctcccaggagaagttcctgggctgggagtaaatgagcggcgccctcccctgtcgatacatgccgtttctctgggtggaatttatggctgctcggacgccacgctgcttttagtagtaaccaatgc

SEQ ID NO: 152594 - DNA, 300 bp, Zea Mays
agtgactggacaagtaatcctctttaacctaagagaatccgcagtttagacacctagtagagcacctaacaactgcaccttttctctatatctcaaagaaacaggtaaccctgagcaagttgcctgtcaaatccttgtattatcgcacccaatccaatcaaaagcacatcctcctcttattggaatctcctctagtggccgttgcctcgtcgttacccatagccggaaagttgcctcctttccccttgttcgccaaatcgccatccccccctgccctacacgagcagtgtttcgttcgct

SEQ ID NO: 152595 - DNA, 425 bp, Zea Mays
tagttatctaccaaaaattattggaataacatgtgtctgtactcttttaattgacatgagtatgcagttatttcagattttccaaagcaatatcatatttagtgtagattttggtgagactgatagcaatgaaacaggctttggtccatcaaccttggtatataatctaacgcctctagctaatttttattagccttgttttttgtgctcactttgttgctgctgaaaacaaacacagactaatatgaatggatgatttgtgctttgcaatgtagagtgtcctattctagcctcaacgtgacccgtcaaaacattttgatcattgccacatctccatacatccgtaatggaagaactaaattttctttcacattctagcacaaaattttcaaggcatggagcagtttctcgaaaggtaatttgac

SEQ ID NO: 152596 - DNA, 836 bp, Zea Mays
gattggtttgagcctctgcatgaggctcatctgacattccgccgaacactcctagtgcagagtacacagacaaatcaatcaaatgcaagaaaacctcaccagtaaatgagcttcccgccgggggcaatgatatgcacggcctgtcccagcgcgtgcagggccctgatgtgctggcggtcagtgagcccgacgcggcccacgcgctgcagccgcgacggcaaggaaggcgccgcggggagggcgcggcgcaccggcgaaggctgcggcgggcggcgcgaggagtggtagtggtggtggtggtgctgttgctgctgctccggcacgagcttggaaatctcccgcttgagctccgcctggccttcctccagctcccgtaacttccgcagcagctcctccgccgccatcaccggcagcagagcgcccggttgctgtgtgtcaaatggcaagcatcaggggagggggagttgttgcttccggcgcgcgcgaggtcggcggcgaaaatggcgcctttggaggcttccgcgacccagctaactgcctgcctgcaccttctatcggtttctcgaggattcctcgtctggcccaagaagcataaagcggctgcttttgttggtttcccggcgatccggggagcgaacttggctcaatcccgccttctggaagcttctgtgagctgccacacctcaggacggaattcagaaatggggtgaaccgtgaacccagcccaacaggagttcttcttgctcccctgctgctgctgaccgcgtggtctgttcttccgcggccttgttgcttggagaggcagcagtgacgaggattgggagagggagttggag

SEQ ID NO: 152597 - DNA, 398 bp, Zea Mays
gccaagtgcagtatgaatcaaatttccgtcatacacttgttggccactgataaaaagaaaagaaacactagtcgcatgattgatcacattgcaaaaacaagaaaaagagaaagaaaaacgacgagaacactcgcaggaacacatgaaaacgttcttattctcaattactccctgaaagagcctctcgtcatcttgttggcatttccaatggagcttgctgatcggacggacctgaccagtcaccacctcctctgcaagaacgccagcctgtcgttctcactgcctgcaacctccaacgagcggtccatgcggccaacgacggccgtcctgaagctgaaggcctcctgcgcccgggggccgcacccgcgctgcatgcccatgacggcgctcaggctggc

SEQ ID NO: 152598 - DNA, 692 bp, Zea Mays
tgacggcgtgcgcggcgaggagcgcagacgtcggagttagttgaagaagaaggctccggccagggaaccgcatcgccgagattcacggaaatcaccaggagaggatcaccgcggtggatccgcctgttgtttcgcggaagctgttatgcggcggcagattggagaagacgagccgttcgggagggcccagcggtcagtgcaccagagtaagcgcgcgtgcgagcagggtggctggcaacgtggcccacatggccggtgacttatgggcgcgcgatggttctgcccagaggggccgcgatgtcagcgagacggccaagggtgggctgacaggagagaggaggaaaagtgggccgaccagagagctatttgggccgagaaattcagcttcggcccaggcgcaaatttatggctttttctcatttctgttttgcattttcttttctattttctctttcaaatcccattctaattcaaacacatgtcttgaacttcaaatttcctagtatccaaataattcctaatgtgaatgtaaattctactgtatacaatattattattattattatattcttttccctattatgtatttatggaaggaataaatcaaaattcctcccccattttatattttgtgtgttcaaaactttgaggtttagtttatgttttccataaaatgcatcaccacaaaatca

SEQ ID NO: 152599 - DNA, 677 bp, Zea Mays
gcatgctcgcattctgcttcgcgcatcacgcgtcgctcacgtatgtcgcgcgttgtccgcgcctacccgcctgtactgttcgcgtacgctgtcaccgcccattccacgcgtgtcacgtgttgtgctctattctacgagtatcgtgagttcgatctgtacgatgttcgcgcgtgctgttcacgtgtcgtcgttcgtgcgagtcgcgattcgcgcgctttaataaaattgtttattcgtcacgaattggtaactattcaatatataatgcgccataaacctgtttctatttgtttcagtcgtgtcagctttgtagcaacaccgatttcatattagtaacgtactttatcatgtcacaagttttaattatttaattagttgttcattcgacacttattaaataaaatgaccttctaattaaaattagtttatatttttaactcgcacttttataaatataaatgttaactcgatgaatatcaacttaaatgcttctcagttaatacttgtttagtataatcgtgttatctgttagcgattatcaagcgtcgtcgcattgtctgcgcgttgtaagcgcgtgatgtgctggtggtcgcgtgtcgcggtgctgtttgcgcgtgtcgcacaccgtcgtttgcgtgcgtcgcatgtgccatttaccggtgtcgcttgccttgcca

SEQ ID NO: 152600 - DNA, 1954 bp, Zea Mays
cccgtcttcggcggcggcgttcctcgtgggcagtggagtggagatccacacgggcgttggttggttttctgtccatttttgttggtaagaaatcctaagctcacttggataggaatactcttgtcataagaattgggttgtctcttattcaaaccaagtagtgatttctatccaccccattcttagttgtggatttgtgtgctgcgcaagtggttgggttagcttatttggttaagttcctattcagcgtatgaggtcgtcattggtttactccataggacttcttggtacatggcagttaaatcgcaggtgcgtttatagtttattttccaacaccaacaccttttggggttcagctgaatccccattccccaaccaagtgcccctgcactggaacaaggtagtatacacagtgacatagagagttctcaacaggaacacatctggaacttccattagtttattttatcctctaaatagcttgtctgcagcaactatatgtccataacaatttggttggggttggtaaggggtgcatgaatgggagagaaggtacaatgttaggatagcttaacatacattcgaagtttcctgttctgtagttggctgatacctaaatgttttatgctgttgtcataatgaaaacaaaccctattgagctggcatggctccatccttgcttagcgctgtgatgacatcctagtggaaaaagtgttggccttgtgacaagcaaggccagttgctatagttgtatccacaatccacttatctcccaagtattctttcactaatctgacctctgctagcaattataatattaaattgataaagtgactaactaaccagacatactgcactccgattttcagtaattataatcacatccttacatgtgacagttaaaatgaccaaccagaatactgcattccaattttcagatatgattgtcacacccttacaccttatagttggttattttgaaatcaatctatttttgcagtgcttttgagatagcacctagaaatcctgtgcagtttgcccaccaacacaaaaaaaatcctgagcagttatatcgacatttcttcattcacatgaaatgtcacttcttagtagattcttctacaagaggcctcctgatggactactggagtttcttgacaggatctatggtatgcatggagaattttactatattgattgccttcttagatcaatgtaacttattttatgacagctcaactaatcacatcttttggcattgtacagtttttgattcatgcttcagcactgaagttttgcctcagggaatgtacccagtgtatttaattgggattcttacagagttgcatgaagagcatgtagaatcctcatttctggcaattaacttcagagatggagataagagaagccagcttgctgatatactacgtgaatacaacattccagtcattgattacccccgtcattttgagggttgtcctgtgcttcctttatctcttattcagcatttccttcgtgtatgtgagcactggttatccagtgggaccaatcagaacattatattactccattgtgaaagaggggcgtggcctttgttggcttttcttttatcttgtcttctcatctacaagaaactgaacagtgctgagcataaaactctggacattatttaccgtgaggcacctaaagggttcctacagcttttttctgcccttaatccaatgccatctcaactccgttacatgcagtatgtagccagaagaaatatatctccacagtggcctccaatggaaagatcactctctttggattgcctgattcttcgagctattccaagttttgattctgataacggatgcaggccattagtccgcatttttggtcgaaatcttcttggcaagttttctagcatgactaacatgactttttccatgccaaagaagaaatctcttac

SEQ ID NO: 152601 - DNA, 1909 bp, Zea Mays
tgtgttgtcgagtactaccttctgatctgttaaaacgcttgccgcaacatagcaactatggacctttgcaagtaactgctcccacaaaaggtttgtattgtttctgtctcatgtaacatatttttgtatagtaagtttagcctatcccacaaaaggtttcagacacgagccaagctccagtaacatatatattgatcaccccctttgtgtcgtttacttggactaagttaaaagattagattgggctgctcacctcattctggtggcatgacttgattacttataggtacgatttacaggataagctcagcataatttcagggataagcccctgtaacagactatgcgtttacatactaatctaaactgatatagctataaactaggatgttgttacatatcttgatacacgctaacagccccccgcaatcttaaccggtagccacaaggttgagagtgggtcttagtcgctgcaacatttgtttagtagctggcttggtgaagatatctgcaacttgatctcctgaagcaatatgtagaacatccatatttcctactgcaaccttctctcgaacaaaatggaaatccacttctatatgcttggtacgagcatggaacacaggattagaactcaagtatgtagcacccaaattgtcacaccacaaaacaggcggtcttgactgcataacatgcaattccttcaacaatgattgtatccatgttgcttcagctgcatcatttgctaaagccttgtactcggctgcgagcattccatgagataaggtttggcccaaagaaaatggcatagcctccagttgaacgtcgatcatcaatgcatctcgcccagtctgcatcggtgaagatgcttagtaaactagatcttgatggtcgtaatgacagtccagtattcaaagttccttttacaaaccggagtatgcgcttgacagcctcccagtgtaggattgtgggtttggagaggaactgacatactttgttaactgagaatgacaagtcaggtcgtgtgagagtaaggtattgaagagcccccactgtactccgatagacaaaagcatccttgtctgtaagaggtttcccaattgctctggataatttttcagtggcacaaagaggagtggcaactgacttacagttttccatatgaactcgactaagaatatctctagcatatttctgttgagtgagtgtcatgcccccagaattgtaagtcacttcaataccaagaaagtaatttaactaacctagatccttcataggaaaagagactgagagttgctgcagtaattgccttgttgcttcaggagaggagctggtaatgacgatatcatcaacgtacacaagcatgaacatggtgatgtcgttggccaagtagataaacaaagaagaatcagcaactgaagaagaaaaaccaagctggtaaaggcgctcactaagtcgagagtaccacgccctgggggactgttttagaccgtaaatggacttgtgaagcttacaaacattgtcaggtcgagaggcatcttgaaaacctggaggctgttgcatgtatgctgtgtcatcaagaaaaccatgaaggaaagcattgctgatgtcaatttgcctggtgtgccatccacgagagactgcaagggaaagaacgagacgaacagtagccggtttaacaaccggactaaaagtctcatggcaatcgatgccatactgctgtgtgaatccccgagcaacgagccgagcttttaatttgtcaatggagccatcaagatgttgtttgacacgaaaaacccacttacaactgataatattttgaccatggggtttaggaaccagagtccaagtgttattctgccgaagggctagaaattcatcctgcatagcctgacaccatttgtcatctgcc

SEQ ID NO: 152602 - DNA, 400 bp, Zea Mays
gcggggttcagaaatgttcaagtcaggagcatccaacactcccatttgggccaagatttagtgcggttcagattcgcatttgatagagataatttggtggcaatgggtccgcaacaagctcttgggtttacttttactgttattaggcataatgaagcctggaatcagcgtgccctgacttttaaccatgaatgttggctccttctccttggttttcctctagatttctagactcatgagcatattcaaaatgcggtcgactcctttggaagggttctcatgtgggatcctgacccttcaaatgtaactaggctacttgttcgtgctagagtcacgtccctccaagaagttccccaatttacagttttttcagttactgagggtttccaaggagtttctt

SEQ ID NO: 152603 - DNA, 346 bp, Zea Mays
cctccttcgggcacgaactggccccggcgtgcgcacacgtccccggccagcggcggtggcagccgggctcgactgcatcctccaccgagctggcctcctcgtcgacctccaccgagctcctctcctcgccggccatggaggccgtcgtcccagctcctccctcacctccccttggtgctcggcctccaccaggtcgtggccttcaccacctcctcatcctggcccctcttgcccatgccatcttctcccagtttcctctacaacagccgatgctcttcctctctctgcttcctctccggccgtctggctccctgctcggcgggcacaagccctcggaccccccgcg

SEQ ID NO: 152604 - DNA, 1185 bp, Zea Mays
gccatccttcaaggctacattcagctatggccctatggtcgacttctgggtaccagtgtgaggtgtttgctgttgataatgcacttgcagttttgactttctactatacagaagccaatattagcaagttgtgtccatggttgtggccttgtgggtctgtcaaaggaaccaatgtttcttgatttcaatgatggcactagcaatgacactttcctgctggcaaccaacagaattgtggaccaacttccatcatatattactgcatgtagccttcatgctaagaagttcagtatacttgggaccttgatgcacccttcgacatatgctggaaactgctgccgcttgatgaaggattctttcgtaccagtaaggaactgcagtctggagcgaattggttgagcttgacatattcctcgtcctgtgagccttttggtactccaaaattgatcagtatggaagcaaaggggagcactggagttagcgtattaaaattttgccttgacctgtccagaatcatatggggttcaggagccaaacttgtgcactttttgcgtgctgattcatttgacgtcttcaagatgtgttccagtgacgccatacgaaatggatcggaactaaggcatgatcatttcataccaggaaacaatagagatatccaggggacaattgaagtaacaatggatgtctctgcaaaccggctttaagacaagatatctccaaggttttcgtacagctgcttggggcaatcagcttctcaagaagagggtaatgacaggtatttgcatcaaatgggctacctctcgtgtgggccatggcccattcgcctgtgtaacaaatcgcagcaactacaagaggagagacatcagcaagggggagggcattcagttcatgtcctattcttcttctagctttgcactcctcctcatccttttctcccctccttccctagttctctattccttcatatagattgctctgctagcttcagacccccctcctccccgagatcgtgtaatctgatttgtatctgaataagctgttctgtgaactaatcgacaagggtgctagcttcagacctcctctccccagagatcgtgtaatctgatttgtattttaattagctgtgagtctaaggatttttcaacttggctcaaatgcagtgagtacatctactagagaacctgg

SEQ ID NO: 152605 - DNA, 370 bp, Zea Mays
gagggagcacagcacgtgggcgtaaccaattggacgtagtactctctgcttggtcagccgtgggtcggaagcaatggatcgatgccccggcccggcgtgtcgcgcgcgtcgtttgtgatgtgagacggcggtcagccagtgccatgtcaagtaccctaccctaggttatacacatgcaatctcaacagagggagggagcaggaacgccctgccaatcgcggcctctgtacggtaatccgtagccaatcgtgcgtaccagccgtgacttgggtcggaagcaatagatggatgccccggccccgcgtctgccaaaacaaacaaacaaacggacaaatttgcagcggagagggaggggagacgagacgactag

SEQ ID NO: 152606 - DNA, 286 bp, Zea Mays
agatccttcataggaaattcttgctggagggcactgatgatacgtcacagtgttggcagggaggaggcaatgagcacaatatcatccacatacagaagaagataagccatgtccgcacccttgtgatagacaaacagggacatatctgttttggcctcaatgaaactgagctgcagaaggtgagaagcgaatctgctgtaccatgcacggggggcttgcttgagtccataaagagagcggttgagatgacatacataatctggatgagtggagtcttcgaaaccag

SEQ ID NO: 152607 - DNA, 322 bp, Zea Mays
accgcaccagtggctgtcgtacagttttttagccagtagccgccctatatgattagatagcgatgcaacatatgtaatgttctgacgtcttaccaaacgtggtgacgtggccaatgtaaagccaaatgcacaatcatgtgtaaatatactgttgtattagtacgatgccatgtggtgggctaatgctgtttcagtcatcttggaacatgcagagcagtcactagatctggaatgaaactggcctgacgagagattagtgtcgtcctacagtcctatactagcttatcattatattcccaactccccaggggatcgaatttcg

SEQ ID NO: 152608 - DNA, 317 bp, Zea Mays
atcatttacaaataaacattcacaacaatatgatcaaaaccttgttattcctttcatccaattcaccatctctttcgatgtctctattgtcttcatcatcgtcctgaaattttattgtttcatacctcatcaatgtattatgatgaataatatgttacaaaatacatattaaaacattacatacttgtataccatctcctccactagttccacatgtctcctcaacttctatatctgtctccaaacgcgaaagtacctcgagaagctcatccattactgctagggctctatcatttcctgccttggataaactagca

SEQ ID NO: 152609 - DNA, 279 bp, Zea Mays
aagagaggaaaccaatctgtatgcctcagcatatggagaatatcggtactcatttggtgtggacggaatctctgtttgcactattttacaacattcttagtcaagatatttacttgacaccaagcaccgttaatgagctaatttctgtgattgatgaccgggcatcagagttcccgaggtcattgaaatttggcaactttctgctgtgcttcttatcaaagtgttggcatgaatgtaagcatcagagggttttacttgagagagctgccaagagaacca

SEQ ID NO: 152610 - DNA, 365 bp, Zea Mays
agaaaaaaatattaacaaccaccatgagtaaaaaatgcacattaacgtagaatatccccttagtataagaaagtaggatcacgacaattcaagaatgggaggaagaaaatccttcttacctgagattgagtagcctagatttgatcccgctctttgtgtgaggctgtgtaaccgatataagttcgtagatatgtaaaacacatatatagtatgtgtggcaataaattatgtttttgtgtatacggattaccgtgtatggacataaaaacgttgttaaatagaatatggctgctgacttgtacattcatttatttatgcagttaaggggcatgtttaaatactatgttgtatattttcttgaaaaa

SEQ ID NO: 152611 - DNA, 279 bp, Zea Mays
ctgaagggacgaaataatctgctgcagtaactcaacaaataatctgcgttccattgaatagaaaggagattcctccccatggatcccctcatgatccctgatcaccaaactagccctaaagaagataggctggggtttcatcctgatggtaaatgaacagagaagtatctaacttagcttctgtaaaaccaagggacttcatgttgggagcaaaccgagtataccaagcacgaggcacctgtgtaagtccataaagagacttgttgaggcgacaaagcc

SEQ ID NO: 152612 - DNA, 397 bp, Zea Mays
cggcaggtgcccagatcaggaggagacatgacgcggtgaaatggagacggtgaagttgcagaacaggctgatggtggctggatccaatcgtcgcccatagattcggtcgagggaacgaccttggaagacgaaggggggcgagatccatgtgtccccatgtcgatccggttaccagagggcgcgctaacaccggagggacggagtaggtggcggcgctgacgaggtcgatggcggctggctctctccgtcaaagagagtcggtcgaggaacggaggcgggatcctgctatccccgccttaatccgatggatggagcctgtggtgacgacggaggaacgactcgtctgcggcggggacggggcggagggcgactagagcgcgtcgaagggcgaggagag

SEQ ID NO: 152613 - DNA, 326 bp, Zea Mays
caccatggatgggaatcggatcgctgagattgaggatggttcaaatgatgatgacatggtggaagctccatttgtgggtggtgatgttggtagcaatgaacagatggcagaggattgtgttgttcatgcctctgttggtagtgatgagcatgagcttgacattgcccagcaagttagtctaggaaagaaaaagaaatccatggatctgaatgaacaacgtgttgtgaaacaacgtaaactagcaccaacagtgaagaagccaactagtacctctaccaacaagttaatggcatctgcattcaaggtcacatcaagcaaggacaaac

SEQ ID NO: 152614 - DNA, 936 bp, Zea Mays
acctttactcacacaaaactaccaatagaccatcagtgactagacactagatatgctaacacatttaaaattttccatccataatgcacggacataaagtggcacacaagtacttccaaagaactagaaataacatgtttgatgtcagaactaacaaggaaaatgaaaaaataccttaggtggtccaaagactgcttgtcagtgctaggatgcagcttccctttctcacagccttttggaactggcaattttaggtgtgtatatagaatgtctgcgatatcagcagtagcatttagagagaaattcttgcctgccaatctgtaagcttctttctctagttccttcagcttttttgttataatatgcctcgcacggagacaagcatccatgtcagcgccaattccccaaagctccatatcagcaagaacattaacctgtcaaaataaatgcataagagatatccaagcataatacaagcagcaatattgtattccgatcacaagtgtaattttggataccaacatgggtactaataggatgattcgattgctacaaaatgtatgaaactataacaaagttgttatgttttgaactactttccaggaagaatctagttgcgttattttcagatattcaatctgaagcatcaaagtataaacaaattaactgcaggcaacccaaaatgacacttttgttataactggagagagtattaagtaagaataggtgttgtaccaatggggcctcgattgtttcaaccaaaacagaaagattttgagtaagtaatttcttcagaacagtatacaaagcccgtgtctgtgcagcacgtctacagcagccattgtgtgctgctttgtgcatctgatttctccatcttccatcgcgatttgcagcagcagcttcttgactatgaagtcgcctcttgacaaactgttt

SEQ ID NO: 152615 - DNA, 687 bp, Zea Mays
gttcgggtgtgtggcctacgtcaagaaagtacgcccacatctcagcaagcttgatgatcgtggaatcaaggtcgtcttcatcggctaccaggacggctccaaagcgtatcgcttctacgaccccatcgccaatcgagtacatgtctcccgtgacgccatcttcgccgaggacgagcgctgggactggggagcatcctcggacgtggactgcgagcatcccttcaccatctcggaccactacatgctggaacgccagcaccaggagactgcagatcgggagcagctgatgtctgatcaccaaggttcgccatcgcactccctgtcccctggaggtgggagctcccaggacgcgccaccatgttctgcgacgcgggcagcatctccagcagcgcaaagcccgcagcaagccgagcagctgccttcgacaccagcccacgctggaacaggcatcgagttcgtgacgccactttccaccgacccaagcttcgacgacgatgatgtaggagagcgtcggtaccggacgctggacaatattcgctgcgtgggtgcagcggccgggccgatgcatcatggcgatgaggaggctgagctgcatgtcgtgagcgtggaggagcccaggaccttgaaggaagccaacggtgatccaagttgggtcgccgcgatgcaggatgagctttcctcgatccg

SEQ ID NO: 152616 - DNA, 395 bp, Zea Mays
ctctcctcatcgtattgtttctgttggtcctgtgcgatgtatgtttaaatggctaagtgggtgcgattatttcgtggatattggccgggtaacccgtaatcccgccgtgtcttagcagtaggtggaggatcgatatctgtgtccctgttgaaagaattcttcggttcttcttctctttgaggtgacgaggacgacattcttggtggttggtgacttggtgtagaaggaatggcctcaaacgagtgaaatgatgcatcaaagtgatttagtgtagtggtacactgcatgtgaagcagtgagtgtgatatccgctgccagtaatgcatagtgttcgttcttttcctagaacatgaatgtgttttcttatgccagttgtaattaattgtaatgtgatg

SEQ ID NO: 152617 - DNA, 442 bp, Zea Mays
ttggcggcgcggcggactgaattgggggaaaatggcgtcgcggtggctctgtttgaaattggggttggagattgaggctactcggccgtaagaagctgtgctttcaccgtgcgcaatcgatttgggagaaggtggagaggtcagtgcgaattttggattgcgatcggttcgctggtgaagaggaaaacacctcgccatggaccaccgtgctatttatagccacggcgacccaacagtcgacctccagccacggataacatcgcaagcgcatgcataacacgttggtaggaggcacagtgaggaaatcacggcatgcgtgacagcgcggcgagaactcactgagtcacgatagtcgccggtgaacaagtctggcagagctcgggcggtggcgccacgtatggttgtccctccccgacgttatccgttcccaagtgtgcacgaa

SEQ ID NO: 152618 - DNA, 623 bp, Zea Mays
taaagagtagccctaggagaggcctttggttcaaaaagaaccaacacctagacatggaggccttttgtcatgctgattaggcaagtagcattgatagcaagaggtctacttctagttattgtgtttttgtgggaggtaatattgtatcctggagaagtaagaaacaagaggttgtggctcggtcaacaattgaggctgaatacagagcaatggccttgggccttagcaagatgatctagttgaagaatctattggctgaattgaaactaatgaggaacgacaatatggtattaaaccgtgacaacatatctgcaatgaatattgcaaacaatctggtgcaacatgatcgtaccaagcacatagagattgatagattctttatcaaagagaagctagatagtgggaaattaaaattgaaacatgtaaaagataggaacaactagctgactatttcacaaaagggttagatcctagtgaaagtatgactatacgtaacaagatgggtatgatcaacatcgggtatgatcaacatctttagcccatcttgatggggagtgttggtgtgtgtacgtgcttttatgtatgtccctaagaacctctctgcaaaagtgtcaataaaaaca

SEQ ID NO: 152619 - DNA, 870 bp, Zea Mays
cttggcgaggacgaccgagggcctccgtgtagatacgacgaagtccccccgtttcgcgggggcacccaaatgtggttagctctgtctagtgcagtttaatcgcggtcgggctcgaccttcgctccaacagtaccccccacccgagggatcgtttcaagttagtgagctggccttgaagtattttttcaggcaatggtcgaacgatgccttcgatcacgagttgagctgacctcaaggggtgtttttgtgaagcaacagttgtgatgtgacctggcgactgctgacattttactgtgcgtatttttgttttttgatgggttttgttgggtataaaatctggtgtggggcctgtagggttacttttcttttgcccgtcctcaaactattgcgcaccaccgccgccatcgacgcatccgattttcgtgtgtttatggggcgatcgcatcgctggcttgtgcatcattgttatcctggcccgcgtgaagcaaactgcgtgccgacacagatggtacgtaatgcctccctcttcctcctcatccaatgtggcctcgtcagtaggctcaccgtcgtcggaggaaacacttagcgtgttgttgttggtcgcggattttctcgggacacgtgcaggagatgcagcagttagggtattttggatttggagttgggcgtgctctgaggtcaaagaggttccagagcctgaggggcagttggtggtgctcaaggcgttttttgctgctggctttcgactacccatttatcatttggtggttgaagtcttggagcacttctgagttcaactctatcagcttacaccaaatgccatggtggctcgagcgaaatttatttgggctgaagttacttatgggggtc

SEQ ID NO: 152620 - DNA, 417 bp, Zea Mays
gccttacctgcataatatgcaaaagttggatactactccgttactgccgcttaaaaaaatctcagtctaacctccaaggctgctatcaactagaatacctattaactggtatccattgaatatatgtcgtgtgtaacacattatcgcagtaatggagtcaagggtacctgaaaagttaatctgatggcacatgcgcctcatgctcaggaattcagtaagttatgcaataattgtttttgtcgaagtgtaagactttataagttaaaaatgattttaatatacttcgttatttcaacaacaataacaacgaaaccttttagtcccaaacaaattgtggtgggctagaattaaaacccaacaaaactcacaagcaatatttttggttatttatgaaataaaataagtgccaggatcacc

SEQ ID NO: 152621 - DNA, 2240 bp, Zea Mays
cttgtttattctgggggcttggatgatttggaaactcagaaatagagtggtgtttgatggtgtgacacctagtctctccctgctgctggaatctgttcatgaggaaagggagaaatggcaagttgctggagcaaggggcctgtcctttttagctggctctagtactgctcttggaggattgtagttgtttcagccaggattcctccattggctccagcagagggggaggaacacaaaaccagagaactccactcccaacatagataaaatgtctcctctactaatatattatatatttgtctcctgacagcatacaacatccacctgaaaggtgtcctccatttctctgacaacatccttcctaacagaagaaatgagccctctaacattccaaataagaatctttgaaggattcgtaggaagaacaaaaacaacaaacaaccacagggggaatgctcctacagatctactggtattgaccagccaaacaaggcagcgagggcctccacctagatctggttaagagggtggttaaaaagaacaccatatttctgcaaggcttccttattcatatcttcactttctgtgatgatttgcaagaccctcatagcttttctggaagtcctgcttctgcaatcatacatttcaaattccacactaatgccggcaactcttctgctgcgcctgggagcattaatcacctgagatgatgcagtcttcagggaaggcttgggagctgggagaagccctgccgtcttcctgctgatcttgcagataaaagcatcaatgccactatcgatgcagcagtctgaagcttggtcctgattggtatgagtttgagaatccagggcaaagtccacgctaagattcttgcccaagtcattgcatcttcctcctgtcaagccaacatccacatcttgatcctgaagggggttctgttttcttcttgtatagactttggttatggaggtgtgtgtctgcatgacagggagtgggggggtggaggctctccactcttctcactgtcgcatgcgacttagcagcaggtcaaggcgagacaggagggaggggcacaagtgtcaactggggcgagacatgccccaactcatgcatttctagcgacccagcaggctgaggtgagacgacatgagggcgggccgtctccggcggcccaggaaggtggtccaacagtaaagcatcagagggctggggcgattcccgccagctggatccagcgacccagttgccgggtattaggcatatatctatagccggctgtcttaccttgtaggcatatatctatagccgtctgtcttaccttgtataggtgacagccttcctagtttagccttaccttgtataggtgacagccttcctagtttaggagattgtatccttgtacaccaggccacttggctatatatatgagaagtcacccacctgattgggtgtgcggtgctttcccctaaaccaactctctacatggtatcggaggaccaggatcaattcgatccaggccttccttccgctgccctctgcttcctctcctctcctccatgtctgagccgaccttaggcgccagcgccgaccttgacgccatccagcagctcatggtgccctcgtatgcacggttttcggttcaatctcatgtaccgaccaagctggagatgaaggcctccaactacccccggtgggcatccttcttcaaatcgatgtgtggcaagttcctccttcgccaccacatcgacggctctgctcccccacgcccgcaagacccgatctgggatcaagcggactgctgcgttcgcagctggatcttcggctccgtcgacgactccatcctcagcctcgccgtcgacggtgacaaccagaccgcccgcaacctttgggtcgccatcgagggtctgttccgcgccaacaaggccccgcgggcaattctccacctccacgacttccattccatgacccaaggcgactcctccatcgacgagtacgcaatgatcatgaagcggaaggccgtcgatcttcgggacgtcggccatcccgtcgaggactcgcagctcgtcctcaatcttctccgcggcgtcaatccccgcttcagcaacaccgcagacgacatcgccaactccaccgtcctccccgacttcgcctctgctcttgatctcctaaaactcaaggagctccgcctcgccaacgaggtcaagacggcggccgccattgctctcctcgctgccacctcc

SEQ ID NO: 152622 - DNA, 928 bp, Zea Mays
ctgcgggttgaatattggaaaccagggggtttcatttataaaactacacggccgaagggggtatcatggagccacagtcgttggatcttgcatcaagggctacgattagatcagcgaataggtacaacatctcggccatcggatcaccgatctacggcaccgattataccaccgaaagggtatccctaagatttaatctgagccgcccacgcgagatcaaatggccacgatttaattacgcttgagtcaatactgaccacccgatcagatccagcggccggatttagacacgtgaaggggcaccgagacgtctaatcttagtcgttccataccggatcaacggcgctcgcctatcttcttcctctagtcgcatccacggtagcccaccggcctccccacggtggtggacattgctgacgctagccactacactccctagtgcccgataacctaccatgtctggtgctaccagatgatgagtaaacgacgaactcagtcgaaggctacttaccgatgattacgcagtccgaagctctattcatgctagggcatggctccatggcgacaccacacaccgatgaggaattccttcaagcagaggtcagccaagcgctcggggtcacctcccgcagactccatgtgtgcaggggaaccccagaatatcctgctagcgatggcttgggcgttgcacacgaagatcaccggcgacggtggcacccctagttaccggtgtttcatgctcccagatcacagtgggggggagggttcgaccggattggatgaggagcaggacccgacttcagtttggttatatatgccgaagccgaggatccccagcacggctggattttgtcggcagaggtggttgcgggtcaacggccgtgaatctcgctcgatccggtttcagctagatgaagcttgtggagac

SEQ ID NO: 152623 - DNA, 399 bp, Zea Mays
atccacctgtcctgcgttgttgatcttgacgacgcgttcttcattcttgctttctagtgccaattagtacctgcggttatatgtgaattttgagcattttttgttgattagtttacttcttgactacgagcggtatcagaaactatcttcagaagttatatccatgaattattagagctcaaatatgatgttgggatcagaagactgcccccgttgtacctatgcgttgattattgagttgagtacacaataatgattgttaaacaacaggaatcgctgtcttgattttgctatggttcgtacttgtgcaattttgttcacatcctttcctcgcgtaggtgatgggcagtgggtatgagcagcatgcgtcattatttaccacttcgacctgtatgttca

SEQ ID NO: 152624 - DNA, 287 bp, Zea Mays
cccgcgagacttgccccacatgaactgtgcatgcgtcaaaccaactactatcctgcttatttaacttaaacaacaagctaaatagaaaacttaaagggcactctaaagacatgcaaggattatctgacattttcctcctaaggcttgctgtcttcttactttatttccttcatctcaatcttggaacacagctccttgaacttctggcgactcaaagccttggtgaatatgtcgcccagctgctcccttgtactgataggctcgactgggatcagcccatttttagc

SEQ ID NO: 152625 - DNA, 295 bp, Zea Mays
ctttgtttcttctggaaagactccatctgggaattataatctcaactaggagatattctccctacataggagagtgatcattcatcaggaatatattattcagtatgagatttatatgttgcatatttataaataaaagatatgaatctgcataggatctcatgatggatcttcagaatcctattaactgcatgttttaattcatgccatttgccagatatattacatagcggaacattgtttattcaacacatgtgggatgggtctctcacaagaccacttgaaccatcgcatt

SEQ ID NO: 152626 - DNA, 474 bp, Zea Mays
ctccggcgagaacggcccctgatagtgacggcatcagtgccccctgcatggtcagtagccattccttgaatcaaatactggctgcctgtgactgcagccaccgaagtcttcctccgccacaccttccgaggcgttgcaggatgaacaaatcgcctcgtctggcacagaccaccagatgacggagaggaaagtctgctccagacagactacaaggtcccaagaggttgctgattctgaagacgggaccaaccagaggctctgcctggaacgacaccaccaagacaggaccacaccgtctgcttgggaacagatgtggagatctgagcacgaactggtgcccccgggcagcgggacatcctatgcccaagcccacagcatctgaagcatcttgtctttgaacgacagtctcagaccaggtgacttggggagaggcaattgtagcatttgccggaaagattggcaggtgcagggcgc

SEQ ID NO: 152627 - DNA, 478 bp, Zea Mays
caaaaaggcaacaaacaaagtgaaccctacaactatctctcagggtggtggtggtggaacacaagttatgaagcgtcttaccctgctcttacaaggttcttactagcactgcaggtggcaaacggtgaccggtgtgactgtccaacgagcgtgagtgtgattgcaaaggagtacctgttctgctcgagagaaaggtggagctttgggaaggctgactaaatatatatatgtggcacacaagtcagtaacagatagcaatgctgaataagtgtcaaaagtactcgtcctagttgctggcctagagaatgtattagcacagttggaggaagacacaaaggaggtgacaaggatctaggaacaacaaggtaacaagttggaatgaaaaaacaatcacagaggtgcacagatcaatggtgttcctgcttatgcgcactctttttctctttttttctctgattttttttcttcttcttttttt

SEQ ID NO: 152628 - DNA, 651 bp, Zea Mays
agaggtgagacgggctctggtctacccgatggcgatcgaacgcgccagatcgccccgaccgaaccggcactcaaaccctaatcccagccgcccccagggaaaccaacggccaacggccttcttctcccaccgcacaccagggcacgacggcgctctcgcgcgaaggcggtgccaccgctggcaaccatgggatcaacacccaagcgtaccaaactatctatcgatacgtgctaaatgcaactaaggacataattaactcgatgagggtctcttaccaatggatcgcacggcgtaggagcacagaccacgatggagggcggctccgcggtaacgaaaagctccggtgagcaattcttcgtcacccgatcactccccacccatgctaatgcaactcaaatattccttgatacatggcgcaccttccagaccaatcatcagccccccgagcaacggcgtgaccgaggactagcccgagcggccatggcaacctcgaccctacggtggttcactcccctgcttccccctccacgacaatggcggctgcacagcccgatcgggtggcaaagggaagagtgccctggccctcatttatatagaggagaggtcaggagagaggggaggtcgttgtgccagcaagagccgcgaacctgg

SEQ ID NO: 152629 - DNA, 712 bp, Zea Mays
taaaaatcaaggaggccacggaaaaagggagaagttggcagggcaatccctcagatgaggaaaggcatgaagacgacagctttgtgagtgtcctctgtcggaacggtgaccccgcaccagatttgccaggaacacggctccttcggtggcagaatgccggtttcgacgaggtgcaagagatcagacttggagacgacatacatgtggttaccggcaaatagaagctggctattgggatcgatgggcagaatgattgcaatagcagtactttgtctcttcctcttgggggccatcgcagtctcccaagtgaagtgggcgggctcatgaactcagaaaacagagaagcgtggaggaaaaaacaagagttagggttaggagctcaaggggatacgttagcataaatatgagttggctcgataagtcgggcgcaaaaaatgtcaggtcataactcggaaaagtggagatcacaatcatcactcgagcattacttctaaaatgccagcgagccgctaatgcacaagcaaaagcacgcaacagtggataagcaaataaccatattttttattcataaggggagttcgtcacaaacttgaaaccgactcattatgagtcggcctcttccaccacttggtcgtcacactacattacactactctactacttacactacactatactaatactactctaatctactacttcttagtactac

SEQ ID NO: 152630 - DNA, 436 bp, Zea Mays
aattgctccttggccaaacaaaaacttgcagcaggtataaacagttaaccagtgtgtaacagcgtcggagaccgaggtttcaaggagttagagggcagtacagtacaagtaagctcatgcttttgttctgctagaatgacgtgcctttatgaaccagcaatacaattttaacggttttgtggtttacacttgcatatgtcagtgtaagtagattatacaaaattttctcaaagggctataataaataaagatattgttctgattatacttcaaattacagctggcgaacacatgcaatgtcaagcacacaacaggagaacagaacacatcttagatgaaacagaagatattatgcttattaggtgcaacaaataccttagtgccacgccatatatattcattaagtggcacatgcatcatgtgattgagtgcaaca

SEQ ID NO: 152631 - DNA, 283 bp, Zea Mays
cgagacgggacgatcaagaagtcaaatgatgtgaaaacgatgtttgacggataaatagtgccataggaggtttggaattcgaattgaggcacgaaatgatatgggatggagccgagacttcacgaataggtttatataggtgaatatgagtgaagtgtgtgcttggtttgaatttaggcgaagaaaaagggatttgggcactcggctcggaaacgatcgctctaaacgggaaatttggtaaaatttaagcctgggatctcggattggcgtgaaatttggcaag

SEQ ID NO: 152632 - DNA, 400 bp, Zea Mays
cagatcccaacaaattgctgtaaaaatcccagaccacctcaatcttatccttctgatcagtgaacaccctgtcctctttcttcaaactggcaataaagtttttcttcttcctgtatctggcatggtgctggaaataagcagtattggcatccccctctttgagccatctcagaccagaacgcagccttgccctggttctctcaaaggaagacaagcccaaaatatgatgcttaagctgtctccgaagccaaatttccagtgaggacagcaatcttgaatcctgggcggattccagttgatgaataatctccctcgcaagaagaagctgacgcttgatattgcctttgtacaccagtagtgcaggtaccgaggagattatagttttctgtgatagatgcac

SEQ ID NO: 152633 - DNA, 462 bp, Zea Mays
atgccgtcggtttctggtgaacggtggagattaaaacgtgcgacggattgttatgggccgttgatctctacgtggacgggctggattggaaagggaataacgattcacgtgtgttgatcgtggctgtcgatctgtgattccatggtccctgtcccataccccttcgtgatctaatctgaactcttcgttttggatccagcgacgggatcacgaccgtgtgtaagccgcctcgccaatttgcaaatgagcccctgggattttggtaaatcaacccaccgtccgtactgagtatagaaacattacatataggtctgagttcttctgatttagtccctggattccttaaaagctcaaaccatggtccttaagctttaataattcatataaataaatctagaaaacggtttttagtagaagaataaatccagaaacttgtgtaatccatatctcctatgttttaac

SEQ ID NO: 152634 - DNA, 746 bp, Zea Mays
cacctcgtgcgtggttttctcgtctcagcaagaaattaattgatcttgggttttcaccatcaaaggctgatgtctctctcttcatacttaataagggtggtgttcagatatatatgttgatttatgtagatgacataatcattattagctcgtcgtcagctaccgtggatagactccttagtcaacttcgtaatgattttgcagtcaaagattttggccctttggcatattttttgggcattgaatgtcagcacaccacgcatgggctcatcctgtcttagcacaaatatattcatgatcttctcactcggaccaacatgctgacatccaagccggttgctacgccaatgctaccagctgataaattgcaaatccagggtggcgcaccactctctgctgaagacgcaaccagatatcggagtgccattggggccctgcagtatcttcttctcactcggccagatattgctttctcggtcaaccaggtgtgccaattcatggttgcacctactgctgatcattggatggcagtcaagcggattttgagatatctacatggaactatcaacatgggtctctgtttcaccaagagtaattcctttcttctaagtgctttttctgatgcggattgggccggaaatattgatgatcggcgtagtactgggggttatgctatttatattggacctaaccttatttcttgggggtctcgcaaacagcctactgtctcgcgatctagcactgag

SEQ ID NO: 152635 - DNA, 288 bp, Zea Mays
ttttttgaagccaaagccatctcatgcgcaatgcctagctaagcttctgaagatcagtgatgcccagaccaccaagctcctggggtcgacaaactttttgtccaagcaagcagactatgactaccgttgagctatttccttcctctccacaaaaatctcctcctgatcttatctatttctttgaaagcccacggcggaagctctacagccattagcaaatataccaacatggaggtcagaactgattgcaccagaattctcctaccttcccgagataacaggtcggcc

SEQ ID NO: 152636 - DNA, 700 bp, Zea Mays
gatgtatatgcatgtgttcttgttgtatttggtctcatatatagagtccttattccacacggtctctattctatatcggtgtatatattcgggtctagtaccctcatattgagtatagtgcaatttataacaatttgaactccatgcaccatgcttaaatatgcaacataagataaaacgtccatacaattaaagatgcagtaaaatatattgtgcagaaccaatgtcctactttataatcctactaatgatgcagtaagatatattttggattatggagtagctcactagatattcgagagctgcaccttgagtcactaatcacatagccttgtgcctgggtgtgtttcgttggccttggtcgtgtagtccttgttcgcggtaattcttgtactgtgggtgtgtggtgtgtccgcgagcctctcctctgtagcaggagtggactcttgaccaacacatgtggtttgaggtgaatacaagcgcatccaaagaagtcctcaggtgggaaaatgtgctgcatgcttctcgccgtattgctgttcctataatccagtagtctgtcacaaatccaacattttgctgttttgcagttttgtcttgtttaatttaatgcaagtataacatcagttcatccagtgccgtggttacagcatttaacatgtcaatatactgcacttccgtttgtaatatgccatttttc

SEQ ID NO: 152637 - DNA, 354 bp, Zea Mays
ctccagcaagctcaggaggtatggacattgacaaagttgacggtgtactgcaaaaacagtaagcccagatagtagatatgaatcacatccgaccttggcacacgaatgtggcagtggcacagaagaaaacaatgtacgctgtgtggtgtcttcgctacaaaacaactagcacaaaaattggtacctgacgcacttaacaagtagggttggtaggccatggattacgagcacagcacacatagccaattatagcaacattaacacgatacagcaattaaacaaattacaaatcctagccatcagcccgactttttcccccaactttacactaggcaggcagggaactcttttggc

SEQ ID NO: 152638 - DNA, 479 bp, Zea Mays
cactgtcgaagaagcggcaacatatatgcaattgcagctaagcagagccaaggaacatttaagccgcaaagggagagagacattctaacggctggtctcggtaaccttgagcatcctggtcgtgtacgaggaatctcatctaaggaaggatggaaggaaggattcggaccacaatgggaaggtctgtacaagaaacgtgatcgatacaaggaagagatggcgaattattttaaggaggaggccaagaaagagttcaaaggcctgatgtctgaaatgctatcgaatcctcctctagaattgatgcagcaattggcgatggcgagtgcgatgtctgttcaacagatgaccactccacagatacaaataattccagcagctcaaacgccggcttccaccgagggtacgaccatcccaagctctatcgcgtcaacgggaaataaggtccgctatccagttgatgacatcacaaggcctgtggc

SEQ ID NO: 152639 - DNA, 550 bp, Zea Mays
tatcgatccacaaataatataactttcataggatacagataatttggtttcaaagattagtattatgacggaagtccagtattacatttttatctcaatggtaccttaagcatttggttttgcataaatgcaaatgctataatacaattgagtacaggaatagtttgatttcaagctaatttggacataataacaacgataaggtatgcggtatatgataaattacctcaccaccatttattgggccattgtagcatggttgaagtgtgagagcacgaagtaggtacggtttccagtgtccagcaaggaaatcacttctgaccatctcaatgctgttttggtagtgctgaaattgaacatgatgggacaaagcatgaaggcattttcaacacacttatatatacataagttattctagcataatacaatgataagaaatgtttgaacctcaagcaaatttcgcaaaaatggctcttcgttgaagtaatctctgcgaacaaacactaatggtagcttgcaggccaaagcctcacttgcagttccatatcca

SEQ ID NO: 152640 - DNA, 526 bp, Zea Mays
caaaacagcaatcaataaatttcagctcctatagaattcacgaatcgccgcgttcgagcgacttgaattactctaacgctttactatttgtttgagttaagacaatcaaattagaaccaataattcgacttgcaaattttattcaagtcatttagtgcactaaaattatcacatacatttaacaaatgcattcaccacgtacatagcatcatcacacacgaccttgacttaatcgcaaaggaagcgatgactacttcggcatgtcaccacttcatcacacccattcatcgcctatgtgcgcaataattcatttcttgcgacacatgcactcaaaatcaatccattctacataaaatacacttatctcttatttatgcgcagacttaacacctttcgggataaagcgtcactataaacacactacacctaattgccttaggaacctattagttcactcgaagacatctattcaagtcataagcacaatcatacacttatttgtgaagcacaatttaaggaacgccta

SEQ ID NO: 152641 - DNA, 676 bp, Zea Mays
cactgaggtatttttttagtttttccactatttattatttctcactgttacttggcagacatgaattcaccaatattttttgtatgataggtaaatacaagtgatagccgtgttgaagtggactccaagatctagaaggttgttggggggaacacaacgcaaattctatcaaagagcttatcagcaacatgactctaaattataatgacaatcggttggtgttgcagcatgagtcatgaacttttttattctatatttagattattatatattaagtgggcatatggtaattttgttttattattcactgacttgttcctctctctgaacttaccatttgcaattactaagacaaatatgatgttctttgtagtttctttgggcaattcagatagtaaacagaaagtggctacttcttcagaagcgcaaggttgctttacaattgtattatgagaaaatatttgatgatgagaaatggaggatctggtgaacgacttcatgagtataggttcgtttcgtcgccgaaatctacttgtgcaccttattcatctggtcgttgtgcgctcttcgattcatgctccaggcgctctttcgctacaccagcttgagtatcctagaggaaatagtttgcctttgtgatagagatctacacctgaagaactagctaacattagga

SEQ ID NO: 152642 - DNA, 521 bp, Zea Mays
tgcccttgttggcgacgtccggccgaacatccgcgcacgcccagtagtccccccgtcccccgccgtcgactcgtgctaggtgaagcgtgccccgcgaggcggtgatgctcgagcgagcgaggcggtactgcaagttgctgctctgctccgccgaggtggcattcgtttgatcttggcccccgccgccgccgtagaaggtgtcggtcaggctaatgcagcagtgtgtggggctggcgttgacgctgagcatcggcgactcagggtcggcggggtccacgggctggctgacctggatctggatgtgcccgtcgctagaaggcggtgcctcaggaccgtagatctcaagcaaggcagagtacgtctggtctatgatgatcataaccatgctgtcgaccatattccgtggatgatgctagtcgccaaacagctcctggacacgcggacacgggggcgccgtcgttattgtcctcgcgctcggtgatacggtaagacgtagggtaaacgcgaactgagacattgat

SEQ ID NO: 152643 - DNA, 588 bp, Zea Mays
acatggagtgatgagtgaagcacaagatgcgtcccgaataccagtaccgctcacaacaacaaaaaaaaaaaaaaaaaaaaactcacacgctggcaagcggcgacgcgagccttcaagattaaactagtcaaaacacggcaggtagctgggatggaaacatccgtcccagaaaaggggatggtgagtggctacagaccgaacgtattgtattgtccacaaaaggctcgtggcaggttgagttgcaaaacgaggcagcccccctccgatgcagcgacggaataagagacgagtgtctcatcacggaagtatttgggttcagtaggccaattctgagtcgctcacctaaacattcacacagatccaacaggtattcttttccgacccatggaatccatggcagataggcatcagaaggtttcctacgcaagtattctttctacaaagggcaaagatctacaacatgcttctgtggttgcggtaaaccatgctgatcatgcatgtgattcagcgatttggtggggtcctcctctagtagtatgatacagtgggacagcatgagaagtgcaacagcagcacatccatagctag

SEQ ID NO: 152644 - DNA, 620 bp, Zea Mays
caaaaatcggaaattctcccattcttatagaacatgtgatggccgatgcagttgatcgttacagtcgttcgttgttgaaatccttctcgggtagacaagatggcccacgcagtgcttttgagttaccccccagcagatcatgatctatgcaggtccagaaatgggggttcttgtctcgaatcatgagatcactggtgccagtgaccgatgttctggttaactcaacatggaatttagatgtgaaaaatgcagtatcatagatccataggccattcattgggggaaagtagccagcctcttgcagatgtagacatctagctgacctgaacgccaccaaccccggtgtcccttctcctgatagactcgcttgtcagcagccacagtgacgcttgatggctcgctcacatagaagtaggtaaggtgcgcctgccactagcatttaccgaactgactgacgtgttttaatgtgccagatctaatagctagttggcaaaaatttaagtaaaattagttgattttagcttagttgaacgagctaattaactaatgggtagttaagggtgcagctaatagttagctagactactagttagaggtgtttagatgtctccaatcaaaag

SEQ ID NO: 152645 - DNA, 703 bp, Zea Mays
caatcgtaggaccctgtcacccatctctacacatcgccaacttgcctaaacgacgaggggcccaagtacgacctcgagctatccaagaaagagcacacgaagcatgggttctgggggcttctggctcagaaagccaaggtcatgctcgacgagaatggcaccccacgcattcaggtaacaactctgaaaccaaaaggagaaggaagagccatcatcaggcgcgttgacgtgatccttttgtcagttctaatatccatggaaatttccagacctctgaatctcgctggtcctacgatcgggtccgaagctcggagagccagagccccacggcacggagaggaacgctggaaggcaggctagacatcggagggaagatcaaggacgttcttgaggtgggttcaccgatactttccactgcttcaggctctctgcgcgcgcaccacatctgctaataaattttctcgcctgatgaatgagatgagatctcgtttccttgcagaaggagggcctggcggtggccgacaacacaatgtcaggcaacagccacggcggtgtcgtcgctgctgcccggaagctgcacatcaggaggaaggcgtgcagcatggacttccgggccgcaaacctgaccccggccagccccagcatgtcgccgatgctggccgacatggaatcgcctcagctcaaggcctctcgcgacgtaagg

SEQ ID NO: 152646 - DNA, 481 bp, Zea Mays
cggagagggaagaggttactggcgctagcaattcgtggcgttcaccgtggcaagctcaccggcgatgaacaggtgggttacggtgacacactgcacgcggttaaagggttagggcgtgtcgcgatcacggcaggcggcgtatgcctcgacgacggccgctgcgccacgtcgccggcgcaagtgggcacgacatagggcggaacagtggcttcgagctcatccgcggtaaagatcatttcaccacgaggcgttatccgggcaccagtgagcacgaatcacctcaccggcatgaatccaggtgcaggggtcgccggcggcaaagtgtactgcagctgcgatctcgttcagtccactgtaccatcagagttcctatcaggatgcctgacaaagctgtttgcagagcccagattttgaatttccatgtgataactcgctaatccacctttagcaaggttgttctcctacaatctagctttaattt

SEQ ID NO: 152647 - DNA, 1419 bp, Zea Mays
ggaggcagtgagaagacacctagaggatggcttttgccagtgaataaagtactcaaaataggagtacctgggaaatctgggtttagcagttttataagatctgaagatggtatccccaagggtttctgcattgacatatttgaggaagttattagtaaactgccctacaaagttcccaagcactatgtggagtttggaaatggaaaaggagaaagtaatggaacttatgacgaactcgtctacaaagtttatcttaaggtatgtatggtctatttttcattttttcttgcattttattccttgttattgttacaagcattttattccttgttacaatcaaactggaggtgttaaaaaactgggcaggtatgctcagttgttacatgatcagaaatgatctgaacttggcaatttgttgtccttgttgctcttgagtgcacagaattagtagcatgtgattagtctacagattgtcgatgtcaacatctaaggtagcttacagatggaaaccagtggttttatggatggaaaccactgcaaaaggggcagaacctgcatgagccgtcgctaatactattaagtattaagcttctaatttaaatagcatatagcacttgtaatatgtagctggcttgcctgtttaataggagtgacatcagtgacagtgacaatattttattgtccccaaatgtttagcactttattctgtgcaaaatggtttaggtttctcctaagtctaacgaccagttctatgttaattgctggcaggaatttgatgcggtagtaggtgacataacaattttagccaaccgttctctatatgtggactacactctcccttatactgagtccggggtacgcatgctggttccagtttgggaccggagacagaagactgcatggacattcctagaacctttaacagctgatctatggttacgaactggagccttcattgtcttcaccggctttgtagtttggtttatcgagcacagaacaaatcaggaattcagaggaccgccagccactcaaattggatcactcttctacttctccttctcaacatttgtatttgctcatagggagaggattgtgaacaacttgtcaagaattacagtagtagtttggctttttgtggtgctaatattgcagcagagttatactgcaagcttaagctcaattctcactgtagaacagcttcaaccaacagtcaccaatttagatgaagttatcaggcgaggggattatgttggctacctcagtgattctttcatgcctgagcttttgaaaaggttgaaaattaatgaaacaaaaatgatcgctttcagctctcctgaggagtacaatgacgccctatcaactagaaaagttgccgtcattgttgatgaaataccatatctcaaagtgtttctctcaaag

SEQ ID NO: 152648 - DNA, 311 bp, Zea Mays
cacgcggctagccagacaaccagcctccagcacctccctctccctatgagcggagacaggcccaaatgccctatcgtagtatcgccctccgctgtcccttccatggatgtgcgcttgtgattggagagacggagaccggcaagccactacggctgcggaaggcgccgacgagggccaaccttctccggtcatctccttccccaaggccccaagctaggtcgagcctcaagcgccaggcgcgccaccgccgcggagcagccaagccttcaggtgcaacgccgccgccctcaactctaggctcccaggggcgc

SEQ ID NO: 152649 - DNA, 312 bp, Zea Mays
gcaaaatcgaagtcttctccaaaagactatccatgcaaaagtcgcctaagggtgcagccggactagcacaacaagtgcgcaaaatcgaagtctccctcaaaagactatccgtgcaaaaaccgactacaggtgcagccggaccaacataataaacgtgctagatcaagtgcacaagtcccccacgggcacggccggatcagcgaatgcacacagcctcatcatacaaatcatcataccaattaaatttacacacatacagcgagggcatcacaccttacattggttcaaccttcgggatgatacccatctccc

SEQ ID NO: 152650 - DNA, 439 bp, Zea Mays
taacaatatcatgtagatgtatagtctggtctttctagccacagttctgcttcgctaaatgttaatcattctttgacatttcttagtcacctaggcataaataatgtgtggtaggtttagctttgtggcccaccaattcatgcatggcaatataacaattgtaggctgatatttattagcttaggtgtggaccgaaccatctaaaagcgtaaatatgaatcacatttatctagtgcatgctggcttaccctccggtgggtgggcatgttgggcacaacaagatgggaccatatcctggaattctctgatggcaacaaggatataaatgaccttttcccctgatattggttgaccattaagtcagatcactgcagcatatctatgactgagcagaactttggctgcattctctggtagccttgtccttcccagttctctt

SEQ ID NO: 152651 - DNA, 834 bp, Zea Mays
cttccccaaccaaatcagctgtcggtttagccgtgttcaggatccagtggaccacgtccacgcaagcagcctgcttgtgaagacaagcgtcggataaagcgcgtaggagagggagggagaggcggcctcggccttcgcagctgcttctctggctctggctccacccgctcccgcgctgccgcgcgcttttccagtcgccgggacggcgctcgcgtcggcttgcgctcgatggccctccctagctcacgcgcccggccccagccagcctactccgcctccgcggttcctccccgaccaccgcggtgccagtcccacgcgctgcgcactctttttctccgccctcttcttcttcttcctcctcccttgcagtccaaagaaccgcactagtttatgacacacaaaaaaactctccagtccatcgacaacttttccattgtgttccatgtgggtcataaattggtactagttttttttgttctggccttccagcagtgcagagcccaccagcgtcatcgtcctgtctagtttatcgttgagaatactgtaccggtctgtcccgtcatcgtgggtgcgtgcgtgcgtacccgcttgtacctactgtgcactgcactggacgtctctctctctccctctacccattttatttcccctcctcctccaagagcttttgcttttcacgggaaaaaaaggtgaagggacaaggaacagtgcaggtgcgcgcgcactgctggtcgcaattcacaaactgcgcgcgtggtgctcatcgtgctgcggccccagttgtccgtcgacccccccgcgcgcctgccgagagggccggtgccgcatttttcg

SEQ ID NO: 152652 - DNA, 572 bp, Zea Mays
ctgacctccctgttgtcacgctaatcacgccaaaatcgtccgttacgttcctcgactcgtttttgcgcttaggaaaatcgtgatgtgccagagcaatgaacagtagcaacatgcatcgacgaaagaatttgaaatgataggattcgatatatatatatcctgactgagatatatatagagcatctcacttctcgtgtgtcaggatatataggtgtgatttaattctattattactaactgctatgaatggtagtattacggaatcagacgtgctttctgctggtgacagactgagtaggtgttgtcttgttcctgcatatgtgcgtaggtgctgaacgtccatatgtattcacgagctcaaagtcaaaccacacatagtatactacgccttgtctttcattcagtatactaattgtccatatgtattcacgagctagctacgtaagtaccgccacgatcgacgtgtatataacatacgtatccttttgcgatgatatttttctgtatatatacggctatattaattgtccgccctgtagtttgcacatccagcgagtccaaactaatccggc

SEQ ID NO: 152653 - DNA, 609 bp, Zea Mays
aaacccaatcaaagatggactgtcagactgcctgaagtctgaaatacagattaacagtgttgtgacatgaactttgagctcgattttgatttggatccagtgactttttgtgagtacacgttatagcaaagatatagatggattgtagcactacaactttgctatagatcactggttgtgttaccacttgaaaatcagagaaatggcggcttaaacttgctcggtcaggctgtctgaatagaactactgatggtacagtaaaggttaactgaagaagatcctatccctctgcccatcgccggtgaccgtcgccgtcgattaccgctcgccgtgattcgtgcacccgtggacatcagataagcatcacccagtaaaaatcttcacccgccgtgagctggccaccactccgacgaccccccccacctctgctttgcggctggcacgataagctcaccgtcgaccgccgcttcccggcccgtgcgccgcgtggcctagccgttttacagcactgccgtgacaccttatgactgtcccatcgtcgccggggaggttgccacggcggtggacacgaattcactgcgccagtgttttcttctacctccgaccgcc

SEQ ID NO: 152654 - DNA, 690 bp, Zea Mays
ccccctctctcgatctcttttccagatccgtaaaaaaaaactctcccgatacagagaggatccagcagcaacatttttctgcaacctctattcgcatcttctctctcgctggtacacgggtccagccagctacagaccatgtgtctgtgtctcacactcccactccgccgtccttgtctaatttctaggattcccatcgatcgatccatccgacgtgttaaagtagagtagtagactggctccttgttggtttcgagtacttttttttcctattcgatggcaggcgcgacatgagcgtggcgccgtggcggcgaccggcgtggtggtcaggtcagacgacggacgaacgcactggacggcccacatcggcagtgttttgcttgccctcgctgcgaccatgcccatgtctgcagcagagcacgcgattatttgctcctggaagtgggatctgtcgcgcccaggttcacaccgcacgcacgcatctgcaactctgcaagcgtgacgacgacgacgagccggcgaaccggggcggtagtgagtactgttagctgttggccacttgacgcgggcggtacaaaggccaatcaactttttttcctttctttcttctactacatgttttaagactctataataataatacttttccatttttttcaaacaaaaataataataattccaacagtccgt

SEQ ID NO: 152655 - DNA, 312 bp, Zea Mays
gtggaattcttattgcttgtgacgaagactattttgatattgctccaattacttacacttcaatctactcaatatcagttagggtcagttccagattggaggacgtggtgtgggacttaacggctgtttatggcccccagcaggagaatgaaaaaattatctttctatctgaactgtgtaccatctctaacctgatgagacctgaatggttgattttaggagacttcaacatgataaggagagtgagggaaaaaaacaagggagcaatcaacaaaagagtaatgaggaagttcaaccaaactattgacgctc

SEQ ID NO: 152656 - DNA, 734 bp, Zea Mays
gtccggtgtgcccatctcgcgttttaaaaaatcgcccccagcccgaccgagccaggggctctgtctcatttctctgccagcacccgcgtcctcaagctctctggcggttcccagcgcccgccgtcgacctcttcactccggcggcctccatctccggcggcctccatctccggcgacctgcgcaccccttctgctccccctcggtgagcagtcctctgtcctccctctctctttctctcttctctgtcagtgaggcagtaatcaccacccttttgcaaatcttctaatttctgtgaaatccgatgagtccagttggtgaaatgagttcatgtatctctagtgtgtatccctacctgtttttagctccttcgggagggcattcccacctcaaatggccatttccctaaaaccctaaatccccgcacaccaagtgttcgatgaaatgcccaaaccagccaaacttgctccaattgaacccaaatttttcaggcaccttcaccacacttccagtaacctacttgccaaatttcacgccaatccgagaccccaggcttaaatttaaccaaaattctcgttttgcacgatcgtttccgagccgagtgcccaaaaccctatttcttcgcctaaattcaaaccaagcacacacttcactcatattgacctatataaacctattcgtgaagtatcggctcaatcccatatcgttttgtgcctcaatttgcattccaatcatc

SEQ ID NO: 152657 - DNA, 474 bp, Zea Mays
gcgaagactatccgtgcagaagtcgcctaagggtgcaaccggactagcataacaagtgcgaaaaaaccgaagtctaccgcgaagactatccacgcagaagtcgcccaagggtgcagccggactagcacaacaagtgcgaaaaaaacgaagtctaccgcgaagactatccacgcagaagtcgcctaagggtgcagccggactagcacaacaagtgcgaagaaacggaagtctaccacgaagactatccgcgcagaagtcgcccaagggtgcagccggaccagcacaacaagtgcgaagaaaccgaagtctaccgcgtagactattcgtgcagaagccacctaaaggtgcagccggactagcacaacaaaagcaaaaacgacaacaccaaaccgtccgcgccaagaccgactatatgcgcaccagcacagcataacaaaacacaccagaccaagtacacaacgccttcgcaagcat

SEQ ID NO: 152658 - DNA, 650 bp, Zea Mays
gagcgctcccttgaatcggtcgactagtgcttgccctgtccatcgtaagaaccgagagtgagaggcagttttcggccgccgttgtagatcctcgtcggtggctggtgtcgggcttcgattgagccatcgtggttatccccggggacacaccgaaaggagtccgtgctgtcgccaagccaactcggtgggcgaaacctcgccaatttctcgccgtgatttacaagccgccgcgaatccgcctctcgtcgtgagcagcttcaaccagcgcctagtcaccggtgagatagcttccaactggctcgctttatccttacgaacgtgtaggaccttttaattagggtttagtgcagtagcgggcccgattggccatcaccggcgtcgcgtgtttgtcgacggtgggggtgtcgtcgggggaggtgagtcgctgggagaggaaagaagaagaacgaccgtggaccgttgatctgtccaggaacggtgaggattaggttttgagtgatctcttcgcctattcgatctgagccagagatcggaaaatggacggacagcattagattaggctattttaaatctggaccgtcgaccgtcgatcggacggtggtcgcgtcgtaccggctcgcccgtagatagatctaatgtgggtcgtaggg

SEQ ID NO: 152659 - DNA, 561 bp, Zea Mays
gcagttgcctactactgttgatcgtgctattgtgttagcctagactcagtatgatattttggagcaggcaaaagttaaggggcagcgtcagccattcattaacaaacagaccatgttaggatttaagggagaagggaagcagagtgatctgtccaaagaaagacaggtgagggagtttcgaagactaaatggattgtgctacgcatgtggtgaaaagtttgagccgggacatattactaaatgcactaaacgagggcctgcccaactcaatgttgttattactgagaatgtggagatggttttaacagatgagttgttgcaacagcttgagcaggaggatgttcaacaggggttgtgctaccaggtttcaacacatgctttatctggtactattgggttgcaaaatatgagaattcgagcagtagtgcagaagcaaatcatggtaatgttggttgattctggtagttccactaccttcattagtgaacatatggttcagaagttggcattacctacacattcgtgttcaccagtaactgtgaaggtggcaaatggagcttc

SEQ ID NO: 152660 - DNA, 2073 bp, Zea Mays
ggctgacctatgagaaaataatcacaatcacaactttgaattccagcacatagaaaagaggttaacaagggaaatggggtcaaatcgctgttggtagcatcaggggccaacaacaacaacaataaacagccacttctttcctcccttacaaaaagggagcgaggtagctaggaagagcacaacgtacagctgccctgcaaaaacccaggaactgaactgtgctgagggaaaggaaaggaaaggcaaggcaagaggatgaacaccgacgacctgggctcgccgagggaactcaccggcctgcagcggaggagggcgctgtaccaaccggagctgcctccatgtcttcttcaggtttatttgcgttttttgcctgccagcatcttcttagtttctccttcacctgctgcatctgccgtccaagcatgcatgcatgcatcctgcacctttggtttctcgatttgtgtcgtgtcgtggatgtttccaagagttgttccattcttatgatgttgtcgatgtaacaaaaacacatgctcctttttcaccgccatatatatgaaaagcgaaaaaagagagaaagaaaccgctcgattttggacgcacgagacctggaaatttcgtcagctcgctgaacaggaaatgaagacaacgggtgtattgcaaaaacaagaagctcaccaaaagattcttgtggtatatcaatccttagagatggtggtaatggagatccttgcaaaacatggttggagttctaatgccagattaaaggacgcttgattcgagaacaagttctttttaagaatgttacttttttttaataatggatgttttattaattttttaactgtaatgtcaaactataaaaggctggaacattttttgtttccattataaaaaaatgtaggctccactcctatactcgtcttccttctctagtaatagcttgcacaggggtggcggacccagtgcttctagagttctagaggaagcagagacttgttgattcataatatagacagaagcttcttcctctcacaagtcacaaacccttcttttttttccattcaacaggattcaaagttttgaaaaatgtgttccaaccacatggcgtcacaacaggatatttgacgctgatggttttagcatcgtctaacgtttccgaaacttgtgatgggatatgaccagggaacgagggtggagtttggggacccaacgacaaccattgattcgaaatgcgcagacatcgtcgcacaggcattcccgcacaccttcggtcagaggctggtgcgctttctggagcctcacccggacacggtggtctctggttcttctgacgcacaagaacgcccaccagttaggttgggcgtggtgttctctggaagacagtcacctggcgtggcgggcataatgtcatatggggtactttcgacgctatgaaagctcggaatccgcacagcgttctgcttgggtttctaggtgagcgtatctccatggagcaacttccagggttcaagcatttgcatcagccaatatacaacatgttagtagaattttaaactactcttggttcttgtctatggcacattctgttcttgtctatggcacagttacagttacagggtacatacttcctgtttcctcacgaatccattcactgtttatatcagatatttctatggacccgttaaaccactgtttaactagtttatagtacaaatataatcatatactcgtccgatctaatttataattcgttttacttttttatccgatatttagttggttcgtcttattaaaaaaatcataattattattaatttttaccgtttagcatataatatattttaagtgtggttctgaatttttcattttttgcaaaaaaaaaagaataagacaagacggtggtattttggcaaaaaaaagttaaatggattataaattgggaagaggagagtaccattttcttaatgcaatgacatattgataagagagagcgactttgttttttctttttttgtatttctactgtataggtggcacagaaggcctgttcgcaaagaagacgttggaaatcac

SEQ ID NO: 152661 - DNA, 1005 bp, Zea Mays
ctgagccagaatcgtctcaagtcggaggcaagctgtacctgaccgaagaacaatggctggagcgctacaagaagaaggagactgagagcagtcgtgctgccggcggtcctagcagtcgcgtcaggcgacgtggaccaaaaggcaaagggcgaggcgccaaggcggatgacacctgcaactattgcggcaaaatcgaccactgggcgagggaatgccgggggaggaagaaggaccagcaggctcagcaaagtcagcaggcacatgtggcccaagacaacgagtcgtctcttcttcttgcccatgttgcagatgtcgccatcaactcctcgccaaagctgaaccaggcacaagcaccgagcgatgcagcggtgatcagcaactcgtcgaacaccacggcagcgcgctcaccacaggagtgtgttcatctgatggagcagaaggtctttgccacgctcgacgaaaaggaggagcgagatccacgacgctggatctttgacacgggggcgtccaaccacatgacagggtgccgcgacgccttctccgacttcgacatgggcgtccctgggaccgtccgttttggtaacggatcaacggtgtgcatcaaggggcgcgacaccgtgctcttcgagtgcaagaacggcgaacactgcaccctctccaacaccttcttcatcccgcatctcacggccaacattgtgagctgtgggcggttggatgaggagaaccaggagatcttgatcaaagccggcgtgatgcgcatccacgacgaacaccaccgccttcttgccaagatccgacgggggccggggcgactgtacgtgctcgacctcaccattgcacgtccgatctgcctagccgctcatgcgggagaggacgcgtggcgctggcacgcgcgttttgggcacaccaacttcggcgcgctccgcaagatgggcagggagggacttgtccgtggtctccccatcctgaacgaggcagaacgactctgcgacgcctgcatcatcg

SEQ ID NO: 152662 - DNA, 619 bp, Zea Mays
ggaagaagcgacaactccacatagttatcttttaactagtacgggattggaattgatacaattgggggttttatatgaattttgatgagtatatgacaaatggcaggtgtgcagcatggttggagaacagaacaagggagacatgattcgataaggtgaggtggtgtcatgcatcaccgtcttttttttgacagtcaatagggaggaagatgctcatagagcttgttctcgaatccgcgtgtgggctaaaaatgcacatatacacgtttttgtttaaagaaatttggttgggtttagggaagatttgagaaagcaacaaagaacagaaaggaagcaaaatgggatgaagaaatgtcctggttcaaggtggagatcagtaagtgccagactcaaaagtttaatgccatcaatgatgccaaagatccataaacacagcagcgggttgaacaagttcaaaatgaaagtttatgtgctgccaggctgcttcgttaaaggtaggagcagtggagggagctcataattctattaatagaaaataaggataagaaaacagttctaacagacatgttgtaaattagataaagaacaactttgatggtattaaaaagtagtgcattgt

SEQ ID NO: 152663 - DNA, 275 bp, Zea Mays
gatttcctcaatatgggcggtgacttggtgacagcttcctttccttggtccagacaagaccaactccactaacacttcctctcctgacaaggatactaacttcacagtcctcttgtcacagctaagacttgcttgatatttggttagccaattcatccctaggatgacatctatggtcgcatcccggttacccattactattagatcaatggggaactctatcccccctatttgaactcttgcactggggcaaaatctatctgtttgggttctcc

SEQ ID NO: 152664 - DNA, 326 bp, Zea Mays
ttattattgtcaccttgcggttctgtatgaattgcaatgtgaagtagtaggctctctatgtgatgctagatgtctaggtagactttcgtgaattgtggtgctcggaccgtcgagatgaaggttaagtcggtcgatgccgattaagtagttaaaatgattaatagaataatcatggggttaaaactagaaactagtgttctcgcacccgtttgggatgttgtagcccaattgtgcatggttatgatcgcgggtaaaaattagtagtgctcatgtggtgtctaagctaaaatgcgaactagtgggtgaaaagcaccttgatatacata

SEQ ID NO: 152665 - DNA, 333 bp, Zea Mays
ctgtgcaacatggttgtctgcatgatccttaaaatttcaagagttccagagtgttatgaaaaaaatgaggtggcgctgagctgattattgcacagtgcaaattcaaagatatatcactgatgggcactgatgaggaaaatcaaagttgttgctttgcttgcttttaaagtggtgatggaagataactacttttgcttatgaggtggtgaccagctgagtatttagtacttggacaatgtaaattcaaagatatatcattgataggcactgatgagaaaatcaaagatgctttgtttctccacatgagcattgtgatccagtttgttgcactct

SEQ ID NO: 152666 - DNA, 541 bp, Zea Mays
gtgggtgcgggatacaggcgcgagatgaagaaaggttgttggcgagggagaatacgtccgctgtgtgaaggacatatatttacgccctctgtgttgcactcctatatgaattttgtttaaatttataaaataccaactctcttgaaagctatattttagccttaactcctatatttaaaaataggacctagtttaacctctcacttggagttgctctaagtgaaagaaaccggatatgccacaaggaaagattttggtgcagaaggcaaacaaacctctttccgagcaataatcggagcgggcgatgaaagcggcgatacaggaggcgaaaaggatggcacagagaagatgaatgaaagtgatggaaaacgaagagaatgagagcacgacgacgcaaagcgaccgggagagggacgacgcggatggagtaagaaagaagaaagacgtggtggaaggagtgcggatagccggccaagcatatcaaacagaagtaactagggcaacaactaatatgcactcagatcttatgtgcaaacgtgac

SEQ ID NO: 152667 - DNA, 683 bp, Zea Mays
atacctagcacaattatgatagtatggacgtacatgtacatatgtatggggctcgtgtgcgcacatgcatatatgcatctgcatatggaatgcagcgagactgagggaagaacaggcgggggggaaagaggaaaacaaaatctgcacattgtaaattgaagaccagggtggtacagaatgcataatctattgtccgaagagaatgcggcgaggttttctacttttgcttttccttggcagacatcagacagatcacacatgcctgcatttcagtccccagaatcgtagaccagagaagaaccatctttgtaggttttatttagcccagaaactcatcaccgtccagctaaaaaaccaaggcaaactcagttgaagaattggtattctgctccaaaaaaggaaagttgtgtttaatttgctgctcagctatgtttccttcatcacttaggagcctttagttagctgctcaaacaaaatctgcaaaatcctaggactttgtagaagtattctaaacatacttccacttaaaaatagtgtatatctaatttgatcccaaaaaggtagcacactagacattaaaactcagtccgcacgatgccaagaaagcacaaactgcaattgataggaagtcatcaaacaaatccataatgatcgtttgccatcggtagacatcctcaaaaaat

SEQ ID NO: 152668 - DNA, 391 bp, Zea Mays
tgggctcctgattttatgctgtagtccccttgaagccttctatcagttagactttcaaacttctaagagttgcaagattatgctcgcctcttggcctgttttggtccagaggtcactggtgaggtagccttgacgaggaccgtgtggagaacagaacagacaggtcgcagcttgcctgagagcccccgtagggacgggtggttttgtgtcctctttttgtatttgaaaaaatggaatcagtttattgaggacggtgctttctgggtgagtttagaaatgtaatttgtttgaacaatattagctctatgcagtgcatgcgaatcgatggttggaaccatacgaattgatggctggaaccaaatgtaatatatgttcttgtgcttactcggcc

SEQ ID NO: 152669 - DNA, 351 bp, Zea Mays
cgcaaacagaacactagttagtgaaccagagctaataaaaatagaatctgacagccctgagatgtggatttcatcttttcatttttatagttacgatcttacccaccttactttgtagctgccaacagctttttcagtaaagtactgacacggggggtgtttgggtggtggatggatgatggaagctcatctacggtacgatttccaatttccataccggggaagaagagaacaaaaagttaggactgtgatcctccaaaaaattgacgtcaaggacctactgtaaaatttcctcacggcatggcaatgtttgtgtatagtgttcggagttgtcatgacccgctataggcc

SEQ ID NO: 152670 - DNA, 476 bp, Zea Mays
cacgtgtgttctttccttgatcacccgaaaattttgcgaattcgggtatcctggttccctgtgggtatggatggtgatcaaatcggctgtcataaggtttccgatatgattgccccccagggaccatgcttactccgagcttatctcggaacgccccggcaatttcttcccttactatatcaatggcagtcggtgcgagaccaccggctctctggtcaaacataggtggggttggttggatattagcatattgtcttttcccccattggtttgaactacgtggtgcattgccacttgccctatatggttcatatgtttgatcgttcctttccggccttctcggtggggccggaaagttttcctgggctctagatctcgaattaatgggttgatgcattgtatagtgagatgggaagtgctgctcggacgagtgaggattcaggtaacaatcctcctcaaaaaggtcatgtgcggac

SEQ ID NO: 152671 - DNA, 1005 bp, Zea Mays
gtgacccgtatgtgtgagcagcagccagtgcaaggcagggcttgtccagcagaagaggcgcagagtggtgacaaggaagaccgccaacatggaagatgaaaggtggcagcgctcgtaacagaaaagaggatgcgccacatgtctccaaccgcaacacttgccgcaagtgtgtcaagacgggccattgatctcaggattgtaaaaacactgcacgacagccttgtagtaggtagattggtagcatgctggtgtggtcaagtagtaagtgtgcttgtaattggtgtacaaaacatcttgtaaaagtgaagaccatgtatatatgcaagcatgtggaccagctgcatccttagctcaaggagcagcattaactagtgttcatcagttcatgtgtatgtgctccgatctcccctttacttctacctccagttgtgtgagcggtgaattaacaaagccagccaacaagtggggcaagaacccttaccacacacacacacacacacacatcttaatatcttatacatcaatactatagcaaatatattggcatactttcattggaaatatcaataaaagtatatctgttgaattgtttgttttatttaaattgatggaacaatcaatactactaatcactcacttcagtataggaattttcttcagtgttgatcattggtgatatattgtgattggccatctggggagtttctgttccaactatttcattttattctaaaaggctgaatagctatcaactttgcaccaattccattcagaacagctaaaataaacttctttaaagacaataactaatcccatgccatactaaactggcttataacaggtaaatttaattggaaaatactctattatagcatataaaagcgaactttttgagaaaaggtcccagtttgtctttggttaactttctgtcaaacttacatgtgacaactaaactagaagccaatactttggttacttttgattacatagacttcatgataaaat

SEQ ID NO: 152672 - DNA, 463 bp, Zea Mays
tatctaccttgaacttggtcttttacttctttacacaatctttgaccatgttggtgatgctacacaagcattcaacctccatattcataaaatgatgaataatgatcattcaaaggtgtagccaatgattctacctctgatcgttctcatagcataaagtttatccatcatcctccattgaatgatatgatacacttgatgtcatcatgtggccttgttgatttaataaatcgcaaatttgcttgctcatcaccgttgccttggtccattagcgccaagctctctactcatgtctcaatggcatgtgattcattgctcacaagcctctagcttaccctttacattcacaacttagttcgtcatagacaagtcatatctcttgatcttctccatgtatccacataaaaccatgtcatttctcatatgtaatgagctcctttatcacactagttgagcatttgta

SEQ ID NO: 152673 - DNA, 796 bp, Zea Mays
agcagactatccgtatacgcttcttcgtctagccagacatccgagagcatcctcaatacaggcagcagcatcatataccagtactgtatctgtatcatccacttgttggcatctacccaccagttggcaatgcaagtaacactacgcccagcctgattgcataggggggcttgtcctaatctatcaatttttaatgcgggggagctgcttcaccaggatcccacagtgtatgctgtgttgcttgtgggcgctcacataactgataatgtgcttgtggatgggcaaaatcgcgcgttcaccaattgggttgaacctgtgggattgggaatcgggatggtggcttgggcacatcagtacatatcaatcagtattgaccttgtccgaataatgatattcccaaattgcacacaaaagtttcttagtacatattaatcagtattgaccttagacctattattattaagcatacagtaaaagaaaatgtctgtgtttttcgcgttctgtatgagaaaccaatttaggagtaggccattaattggaaccttgttgttttgccgaactttggaagcagacaatggtttggtcacatctggcggcatggccggtttgttagtttcttggtcgtaggagggggcataggatgctctgttgcctcctactaccttctcccctaccattttctttctctccgaatggtttggttcacgggaagcccaagggcgaggtggagtgggggacgcaggacagctcaagaacacaaaccttggggcaagcgtacaaaacatgccaccccgac

SEQ ID NO: 152674 - DNA, 1035 bp, Zea Mays
ctttccccctctccctctctcctaccaggcggccctcgtcgcgcccggctccacgcgcgcccctgcccctgcccctttccttgtcgcagctgccgcgtcgccctgtcctccgatcactccgatcgcgccccaacaggatccggccgagccggcctctccccctgcgttggcatcgacctcatccacctccctgtcgaaccctaccccggcggtcgcatccctctaccctggcttcccttccagcgcactctccctgcccgacgcggccctctttcgctctcagctgttggcatagggttttccccatgtcccgctcgacatgccagttggggaccccatgcgtgaccgtccaccgccgctgactgtctacagctagccctctgccatcacatcatccctgcgtgctcctttggatgacgccgccaccctcctcgtcgccacctgggccgccgttacagcgtctcgctagcgtgcccaggacgccgcccgtgatcttgagcaggagcagacggttgttgacgccatagagcgccagtacgccgagacccaccgtcgtctcatcggctctcacacgtccgctcgacactacgctgacaccttcgagcttgcgccctcgcccgccctagcctcgactcttcgcgcctctcttcatgctcaggcggcggccctcaccagcatccgggcaaccgtcaccgacgttctcgcgccagactccactcagtaccctcggtggcgtgactaggtcctgcaaaccccgcgccgctaagccctcatcgaccacatcctttttccggtctctgacccaacggaggatttgctcctgatggatgaggtggggctttcttggatccatggcaccctcactgtcgaactccaagacatcattcgtgtgccggacgatacggctcatcagatctggggtgcccttgaggctcagttcctcggcaaccgccagactcagattctgtacctcgagaccgccttccgccagcttgctcagggtgatctctctatggacaagtactcccttcacat

SEQ ID NO: 152675 - DNA, 434 bp, Zea Mays
aattaattaccaagtacacctacaattaagaagatagatagaacataaatatgtattcaaaagggatgcatctatattgttgtcccatcatgcaagagaaattaattttctttgttacctgaaactggacgtacattaaaatatgtatctttgcctaagaagcagcaccttgtggtgataagtgaatgcatggtgaccgttttctatttaacatagttactaaatgtttgaagataagtatgttttattatttgcaatagggatggtgtcccaaaacatgtcacggtggttgttttcatatcaatagtgagcgccaactaagccggcgcactacgacatccagtaaggttggagtcaggcagaagtatgtaaaaatacttgctccttcgaccgcagttggttgtggcctaaaattcagaggttgtctcctggcc

SEQ ID NO: 152676 - DNA, 548 bp, Zea Mays
tatctttggactcaagagaattcaaatcaatttcctccacagccccaatagttgagccaagctcacagatagcttggtagtttaaaagttcttcaggaacattttcagccaccacccaagtagtatggagtctggatttagctttagcttgagaggaccaaggtataacactaattttgaccccagatattttcagttttagttcaggaaagttaacaacctcctccaatctttcctgtgaggggaactgcattaaaaatccagatggacatttggtggctttccaagttcttccccagggaaagtggaaactaaaatcttgttccagatcctcacatctaatctctcccacaatgactttcaccaaacctaaaaaactttttctaggtttcttggcaacatttttagcaaactgagaggcatagaaacctaatccatcagccgccataccaacaataggcatggtaggtttactttgtttaggccaaacacatttagcagtgacatgagtttcttttctacaaatctcgcaccaaagtggtttgaaa

SEQ ID NO: 152677 - DNA, 1135 bp, Zea Mays
gtcggtgtcccttgcatcgaaggtaaggggaatgtgtgaccactttgtttggaccactgggtcagtgagagcgacatgattcacccttcggtagtgatctttcttctgtcgtttgttttcaaactctatgctggatcctccggtgatcatatgtattaccccctaaaaggtgggttggagaactcttcttcttgttttggcggcggagggggttgctggaaaggtttgtggttttgttgtggtagcggagggggtggcgactgtgctaatctctcttggtcatgtatccttggaaattgagcaggaatttgtcacagagggttttccatgagtcgaccgatagcggtggtagccttgtgtaccacgtgaggattgggccttcgagaccaatgatgaatgactttgccaaggtggaatcctctccccatgaagatgccatggcaacttggtagctcattatgtactgggttggatctgtattgttattgtactttgggtaggtgcctgctcaatagttttgcggccatggggaggcctagagttgtgctgatagggggctttgctcgtcaaggtactttatccttggaaagcaatttgcatgtgggctagcctgtggtgataaacatgattagctgctccaattgcttgctggtgaggggggtcttcgcgttacatgtcggtgatttcctgctctagtgcccttgatttttcctcctcgtccatgatcagttgcctcactctggcctgcatattggttccttgtcttttggatgcaaggatctctctacttctgaaggttgctgttttttatgcgaagggcccgtagcttgagctggtcttcggctaagattcctaggtcttctccctcttgcaagatatctccatcttctagggctaggagatgtgccgagggcgcaaatcctggtggtgggtcgtcataagggaggtcttcagagctacatgtatggacactttcctgtggtgtgggttggtcttcggctgagggggcttgttgttggttgcctccgtctcgttttcaactgtggcgggtaaggtgtcatctgcgagggctgctttgcctttcttttcgacgaggactacttttgtggcttcatcgagggagggcctggctctg

SEQ ID NO: 152678 - DNA, 505 bp, Zea Mays
gatccgtccgatcgcgatcctacgttccacgctctcatgggtcgagtcgcttcgagacttcaatcgtgaccgccggattacgaatcaatggtcaccgtgatttttcaccaccccgacggcgcacggctgacgccgcccgcggacacggcggagctctctccggcgaatcatgcccgagagcccgcacacccacaagctctaatcgaattggttctacgcgaagagggaagtatggggaacgagacgatgtgctactcaccccaaatctggtgtcgaggagatcgggtcgcgccgctcggcggaccagcagcgacggtgaggaattgacgccggcctggtgacaccaatgcaccccaactttaggcacgatcccccatagtggcgtggagctcccagcggcgacccagtgctgggatggctagcgtttcgcgaggccgagtcacacggcaatggcggcgcgaaaatcctcctcccaccgagcgccttcctatctgctaggtttctg

SEQ ID NO: 152679 - DNA, 981 bp, Zea Mays
aatcgctaagtgttgtcataaataattgcgctaaaattgggttataagaatgcagtggtcacgtggtgtgtttgggtgtgacaagtagattaggagtgtggggtctgtcgaagcactgtgatgtcaaacatgtatatcgaagtgcattgtggtggtaattgcgttaagttaatcggtagtgtctcgagtgcatgccacagcatggttgtatgcgagacaaggtaacataaggtgtgctcgacacgaatgttcggtcgacataagtaggaaattgtgtttgcttaattagagaggtggtgacatgccgaattagtcatcgctttctcaatatttataagtcgaatcgagtcgatgcgtattttgtgtttattaaattatgcttcgcatataatgtgtgattgtgctcacgggttcgagtagacacttcaagtaaatcaagtagatttgtgatacaagtgtgtaatggagttagttgttttaggacaattattgaaatacgcggttcgtaggataaacatgtatgcgttcatgatttgggaagtaaatgcgtggtgactgcgaattggagatttgtgatttacgattcatatgagttggtcggtgtgcgaatatacttgtgaatctgtgggtttataaaaatgttgtagtatatgttgtgtctcggattgcggcaataaaaggcaagttgacgtgtacgttatctagcggcgatgtcgttgctctagttaaccgaatggttagataacttggttaagctcgtaatcgcagcgaatggcttgttgtggtctaaatgtgtatggttatgggcacgggtaaaaagtagtagtgctcatgtggggtctaattgaaaccccaaatggttgggtgattatcggggagaatgcgtcgttgattggttgtagtagttttagtgcactaaatgacttgaataaaatttgcaagttgacttgttggtcctcatttgattgttttaactctaac

SEQ ID NO: 152680 - DNA, 448 bp, Zea Mays
actccttaccgaagatttgctcctgctccgccaatggttacatgttgccaaaaccatcgaagtctggtaagagtagcatgatttctattgcatagagcggccccgtttggacagcacattttagaggaaccatacagaaattggaccaattttgcgtaaaagcatagtaggaattaggaaactttccaaagcagaccccgcactatcccgtccccgtgcccggtgcccccctgttcccatccgctgcaacggcaagcacgcagattcgcagacacgatggatctcccgaccccgtctgtcgccgtccctgggatgctcagacctgttatcccggccgccggcaaggatgcgacgtgaagccactccagtcctctccctactcccgctgctcccctcctatcgtcgctctggagacagatctgctcgccgtccccggtcctccttgttg

SEQ ID NO: 152681 - DNA, 382 bp, Zea Mays
gctgggtcgcttgcgggttcaatcagccacccgacgtggatcttggggagagtcgttcttgctagtggttaaaccggcagctgagctgtgacactggtggctacacacaactttgtcggcccatcaactcaactcgatgtcttcaacgccttcctccactgcaatgcaacctccacgaacaaaactacagtcagctgacttcgtcgacacaaattgccctgacgatgtttgcctcctctccagatcactttatggcctccggcaagcaccacgacacgagcgtttcgtcatccatgtgacatctctcgacttcaggcagtcgagggccgattcgtcgctcttcatataccaccgcaacggcgaaatgacgtatcttcctccc

SEQ ID NO: 152682 - DNA, 279 bp, Zea Mays
ttgacaagggtgtcgaaggtttgaagaggaagagaattgttagtattttaaacagacaagctgccagactggttaaggaggatgagaggattgcaaagaagacaaaatccgctcctgagccaaaggcgacagtctcaaaaaagaggaatcatgagagaaagcctgaagtgccggagctgaaggttgctgaggcaagagaagaaactccaacgccctctgctgctgaagtagcagaaattctaaaggtaatgactgaatccttgccatccagctgctaag

SEQ ID NO: 152683 - DNA, 341 bp, Zea Mays
gcgcgagtgcgagtttgccaccttgttggcatccacatgaacgtttggtttgagcaccatcaccaccaagtgccaacaatacttaacatttgatgatgcacaggagcactgactgcacaggtgtaaaagcagccttacttttataccaacaacaacaaacacgattcaccatatataccaacaaattttatttaacagcgcatggtactttctccatctcagaaagaatacaattctagcatcatgtgctaatatcttaactttaaccaattatagattaaaaaatatcaatgtttatgatatcaaataaccacagttagattaatcacgaaatatatttt

SEQ ID NO: 152684 - DNA, 578 bp, Zea Mays
cttttaggaatttctaaaggcatttatactattcattctgtttactctgtttgatttatgtggtgttccttttcggccctaacattattctaccagctttggcagagggtatctcactatctccagtagattaatatactgtactcaagagtaaactttccctttaccataaagttaccgtcataccaaggcatgccagtatgtctcacaatttattatttcgtgactctgagagtattttctcttaagagcacatgctatgcaaggtggttaggcatgagtgcttaaagagagaatgttattacatcattaagcacaagtatagaagttaatcccttaaatgcaaactagttcttaaatgggcttaactacattgttagcacaccttaagcatcgcctagtacatatgatatggcaaaaaataaaaaacgaaactatttttcttagataagcacctccaccagtccactgtacatgcccttatagaaccttggtttgctcaagatagcataaattggcgtatccatcttcagtttcacatgctaatgagaaagcgtacaaataggttcatcttttcc

SEQ ID NO: 152685 - DNA, 597 bp, Zea Mays
ttgattggcacagaccatctcatgaagccttgcagccaatcgattggcaaggattttagtgatgagcttagcaacactatgaaccaaacttataggcctaaaatccttaacctgggcagcaccctcctttttagggatcagagtgatgtatgctgaattgagtttgccaaagttgttgaattttctgccccaaactgctgacaccactttcatgaaatcatgtttgattatgtgccaacagactctgtagaatcgtccagtaaaaccatcaggtccaggtgccttttcagggggcagacttacaatagtgtcccatacctctttttcagaaaaaggtgcatccaactcagagagatcatgactgggaatatcaagagcatctaaatcaatgattctatctctgcccacatttgtaccaatcaggttgaagaagaaatgatccactgctgcagccttctcatcatgcctagttaaggtgacatccccttccctctgagaggttacaatgttcttccttttacggtgtctggcatacaaatggaatagcttagagtttgcatctccatccttaggactgggcacaatcataccgagaac

SEQ ID NO: 152686 - DNA, 1269 bp, Zea Mays
atttgctcgtcatgaaagcaatagagatagcacataataatgaattgattgattagagagacctctgtgtatatgggagaggagatctcatggcttatgaaaacagaaccaaacaagatctccccgtatctctctgacccatatataagggccgacctgctatacatggcacgtgcccataccttatacacacacacacacacaccatatattgcagtcgaacatatacaaggtccatgctgctatacttggcagttggcacgtacccataccatatatcacacaccatatatggcagtctaacactgagcattattaccctgactttttatatactttacattggggcaaactatttacagacaaacaatgcttcattttgcaagtattacctccgtaaaattagaaaattatccccacaaactttacatgtatagaatgaatgccagcttgatttatggattgagctggcaatatgttgatctgcttttcttttcctggtgacaatggttcttgtaaaaattccttccagtataaatagaattggggcttcccattctcaaaactggtgatatgctgtttgagttaatttataaattactatagtaaacatgatttattttttcatgttcatgttttatggcacttattagactatgtgctttcatatggaaattagaaacactgctttttgctacaaattcgtgggtttgctaaatgtttgcacatgtttaactttgaaattgtaaattattatgtacatatttaaacattcctccaactcactggtgtcatgcaattattgagaagaacaatgataaatgagttctatttgattgtttgttataatattattagtgtcttctagaggttagaagagtgctgtttatatgcagggaatgggggagccgatgaacaactataatgctttggttgaagcaatcggagtgtttactggatctccttttcagctttcacctaagagaattactgtatctactgtaagcatacttggataatcacttttgcatgtgaaatcacgttctcagaatttttgaagcactatgttttctcactagtgacatcttataaactgtatgctgtccagttgctcctggtacacttctgaatgacctaatgaatttctgctgtgataaaccacacaatggctaatacgtcaagaactgtttgttcaattgtgcaaatattgcttgataaattgtgtagcttgccagatgtatattctttggatgaaccgttctatcccac

SEQ ID NO: 152687 - DNA, 340 bp, Zea Mays
tgccggtacacccctctcacctgaagatgctactcgctatcgcagtgtggtcgattctcttcagtatctttcgcatacaaggcctgatatttctttctcggtgaaccgtgtgtgccaatttctctccaaacctaccactgaacactggtcggtggttaaaaggattttgaggtatcttcacgaaacgattgatatgagcttatgcttcaacaaatctggtgcccctttgcttagtgcattctcggatgcggattgggccggtgatgcggatgatagaagaagtacaggcggttttgctgtattttttggtggcaatcttatttcctggagttcacgcaag

SEQ ID NO: 152688 - DNA, 651 bp, Zea Mays
cttagtcatgctagctgcaagatgttaagctgttaattactcatgttagtaggaaatactttggatgcacgcactccaccaattaaaatgcaaatctgatcagtaattcggtttgcaatgtacactatccaacttacttagattaccatgaaagtatctgaagatgcctgattctctctgatctatatattccattttgtaacatcagtgtatatggaatatatctatagccagaacagttaggtttgcctaaaaaaagtcacatggtgtaacactggagtcatccacatgtacagtgacataaaggtcaccacctcttttttcccatttaccatgaaattaaacagcaatcgatgcttcgaattggaaattctttcaatctcttactgtgaatgaagacagagaatacacacaacagctatctctacctggtggctggtgaaggcaatctccacagcttgtctattgtattcagagagtctcgcggatcatcatcatcagcatgtaataaatgtaattacgtgcatgggaaattctagtcattcttgttatgaaacaagcgagaacaatcaagaaatcgtcagcgagccaacatcttcactaagcacagcagacaagagaaattaaccgcataccttgtgatgctggcac

SEQ ID NO: 152689 - DNA, 292 bp, Zea Mays
agttgatcctgaaaaagtacaagaagtgataaattggaaacctcctaccacagtacgacagatccgtagttttctgggattggcagggtattatcggtgatttattccggatttctccaggattgccaagccaatgactgaattgttgaagaaaggagtcaagtattaatggacccaaaaatgtgaggatgcttttcatacacttaggcaacatttgaccacagcacccgtgctagctcagcctgacaacaccaaaccctttgaggtttattgcgatgcttccggtactgga

SEQ ID NO: 152690 - DNA, 452 bp, Zea Mays
cggagctgccagcattgggtctcctttttttctacataataaaatagtcaaagatattgagtccaggtgtttctttaagaactcgattctgtctgtgggaagcttctttgctgtgttcattggaattagatccttgtatctgaattgacattccatattattatcttaagtgccttttctttttgtggattcagtgagcattcctgtatcaaaccatccatctgtctttccaacttaacacttaactttttttggaatacgacggcgccttgttgtccttggtggactcgtcgtcggcttcaatgccacgacgaagcaatccagcgacaaaccccacggaatcgtattctccttggtcttcggtgacggattcggcccgattgcttctccttcctttgcgcccgctcggagccgttgtcaaatgccctcatttatctgcctctgtgagctgg

SEQ ID NO: 152691 - DNA, 355 bp, Zea Mays
caccgcgtccgctcggaaaagtgctgtcgccggtgattcccttacgcactcgcgcgcgtatccgtacgtgtggtcaggtgcgttcgccgggaacccgtgaagctgctggagtcctcaattcgaactgcggagcctcggagcgacttggattgctcgccgcagttcgatctccgccgcgggaccacttcacgacgtggccaggtgtccctgcttcgccgccgtcggtaagaactccccataccgattcgcccatgcacctacatcgtgtagcatcagtttgatttgggaatagtgcgctgggggcttgaatcgcgcgctcgtcggcgatggcgccgccgtgttccgtctggtgcgc

SEQ ID NO: 152692 - DNA, 507 bp, Zea Mays
cgaatttctcctcattgattgtcctacacctccctgcccgtagagagccacgcacgcacaaaggggggaggagaggacaggaggccaagcagcagcggcagagacgcaggcgccgcaatgcagggctccaggaccaagtaagcgtccatcacacccttctcttctgtgctggttcttgatcactgcgactctgcgaggtggatccccgcgggcagcggcggtggatccttcaccgtctgattctgtcggtggttccgtttattggttggaacgcagatctggctccgctgaggcgaagggcaacggcaagccggacaaggagaagaagggtggcggcggcacgccgccaactcccaaggacagcagaccgcgcaagccggctgtgcccaaggcgagcgccgccagccatggcacgacgcgcgcggccgacaagtcccccgggtcggggtcggaccgcaaggcgcccacgcccaaggccgcctcccgcctcgccacgcctcccgaggt

SEQ ID NO: 152693 - DNA, 895 bp, Zea Mays
tgaagttaagaaatattcaagatatatgttgcggagtgcatattgttttgagttaaaatttaaatatgaagtagggactataatttaggggttgtttggtacctttgctagctactgtttggatgtctagatagcctaccttgattcctgcgctagcgagcttttctttgctgcttcaattgcttgtttggattggaggagattgaaggggattggagggtattgagggggaaatgaactaatttccccttctaaccaaacaagccccaagcaagcccaattggctctccttagccgggaagcattcagttactcacgctggtgaagcaaggcaacctggttcgggaaccaagcatgcccttaattggttgtctggcaaggacattgatctatgcattgttaagattttccttgctagtgtggtgagcaaatttggctcgtctggacgggcaagatccttgtggcttgtgcgccttaagaaatgggaggtggcttgtgccagcccctcaatacctcaaccaactacttgtgtttatgggtgttcacctaagaatcttgcatcaagacaagggtgttgttccatgaatgcctacacattatgactatcattgtacgcttgaaatctttgttagataaaaaggacataaccagtgctggcaaggacatgatggggtttgaggaaggaataaccgaggcaagtcttacccctacattttgtggagaggttgtgttgaaccaaggaccttttggcttagtggaaagacctctcaccaccatggttattaaagcgtcgttaaaacatcgtttaaacgctaaaacgtgattatcatgtagaacgcccgaaagttttgaccaaatctcatagaacatccatgaaatttgtttaaacgttcgt

SEQ ID NO: 152694 - DNA, 833 bp, Zea Mays
actaatcgcgactagtcgcgattagtcggccttatcgcctggtagagcacgattagcatggacgactcgattagggcgactaggttacgactaatcgtcctagtcggcgactaatcgcgattagtcggccgactaggtgccatgtccgactagcttgtgccaagtttgggcctgtaaaaaaaagtgtcctctgttatatcattatatgggctggcggcccactgtctccactctccagtccacagtagaaacaagctctattgtctgccactgtgccgccgcacagtagaaagttagaaaccctaaaacagtaaaaccctaagccgccgcctctgccccctctcacactctgctccattgctgccctgcggccctgccctctactccggtggtcctcagctccggtggccctgccctctgccctttattgcgcttgcctctgctcagctccggtggccctgccctctgccctctgttgcactcgcctctgctcactgctcagctccagcgctcgcctctgctcactgctctgctccggcaatcgtctgcaccaatatgttctgaactctgttcagagttcagtgttcagtgctcacttcactagtctgttctgaacttaaccgaaatgagcacctctacagatggtaatctctgtgttcttttggttcttcaattgttcatttggtgctgcaccttttgagttgttattcacactacagatgagactaggaggcggcgtaataatgttcaagttatctattagtggaaacatccttgattttgattgcttgtattgctgtcctgctagacagctatagtgtactgctgtcgtg

SEQ ID NO: 152695 - DNA, 351 bp, Zea Mays
catcaaactggccactgcaggaggggaaatgtatgcaatggccggtgaagaagagagcagatacccttgtcttggcagagataacatggatgctgtcttccggcagcaaggaagtaggaagtggcagacatgaggattagcagtaggaagaaatgaagttcaggtcctggaggcacctaaacgaattgatcaactaattactgtcacatatgaaactgcctaatcctaacaattgcaaacaagatgcaaattccaaggtcaggaattaggatggtatcttcatgctttgctggctacctatatagtatttctcaaaataaaatcatctatcgtttttttaaaaaggcccat

SEQ ID NO: 152696 - DNA, 745 bp, Zea Mays
agagcgttccccgaggtactaccgaactccttctctaaggtatccccaaattccttgagaagatcatcaaggcttgctagggatatatcctcggcgtcggaccaatcatctactctggggggaggtggggctggaggggttttcttcttcttcttctctgtttggcatcctcggttggtggtgttcttctggattttcttcttgggggcgagcttccttagcttcttgtcatagtccatctttaaggtctgataggcctcacgggtgttggcttcctcgccttctgctatgtcgagactctcctggagggatgccttctcttgcttaagctctttgacctgctgctctaggctttccactcgggagtttaggtgggtgcagtgggaggagagctcatcgtagtggttgtcgagggtgtggaggtatccagccatgtagacgatagtggggtcatcttctgtgggatctagagcctggagtcttttcctccaggtgggggtgtttttgttgctgggtgggaaatatcggaggggggtttcagagatctctcggctatagttttggcacagttgtttaagggcttttcgggcaacgccctgacaggtgtctgggaagcggtgcccaatgaaggtaatttggaagggagggtggtttgggtagttccggctttctcccaagtagactgccatagagcacttttctattccattttcgcggtactccttccagacatattcgggcttct

SEQ ID NO: 152697 - DNA, 349 bp, Zea Mays
ttcttgtctctcaacagattgctcttgtttctcattctccatctcaggttcatcattattttcaacaagattcacgaagataatcaagggtatagctaccctcaattttagtttcaactttatgttcttcctcttgttctttcaccatcttctcatcaatcaccacttgtttcatctttttatttttgcttttcttactcataaagcaagtgtggtgggaagatccactgttgtagaggtggactctttggctcaaagaagatccaagtcttacagagaagcaacaacatcgaaagagtcggcttcaccagcactagaatctagcctaatcgataaggtagctttgttg

SEQ ID NO: 152698 - DNA, 375 bp, Zea Mays
cagaaaagcagatcgagtgcaaagtgcactgcaaatcttaaaaatcaagtgcatcaggtatagtccaacacacagagctgtttggaccgcatcaaaacaaacagagaacacccataggaaacagatccacgcatagttacctccaaactcgatcccaaaatacagataattacatctcgtacaagcattcacatagggggaatcgagttaggaggtatggatcagatgcacattgttagctagaatggtcctgtagttatctcacagcaggcgggaggggctgcagggccgctcctctagccgagcgcgactgcaaggccgctctagccgagcgccactggccaagcgccggtgctccctgcggtccgatgtggc

SEQ ID NO: 152699 - DNA, 882 bp, Zea Mays
aacggtttggaggacgggagacagagagatcacagcggcagcatgcaattaagaatccaagaacagcagacgctaggggggttgtggggaggcaacgtggatgctcacacagtgagcagagctgctaggccaggcgcggccgggcggctgcagcgagcggtggcttgagctttataacgggcggaggagtggaggacacggatggatggatggatacaggaagcaaggagcaaccccgcgggtggggtccgagaaaaggcgggcggcgaaggaagaggaagagaaggcagcagggtaagtggtggttggagacagcacaggaagaggacgatggcggaggtgggggacaatttactgacaataattgccgggaggcgagctgctgtccactgctcactcgactcctttgttgtacctagcgatggcagtaaacatatatacggtgtgcgtgcgtgatgcctggtcggggatgcatggtagggcggagggagaaggaactcggagagacagcaagcggatggaatggatggacgtgggcgtcgcaaaagattcagacagggaagggggatagaaaaggaaggccgaaggagaagcagcagctaccactctcgtcgtcggcgacgaagcagcagctagcaagaggagggagaggacggatcggctgaggcacctcttcgccttcggtggggtgctgcctttcgtttccgttgctttgcttgctccctcagcagcctaggactaggagtttcttgcagggctgggactgggttgcaactttgcaagcaagcaagtaaaggaagctcagggacgggacctttgtaggacccaagtgcagtgcagggctcctcgcttcaacttttgcagcgggaggtggaggcaagg

SEQ ID NO: 152700 - DNA, 1165 bp, Zea Mays
taaagaagaaatacattctcttgatcatgaaatggcagtaaggatagaattttttcattggttgagtttgtgcctgaaggctgacagtggatctatttggcatatttgtgctgccatggtgctttcatcagtctaatattatttttccctttacttcagggttgttatattcaaaatggagctaacttttcttgaagcatatgcagttatgcacatgtaaaatgagagcagtggatgattaggagataactagggaacctatacttcttgtgtttcctttttccttgcagaagaggtggttctgatctgtgcaatacttacccgaagatgaactacacagactgatttgcacacaatggttcccttttttcttttggggaataaactgtctccatacaacccaaagatgaactactattttttgttttatttttgacttttgaggccactcattcaaatgaattacgcatactgatttgcacaaagaatgatgtgtgcaaggcatctacatgttatctattttaagaccacttatcccattttgactatttttacgtttatgttctttttttcaattttttgtctgcatataggttgagtgtcagtcatcttgttcttccttatgtttgtccatgtccttattctacttcagttcaatgcttttctatagtgttgtttgctgttttatataaaataagaaggcccttacagtaaactaaaccaacctaggaggaactatatacattgcaaaaagaggactttagctaatgggggtgcacgcccatatctcccaccaactgagctaggctcaaatcctgtttttgtaacatataagattgatttagtagagtgctgatgaggtctggcatctactacattgtaatggtatctgaatggaaccaaagcattttaaagcatgaatccatatagttactttagatgatatagttgacttaataacttataatctgtagctatggtacattctcaactgtcttctttccaagacatttagaatggtaaagtggtatacagattttacagggtatctgttaatgaaaatctgcagttgtgagtgcatcacaactgtgtatatatagcatatgttgctctttgccaaatatcagggaaagtggaaacatctcaaaatttagtgataattaag

SEQ ID NO: 152701 - DNA, 314 bp, Zea Mays
agtttgtgtggtgactggtgactatagcttcttctgacaagagtatgcagtttccttacatgtatctgtataagccaaatgtgatattattccctcagaaagctcattccagtctcttccctgaaaaaaatctcctgtcttctgtaaagtcttactatttccatgtgttgctgcccaaacccccctgagttaaatcttgggcgctattatactttaatacatgttgggagcctgatattcagtatttggggcatctttcatcatcccataaacacccttgcatcaaactgctgtctcttgctccatttgttcta

SEQ ID NO: 152702 - DNA, 504 bp, Zea Mays
tgcgcactaaacttatacgcaaccactaacatatgtgcaagcaactggtcacgaaatgtctggctgttacggctggatgcaccctaccctacacatgttcgactaaagggattgtgtatcaatttgggatctttgggggtagcgggtacctggtagcaaggagataatcatcgttgtcgaaatactgcaaactcttaaggtagtgtttgattctgtagtattgtgggacggagccgctacacttctaatttgttgttgtttggattggtttcgtgtatctaaaataggaaaattatccataaatgttgaaccatctggctccaccaaaatatctagaacagagccacttcatcccaaccggctccggaagcaaacaatacctaattggatggtttgcttccagatccataacaatcattattatggtcacaatattctcaaaagcaatttcaccaagaatcatcagtggactggtagcaaggagataatagctttcctatgccc

SEQ ID NO: 152703 - DNA, 298 bp, Zea Mays
ttcgcatttgtctcaacgggtgcgaggggtaaggaagctagttgagccgactaggatccgtgtatgtagtttaaacgtagggtccctcacaagtaagctaagagttagttgatgcagcgagcaggaggcgtgttaatatcctatgtgtccagaagacaaaatggaaggggcaaaaagcgaaggaggtggagaacactggtttcaagctttggtactcaggaacagtggcaaacaaaattggagtaggtatcctgattgataagagcctcaaggatggagtggtggatgtcaaaaggca

SEQ ID NO: 152704 - DNA, 814 bp, Zea Mays
gttatacttggatttacttcatgaaacgctgctcggaattgccttctatttacaagtccttcaatcgcatggttcacacctagttttctgctactattaaaatttttcgttcagattctggtggtgaattcctatatgataattttcaccagatattgaccatagagggtactctagctcaactttcttgtcctggtgctcatgcccaaaatggtgttgctgaacgcaaacaccgtcatattattgagagtgctcgtactcttttgatatcttcttttgtgccttcacacttttggagtgaagttgtttccactgccgtgtatctcattaatagacaacctttatctaaactttctggtaaatcatcgggtgaagttctttttgggacttctccacgatatgatcatctttgtgtgtttggatgtatatgctatgtcttgttaccaccacgtgagcggactaaattgactgctcaatctgtagagtgtgtattccttggatacagtcctgaacacaaaggctatcgttgttatgatccatctactcgtcatattcggatttctagagatgtgagtttcaatgaaaatcgccccttctttcacaaccagtctactcactccacctattatcccacagaatctacttctttcatgtgtcttccttccattcctgcatctgaaccatcaccttctacatccacatctgatgttctcattcccataacaccaccttccacctccacgtcatccacctcttcctcttccaaaccacctatcatccaaacctacattcgtcgttcccgctctatccctac

SEQ ID NO: 152705 - DNA, 719 bp, Zea Mays
atgcaagatgatcttcccagctacccttccaagacagaacacaagcacgcaacataccttccagggtttggatcgttcgctccgactgaccatcagtctgaggatgaaaagcgacactaagagaaagcttggtgcctaatgcactgtgaagactctcccagaatttggatacaaatttggagtctcgatcagaaacaatggacttaggtaccccatgaagcctgattacttccttcatatacaaggggaccaaatctgaagctgaatttgtggtcttcatgggaataaaatgcgcagacttagtcaagcgatccactaccacccatatagcatctctgcctcgaggagaacgaggtaaacccaccacaaaatccatggtgatatgctcccatttccactccggaatttccaatggcttcagtaaacctgcaggccgcttatgctcggccttcacgcgctgacatacttcagaggcggccacatacttagaaacgtcaaccttcatccgcttccaccagaagttttgcttcagatctcggtacatcttggtttcgccagggtgaacggtgtaaggtgttttatgagcttctctcaatatatccatcttcacctctgatttctgaggcacacaaaggcgacccctgaaacgaaccaaatcattctcatcgatggagaactcccggtgtttaccatcgccaaccctctttcgagcttcctgc

SEQ ID NO: 152706 - DNA, 275 bp, Zea Mays
caagtatttttgaatagttcccactcgatgtagcacaccatcaatatacaagagttcatggatgacaatcctaaaaattgaataacatttcaatcaacaactggatactatttcaatcaataacttgatactatttcaatcaacacttcagcaggatactacttcaatcaacactacaagtctacaagtgaggatattacttcaatcaatactaagatgcggtagctcgtggatgtctatacaatgatgagaggttatccacaatccaccaggag

SEQ ID NO: 152707 - DNA, 377 bp, Zea Mays
cttctccacctccgaccgccgcacgtctcgtccaaattcgcggccaccgcctgttctccctataaattgagcccgtgactagctccgcaaggtcatcagctacccagccaccaagaattgctagcaattgatcaccagtgtgcccgaattccttgttttccccaaaactgtttccgccaccgtcgaaccaagctcgccacggccagccctttccaggtcagttcatccctcactctccttcgtttgagcactcttgtcgctctgggatgcttactgtgtcaccaattcgcactgggagtccaccaatcgtcgggaacacgatcaagtgtccgtagtctccgcggttctcgtggacagaagagagtagatcaccattt

SEQ ID NO: 152708 - DNA, 461 bp, Zea Mays
gttggggtaatccttgtgtcccttcaaagtagtcttgaagcgcttgattacaagctccatttcttcctcattaaagccgaccacctcaacttgtgccaccttattgggaagcgcctccttgtcggccgctacgttgagtgcaacgggttgcggctcgtagtgaggaagaggttcgttggcaatgtcgttggcataccttgcttcttttaccatcatgtgcccgcttacaaacttaccaagaatttctttgggtgacattttggtatgcctggggttttcacgaataagattaacaagatgaggatcaataacaataaatgaccttaacatgaggtgcacgacatcatgatctgtccatcttgtgcttccataactttagattttgtttactagggtcttgagcctgttgtatgtttagttggctcctcactcctcttcatggcaaacctctctagctcgcc

SEQ ID NO: 152709 - DNA, 455 bp, Zea Mays
atctgatatatgtgtgctttctacagatgtctgagaataggcgcagaggtgcaaggcgtgctcagccagaacagcaggcaccccacgaagatgcaactcagcagcagttgccaccaccacccctgatgaccattgagtagatgttcctgatgcagacccaagcagtccaagcaattggttagaccttagcagcgatgcagcaggtgcagcagcagccacccccacctcaaccttaggtgcaagtccagatgccacaggtgcctagagacaagtgggcaaaattcatgaggggccatctccctgtctttgcccactctgctgatcccatggacgccgaagattggctacgtaccgtggaacgtgagttgcacactgcccagtgcaacgatcgtgagaaggtgttgtatggtcctcgacagctaaggggagcagtacagtcttggtgggaatcttac

SEQ ID NO: 152710 - DNA, 1037 bp, Zea Mays
atcgatttgagaataacagtgggacacatgactaaacacattatgaaacccaattcaatcatgacatcccttaattagccgagagctgggtttggtgggaagctttgtattcttggaggaaacaactgttgatctctgagatactccgtctcaatttagcttgagaacctatctgcaccagtggaagaagttcctttctttttatcctcaatctacttcctaaggtccacagagagatgcctacaacgagaatactcacacaactctctactctgttcgccatgacactctaggaagtcattggcactagctagtttccacaagcccctggatccacgtaaggaggcagatgattcttgtttggtgattgaggataaccaccagaatcagggccagaacctggggcacacactactccaacgccctgctttgacgctttcgaccgtatagaataggctctgttgagattgtggggtgatgcttgcatacaagcatcagctcgtttagagcacaaaagcaaataggagtattctaagttaaaagcactttattactcccataatcttgattcagatgcttatatgtcatctagtagcctactccaacttgcttggatctgtaagtctttgttgttgttgctgctgctgctatcatctagttattgcagacttaaggatatccagaagtgaattatcaactatgggatgtactaggaacctgaggcttgtttctagatgcatgtttcatcactagtggcttcttgatattaataacacaactgtgttgtgcaacctagtgaggtatttggtttgacgtaagtcatcagtcaccacccctgatccctttgtgagttgtgaccatttctagctccaacgctgactagaaccatggtcgaagaggcaagatgatgccgggcacctggctctgcactctgctatgggagaggatgtttgaaagaggccacagctgcagctgcagcctgcagtcgtgggtacacacagattatgcaacctgcatcttgctagcatattgatgaa

SEQ ID NO: 152711 - DNA, 509 bp, Zea Mays
ccctttcctcgccattactcgctcactagtgaagtttggcaccgattcgtcccccgcgcgctgtgaccgtgtacccgcatgccaccgtcttcaccgagccatcccatcgccaccactgtgccgccattatcgtcgtcgttgtgtgcctcgtcggtgcccaccagcctccgctcctccccttccccaagcgcctataaaagggccgccctgagcccatcatctccttgcaccggcctcggccactctcctccccctcccctgagcttaatcgagccagcacaccgccaccttcctctgctccggtgagttctccctcccctctctagtagcctaaggtccaattgagttagctcacaaacttcaccacctctccacggacacgaagcaccactttcgccttccacatcacacccagtggccacaccgcgcgaccacaccatcgcggagcctaccacctcctcatggtcagtccctcccagagcgccaccagccaaattggcctcgccgcc

SEQ ID NO: 152712 - DNA, 603 bp, Zea Mays
gtcgtataggacgtagagagagagatggagagttgtatagaacgtatagagagggagagtcgtatagaacgtagagagagagatggagagtcgtatagaacgtatagagagggagagagggggagtcgtataggacgtagagagagagatggagagtcgtatagaacgtatagagagggagagagggagagtcgtacggatattatcgagttgtgtacccctttcatcagattggaacaaaagattagaacatatatacaatatcatactaagttcttacataatacgccgtccatcatactaagttcttatatataatatcatactaagattagaacatatatagtaatttatacttttctactcctcgtcgtctatcagtgtcgtccaatcgatctcctcatcttcatcgtcggagatgttggtgatgacgagcacggagacaacctcgcgtgcagtcgtcggagccgaggagcccacctcatggtggtgagtagacgggcctgcggcggcgacacgttgacggcagcgattcgagagaactctgcatgcgcgcatgaaaaaccggcgtacgacgacatgatgattgagcctcgaccggcg

SEQ ID NO: 152713 - DNA, 337 bp, Zea Mays
ctcccgatctaatcttagctgatggattgagatccaacggtccaaccgttttcttcctcccctggctaccagagcggcggcacacagtgccccacggcggtgagcccaccggaggcatgactgccggcgctataaggcactaacccatcatctaaatgttgcttcgcgatgtagattggtcatagaagatgcctaggaggttcttaccgacgaaggagctacggtggggttggtccacgggaggaggcggatctgtggcggcggaactactccgtcgaggaatccccgtgttcccgggcgtcggtcccgcgcggcgaagctacaacacacatccccg

SEQ ID NO: 152714 - DNA, 419 bp, Zea Mays
tgctattagtgggtaaaaaaacatctatctcagtaacttctatatgcatatggatgtgcaattaattagtgaaattaccaatatcgtttcttgatggttgggacttgctggctcttcttctcctaacactgcagaaaacagctatggccccaattatcaccccagcacagaggcatcctagcaacgcttcgtatcctgttgataaattttgaggagctcaaagcttgaaagatcaagtagaaaggtatgtgcaagagaagtaaaataaaccaacctctctgcatcccctttagcttatggcacttaccggaagaacacaagaatgcttctcgctcaccttgttgttgttctaataatgaagacaagtatgtctccatggacaatctataaccagtcgatgttaccaatgaagcgtgtag

SEQ ID NO: 152715 - DNA, 569 bp, Zea Mays
gcgggttgcaaagttgataggaagagcacctccggttgttgtcaatttcttgggaggtctcttgtttcatggtcttctaagaagcaaaattccgttgctctctaccgccgaggcggaatatatatcggccgacaattgttgtgctcaattattatggatgaaacaaactctattggattatgggatcattttcaagaatgtgtctctcatgtgtgataatgagagtgcggtaaaattggctacaaatccggtccaacactcaagaacgaagcatattgatatacgacatcacttcttgagagatcatgttggaaagggagatattactatatattcgattggcacggatgatcaattgaccgatatattctgggagcctggatgatctggaagttcagaaacagagtggtgtttgacgggtcccccccaatatcactacaatcttagaggccactgctgaggaaagggagaaatggatggttgcaggagctaagggtccttcctttttagctgctcccagtaccaatgcctgagataagttgtatcttttagttgtgtatgaattgttt

SEQ ID NO: 152716 - DNA, 503 bp, Zea Mays
cttaggtgatgattacccacattgaaatgacttaaaaagatcacgaataacttaaatttgttaagtcattcaaaggtgggtgatcatcacctagcgcacgcgcacacagagatatctggatatctgaggatattgcataagaaataattgatgtgtttagtgtagtttacctgccagacattgatcatgatctatacctaatatatcatatgattgtcatgattgcactgctcatacccttttttgtgtagttagggcctggaatatagttggcttttaaggatagtgagattgaagtcgttgggggtgatggatcaactaaaaggtatttcacagcgctgtcaaatgcactgagcattgtatatgtgagctaccatcaggagtttgttgtgtcaaaagaatcaactactattgctgaatgctggacaaaatctattttatttgtcatctattgaggcttctccaccttaatcatttccttttaccacctcacctcatcctca

SEQ ID NO: 152717 - DNA, 475 bp, Zea Mays
aatcaaaccgttggtgtcatcggaaagccgaaagcagtttcatctgccgccggaagggatcgacaagtaggcagtttctgtccgttgcaccctgttgctcggcgatctatccatttgaaaaaaaagagcctcttcctttcacaagtgtcatgaatcaaataacaatctatttgtcaccgcaggacatacggctgcatttgtacgtcaagtaggcaaacaaacatatatgacaccaaataaacagtgctattacgctaatggcatcatattttatgacgcatctgataatattaatttattatcataaacattcatatcgttttatttaaattcgatcgaacctaaagcaattcaagacagtcaactctaaaaaatgatttatatacgaacgaacggatggacaattataccagttatatataaattcattggtgaaggtgttcatggagccgaagcaaaaaaaaaaaaaaaaaaa

SEQ ID NO: 152718 - DNA, 331 bp, Zea Mays
ggaaattccagggcgagggagaggcccgcgccatggcctgatgtggaccccgcggcgtgttggtttggactgtgcacatggatcctggatcgatgaaccctttacgaatgatcttttagtttgatccgtatttgttccgatcctagggacaaaatccaaatcgcacaggctagaatcacccgaattggccataagccgctctgaagatccaatgacatcccggccagcaacagattcttcaacaggatcaaccttcacggagtcaccaagaataggagagtctgatctctcccaccatcggctacccttgggataacccaaatcgatccaa

SEQ ID NO: 152719 - DNA, 330 bp, Zea Mays
cgcacatccttggtgatctcgttaattccttgtaacttctctcggtaatgaatttttacttcaactcctctgtcggaacctcacttatcttatccttgattattttctccacttcgtcactttgcgagtcttgccttaactctatccctggttatgcttttcatgattatcatctttacccttgtcacctctatatcttaccttgatgctaatgttatacttgtcctttaaaaccttctctcttccatctcaattttatagttgtattttacctattttccattggttgtatcctcttccttgtcgcttgcgagtttttaactccaccct

SEQ ID NO: 152720 - DNA, 768 bp, Zea Mays
gcccacgaggcggagcggccgaccaggtcgttgccgaggaacttggcgaggcggagatccaagtccaatactactgacccacgccaaccacgacaggatccgtcgtcaccagactagactggacatacgcacaacacgcagaataggcgacgggaggtcgctgtcagcacaaccgtacattcccaaaggacgactccaggcatgcctcggctaccctatggggtcaatctccgccgtaggagggcctcagcaccggagtctctagagtgacccatatgttaggaagatacgacggtgcgccataccgggattgtacatatgcacactgacaagagacatagggaacatgacgacaagtagccacaccacgtttgaccaggactgatccgtagggggctgccgcacactgctgcgaagacatcaacaacagactcgctacggggtgacaaacgacgccatgacgggaatacggttatacacgaccctcggaggacccaccgcgctagcccgagggagcagatctctctccctagtagaaaacagattccctctgcaaggttcctccattgaaatataaaagggaaggcctcccaacctctccaacacacaagcacaaccgttgtaacagactccagagcaatactacgatcaacactacaccagactagggcgcaagcttgaaccactatagtctataaaccctctgcctcaacccctgttcgaatctcaacgattcaccattcggagtgagtccacgctagcatcccc

SEQ ID NO: 152721 - DNA, 315 bp, Zea Mays
gctgcattgaacacttgtgtatggggttcagaaactagagaagagtttgagatgcgatggaatgttatcattgctgcttatgatctttatagcaatgaatggttggctaatagatatcaaattcgagagtcatggattccagcattttttatggatatacctcttgcaggagtcctcagaactacttcaaggtctgaaagctcaaattcattcttcaatcgctttatccaccgaaagttatgtttcgttgagttttggcttagatttgatacggccttggaatgccaacgacatgaggagttaaaggccgatcat

SEQ ID NO: 152722 - DNA, 395 bp, Zea Mays
cagttaaacggggatggcgggttgattccagaaatccccagggtctctttaacaaaaagtcacggcgaaggggtacggttaactctcgaccgttggatctgttttcaagggacaagattagatcggtgtattatgcgaaccggtattcaatccgggccgcaggattcacgatcaacgacccatattttaagtaatcacgactgccccagggccatccgatcaaaatcaacggatccgattccatgtacgaagcgttattctctcttctaatctcgaacgtccgctccacgatcaacggcccccatcgtttcacccaatcccgccccaaacacggcggcgccgcccagtggccgcggcgagccatcgccggaggagttcaattcgggtgattccgt

SEQ ID NO: 152723 - DNA, 370 bp, Zea Mays
ctcgataagggaaaggggaacacgcttctgccattgcttggctccccccacccgaatcttttctgcttgttgaatctgaaatttgtgctgggttgagcagcgtccgtccttgcgcttagcgaattcgcggtgtttacgctccgatgcctcacgtaaggctatctctcaggcttcccaaaagctcgggtaggttgaatcgtggagagttccacagcgtcctagccgccgccgtggcctgacctcgccataaccttccattccatggaggtctccaccatcagcttctcgtccccgccgccgcgggccacgccggccgacctcgaggccgtcggcctccgccgcctcagcgacaacctccagcgcctgctcg

SEQ ID NO: 152724 - DNA, 487 bp, Zea Mays
cagtaatgctgttttagatcatgatacatcttagtgcctccaggatgaatggaatagcgactaagatgtacttcatccagaatttgttggcggacctcttcattctttggcacaactacgcggttgttgaaccatacaacaccttgatcgtcttctttgaaacatttggcctttccagcccttatcttctcacggatgtgtttcataccctcatcatctttctgtgcgtcaattatcctttgtaagatgactgactccagcttcaaatgatttgaagtcccatgctgaatcattcccaggtttaatttctccatctcctggcataatgtaatgtcagaagtcctcactgttagacaatggcaggaagccttgcgactgagtgcatctgccactacatttgctttgcatgggtgataatggatttctaattcataatccttgatcagctcgagccatcgcctttgtctcatattcaattctgactggg

SEQ ID NO: 152725 - DNA, 447 bp, Zea Mays
ccacacaccataaccgccggtaagaacccctccattgatttcgccatcctctccgctctgtgtagcatccgttcaatgggagtttgggcatcagggcaccgatccggcatgctccggcgtgaccactgtcgcggcgcggtggtgtcgctgcccctgttgtttgccgtgagctagaagatgcccttccaccgttggatccaaggccagtggtgaagattagatctagttcaatgtggcggggaccgtcgatctcgctatgggtggctaagattagaggcttgtaccggttcggctcggctcgatctcgaccgtagatcggtgtgtaagcgggcacagttggtttggggctgttttaaatcatggtcgtcgatctcgtgatccgcggctcggatgtattggtgggttgggatctaatccgatccctgaattcaggatcggacggctgtg

SEQ ID NO: 152726 - DNA, 276 bp, Zea Mays
tctcaccactggcgatgaactgccgactgttctttcgagtcaaaggaacctcattctcttccccctcgtcatccacaccgacaacacaagcagcacacccattgggatcagcaataggcggagcacccacattgggatcagtggcagtttgggtacacccattggggtcagcgtcagtaagtccagtagcaggcatttcttcagcagcaggaactgaggtaccagcatcttcatcaaaactggatactcgccggacgcgccttcttttcttctttt

SEQ ID NO: 152727 - DNA, 513 bp, Zea Mays
ctccaaatcatcgataagacaccttgagattgttcgcctggacctcagcatgatgtagcagtaggccttggggcagagagtgcaccctccgcgtcggcgagatcactgccacggcgctgcgaaacatcgtagtcatcccggtcgaagtatccatcataggcgggtggtcttcctaggagatcgccgagtcatactcattgttttgtagtgatgggatcgagctttgggcaagggggttcgggtctgcactgttccagtggcctcaccggcgcttggggctaggcgccgccgttgccgtgtacttggggaagaagatggtcccctgggccgttggatcggacggtagcggtctagattaggaaaacgattgcctcttcgcgtcatgtaatcctggccgctggattttgatcaatggctcgggatgcgaactgcttcgggcccttgatctttgatcaaacgatccagcacgtatcaagtaatgtggctgcagcaaccttgcaaaacagcccctcg

SEQ ID NO: 152728 - DNA, 403 bp, Zea Mays
ttgcagtcactactgaactttgaggaacaggaacgacacagccgaaacccacaaccttttgatgaatctgtactgcacacacttctcgacaatacattgcctgagacaaacgaattggataaatgcaaagcggtaacaatcgtattacattttacaaacataatttatgttaaatggtacatatcacatcgtcatgcataaccatttacatttctgttgatctttatgcttttttacatggtcagatcatgattcccatggtaagcagggggcactagacattgtatgttgtcaatacagtcaaacggtgcattcacattttagattccaatccctatgggccaacacttggtggtactacttggaaggattaccattttgcccaaatggacttaggtggcag

SEQ ID NO: 152729 - DNA, 371 bp, Zea Mays
gcaggcggagctctgggtgcgggatcctcttcatctgctgctgtgtatgggaaaaaatgagggaaggcaagcgcgaactgcatagagaagaagtggggcgtggggctgggcagttggaacggcatgggcgcgcgtcgtggggctgagcgggagcgagtggcgcagtaggagcggctgggcggtctgtccatgcggcttgcaggaactgcatgcacgatgtgctgggatgcatgcacatgggctccacatgcaatttctcctcatgcacacacaccatgggagtcggcatgcaagcgaggtccacgcggttccttcctgcttccatgcacaaaacggttcctgcttccttcttttccttctctatttactcc

SEQ ID NO: 152730 - DNA, 356 bp, Zea Mays
ggcccgtatccagtgaatccatctttttccttcaaagtacctttttcgatagtccttttttaaagacttctcgtttatcccctttcattttcaccattttattcgtaatcttgatttgtttatccctatagacacaaaactccaccatcacaatcttatgttgagagacaatatactcacatttatcaccttacagtccaaaaatgctcgtttatcctcttcttgtgaggaatgaggttgaagtcaatctgactagagtgatggccgatactataagttactaaatgagagtctctctttgtaaagaaagtgttagctatcaataagtcaaaagttatcgtgaagttcaagacttc

SEQ ID NO: 152731 - DNA, 1152 bp, Zea Mays
gccagctgttaatcgcaattagcaggcgctaatcaaaaccccccgcccgaccgttactttgccctcacatccatattccataccacaccacaccgcagcccgacttcgcctcacctcgccacgcttgggattcccgcaggtttgcctcctgcttcttctctactccgccgcaatggccttcgggctccaggttctcgttgggttttagttccgggtgtagtcggtgcgggtggttctggattccgcgtcgggttttggctgaattggtgcgctgggtcgaggatcggtggggcgtccttgaatcgccggtggttctgggatcgaggatcgacgggacacggctcgctaggcgaatgtctggttctgtttcgattttttggttcagttgcccttctgattgaattttgcgcggttcggttcggtgccctacgatcgaggaccaaacaagtactgttcgcttttacttggtgccggtggctgtgcgtgtaacatgttcgattgatttcctactcgaggtagtgagatgctggcgtggaggacatgtgcaacttcagttgggagatgacagctagttatttccaatgttatgtggaaattactgaacatttccttgcgatctttacaaaaaaaatccttgtagattttcattttctgggatgattttgtttcccaagtctcttgttaatatttttgttagttctcggctaattcgtaaagaaagcacttgttgtcttgttacttcagatgtacagtacagcttgctacataatatttcatatagttaatgctttgcttaccaagacccgatccatgcagggatccaatttctggtgaatcttccgtacttctaattcctgaaatatgagaagattctttttctttgggtcctccgctgcaaatgctggcgacgaaaacgggacaccgggcagtgatagcgggactacgcataaaaagacactggtggcagatgtgggcaacgaaagttctggttcctgcagcacaaggttgtcaagatccagaagccgtggtcaaaagcggaataaggaggaaccagccaatccgaagcagctcaggaggtccatgtcattctcgtctccggccacaaacacttgcttagacgaacgatgctttagtttctctggtgatgttcca

SEQ ID NO: 152732 - DNA, 594 bp, Zea Mays
agaatctcgtcctcgagatttaggaaggactagagaaaagatgtgaaaaatctatgcgaagctcttcttctctctcccaagtagcttcatcttctccatggtggctcccttgtactttgcacatctttataaccttatttcttgtaactcgagtcaaagtgtcaagaatcttgatcggatactccgtgtaagtcaaatcaccctaaacactgagctcttccattggtaactgttcctcagggacagggagacacttcttaggttgagacacatggaatacattatgcacatcagacagattatcaggtatctcgagttaataggctatctctccaactcgcctaaaaaatctgaagggtccaataaagcgaggggacaatttgtccttgactttaaacctcctcattccatgaagtggtgacaccttgaggtacacataatctccttcctcatattccagtggtcttcttcttttatcagcgtagctcttttgcctggtttgagctaccctcaaattctctcgaattatacggacttgttcttcttcctcttgaataatcttaggcccaaataactgcctttcaccagtttgat

SEQ ID NO: 152733 - DNA, 415 bp, Zea Mays
gatgatgatttttgaagagcaagatcctaatattgttgcgatccaatttctccatttctgggaaaaacctagagctctcagaacctctaacagatatgcccagttgatggaatcaaaagcttttgatatgtcaagcttgacaaaaagggctggctgattattcttatgaagttcctgaataactttttggacgtagagaaagttatcatgaattgaacgtttttgaatgaacgcgttttgagcagtggagacgatctcattcattcttagcgcaagcctgtttgctaaaatcttggtcaatattttcatgaagctattgatgagactgatcggtctaaacatgtcaatcctgtcagcaccctcccttttttgtaaaagtgtgatatttgcctcattaacgaggttcaggtttttg

SEQ ID NO: 152734 - DNA, 307 bp, Zea Mays
gtgaaggttccagcaatcaaaattatgcagaagatctgatgggaagtgttacagccatagtggtgctcaaccaccatgttagtgtctgcattttctctctctattgtcagtaagggggtcggtcaagtcatgttggaagtcttagattgctgtggtgttgtaaggggtcagcggaacctagtcccagtgtcttctatgtcgttgtatcttgttgttgttagtctggtggattggtgtgtaatgtggtttgttctcctcttaaatgttgatgtgttggggcttgtaggggggtcgggtctgcttgtca

SEQ ID NO: 152735 - DNA, 528 bp, Zea Mays
ctattcctttaccgcgccaggtcctcgacgacggtgagcgcggggaagctccggcaagcttgcagactggccgaacggggcaatgaccggcgctcccgagtggcagacaccaaatcagaccccctccgagcatttcccctaagttaattgcacgattggtgacccattccgctctgcccacgaggacaggaaggttatggacaccagctcgtgttcccggcgatgggtggtggtccagttcaattgaaggggttgtagagcttgaggagggtctagggacactagaacaagcaacagagagactggaactaacctgagttgggctggccgcggttgagctgttcttcgcagtggcggagaccagtttgggggaaacaagaaattctcgagctctggcgaacgatcgtggctaattagcggtggctggatacttcactgccttacggagctcgcggcggggtcaatttatacgcttagtgagcggtggccgtgaattcgggcgagacgcgcggcggtcagcgaaagggg

SEQ ID NO: 152736 - DNA, 398 bp, Zea Mays
aggaaaaataattgtttgggggcatgcttccattatcattatcattatcatgtcatctgcatactgaataattgggaagtcttgcccacatctctgttgcaaaggtaatctgattaatcctaggtcctttgccttgttcattatagtttgaagtagatttgctgcaaggacaaagagatggggggacagcgggtcaccttgcctgactcctcttttacagtggaattgcttgcctgggtctccatttagtaagatctccaaagtactagagtccatgatcattttgatccaggttatccatttaggtctgaatcctttgtgcttcagaatgtctattatcactttatgttccggtttgtcaaatgctttttcaaagtccagtttcaaaatcaccagct

SEQ ID NO: 152737 - DNA, 329 bp, Zea Mays
taaatgccgaggcggcacatcgcctgccagtggaatggacaggcggcacgccttgtccgcaataaatgcagaggccacgtagcccagaggccttacgtcaggctccgcctgttggcttacgtcacgtgcaccatgccacgtggcagcatcggggctccgcctgagcggggagcagaagcgtatacggtaagatccggacacgtgtcggctccggacccccgcctggccttgattaaggcctgggtattctctgtcccagaatcctgggaccttgccgtgagtggcccggaccccacacagaggggtctggaacccatcctaggggtccg

SEQ ID NO: 152738 - DNA, 650 bp, Zea Mays
taggcacggcaagacatatttacaaggtgtaaacagcttcttggcttttgcatttagaaattcggctgtagggaacaagattttatgcccttgtagaaagtgtgttaactcgttttggaaagaggcaagtgaaatacgtgagcacttaatatgcgatgggtttctaaaagggtacacgatatggaacttgcatggggagactagctctgttgtgagtcatggaaactatgattacaatgaggttatggaggaatctaatgaagatgatgacatttttgatttgcttagagacttagctactggtttagatgatagatgagattttgaggatacaagctcttttgttgacccctgtgaggagctagttgctattcaaaagttggttgcagaaaatagcaaagagttatatccaaactgcaagaaatatacgcagctacgtttcctgattaggttactccacatcaaactcctcggaggatggactgatagatcttttaacttactacttgatttacttaatgatgcactccctgagggttcagcactcccgaaatttttttatgaagctaagaaattagtgaaaaccataggaattgggtatataagtattcattcatgcgaaaatgattgcattctctattagaaggaga

SEQ ID NO: 152739 - DNA, 305 bp, Zea Mays
cgggagctggaggtgacccggaaggagaagaagctgaccaagaaggaggagcgcttggaccagagggaggaggtcatcacggagttccaggcgaagctgaatgccctcaacaaaatcctggaggagcagcgggcccagcagaccgcgactgtgaagagtctgcaaaggctgcagtaggagctggatgacagggccagcagcattgccctggctgaggagaacctcaaggaaaaggatgcctccctggataagcgggcggcggatctcgcctggcaggagaaggacctcgccttcatggaggaaat

SEQ ID NO: 152740 - DNA, 310 bp, Zea Mays
agcaaatatgcccaacggcagcgttgtcccaccaagaaccgtcccaaccccaacaagaggaaggccagcagttaccaagtcgacggcctccttgaggacggcgtccagggtcccctcattgtcggccatggagacacccctctgatctgatgatctcccccgcaccactgcaccagcaactccctctgacggtctgacctctgcactgtgctcggtagctcccccagtcccccttaaaagccacagaagatcctgttgcagcgtaaaaccacttttctccaacctgattcttgcttttacctactcgtac

SEQ ID NO: 152741 - DNA, 575 bp, Zea Mays
aatgataattctacaacaaacatagaataaatacttttagcttctctgctttggttatttgtgtatgtgcccgacctatgtaataagataaaatctgtaatttccagctgcagctcttggaaatatgcagatgttaccactatcaccatggttttctacttttcattatcaaaactgaaatgacaactcacaaattaaggctcaaacacctactcggtggcttgaatgaccatgcgttacaatgtgtcttgcccgtttgtgtgttggaatccagctggtctgcgcaggtgaatgttagtactcacgctgactctcacgaatggtaatatgtgggtggtggaattcgcgtggcgacgattatcagagtacgagctcgacctgccgatcgccgtcgctgccagagggttcttctccttacacaagtctaccctcacatactcgccctctcccctatatggctctggatcgctattacatcatgggcctatacaagccactgtggacccacgcatttgctattgggccggattgacctgttgctgcgcctgggccatgctcctgccatcttcccgcca

SEQ ID NO: 152742 - DNA, 948 bp, Zea Mays
cgcgacggacgcgcgcgctcgctctttggctaccgcgtggggccattccacagctgaccggtcatgcgcatgcgcccgcgtatggactcggcgtcggcactgcgcggtggggcccagttcgcagtctcaacgtggtcatcgtcttcttccccgtgaaagtcgcgcggagtggacggtcctcgccgcaacgacctccgcgaagttcgctcggccgtttggggagttgaccctataaaagcctgcgctcggtgccccgtggcccccaccaagccatccgaaatcgcgcgaccactgccgcctccgaaatcctgctgccattgttgccgtgtgaagaaccttcgccgccatgccaacccgcgcggggccagccaatctgccgtcggagctatccccggtaagatacctagtcagctcgctttaaacctcgcgtcgatatgcacgcttcctggctcgatttcgctcgctgtagctcggagtgcgccacacgccgacgtacctccgccgcggctcatgggcaggccaccgtccgtcgccagagtgctgcgtggttcgactgtcggtaagaagtccctaatcggtttcccctatgtctttgctacgtgctgcgcacctcgaaacggggtttggtgcagggaggcgggataacgttgtcgccagccatggctccgtcgtgccttcgcgttctgttgtcggtcgggcgccgtggtgagagagaggggattggggggagaatggtgaagggcttgggctgttggatcatacacggacggccccgatctaaccgcgcatacccttcgctcaatagaatttgaaccgtagatcacgaattgggcggctcagatcggatctcgtgctccaacctgcggatcgattgtgggccgtggatcttagatccaatggccgttggcgcgtaccggttcacttcacctgagatctaatctgggccga

SEQ ID NO: 152743 - DNA, 378 bp, Zea Mays
tacgaattatgtatcaaaaatcgtcggcatcagagttctcttcggcgacacgtgtattaagttgttcaacccattgttgtgtttcaagaactgtttcttcaaacctttgacgttttgagtttgatgaaactggttcctccattaactctacggtaagagaagctaactcatttagtcctgccccttcggatataatactatcattgtcgctatcgtctgcttgatcaccgacttcttggaagataacatcatcatcatcgttggtgcttaaattgtagttttgatatcggtaagggtgaacctctggattaactttatatgcaacccaccaggttttaaaacttttatgaggataactcaaatagtacacctgatgcg

SEQ ID NO: 152744 - DNA, 1722 bp, Zea Mays
cgagaatctgattcaccctttctgtttggccataagtttgaggatggtatgctgagcttctgactaacttggtgccaagtgcttcttgtagctgttcccaaaaacgtgccacgaattgggctcctcgatctgagacgatcgtccgaggtatcccatgtaagcacactattcggtccacatacagttcaacatatctcttggtagggtaagttgtatgcacatggaggaaatgagctgtcttggtcaatctatccacaataacccatatggaatcatgatgtttggaggttcactgcattgctctacagattataattaacaaattaacaagcaatcccctttgacaatattcattattcatgaattcatcacaacaattggagaaatggagagtcagctcactactcactgttttagaaacagtctatgcatttgctctagcctctaggctctagaattcacaaattaataagaaattgctaaccaaaattgcatttgcgcactgcacattactcaaaatcaagctcatcaagtcacaaattaataagaattcatcagtgttcagtcttcagtggtgctcacctagcctgatgtttgccggactgccgtctgccggtgcctgatgcagtgatgccctgatagccggagtgccggccgccgggatgcacgatgtgctatatttgtagatgagttcagaaagttgatcacatgtgcaagaaaatgctaagcggaatcatgcctcaagcgcgtgctattctaagatacaggatgtgctattacataaaactggacgtgctagttgtatgtcatggcatttgcgacgtcctagatgcacgatgtgctatttcgtaaacctggcgtgctagctgtacaactcagatgatagggaaatcgtgctcccaccgcgtgctattcatagatacagatgtgctcttttgtaaacccggacgtgctagccgtatactctagtgctaagatacaggatgtgctattacataacccgctggccaattattgggcattacctagctgccatggcttcagttaagcaaatgtttgaccaaatcatataatcactcttaactatactcacttttttgttctctcgactcattctttaatcttggctaatgagcaacgatagcagtgacaaaggtgtgtctgaatacgatggtagtggggaagtaaccatattcatacaaggttcaacaatcctattttattattcagctggcttaacaaggtatgctcgttctcacaggaagtggaaaccattagctactaatgggttgaaactggtttgaaactgcagtttggcctctggtctggtgtgggttagcctgtgggttggggtgggtttatttaaatgataacctgtcaatggtttggatcgggtgttggttcggttttagacccattgacaggttatgttcaatctctcaagtttcaaactttcactctgacagtctcccctgcaaaattgtagggtcgttcgatctcttctacggcggtctcccctgcctccgagaacgatggtccccaagcgcacacacgatcctcgttctggggatgaatctacggcagatgaatccagtttggaagcttcagtaagatctcagatattttaccatctcttgcttttaccacgcgaggaacacagattttaccatcctatgattttaccaagttttgcgcagatattttaccatctcttgattttac

SEQ ID NO: 152745 - DNA, 376 bp, Zea Mays
gatggggatggaccgcggctatgcggttggcatggcacgatggtggacgatgcggacctccgttgttgggttttctggtggttgatgtgcgaatctgatcgacatgttcgtgcgtatacatttggtttcttcgtacttcggtgtgtgtaggttgtgttgatagcgtgacagtgcctgactagctactgactactagtacctttgtttgttggtttgacacgggagcatgctgaaacggagcttgtacaggttcaataacataacatggtgtcgtttaaaaataagagcggtttattaatatataaaccatgcatataacacacatcatgtgttcttttgtcaagattgtaatgacacacgaactattgaataaaat

SEQ ID NO: 152746 - DNA, 343 bp, Zea Mays
ccaaggtaaagacaaagtcggtctcctttgctgaccccctcatctctgctgtgtggtcaccagctgtagtggaagggccggagggagaagaaagctttaaccttctggcgacatgaaatccggcgaccatgcagcaccacaacatcatgttgttgctccatccaaggtattcgtttcagaccacttaagtaattcagatgctttgttaagctttaaatccttagaggttgcagatcctaatcatatttcaaccttgagtgctttgcaactagtaggtgcagcaaaggaggcagcagccccaaacttattacatcagttgttggatgtagaaacacaagtgctc

SEQ ID NO: 152747 - DNA, 457 bp, Zea Mays
aggtaatgaaagctctaggcttccgttagtgggcgaagccccagccaggaggccgatcgggtcgcgttcggcccactggacgccagcttgcgtcagccatgcataggatagccacgtatcccggctgagacgcgacatgcgatatacgcacgcataaatatatatacaaatgtgcataactcatgcataaatggaatcttttatgccacgaatcatgagaacgaatatttgcatgtgcttgccggttacgactgcataacgatgtgatacatgatagcgtaaaccatgcaaacatttaaaatctcccaccggttttaagataaggaaagacgtgctcttcgtgcgcgtaaataaaggcgcagttacaggaggaaaaaaatacgcacgcataaatcatgcatagaagggatcttttgtaccttgactcacggaaacgaatattaccatgtgcacaccg

SEQ ID NO: 152748 - DNA, 1142 bp, Zea Mays
gtgagattgcccaagtagctcagagtgacaccagagaaatgtgtatcctgtagattcaaagtttccagcgagctcccatggagaaattttggaataagccccgagagttgatcgttatttgacacatccaatactgccagattcttcagttgaaagattttcggtggaaaggtgcctctcaagttattaaagctgagttgaagaactcttaaattgagaaaatctgcaaagaattctggaaccacgccggaaattccattcatttttagattaatcacttcgatagagcggagacgtagaaaatgtcgatggataggaccaacaagcctgcattcctccatgctaagaacctgaagatgaggaacgtattttccaagagttctgccccaatcttctctgccactactacttatgtccacgccatcaaggtagagctctctcagatttgtgaggtttgacaatagtgtctcgaaacttggttcttgtaggaccaaaaggttatagctgtcaaaaagattatacaatgtgtctatttcagcaccatcaatgttatggattgaagaaatatccagcgatatgagactcgggagtttgcctattacaaccggaatgtgtccatagaaacctgcgtaagaaaggttgaggtgtgtgagtaccgaaagcctctcaaagccagccgccggaataggggatccaccgaagtcattcttgctcaggtcgagtcgctggagtgaggtgaggttgaagagcgcgccgtcaagactgtagctgtacaagccacggccaccgaggtcaagaacagtgacatggccggagacactgtcgcatccaacaccctcccagaggcagcagtccgtgcctgcttcccatgaagcaagggtggtggtggagtagtcgaagagaaaggatcgcttgagctggaggagtgctgcagcatggtctggatggcaccaaggagctgtgaggttaccataccaagtggatgaagctagtgatgagcggaggtggtgtatcagtatcaggaagaggggaaggagataactagcacgagccatgcatcattgtctttgcactccagaaggaaagcaaaagaagatagttctatatagtagtactagagatggacacatcccattgacgat

SEQ ID NO: 152749 - DNA, 281 bp, Zea Mays
attcaacactgctccacatggcgcttgccaagaccacgctttctctcaaatcaaaactccaaaagagatcctccatgttcttctttcctgtgacgagaggaggccagggatacccccatgctttgccgaacataagaaaatggaaaagctggccaaagctacaaaagctagggcttgtcctatcccactaccaaccacttactacctgggtctgacgtgtcatggcctggatatgcacgccttttgtgttctctatgactattctaataaaccaataatcc

SEQ ID NO: 152750 - DNA, 1363 bp, Zea Mays
taagcgttactgctgatggttgtgatgcattcccctccaagattgcgctacatgttgcaacatcgtccacggagacccccatgctgcatgatgtaacgcagcccaagaagaggcctgccatgtgctttgtgattgtgcgccccacccctgcgcgtggtccagatgcagatgggtggtatacggtggttagtcgttgtgaacttaggggggcagtctcgacacccacaacgtcccagaaggttgatcctagaggatcttcaaggatgatgtttcaactatttgtccaccaagcattgtgcggcgcggtgtcatcttcctactcgatgcttccatttgccatggactaggtcatcgggcaatcggttgccctcgtgctcagccacaggagcatgcatttatttgaatgtggattgagtcggcacctgtacatgttgatgacaccctctctgcctagcaaggtgcaggttctctgccttgcggtgccctccccttgagtggatgcgcacaggccgcagtgttggggttgtgttgcatgaaacaaaaactatggactctggtgggctaccaaggcgtcatcgtcgtaggttgtgacgtcattcttcaatgtcgtatgctagtactcgtttgaaacagtgccacaggatgcttatagcgggcagtagtgactagctgaggtcatgccggtggttgtcgactgagtgatgctccaaccgataaggtcgagctgctgtatcatcgagcattcagtggacctatcccaggaggaagataacatgtgtcgtgttgtgttcatcacaattattggcacgtcgccgagaagtggaactgggagaggcggcaagagtgattgacaagtattttgacattgatgcctgtggcctatatggcccttcacaaagcctgaagactttccattgatattgttagatgaagcaacaacgcaacacatttgaaatggcggtcaaccggtgcggacaataaggtttagttgcttggtgaagccatggttgtgacttgctcacgttgttggtcgcatgcttggattttagccatgacaagtaggttgttgagctagttctgtcggatcgatgctttgcatctgtccacaacgtcgcgcttcgatatgtatgagttcaagctcagtgcatggacacattgtctgaaacatgtgtcgtcgtgtccgagtctttgagtggaggagctaggaaatgaatcatttattagtttgctcgagtactaggttgaaggtcatttgatgaggatcgtgagccctcgttcttcgcttctgggccctccaccaatgggcctagtgacgagaatggccctgctcctcgacgtcatggtagctggtggcgacgacgat

SEQ ID NO: 152751 - DNA, 571 bp, Zea Mays
caagagcggtggccggtgaatttggattgagacgcgcggcggtcggaggaatgggaggtcactggcgcagtggattcgtggagaataccatggcgggctccctggcgatgatcggatggcttaagcgagtcacggcgatgcggtaaatgtgcccaggcacgtggcgcaaggccgtgaagtggctgtctccggcgaacacatccgaagcatccgtgactagctcggtacggtggtcggagtaatttagtggccggagtatatccacggggatgatatttactcaaccccaagcgctatccaaccgatccgagcatgaatcacggcggcgaaagcatgaatccgcgcgtggctcgtcggcggcgagggacagagctggcgacctgattgggacactgtaccatcggaactgcgattcagagctcctgacagcccaactggtagcatccagaacacaaatttctatataagaacttgctaattcgccagtagtaaacttgcagcccttcataccagctgcaattttgttatagcaacaaccaccaaacgagcaatacatctagctcaaaatggc

SEQ ID NO: 152752 - DNA, 389 bp, Zea Mays
aaaatagcacagtttcatcatcatgggcatgtcgtcttcggacacagtagatttctcaaaatctagatggctaggctttgttgggatcaaaatattgtaatcttcttcactttcatcaacattttcttcttcaacaacagtatgttcagcttcggcatcaggagcaccttcatcaatagctccctctatcacaactagacctgatcgttgcatgacttctaaaattggagctgtctcagtgacctcggcctcttctccctcacgagacacccttgcagttgatcgcactctagccattttgatggtttttacaatttgacgaagctagctcgtctgacgaagttaactttaaatgatgaagtgctcgcttgagagcgcagaaggcttcg

SEQ ID NO: 152753 - DNA, 1698 bp, Zea Mays
agaagatatgagagttattaaaagtaaggtatggctgatgccacactaagccataatggctcctccaccgctgttgtccggcaaaccatcacattctgtgacgcggggacgtcgagcaactcctgacttggggcactccggtcccatatgacaaaatcccccattcccattcagccattcctatcgtgcaagccatcacacactccggacgttgggcccacattgcagactacggacgcccacgtgacagccaccattagttttgcacacaccggacccacgtctgctcgcgcaaaaagttgcctcaatttgacactagcaggaacatttgaccatgattgctttctctaaagaaggaaggcttataagctggtagaagctatgttggctggccggtatggtcataaaaatgtgcaaaccgtgatgacgacataggtcgcgtgggctgtgtttctttggtgcggcccaagtagctgctaggaggcccgcacgcttcttaccctgacccagcttggctttagggtcagtctcccttgctttctctgcctagcgagccctcgccctctagcccttcctgctagcgccgtctccgtcccgtgctctcatgttcatcgtcgatctcagccatcttaggagcacccgctcactcccagacgcccacgcaaaggaatcccccatgatcttcctccaaactgccaactccctccacgatctccccctctagctcatgatccctccgcccgcccccaccccccgcctgccacgcccacgggcgcaacaagccaacaacccacactcggccccgctaccccgatccgtcgccataaatccgctacctcctcctcgagtcctgcttgatcgccccatgctcaaccggtcgaccggacggaagggcagccccgaccgtgaccacaacgcgatgtgcgacgagtgagggcagtggcgggggttgcgaccaacgacagagagccacacaaagaagcccgtcggcgatgttttcctcaaggttcgttcgctcattccttccttccttgtgctattggcgtgtgatcctagctagcgctctcttgatttcatccttatccacgtgaatcctggatcacactgtatgcagatcggattactggaaggccagaccagctgctcgcattcactggtgcacggtgtgggagctgagagctccgttcctatggccgggccccacctctcttgggcccttgtgcagatacgcagaggtagtgtcccctaatttatttgtcatgtcccctaatttgtttgtcagagctgcttgaggatgttaatgaggtatggctccgctggttcatcagtattcagtaattacaaggcattatgagttagcatgctccctcctgctaagctagctaaatgtggttatcaggtctcaataagtatccatttttaaaagtataaattgttatagccatacatgcgagtctttattttagaaataaccaaaggttctaaacctgcattgtgctaactcgtcaatcattcctgaaatgcgattcctttttttcattcagagttcggttggacaaattaagatggattgagatcttagttgttaaggtagaagtaaaagcacggtgatagcagcagttgtggtcttcgatatcttagtgtgttacttggtgatagcagcaactgcgatctccaatattctagggcatgtttgcc

SEQ ID NO: 152754 - DNA, 479 bp, Zea Mays
aagaagatactgtccgtctttagcagctggccaccatgcatcaccaactcacatgtacaaggagctttctgcctgcactgcactgcactgcgccttaggttctacttctactacctgcagcactaggctagctaattaagcgagcatgcactatctgtggttgctggtggaaccaaggcattccgttcttgcatggagacagtcaggatccagaagtattcttgcattggtaaaaggggagtttgtaatgacatgatgtgcttgtttgttctcttcagatcatgctgcggcatgactcatgctcattaattggatggccttcgaacgttgatggaactgatgatggtgctctctctcaccagtcccgtcaccacagacaggaagctaccagagccatggtcgccgaatctgttcggttcagactagaggtttctcagctcaagcctcagctggtctgcaacagaagccgttcagttttg

SEQ ID NO: 152755 - DNA, 679 bp, Zea Mays
gtggcctgcggagtgggttgtgtgcaggatagcaggaagtatgctggaggattgtggtacaaaaatctgattgccatgcattatgagtccctctctgatctgccatggcgcaccctgctgccctatactgatctaattgtgcagaagttgaaactcttggttgcttgcacagtcttgctggaggtctttgtagagttgaaaggttggtgttgagatcgtatagaccaatccactagtggtttccctgcgcgaaagagcgtctgctactgtatttagccggacagccctatattccaccttgaagtcgaaaccaaatagcttaataatccactgatgctgaggtacagttgagagccgttgatcgagcatatacttgaggctgaaatggtctgtacgtaccacaatttcctgccccacaagtatggacgccaatggcgtactgcgtaccagtccaatgagttctctctcatatgcagcgagcttgacatgtcgggctgcaaaggggcggctgaagaaggcaattggtccctcatcttgatgcagtacagcgccaaaacctgagccggacgcatcacagtcaacaatgaatgagttggcaaaatttgggagttgcaagacaggggctgtagagagagctcttttcagtgcctcaaatgctttgtctgcctctggactccac

SEQ ID NO: 152756 - DNA, 597 bp, Zea Mays
cactgccagacatccatcaggatttcgtcgtcttctgtgatgcttcaaggcaaggattagggtgtgtacttatgcaaaatgagaaagtcattgcatatgcatcacgcttactgaagccacacgagcagaattatcccacacacgatttggaattggcagccatagtgcacgccctaaaaatatggaggcactacctaattgggaacaaatgtcacatcttcaccgatcacaagagtctgaagtatatcttcactcagccatacctcaacctccgtcagcgaaaatggctggaattgatcaaagattatgaccttgagatccactaccaccccgggaaggccaacgtggtagcagacgccctcagccaaaaaccttttgggaagaaaggaaccaatttcttggaagattggaagaaagaatcagctcaactaaatgtatgtctgggagacaatggcagcctagaagtcaagccaatgctagaagacctcatatgcaaggctcaacgcctggacactgagacagcaggtcttatggaaaaagctcgcaaggaaccactcccggacttcatcacatatgaggaaggagtcctttggttca

SEQ ID NO: 152757 - DNA, 404 bp, Zea Mays
gtggaaagtaaagaatcggagtcaaataattgtaagtaaagagttgcagtcaagtgatagtggtaagtaaagaatcagagtcaatcacaattgcaggagatctgctaggcaagcaactcacgaggaggcagttctgaagatgacgacattgggagctgttcatcggggcaaaggaaatggaggctaggatggggaggtaggattctgattcacaccctctttctataaatttctggatttattcacgtacatggatgagttgaaaggtggtgcctaagatcaaatttgttatcaaatatcttggagggagaggtgtgtacaaatgtagttcccagattgagctaatttctacctagttcatagaagtttattcaaacttttatacagacaattggatttttttg

SEQ ID NO: 152758 - DNA, 1853 bp, Zea Mays
ttctattttagttctaccgagacaaaaacctttagattctatagtctcccgccacaactctagtttcctatttactcttgcacaactttcatcaactagcactacatcgtatgcaaaaaaacatacaccaagggatatccccttgtatgtcactaatatgcaaccacattggactgttggacatattaagagagaggtgaatcacttgaactcaataagaaaaaaaaatgtgaacgttgttgtaaatgcaaggtgggttgtttcttatgttactccctcctccccaaaaagaaagcaactctagacttgagacaagtcaaaaaaattaagtccggcaaagttcatagaaaatagtatcaacatttatgtcgccaaataggtttactatgaaaatatatttcataaccaatctaactatctaaggatattaatttgttatcataaatattagtatttttcatataaatttggtcaaacttcaaactgtttgacttgtcgggaagtaagaattgcattcatttttggacgagtaattaaagaaaccaaagttcaatacaatgcaacttatgatataaactatactgaccactcctgtagaattctgtaggacaagagatctctcccaagctgactcatcaagcatttcaacagatttggtttcttcaaagtaagcaagcccttcacatccagtggcttcccatttcaagcgaagagaagatgaattagcgaaaaatcttccatttacatgtatactcgcagcagctagacgtatatttcttccgttggagattacaatgggtgatgcttgcaatctatctggaccacggtcagctttcctagcagcttccaatatatcaagtcggttttctgtacagtcaacggaaaccatttagtaggctgggaacagtacaaaaactttcaacatggacatgttgaacttttaaggattattaaactgaattttaatgaaaagaacaagaaagtaccattttcatttgctatcaatgttatttctgatgggaagtcacaaataacagtgaactctgatttggaaattgcaggcacaggatgatctttaccaaccatgttcccacgtgaaaacagcaatttctaaaaaaaaagtgaattaaattaaatatatttcagtgaatcaattcaccagaatatattgcaatacgcagttcataaacaaaaatgcaaagatccatttgaagtacttacatagctcactttgcttaggcaagatactcgatatagtccactagatagtttcttcacagcggtagaactaataatatgatttttggatggatcaataacatcaactgtttcaacaaaatcaataacttggtcccaacgctcaggtcctccgaagataaggacatccattgttgatccaggaactaagtacagctccttgggagagttgttatccatgttcttaatcctactatgaattccagataagtcaaaccagtacccaccaaaatgatttccattccccccttggagaactacaagaggataatatgcagaaatttttgaagttgcctccagagaaatgggtccaccaaatgtctcaatatctgaatctgaatcaacagcaaatgttgcaactattgttgatctgccagcagcaaatgcactcagagagacccaggcacaaggattgccattttgtccccaataaccagaattatgttttatgtcgtcgatgcttgaggcctcagcggtgttaagaatgtgaaaggcctcatcctcggatagtagactccaccttataaaagcattaaaatgggtacattgtgagaatgggtgtcctgcagagagaaacggtgatagctcatttagaa

SEQ ID NO: 152759 - DNA, 624 bp, Zea Mays
cgtcaattcccaagaagtgcaggggccctagcgcaaaagtaactaagactcaggcgaccctggctatggactgcgggttagttttctaaaaacataagtgattttctgcaaagtgtgcaaaccgaagaggtatcggcctgttctggccgttggattaggtttggacgcgctagattagatctgccaaattggagtattcccacgccatcccagccgtccgatccgaaatgagcgctgttgattaaatgctacatcaagtgaaacggtacgctagtcagaccgttggattagcaatcaagggtccagatctaatgactccgagatctacgctgatcgtcgatttccatctggacggtcaccgtttcccaccagcccgacgatgaagcgcggcggcggtgcccaggttctacggcggcgccatagacgggcctcaccgcagcacaccactgtgcccccaaactccattctaacgggttgtacatgactatgggacgcgtgcggattctatgggggcatactcaccggagatggggtcgaaggaggccgaccacgacgcttggtggtccggtgttgttgaaggtactctgacgagaaattgccggagtcgtggtgcccttctactcc

SEQ ID NO: 152760 - DNA, 280 bp, Zea Mays
ggaaggcaaccctctgatcggatcgttcgctgtcatgttgttttggattaaagttaattgtttacaactgtaatatatagtgataaaaacattatagaaagaaaggtagcgaatagtacgtaggggccgctgttggtccagcattggttgaggaggcaggcccgaggcacggtacgaaaggcaacagggccacgcacgcggcttcccaccgagtccgggcgccatcccgtcccgtgtggtcgcggtcaatcagtgacagtcccgtgtcggtccgggtccc

SEQ ID NO: 152761 - DNA, 695 bp, Zea Mays
ttgatgctttaggtgtcaaaaataaattatatttctcctcagcttcacaatgagcactatcaacaacaccaacatgcttaagcaatctagctttaacattccaatttctaaaccttcattaacgaaagcatctccaccagagaatttgttgttatctttgaacagatagcaaacaaaacaatacaacatctttatccatactatactcaagccaattaaactcggaaaaccactttggtaggaagcgacttatgcctccacattcatgttggggaaaatcatccttctttatatttggttgacatggccccaatgcaatataagcccttctaaccgcatcttggttattaataaaatagcttgagaatggagtcctgaatccaggatcatgctcaatgccataaatatcattatcatcactatcattatcctcactcgatgttgtcccattcaagtgcactgattcaaaatcatcattgtcttcaacatcttctattattggaggttcaggctcaactctctcgttctgcgggcgttgcattattagtttcagtctgtccttggaatatcaccaattgcatctctctttcattagaagatggagcagcactatctttcttttttgcagcagctcttgctaaaaaagctctcaaatcagtggtagcattgatcttcctcttcattttcaaatctgc

SEQ ID NO: 152762 - DNA, 375 bp, Zea Mays
gtgcaaaagtcgcctaagggtgcagccggattctccgtgcaaaagtcgcctatgggtgcagccggactagcacaataagtgcgcaaaatcaaaaactttgtcaaaagactctccgtgtaaaagtcgcataagggtgcagccgccccccgccggactagctcaataagtacgcacaatcgaatactttcccaaaaagaccccgcgcacaagtcgcctacgggcacggccggatcaacgaaggcacgcagcctcatacaaattacagttacatacatacagcgagggcatcacacattacattggctcaaccttcgggatgatacccatctccctgtagttgaacagcattatcctcaattcctcaccctcaaaaag

SEQ ID NO: 152763 - DNA, 341 bp, Zea Mays
aaagggtagcattgagttatgccattacatgtttaaagtgggattctctctaaactccctcttccttaagcaaaaccagaaaggtaagatacccaacattgcattcaaagctgacacactgccaccatagctctgttattcagctaactgtctgcagcaattatagccgatccatcacgtcctccgttaccctttgcacccagctctgttattctgccttgcggagaatgttccatttctgtgcataagaattaaagcacgatgaacagccacaatgggtgaactcagggttcaccaaaccggttcaggggtcaaaaccggccaggaccgataagcggttt

SEQ ID NO: 152764 - DNA, 534 bp, Zea Mays
tgtaatttcatacgaagttgtacgactctctataaatagatgaacagtgccctgcataaagtaccttttggtggtctaggtaattgtcgtgtgtaatcttttccctaggacaccttcgttctaactcattctgtagaaccgaaggtacgattgtaaattcattatacgaaaggggagaaatgtgatattgaaatatctgaaatgagttatcatgtttaacttcttcacattctttacatacttatctacgcaattaagttatggtttactcgttaagtcctaaccttcgtcttcgaaggagttatctcaaaaagataactgcttgaggacgaaggttgattatctttttaatatcgtgttgccttgttttcgactgtgtatagcaattgagaacaagtgaccaataggccgcacaatatttgttatggctagagtttcgaatgtaggggttaatatttttggttgtcagactgacatatatggtagtctaccatatgtgttagagtatatttggtagtctagatattgtctcat

SEQ ID NO: 152765 - DNA, 1619 bp, Zea Mays
ctgtgatggataagcatatgaacagctttgccagcccgagttccaagttccttcccttgccactcatctcgagatgaggtagatgcctgaaaaagaaggtttagcctgactaattatatcagaagaggacatttatggggaagataaaatgcccttcataattgctacgttacttaccaagtgggaaacatgctctaacatagggaaaacatataaccaaagacaatcctcccacatacttttagaaagcttttggccatggatgctgagagtctggaagagagtcctaacagctgaatttcgaaccttgaaatgaaaaaagaaaacttagcagcagtctgtacaataaagctattggtctttcgaaaatatgtgtcagcttttttcttcgaacacaagggaactgtgtatcattatattaacaagaaaaaatgggataagcaccatgcaaggccctcccacacacaccaatgggttcttactaaagtactaaacaatctcgcccttaaccacaaagagggctacctcgacccaaactaaactcacattcagccccaaagcaaggaggtaattgatacctcatgccgctgcaactcccacccccaaaagcagctcatcactaggcagtagggagctctagctacgtttggagattcagcatcaaacacccatgcttaatagcacggagaatttttcttcaaggagaattagaactttcatggtaaaagtaaaaggtgtggtgcaatgtgcaaagaggatgccaaaaatatctgtaaggaagatgccaaggttgccatcaattactaatattacaacacgacagcagtgccctatagagatcgctaatgattcaatgagctagaaaaactcctcagcaatgggtgttcatgcagagaacagactgtatgttgagaagatgcacctcaggacgatcatctgaacccaatttctggaggacagagaaaactgaaaagaaaagtatactataatcaactagttttggaggaacttgcttgctgtttgcctcttcagtcatttcacatgattgaacatctgcaaagcaaaaggagagctatgtattagggatatagaaaataagagaggaagtatatttatgaggtgatcacataccatcattcatgtgactagcttgctcaataggcttgctgactaatcccttcacaataaaatcagtagcagtccacaaaagtccaactgatgttaaacttatgtttatatcagttttctgagtaccatatgctccagttaccaaaatgcatctgtagttgttggcaaatggaaatttcagaaattgcaacaaatcgtaaactaagtaaacatacaactcccaggacggggataaaaaaattgtgaaatgaacatagcttttcctttcaaagcagtttttgttaataaaactccgaagctggaattcttttcttataatgttgtttttgttaatgaacctctattccaaacagagtttgtgacaccgaaagcaccaaaggtccctagatagctgctccaaatgatggcacatgatccttctttatattaacgcaaaatcccatgacttttgaaagccaggccatattcttgtgtacaggacaatatggtat

SEQ ID NO: 152766 - DNA, 1364 bp, Zea Mays
atactccatccattcctaaatctccagcgtattaggcattggtgcagtgaccaaggagcgtcgatttgcttttaatcactacaagttttcataatacccgatatcaataaagattcttaaagaatgcgcagaagtaatgaagcgacagacatactgagaagacagaggaacatgctaatacaacgaagactaatagaaaaatgaaaaaagatcgggcgacagagatttgtggacgaaaggagtatcagtcagtttgttggatgtctcttctacttggaaaccaatcagaaaaagtataataagatgatgtgaataggttgcaaaagatgacatgacagatttgtggtgacatgaaaataaagaaaggaagcaggttgctcactagttgtcaatttctgaaaccaccggctagtaatctacgtgttttgcgcgtctagtgcggatggtgtgcaaggaagacacaagagttttatactggtttggacagagtgtccctacgtccagctgggtgacttgtgttaccatgcactaagttcgtaataagggttataaactggacgatagagggacgaatttctaagtctctcagtgaacgagtgggagcagagtgaagtgttatgtgtgtcacaaatatgttagctatgtaggggtttcagcccctcctgttccatcaaaaaaatgaacatgttggctacttgtgtttgctcgtccctcgatcgtgatcctccccttctttttatataccaaggagaggaaaggcactattacataagtttaaaatcgtgtgagacggacgaatataaggtcttgtagtgtagcttcttgtcctccaggattcttgccaaccaaaggactcctgcagatgactactcctccttccatcgtaacactgtagcgatgctcgggtcatcgttgtgtgacgtcttgccttcgcagggattgccttattgtccttggttgaccacttcgaggacaaagtggttgaaccagtactacagaccatcatgtgataggaggagcctatacattaacatactaactcttgtggtgtccttcgaaccgcacactcgtgttagagcctgacttgcatgtacccttatttggaatggtcatcggcatgaccccgtgaatttcgaatttgggcagtcgggcgcagcccctgactctagggtcgggtgaggcagactttgtgagacgtggtttcgtattccgacccttcggggcgatcaagggtcgaccgagatgggacaacccaccctacctctgaccttttggggttcaggtatcggtcgaggtagagccatgaggtgggactgttatgggggttggggtcggagggttgggttcggataagacatgttatt

SEQ ID NO: 152767 - DNA, 787 bp, Zea Mays
ctgaggacgttcaaaaggcaataaaggaaagaaaaaatgttacaggagcttgttacatgacaggagcgcggtcaacatagagaggtataaggtgccaaagaagactgcaaagcgagctatgagtgaggcaaagagtcgagcctatgataatctttaccgaagaccaagtagaaaggaaggggagaagaatgactataagatgactaggatccgggaaaggaagacgagggacctcaaccaagttaaatgcattaaggatgagatggatcaactcttggtgaaaggacatgacatcaaacaaagttgacagaagtattttgacaatcttttcaatgctaagaatgagagtatggacaccaaattggatgactcctttgatgatttaaatagatgctttatacgcaggatccaagaatcagaggtcaaagaagttttaaagaggatgaaagggggcaaggcgatgggcgaatggtatcccaatagatgtgtggaaatgccttggggatattggtgtttggctaaccaagttgttcaaccatatttttcgatcaaacaagatgcccgatgagtggaggaggagtacattagttccaatcttcaagaataagggagatattcaaagttgtaccaaatattgagggattaagctcatgagccacactgtgaaactatgggagagagttattaagcagcgcctaagaggaatgacatatcaccatgaaccaatttggattcatgcctggaaggtcaaccatggaagcaatttttttaataagataggtcatgg

SEQ ID NO: 152768 - DNA, 348 bp, Zea Mays
ccctcctcacgtcctgcttgcactgcgccgcactaggagttgcctcgccgaggacctcgcgtgctggagctctgccgagccgccatccgtgtccaccacctgaactctgctgtctgctccaaggcagaatctgtcatccttttacttttccgtttatgctcatgcgcgtcatctggccttcgcatcacgcccgccgcgtgcggtggcgtgccactgcagcctcacgtcgtgcgttcaccgcccggtctcctgttccctagcgccagtgcccacctgcgcgtgctatccggccgagcacccatggcgtgcagacccagtaagcagacgccctccccaattgaaatcgtc

SEQ ID NO: 152769 - DNA, 752 bp, Zea Mays
aaaacccgctaaccacgataaaactctcctgtccaatctgctattaaaaaaagacataaaacaacgtcaaaatcagtggattcataggggaggctgccaaggctacgccctacccgcccgtcgtgtgttaaaggtagtgatagatctttagaccaacttaaatgtcccactctataagccaacacatagcatgtctgcatctaacatgacaatctatcataaaatgctatgttaacgactcagttgttactaactaattatttagtttcatctgtaaagacaacataagattaaatatccttatccaacacctgtgcaccataactacagcctcgtcctagtcctagcatgcgtcctaactctagtcatctagtgtccgagcctacaatgcgtcctaactctagtcatgtagcgtcctgtgtccgcgctaaccgctagtcatcggcccgctattgtctcaccagtgattgccctccattttctctatgccacacctacggttgacagccacccatcctaggctctagatcgacaatagctaactggccaagttgcccaggacaaggtactaactgcttgtcgtcagaccaacaacgcagaccaacaacgccacggttggctaacttagtagtctcgtcttttatctattccaggatccgccactggtcaaaatagatataaaacaatacatagaatcgcaagaactggctaagaccccatttggtttgtcctctattttatttctatttagt

SEQ ID NO: 152770 - DNA, 495 bp, Zea Mays
gaaggaacggcgttacggttgacggggggggtgaaccggccgtccgcggggaggactcggccgccggtgggctcgacggcggttcgccgtcggtggcccggttcttgggcaatgtgtaggtgccttagcatggggaggggatggcggacctagaggtgggctcaatttggtcagaggaggtcgggagggggctgcccgcggggaggtggcggagcttcgcggcggggttgccgtcggtgagctctgggcgagcaatcggggtgggggagtggtgtattgcgtttgcggtaaggtgaggaagctgctaggctaactcaatcgcttgctgggctaacagagagggagagagaagagggggagggactccccggagagggggaagacggcggcgcttcacgaattgggctcgggcgaggggaggagggtagtggtcgaggctggtgcgaggaagaaggggctcggagcgagctttttataggcgcgcgggggcgaggg

SEQ ID NO: 152771 - DNA, 299 bp, Zea Mays
cacagcatcgtccagcccacacccatccaatttaggatcgatttgtgggagggagcaggcgtgtaggaccgatttgtgggagggagcagggccacgtgatcaatttctctcttaaccattgttctttccttttgtctccaataagatctgtgggaggaatacattggtctgatcatgtagtgcatgtgcaatgatacctgtgaaatagaagtcgttttctggggggagctccatcgtcgggaagaggggtcatggctcaccacggacaaaaggtttgtgatttccatcaccacgctccc

SEQ ID NO: 152772 - DNA, 354 bp, Zea Mays
gctttttagagcaacaccaaggagtactatatttgagccctaaatgttgtttcccgactgatttaatttgttttaggaccttaaatatattatcatctccaacagccggccttaaatatgtgtttattaactaatccaccgtcccagcctcccagggccgcgcgcacgccgtcccgcgctttttccacattgccgcacgcccaatcccttgccacctgtctctaaactatgtcgccgtcgttctgtagttgggcatgtccggcggctgcaaccagccagacaaccttcagttccacatgaacctgcatcgtgaggagcgggtaccggccagagaacctgcagcttcacgtggtc

SEQ ID NO: 152773 - DNA, 1115 bp, Zea Mays
ctttttgttgatttttaactttgagggtaccaataagcatagtgcatagcaccagtacttttacaattatggaatctctgcaaagcaaggaagacattatactgtaataatttttgctccaatttcgcattgcaaatgttctattagtgtcacatttttctctaatgcttctagtgaaaaatgagaccttttggagacagtttctaaattttgtgtgctgctagcctaaattatgtgttgtttcataagctcagttctattaaaaaagtgtggcacaaattgagttaagtgataaaccaaacagtagccgcacatttaatggtgtgcctaaccttaggtgtggtagtaatccaaacagccgccacacatttataggtgtgcctaaccttaggcgtggagataaaccaaacaaagaactaaccttaggcgtcttaggcacgccacagatgtggcagggtgctaacgttaggcgtggcacattacacgtgcaaccaaacacatcctacatcttctgctactgggaccattgtggcgcaacgggttagcagaccgaccaagaaatctacaaaggtgtatgggccggattgggtggatgggctgcagctgtgctcgctttgcgaataagtagaacgagagttgcctggtgaagggcatgtaagaattattcactacaacttcttctccaagttctactgctcgtccgccgccactcttcttcctccttccctctgctactcctaatcgttctctgctactcttaattgttgttctcttctactgctaccttgtatccataccgagttgttaacagtggtatcagattcaacgatccttggccgatcctcgcgttctcgcgctggatccttctggtgttcattcccatttcactcgttttcgccgtcagcaagttctcatgaatccagatactcagatcatcttggacgagatcgctcgccgattcgctgatcatgatgccaaatgggatcggcgcgcgtcggagcaagaatctcgctgggaggcggtgttctctgattttgccaaaaaccagagcgatcgtgtcggggcgctcgagaaagcctccggtgcgttcgacgaatggcgtgtggggatggaag

SEQ ID NO: 152774 - DNA, 487 bp, Zea Mays
gtcgcgaagccgataaccttcgtcacctccgaccgccgcgcatctccttgaaattcaccggccaccgtccttggagcctataaattgagggcagggctagttacgccatgaaattgtgaagctctagcacccgtccccatactcgatcgcccaccagctcgcctgaatttcgcgttgcccccaaatcggttttccgccgccgtgaatcgagcccaccgtgggcagccctccacaggtcagccccggtcctctgctatttcgtttgagcacccttccatctccgtgatgcttaccgaaccattgaatcgagctagaccgccatgagtcgccgggaacacgatcatgttgccgttgtgcttacggccaccatggccggagctccctagtccaccgatagtgtaatttagttggggaaaacgttcataggaactcgaatttgggctcagccgaagattagcaccagtcttagcctcaatcggccggcgta

SEQ ID NO: 152775 - DNA, 446 bp, Zea Mays
ttgaggtatcaaatcgacaaacttattaaaggtatacatcgtattctatacgttctctcccataatcctctctgttgctctattctcccatgcacacaccttccaaaaagaccagaacacatcattagggtagaaaacagaaaacacacatctacttaattgacaaagattcagtataacatgctgagccttatgtccatattgacagaagtaaccgctatccatgacatgtcaacaacaaactgttctcagagagccactggtaataaccagctctacaactataattaacttgctgacataaatcgataaaagatgtggatttcatttttgaatggcaatagcacatattcccctactaaaaaaataaaggctttgtttagaggaaaatggcaatctggcaagaataccaggtggagccttctccacaatcagcgctcaagagc

SEQ ID NO: 152776 - DNA, 993 bp, Zea Mays
caaccactcgtcctattgaccaaactccacgttgccatcatgctgcacggatgcctcgtctatgcaaaaccagtcggttcagcatcgagagcgaggataatcctgcgcaacaaaaaccgacactgacgtcacctttgccactgggtttaacacatcaagtctctgaaatgtctgcatacaataagacccttatacatcgaacagtatttacaggagaatatacatggtgtattgagcctgtactgagataaatactctacaaaatctgccgccagcgcatcttccagctccagggcgccgataaatatcacagcggcagacatgccagatcctgcggcattgtcatgtgatgcaggttcgggccttctgcagaaaacctcattgcttgtgcagttctcagcatgctctgagatggctaggtactgcagctagatgacatcatgaatggatgctaactttaccaccactatcagagacctaaatcgaatgacggaggtgcaaaactcatgtctgatgcattcttaatttccactggtttctgcgtcgattgtgtggtcttctgtctccactgttcggttgcttgagcttcaattgcatcaagatcaaggttctcaaagaaaccatcatcaaaatataggtgatcagcgactctgctggcgacgtgtggagatggttctggtgctggttctggttcaaggtttataacagggatcgccagaggttgctggaagcttagccttctctttctgcaatccagcttagtcgatgattcacaattggcgatccctctttcacatcgatcctgtacaaaactgtacgatgggcttgggtttatggtatgatgttgtgtttgaatctctttgggagtctcagtgtaattgtgcctagcctctgaagaatagcttgaatttccggtccgagaagcagaattgtaagaaacatcaaggtaccttgagggtagaactactggggactgagtaaacaacgattgcc

SEQ ID NO: 152777 - DNA, 1825 bp, Zea Mays
ccggggccggcggccaactcccaggctgctgtcgccgcagcttcctctagccctggcgcgtcggcttccatcccctccttgtctcctcctgtgtcccatgcaaccaaggggcgctccaagtccgttcggtggggtgatctcagtccggcttcttcggatggcgcgacgtcgttcgactcccggccttccttcaaggatgtgctggtgagaacagcgaacccttcgctgcccggccgtgtggcagcccaagggtctgtcccggcagctggaaagtcctcggcgctgggaatggtgtaccgtcagccgcaccccctgtctacaaaacggcggagccccaggcaggccactcaacccacaccggcaatccgcccagctccaggattatctgaccatggatggacgacggtggagtccaagaagggtagaagtcgccggctgaaggctctgtggctcccgggccgggtcccggctgatcttgttgggcgttgcttcaactgcttgggctgcgatcaccgggctgcagactgcggcagcgaacctcggtgtttcctctgttctgcgcttggccacaagtcctcatcctgccccaaggcttcggtgtggaggaggctcgggtgtcctagacctgtgaagtcggtctgggagcggctttcaccggcggtacagggaagggtccaacgaccggcagggcgtcgtccggtttggcagcgtattgctccaccagaagccattccggtcgtcccttctgtcccggtgggcaacatgctgggcgtctcggctgcacagggtaatggcggccctgccagctccaggcgcaaacggtggaggaagaagaagcgcaaggagcgtgaagataagccggctttggagatttcggctccacctcctcccgagcagacgcttccggcgagtgatgagactgcttgtgttattgattggtcggttcagatgtctattgcggaagataatctcaagacggctgtggtgatcacagtggttagctctagagacgtcagcgctgacgagatcgcgttggttttggccccacggctggaaatggaggtgggaggattggttctccgtcagttctcccagtccagcttcttggctgtcttacccaaccatgtgcagctcgacacgctggtggatcgcttccatatcatcagagaagaaaacttcatgctctcctctaggcgttggacgaggttcgggggtgctgttggtaattccttgaagcatctcgtggaacttgagatcagaggtctgccgttgcacgcgtgggagacttcggtggtgcaacatttgatcaacccccatgcttgcatttcccaggttctgcccgacacgctggaaatcaggaatctggaagtctttcgatgccttgcttggtgttgtgatcctgaacatatcccatctaagaaggacctctggatcactgaaccagaccaggcttctgctgctgaagggaagaaggctctggtgtatccggtgcaaattcgttggggccctgttgatttgaatctcatacctggcgctccacagccgccagttggtgctggtgatcaggacaaacctgatacccccccttcacttagaagatgtggtgacaaccctccacccactcaacatgctgcagcctttgaagaccccgacataatgacccacaatcagcggcggccggtgcatgaccgattgggacctttgaggcgctcggattcccccagggaattgagccagccttgggttctggttgatacagaggcccggagcagccagccctgtgacctgcttgatgcagtggtgtgcagcagagtagggattcctc

SEQ ID NO: 152778 - DNA, 559 bp, Zea Mays
aaaaagactacgtatttcattgattccagttaccaatttacattgggccattctggacaagatcgtgtttaaaggacatttacattgggtgattctggacaagatcgtgtttaaagggcatttacattgggcttgtttgacaggactccgcctcctctgaaaattgaaaatggctctggctctaactttttttataggagctgttcctccattagagccgccgttttttttgcaaattatttggaacagctctccacagtcacgcagatggccagaccgcaagcccacagccgctgactgctgcttgcttgtttccgcgtattgtcatctttgaaggaagatgaccactcgtccactcgcctctggagacaagcagaaaggttctggagacaagaagaatggttgcacgggcacatatggagctgctcggagccactttttacggctctcgctcgggcacctaaattagctccggcaaggagtcagagctgtccgggaagcactaagtctaggctagttccaaacatttggtggcttacaccgtggaatatggaaatgg

SEQ ID NO: 152779 - DNA, 1149 bp, Zea Mays
cgcacgcgcacgtcccttctcgttgccccgtggaccccacccgtcagaccctgtccctaacctcccgcccgtgcactctcacagtggacgcacccacgtccccgcgtttcccagatacctccgcacgccccgatcccctttagagcccgcaccccgctcgcccacttccacctgctcatttgcgccctcagccgagcaccctcgccctctctctcgccctgcgcacgcatccaggcagctccgccaccgctcaccaaaacccgctgcccgttccacggccgtcgtcgagcccgcgccacgccagttgccttggtgagttccgccacattgtcagcaactcgggacacctctcggttcacccccaacccctctagtttgctcggtccgtgctcaccgaagtgttttcccgtgcagccggagtccgccgccgtcgacctgaggcttcaccgcatccccgccgcctcccaagcactcctgagttcgcactcaaggtgagcaacctccctatgcacttaattcatccgttactgccatagtgtccacgcaattcttcgctggagttgatccgcaccaccgtaagttcgtctcgctgtgttccatgccctctggtgcctccatgccgatattgcgccaggactgagttcgccaggtcaccttgatcgcgcctgagcttttccccgaacccctagagccctgccatgctcgttcctctcgtctctggcgatctcaccgccaaggggcaggagtggcgccgtccgtagccgtaaaacctttccgacgttgatctccaccgatcgatccagatcgcatggtcaagatcacagggtaccgattcgcgcccacgcgccctgtcctcgggcccaccagtcagcgcctgcgcccactggcgctaggcccggctggtcaacccgccttctcctctggtcgctggcgccctgtccccacttgtcagccacactcgcccttccgcgcctgtgcgctcatctgctggatctaatctaggccattgatcggaaatcgggcagtcagtttagccccgtgccccttcgcgtggcggttttgcttaagaaccactcgattttccgagaatcaacccgccgtcccgcaatttagcgtgcaggcccctgacttcttttaatcagacccctg

SEQ ID NO: 152780 - DNA, 404 bp, Zea Mays
ttctgcattttcagattttaaactgcccagttcagatttctgcatttttatgttatgcccagttcagagttctgcccagtccatatttaagcatcaactgttctgcccagttcagattgtaaactgcccagttcagattgctgggtgttctgagtaaactctgctgcccaaatcagattgtaaactctgcccagtccaaagttcaaagttcagagtacacctccatcaacaccccaaaaatcagattctaaactacccagttcagagtacacctccatcaacaccccaaaaatcagattctaaactgcccagtccaaagttcaaagttcagattctaaactgcccagttcagagtacacctccatcaacaccccaaaaatcagattctaaactgcccagttcag

SEQ ID NO: 152781 - DNA, 1360 bp, Zea Mays
caccgacttcattaacgcctgcaaatccactcagaagttcgttgcttgataaaggttcttcctttataacttctaaacagggtgtcttgagcctgatacaaacaatacgatctcttactacaaatattcaattttcatgagtctctgcttattgttttgattgattttatatttgtcagtcaaccctaaactttggtttggaaacacgggctccattacttctacatatttgcatagaaagttgttgcttaatcagggctcattccattacatatacctttatcccttccaaatagtgagctcagcttccacaatttgttttccattgttggtagtattacatatttcttcttttgataattgtgcatttttaaaaggcttatgaatgttggatgttttctaaatggtctatctaaatgacattataaaaaaaatcgatccttctcttttctatgactgtgtgcttaattgcgaactaggtatacaaagaaagtaaaagcatgcacatgaaataaatagttgcgactaaaaaatacctgccctatgttctaaattttccgacaattatttttcatgagatgtggtccatggaaaacaaggtcctctacttactgtttttgttgttttttgcagtacattctaaactcctgattagcaacatcggcttcattaacatctacaaatatactcaaaagtttactgcttcgtaaaggttccttctattacgccttcgtttataactacctcgcatggtgcattgatcttgatacagacctttcgagcatcttacaacggatattcaatattcacgactccctgcctattgttttgattgcttttttatttatcagtcaaccctaaactttggtttggaaacatgggcttaattactgtctacgtctacgtatctgctcaaaaagttgttgcttaaacaaggttcattccattacacattcttttatcccttcctaacagtgtgttctgcttacctttttacgttgttagtagtattacatatttctcctttagataactgcacgttttttaaaaggcttatgaattttggatgttttccaaatggtctatctaaacgacaatgtaaaaattatattcttctcttttctattacaatgtgcttatttgcaaactaggcaaagaaagtaaaaaacatgcatatatcaggtaattactacagaaaatttaacaaccccatctattacaactttaaattaaatagatttatgttcctgtcaatccacaacatatgctgcagaaaatttacatgtttatcatctattctattcagcttattttctcttaaaaatatatctagaatactgctattacattgcttacatgc

SEQ ID NO: 152782 - DNA, 306 bp, Zea Mays
tgcacttgaattggagaaggaggcttcaaaaatcgtttggcgagggaagggacaactatgtcaaaaaattgctttatatgatggtggaaagtgtcaccactatgcccgaactcttcttgcaggtcctcaaacaacgcattatggcttatcatgtatagaaagaacccgagcttttcctcaacttttatccttgtgtcacgtaccaacctttccttcctaagatagttggctagggctctaaaaattccaggttccattctaaatgctactcggcagttcttgacatgcccttcaagcaactccgaa

SEQ ID NO: 152783 - DNA, 679 bp, Zea Mays
gatgggtatgaggtatctaatcccggattgacagtttgacacttctattgcagcaaaagcataccattttgacttagagttttccatctatgataccaagggcaaatataaggatgggaacgtgctcaataggaaaaagggcatcccgtctaattagcaccgcaactctttgatctccatcgactacaaaaccaattaattaatgctcacattcacccataagcaaatgcagaactaatattgctaagagagagacacggttgcggcggaatgactataaaggcaatgcttgaaatcaaatacggtgtatgcattcatccacaagctcgatatctccatccgcacttctgcaggagggaaactgaagaaggaaaagcaatcttacctgcggcacgggcggctcgcccgtcctcgtagcacgagcgcaggagatgcggcccggggtgaggcactgaggcagggtcgcggccgaggggatcgcaacctcagggcgagatggcaatggtagtgtgatggggagatggcggcagcgggccagaatcaaagagtttagtcaaatctataccaaacaaaagtgcaattcttgtttttcgtcaaataaatttaagtttagttgaatctataccaaaatttagtaactttatggtaccgaataaatcctggtatattaataatacac

SEQ ID NO: 152784 - DNA, 315 bp, Zea Mays
cttgagtcggaagttgcagtgcaattgtgttctgatggattctcgtattgacaccttgtgtgatgagttgcgcaagatgaagattgaaataattccttctggtgctttgtctcacatttctgttgagccagctttgcaagaccagatcatcatggcccagctcagtgacaagggagtgcagattatcaaggagaatctccattagaagaccgagaagtataaatgtttccgccaagatggaaagggtgtcttatggtttgaaagcagattggtggttcctaaaaatgaggatctcaagaagagaatcttggatga

SEQ ID NO: 152785 - DNA, 757 bp, Zea Mays
gagttctcagagggcctcagtttaatattcagttcaagcgctggacaaggctggctcatgcaacggcagctccattgccgtcgctggtcgacatcgagatacaagggattccgttgcacgcttgggggcggtccacagctgaacagctacttggtaattcctgttggatcacagatgtgcacccggctacttccctgaaaagtgatttttcatccttcaggcttcgggcttggtgttgcgagttagagaagcttcaacgtgccatgaatctggtcattgttgagccaacgccagcggatcatgtgaaacggtgtttatcctacagtattgaagtgactgtcaccccagtcgagaagccactgtcagatgggacccctccacttcctcctcctggcaacgacaacaggcatgaagatggcgatcgtcgccgtcctgaggctccaccccctcgacgccggcgagaagaccttcggaggggacccatccaccgacgcctgggccctcttgctcctgtgaatgactgtggtaggggctctgctaaccacagcaccagcgatgctctagaggcgccaagatccgctgagacagagacggttcaggtcccaagggcaacaagatccaaagaggcagcggcggtccaggttctagctttggacaatgaagtcctttcaacaccccttcctgttctcgagttgtcggctctctcgggggacgtgttctggccggcggcgattggagtaaagcaccatggaggtgg

SEQ ID NO: 152786 - DNA, 485 bp, Zea Mays
cgaatgcggatcagaaacgggatacgaagatattaagaaaaactcggaatcgaataatatatatccatttgatatcgatattaaaaacagatatgagtactcgtattatttttcacaaattttagtgggtatggataacggataataagtccaatatctggttttatattgcatccacgtcagctcgcctccggtccgaaatggtgagaggagacgcgacgcgcacgtcgccttgttgatacacaagttgaggcacgtgccacctgggtggtctggtggctgggttcagtgaatgtgcccgatgcgacgcgagatcggattagactatggcgctgcctcattgcgataaggatgagcagctgaggtagcctccgtagcggccggaccaagagcggcggcatgtcacctctcaagttcaatatataaaattcaaatgcatggtacgtacaacccaaacacctgccacgaagaaacccaaacaatct

SEQ ID NO: 152787 - DNA, 645 bp, Zea Mays
gtttgatcattctttgaagtaatctcttgcttagttgtcctcgattctcttatgttctataatccatacttgttctatattggttgatcattctttgaagtagtgtgttcaaacatctactcaccttgctcttattatattggtgactgttagtactacgcagtagctcatattagacgtggtgggagcactttctatcctgataatggttaaatctgagccactcaaatgatctttttctcttagtaccactgtctgaatactcctgcccctttaccccaattcccatggtggtttttataggttggttttgttgctgttgcaggtaatgactaatgtaatctgctgtttgaattggttaaggattttattatgttctaggcatgtagacatattttttctgttatttcctcttcatgtggattatgtgcttcatatgatgcttttggataccttgttatgtatttctctctttagataacttagcataatatcttttgaagcaataacattgatgcattgttgttttggttcttacataaatagtttcgttaaataaatgtttttgtatttaatacttgttcttgttcgttgtctgtttgtagagcaactcttttttaaataagactcgaaagagacgccgac

SEQ ID NO: 152788 - DNA, 497 bp, Zea Mays
gcattgacgatgctgagatggacgtcatgcttagcctgctggccgggaatcttccgactctacccgaaccgagccgatggccatcacaactgggcaagaatttggtgaagaggtggagacttgaaaatccgaaggtgcccgcccaaagcgttcacgccgagtgaaccgcccggctacacctgttgaggagaagaggaagaagaggcgacttcagtgactgtcgtgcttggatcaggatgccctcccttttgtaccgattcctgatgatgtcccggcaggggccattcctgaggttgatgccaaaggctgtgatcatgcgcaggctactggcggcatgcttgatgaggatgaagaggaggaataagaagaagtcccgctgatttgcaagaacagccgacactatagaagcagtgagggggggggggtagtgatatcccctctccagctctgtcggcacttatcagtcttcagggactttcaatatcggattttgatca

SEQ ID NO: 152789 - DNA, 560 bp, Zea Mays
tgactgtagcgtgacggagtgggtccagctggtctattgaagcttggtcccctgggtggaagcccaaagggtcgagctctctggtgacgatcttgctgctgagctcggagaacctggaatttcctcttgatgtgccctttttcttcctcttttgccctttccacttggatggatttgttggaaaggtgagagaagttgaggaagtcttggtggtgaggatggtcttaagctcgggtcttagccctttcagaaaacgggccatcttcctggactcgatgctgacatcgtcaggcgcgtaatgggccagctccgtgaacttgtgcacatactcactgacagttctcccaccttgagttagctcccggaactcatcttccttgagttgaactatcccctggggtacatggtgctcacggaaggctgtttcgaattctgcccaggtagcatctctgatggcctcgctgaaggtatcccaccatgctagggccatcccagaaagttgatgagcagccagttgaacacgctgattttcggggcatccgatggcttccagtttcctc

SEQ ID NO: 152790 - DNA, 562 bp, Zea Mays
gggttaagcgctcttgggcgatgtgatggagatatagataacagaacatgttgaatcattatgcacacctgcatgactgtctgaggtccttaggacaaggacatctgtaggtgggcctaataccttcggaggttccatgacactaaggcccttttcagagttcgtgtccaacccgcccgttcaagatgggagcccagacgatagagtgcaaccttcttcggatgaaattgaggtactcatcaccgcacacaagggttttcctgaggaggagagacagacccacttctggatgcaatttgttgctaatgatgctgagacgaacgctgttctaagtgcattggctggggaatcgtctgggtctgttcgaactgaatcagtagatgctgtactccaacgtctatgcgatggggagaaaggaatttgcagccttggtagtgctcgtaaacggacacgccaggtgggctccccggttgtgttatccgaaacgaagaggagaagaagaaaacttcggcgcttgtccggcttggaactggaggctgactccacagctccaaaccctggt

SEQ ID NO: 152791 - DNA, 445 bp, Zea Mays
tgggaagaacaagaatagtttaaattttatctcaggtttatcatatgtttgaaccaaaggaatctgatgatgcaaggcgttattcctagcttgaaaatctttgcaatctgaactacagatcacataaccaccgcattttgattatatttatactgcaaccagagcttaaagtcctattgttactgcttagcaggttttttagttatatttgctgctagatcttgttttcagttacatttttgaaattttgttagaaaaaacaaatttgggattgggcatgtagctggtcggctaccagcttcgagggattgtttagaagactactggaaaatgtttccttaaaaaaagcacacaccatttctctttcgaactagtgcagcatggctgcatgggtggaaccttttgcaattcttataaaaatgacattttactagaaaattccaag

SEQ ID NO: 152792 - DNA, 674 bp, Zea Mays
cttaacttttgcccgttggaagagacggatttcctcttcccttaatattgtagtaagcctttgttccatataaattttcattgttaactcattaggtgacaaatgagaagtctctgcctttttgtccaactcatcaagcttccgagtaagttgatacttctcctttcgaagagttccggttgtattcttagaccagcctcgaaggtattgacgcaaggatctaattttgcattgccatttctccatcgctgaatatcccctcgtatgctgctgccaaatcgatgcaaccatatcatggaacccatccctaataagccatcctaactcaaatttaaacaacgatcgagtgccaaattgtgaggcaatcttgtcgatgagtaataatggtgtatggcccgagcgtgatctatgaagcgcttcaacagtggcattagggtattttagttcccaatcgatactcataaaaactctatctagtttttcaagtgttggagggtctaagttgtttgaccaagtaaattgacgacctttaattcaatttcttttatctcaaggctctctatgacagcattaaatagattaggccatcggggattgaagttatctttatttttatcctctggccgcctcattatattgaaatctccccctataataaaagggttcagttccgc

SEQ ID NO: 152793 - DNA, 551 bp, Zea Mays
taactgtaggttgaacggcggcggtttcgtagccgagctggagcggagagggaagcggcggcggtcgacgtctccgggtagtgcttgctcctcgtcggcgattggcccttcgagccctcggtacgccgtccagatccgaactccgttgtggtttctattaggttttagttgcttcatttgttcgatctgtgtggttctagggtttgtggtgtgcgaatattgggcatagaacctgaacgacggtttcgatctgtgtggttctagggttatgttgcgcgaatattggttctagggtatgtagatgctagcggttctaatttgtggcaggtctggtcatgttgtgctttttgttgttcaattgattcatctggaaactaaaaaaagaacacttcattacatatcatattggcacgaaaatgaaacaatggtaaccagggtagtaccgtcgtctgaaaatgtcgtcattgtacacagggatgtctgcaaagtagcattgcacaagcctagcataacctgaagacctatcccgatgaataatacgtctacctgga

SEQ ID NO: 152794 - DNA, 666 bp, Zea Mays
tgaataacaagttctatatataaaaaattaaaacaactttacccttaaaaaaaggaagaacactaccagcgcaggtcacttgtttgttactgtataactaggtggagaacttctacaattaggaaatcaactctgatctagtagctagtgttattataaaatagtttttttcctacgggcatgtgattttctttttagttaggatagcatgcaaaagataataaatggtaggaaagtatgtatcctcgtagtgatataagactgtccgtagcaaatcctgtaacataggggttctgattgtagattacactgttttactgggcaaaatttgaaatagaggatctgataaaatagctgctcaagacagactaatcatggcctggttttgtttaacttttaaactagtgcattccttgtagacagtagactttatctagatattgtgcatccttggtataggacaaagcttcatctggacaacttcttttgatataataaactgtgaattaggctggttcaagaatcacatttttttagttttgtttcttcatgtatacactactgacctctattactaatgtgtttacatggttcaaaactgttttggtaatcgaatttattaccatataatcgtcatgtaatcaaactaacaaattataaagaaac

SEQ ID NO: 152795 - DNA, 685 bp, Zea Mays
ctctcctgcccacacagcaacctgcgccacccctctgcacgccctcacaacaaactgtgccaccctcacaacaagctctagggagatggaagatgcatctgcagatcgaccataatgggagtcaggaagccagcagccatacgatccagctaaacatcctaagagaaaggcaaaatcgaaggatccagcatggaactattgttattggccggatttgaacaaaaaagatgtggtgaagtgcatcctttgtggcaaaattgttcatgcgggtgttagaaggttgaagcagcaccttgttggtgttcatggtgatgttgataagtgcccgaagacaacatcggcaatcagcaaagagatgagtgattatttaaagaagaatgctagacagaagccgattgagttggatgatgataaagagggtgataaagacgatgaagttgaggtatttggagaaggggaaagtagagcatcccattcagttgttcagcccagttccggaacaacccaaaagtgaaggctgttagctgaagcaagccaaaacaattaacgcgcgttgaagtcttctaagtcaattgcatccatgcttcgcaaagcacatgaagatgtggttcctgagaggcattgcaagggcaacactcaaattacattgcaacgaaagagcaaggaggcgaaggaaagaacagat

SEQ ID NO: 152796 - DNA, 374 bp, Zea Mays
cggaaacaaataacagcgatggagcggttgaactacgattacgacacgacctaaaccagcaacaagactcgacacggacacaaactcaacaaagcaatctgaaacgaaattgcaaggctaaacaaggtttctaggacagcggaatattttttgtatggcaattatctggagttataggatgaaaaaaactaaactaaactagggtaagcctgatggtaatacctgggtctttgaataccacttgataggaatgggggtgcctgatcttccgtcaggtgaagataactatcaatttggtggagatgtcacacagacgatccgacttccaatcaacacgactagaaccccgcaatcgcagcaccacttctcctctg

SEQ ID NO: 152797 - DNA, 1200 bp, Zea Mays
ggtgatggggtgtcaaactgtgatacattagaagttgaactgttctgcacatgcaatgcggttggtcttacatgaggataaccagatacttctgttatgttgttagcatgaagctgtttgatttgcttaggaataatatccccaaaacttgcagagacactggatgatagaactcgattttcattggcaaagttcgacttcaccaaagtggacgtggatgtgtgttcctgctggagacgtagagcagtcgattcactaaaacactcatcggtatcttcggcaatacctataagacaaagacacgtttttaatgtatgtttatggcttcaaactttaaattgagagtgactccttgcaagcaaaaaggcaaggattaatgaatcatagtgtaacttctacagtaaggcaaaaggaaatactgcccaccaggtatgagccagtaacaacgaatggcggaatggcaagctaattgatgatgattgaaatccatcggatagagaatttactgcagtaatgctcaaatgctctgaatttacaggaacaaacatatttctacaggttaacatagaagacaacaatatatgagaaatgtctatgaaggccatattcaaatccactagatgtagcatattcagtaacacgcattcaaatcaccatttcatttctatttctacaccttcaaaggttaagatatgaggcaatagtatacttcatgcaactagtcctaatatatcacaattgctatagacctaccacagaacttcatatatgggtgtaaaatgaaccaacctaatatacacaattcctcatatgccgcccataaaagaggatctagagtcaacgcttgtgtaaattgttcagctgcagctgaaattctgcctgtgcacctgcacacagttgagataaatatctgaactctgaagaaatatagaatgcagcaacatggattcagttaagccatgaataataaacctgtagatcactccaaggaggtagtgtcctgttgctccacttggaacctgcagaaggatgaaactaatactagaaacaagctgacccaatacaggaattaaaacaaacaaatgtgattgattttattttctaagtatctacttcacctctgtagaatcagtgaggaacctggctggtgccaaggggctttcctttttggccagccaaactacctagctcctagggctg

SEQ ID NO: 152798 - DNA, 416 bp, Zea Mays
tctacttggagacgaccacgctccatccccatacgtcggcgcctgccacttcgcgaaaattcacccacactatgttttcccaccactcttcgccgcctacacccagtactcacactaggaagatccccggcaccctccacacgcggcgaagtctccgccgcagccacatccaacgcaacaaaataatccaagccttcatccgaggactcctccgtccaaggaaacgaactcccagattcaccatcagactcaaaacactcagacactgaaccaaacaaactatcatcggcaggcactacggttgaggccgccataaaatcagaattgtcagcagcggttgcttgcgcaggcccaaatgtcggaacctacgcagcaaccgaggttcagtatcacagaaacaaaagtttacacttaaa

SEQ ID NO: 152799 - DNA, 1870 bp, Zea Mays
aggtttctctaacctgaggtctgataaactcaagctgtcttcaatcttgcatcagagatttgtttcagcaacgttatagccaaaacatagtaacagtgttaaattcatgatgcgttacaaaaatattgatacaattttttataatccaaaaaaaattgtttaacatgtagcttggccaataaaccacaggtttctctaatctgagatctgataaacccaagctgtcttcaatcttgtatcagagatatgtttcagcaatgttatagccaaaacatggtaacagtattaaattcttgacgagttacaaaaatattgatataatttttataatccaaaaaaatgtttaacatgtagcttggccaataaaccataggtttctctaacctgaggtctgataaactcaagttgtcttcaatcttgcatcagagatttgtttcagcaacattatagccaaaacatagtaacagtattaaattcttgatgcgttacaaaaatactgatacattttttttataatccaaaaaaatgtttaacatgtagcttggccaataaaccacaggtttctctaacctgaggtctgataaactcaagctgtcttcaatcttgcatcagagatttgtttcagcaacgttatagccaaaacatagtaacagtgttaaattcatgatgcgttacaaaaatattgatacaattttttataatccaaaaaaaattgtttaacatgtagcttggccaataaaccataggtttctctaacctgaggtctgataaactcaagctgtcttcaatcttgcatcagagatttgtttcagcaacattatagccaaaacatagtaacagtattaaattcttgatgcgttacaaaaatactgatacatttttttataatccaaaaaaatgtttaacatgtagcttggccaataaaccacaggtttctctaacctgaggtctgataaactcaagttgtcttcaatcttgcatcagagatttgtttcagcaacgttatagccaaaacatagtaacagtgttaaattcatgatgcgttacaaaaatattgatacaatttttttataatccaaaaaaaattgtttaacatgtagcttggccaataaaccacaggtttctctaatctgagatctgataaacccaagttgtcttcaatcttgtatcagagatatgtttcagcaatgttatagccaaaacatggtaacagtgttaaattcttgacgagttacaaaaatattgatataatttttataatccaaaaaaatgtttaacatgtagcttggccaataaaccataggtttctctaacctgaggtctgataaactcaagctgtcttcaatcttgcattagagatttgtttcagcaacattatagccaaaacatagtaacagtattaaattcttgatgcgttacaaaaatactgatacatttttttataatccaaaaaaaatgtttaacatgtagcttggccaataaaccacaggtttctctaacctgaggtctgataaactcaagttgtctttaatcttgcatcagagatttgtttcagcaacgttgtagccaaaacacagtaagtgttaaattcatgatgcgttacaaaaatattgatacattttttataatccaaaaaaatagcatgtagcttggccaataaaccacaggtttctctgatctgagatctgataaactcaagctgtcttcaatcttgcatcagagatatgtttcagcaatgttatagctaaaacatggtaacagtgttaccttcttgatgcgttaaatgacacgtagcttagccaataaaccacaggtcattcaaacctgaggtttgataaacccaatatgtctttaatactgcatcacaggc

SEQ ID NO: 152800 - DNA, 470 bp, Zea Mays
tttgcaatgatggaacaaccactcagtccggggtttgtttgttaatttgtttctggtgggagatattgttcatttcgatgggtaacgtagtgaggggttagctgtgggcgttgggttagctggggaatggatgccttgtagagatttgtgtgtgggtgtatgtgtagctttgtattgagctcagtgttatgtgactcttcaccattcactagccagagcttttgtggaatgatctgattttatacaattagagtgcggctaacgtactggttatctgctcattgttgattttcaaatggaattctgttatatactttttatactagttgctggtaagctgtatattagagattagagcaaatagtagtactgggctactggcatatagggcagtttgaattgttgcccgtggaagcctggcccaattttggtggttgaccgtggacaaggataccatttggatggcagcc

SEQ ID NO: 152801 - DNA, 328 bp, Zea Mays
ggggagtgtgggaagggtatctgatggatgggtatgggcatggtagatgtgggtggcagcaaggctgaggttggcggtggaaggttggttgaggtggatcggagtggagcggctgtggtgatgatcggcggtgatggtatgggtggcgcggcggggtttgataagggaggtatcccgccataacctggcatgccatatgggatggaagtaggactggtggacgctaggggtggtggtggtgttggcggcctactgatcatttgagtgatggcggtggtgagatcggcaagggccttcgtcatggtgtcgatcttttgctctagcgctg

SEQ ID NO: 152802 - DNA, 603 bp, Zea Mays
tgaggttatggccacactttctcaatattgcatgaacttagatatcaaggttcaaagcatctaaggatttcctaactaaatgagaaggaaaatgaagattacaagctaggaagatgttagagagatagttcaacggttcaactctctcctcctatttatatagggttattcatatttcataaactattcatagatacataaagtctatccactcatacaggatcaaaatggaccaaatcttggatttctttatctgacgaccacacactcttcacgaagttggttcacctcaacgcaacctttcgcgctgacaccacatgcgccttcgatttcctttagaaccgtgttgtcgggttttgaggctcaaattcggtgaaacccgtgaattgttgtgttgtctggttttgaggctcaacgaccaaaatcctcatgggtaccgtacgcaccccacatccttgacatgtgccccaccgcccccaaccacgttgacgatatatgatccacttctccatgtccttgcgtctgtcattgttcctaggtgtcagtcgccatggctactcatctggcttctctaggtcctcgatcaagacccaatgttcgtcc

SEQ ID NO: 152803 - DNA, 284 bp, Zea Mays
atgaaagcaccacgatcacagaagaaagtacaaagacttaccggatgtatggcagctctgagcagattcatatctaggctgggagagaaaggcttacgattctataagttgctcaagaaggtagacaaattccagtggacttcagaagcacaagaagctctagatgcgctgaaaaaattcttgacaacaccaccagtgctaaaaccgccgcgccgagccacgccgactcaaccggctgaagatctgctattatacatctcttgcacgactcacgtggtgagcac

SEQ ID NO: 152804 - DNA, 845 bp, Zea Mays
gggtgctgggttgaggtccaccttgacctggggataataccccctggacgccccgcgggtccacttgccctctccttgcgcagaaaccacatgccgacctatccactgtaccgccattgccatccgtgagggagaaggggaattgtcgcgatagaaatctgggttggccgtcgtctgcaatcctggtgtggacctgaaggcttctcgtggtcgattggaaggcggtcgcataagcttcgctcaaaattagtcactagcgccgcaggaattcctcatcgtggttgtgctccactgcggatccgcgccaccatgtggatagaagggtcctcaccccgaaccgaggtatgttgggtaccttactgttcgccctgctctatttttagtagatcacgattcaatttagaaattggcggtcggctgcgcggaattgaggtgctccggccatggccttgccgcggtttccgtcggcgccgccgtgagcatatcatgtttggggaaagaaatcttggccgtcggatcggatgcgggtggatgagaatagaacataacgtacagttttgttcaacgcaatctgggctgttgatgcagtagcgatcggcttaaatcaggattagtgtgtggcctgatcctggtcgtcagtcatcggtcgggcgatcgcggacaaaacaacactctcgctggcgatcgatctaatcgtgtgtgttggctcctaatcggacggctatgactacaccatacccctttgccatgacagaatagcataagagaccctgaattatttataaatcaacccacaatcctggtggggaagttctgagtcttaggaaacttacgaggtagcccct

SEQ ID NO: 152805 - DNA, 383 bp, Zea Mays
ggagggtctgcccttttattgttcaagggtagatcttacaatagggacttgtttgctattcgtaagggggcactctgccaccccaggttgaggtagaattcccaatgtcgtccgtagggccgtgcgtagccgtactcccggtatggtgtattgtcatgtgtgcctgccatacgggtccctgtagggagtccttcactgatgtattcgtagaagtgtgcggtgggtcctatgggttagcctcatgacttggtcgtgcgcgatgtagctctgcttgtcgtcacgagccctgcatcactagtacgtatacgttagcatacgcttggcatggcgcattgttctttcttccctaatatgcgagccactgctcagactctagggctaag

SEQ ID NO: 152806 - DNA, 690 bp, Zea Mays
cgctcttgctgaagtcctgtgttgcagctgctcagctgtatgcttgtgacgagcatgtggtgctgggggccggcggggcacataatttcaagcaagcagatgaggatctacaaccaggagggtgtatccatccatgaattctagtccaacacccgagcatttaaccaaactagcacctttgatttcatcctgtgtctggcacgattcgtgctctggatcgtgttcgtcttccctaacaacagctgggtccggtgagctgaggtttgggtttgggggttttcaccagaggttgcacaggattagagtggtggtagaagacaaccaaccgataggaaaggtcggggcgcgtggaggtgttacaccaagacgagtagcatggtcaggcctgggccggcataaactgagaccctgttcaaaattctaaaatggggcctatcactataatcactcgtcaaatacataattttatatagagcaatttgtttacaattttacggacatagaaaagatgaataggaaaaatataaaattaatgaactttataaaagagcattaagattctttccgaataatagaattaaattaaaaattttatattatgttctgacaggcaacaacctattgacgttggcgactagagtagttgtatggtaaccacaaggatcgggtgatagggcctctccatcactt

SEQ ID NO: 152807 - DNA, 711 bp, Zea Mays
aggacatgcccagggatgtactacaggagcaggcacaattcaactccctccctgcctgaaccagtgaagcattcaatgcagaataccaacaatatcagctccagacaccagcaacagccccagttgcgacacaactctcttcataaggagcaggaacaaatccctcaacctgcactcaacgcctcttcagttcaacacaaaaaatcttacctctgtgcagttcaggagggccaaaccatggaggctcactacccaggagatccaagggcaaggccggcgcgcgcctcctgcgccatttcagcaactggctctttccgtcgtcgcagggatgacctcatcagcaaggcggtggtttgctcattcgatgggaacaaccatgaggttgacatcctttcggcaggagacatgctgagacagaagttcgatcttcgccatggtcagtatcaactagttaagcattacccagagcagttttttattgtcttccctgacgcaagaacaaaacaatgggcacttgatagaagatcggtttcatatcgtgggcgagagtttcatttcggtgactggtccgaggagagctatgctagaaagacaagctgggagtttagagttaaggttcgggttgaagggatccctgtccactgctggggtgaagaggtggcatccacggccatgggcaggtgctgcaccattcactatgtccaggagcgc

SEQ ID NO: 152808 - DNA, 294 bp, Zea Mays
catctttgctatgagttatgactttatgttttaaacttgatctttgattatcaaaatcctcaaaagtcgatcttgcccgattgtgcaaactacttggacccccaacatgttttctaaatatcaacagggcattcttccattgcttgaagcccatttttgtgaaagtgtcatgacaaaatttctcatctttgcaatcatctctaaaaagatagcaataagcactatccttcaccaaactatattccaaccaattgtgttgcttaaaccaatgttcctgaaatgaccttttatcat

SEQ ID NO: 152809 - DNA, 383 bp, Zea Mays
tcgagcaaactcttcatcactcgaggtcagcttcgtcttaaggaaactgaatactgaaatggccagagtaagatccactgctagggtgtcccgtgagggagacgagaccaaagtaactgaaacagcaccggtatcagaagtgatgagaggatcatgtctggttgtgacggaagaagctactaccgaagatgctactgccagagctgaaaagactatggccgaaggtggaagtgacaatgaaagtgaggaggacaacagcattctgagcccaacgaaacctagtcacattgagtttggaagatccatcataacaacaaaggatttggttgtgatgaaaaagttgggctattttggggaaaatgacgatgaactgatccgttttg

SEQ ID NO: 152810 - DNA, 456 bp, Zea Mays
ccgggaagctggcggcagggacgcgatgaaggcgcgcaggacggccgcttcactagcgccttcggacggcgccggcgtaacggagaaggcgatggtgacaaggatcaagaatgcggcggcccaagacattggagggagctgcagtatgctgccttgagcattgagtaggctgctgctgcttgtttcttggtgtgccccgtgcgcggcgctttgaaggggggaacgggaacagagtcagagacagatgactgggcatttgacggctgcggttgtgtggtcagtgggatagtggcggcagcatcagggaattgaagtgggatttggaaatgggccccgccggatcggtgctgccgaaaaggaagctgttggtgtgcggtggtacccaccgagacaggtggcggcgcagtgcgcgtgatttgatgagtggccggcgaatccggtgtggtggtgcggatg

SEQ ID NO: 152811 - DNA, 644 bp, Zea Mays
agtatggatgtgctgccagccaatggaatggacaggcacgccgcctacgggatggtctagtcaccgcccgccagtagagtggacagggctcattaaatgctgaggcggcacattgcctgccaatggaatggacagggctcattaaatgccgaggcggcacatcacctgctagtggaatggacaggcggcgcgccttatccgcaataaatacagaggctgcgtggcccagaggccttacgtcaggctccgcccgttggcttacgtcacgtgcagtaggccacgtggcggcatcgggtctccgcctgggcggggagcggaagcgtatgcgataaggtccggacacgtgtcggcttcggacccccgcctgtccttgattaaggcctgggtattctctgtcccagaatctcgggaccccgctgtgagcggcccggaccccatacagaggggtccgggtcccatccgagaggtccggcttgcccacgtggaggtcctggactatacccggagccctggatttgtatatgcaggagtctggcactttcccatggggtctggactcattgctgataccttggagtatatcatcctttatggccacgtggcggccccggaaccgcccacgtggtgggggtcgggtgctgttg

SEQ ID NO: 152812 - DNA, 826 bp, Zea Mays
ggagaaacagaagaagaaccggacgggatgcccacggggtcctgggaaattcgaacacgtctccacgagccgcgcagtgcgccaaatgattgcgtcctccgatcgggtccctcggcttcgctgctctacaccacccgcgcacgcgcccgtcacagcccgcgataaacgaaagagatcctggacagggaaagcgagcccgtgcggtgtggtcgagccagccagccagcgaacatggcacagtggaggtggcaacgacaccggtgaggcgagcctggttcctgaagaactcgctcgcctgctctgcctccctccctctcacaaaatcaccaggggttgcgggctgtggccctggagggcagggcatgcacgcgcgcgcacgaccgacgaccccctcgtgcaagctgcaaaccaccaccccacctcgcccccacgttcccttacgtgccctcccgtccagcgccgcgcggttgcccatcgaagcggccaaggcagggcgccagcgccacccggcccggccccttctcctgcttctgcttgctctggtctccctcctcctcgcgatcgagctcccgcgcttggcttggcttggctgcgcacttgtctaaagtctaaaccaaagccgctccggccatggtcgcgtcgccgtcacccacaccgtcggcaccctcgtcctcgccctgcagctgcagcagcagcagcagctgcagccccgtcacgtccggcgcggcgcaccgccgccgcctcccggacttgcccgccgcagcggaccgctccggcggggcggcgcgtgcgagggccctgttcttcgcccggagggccagcggca

SEQ ID NO: 152813 - DNA, 314 bp, Zea Mays
accctcaggaggaaggacgaggagtccaaggtgatgtcactgcattttgcagagtcatctggtgagacgttgctggagttacagacagttccagagacagagatgatgcatatgttgatgagaagtgccacgaacatcgctacaccactttcaagaaggaagaacctgcaagcatcctgaaatgcaaacgagcgaacagatgtgccctgattgatttgtagccattttttctcggctgtggaatgcgagaatgtaagctgaattgtttctggattctggatccgtttggttatatatactcacattgattcctc

SEQ ID NO: 152814 - DNA, 302 bp, Zea Mays
ccactagttccaccctgggacaagcaccggggagttcatgaaccacaaaccacctaccttcgctggctctccagatcctctgcacgccgatgattagttaaagtcggtggagaagatgttaaatattgctcaatgctctgaccaggagaaggtgctctatgcttctggtcgttttactggtcctgctgctgtttggtgggattcttatactgctgcccatgatgctgctgatactatcacttgggcagaattcaccacacagttcagaaatcatcacattcctgctggactgatgaagatta

SEQ ID NO: 152815 - DNA, 281 bp, Zea Mays
gcacaattttaattgtgacaccaaattgtgttttcacataggcgaaaaactgagtgagagtcaagcatcagactttaggcgtaaagggaaagtccataagtaatgagagcaatcatcaagagcaactaaataatatcatcaagaacgactaagtaatatttgaaacctgagacacttaaaataggagatgtccacaagtcacagtgaatacgatcgaaattgttaaccgcacgagaagtagacgtatgaaacggaagacgaacatgacgactcaactgaca

SEQ ID NO: 152816 - DNA, 854 bp, Zea Mays
cctctacccagttcggcgccactgtgaaggccgtctagtgtgacaacgggtgcaagtttgaaaactccagtgctcgtacctttcttctcagccagggcatccaccttcacatgtcctgcccctacacctcacctcagaacggtaaagttgaacgcaacattcggtccattaataatgttgtttgctcccttctgttccaaacatctatgccccctcatattgggttgaggcactctccacaacaacaagactacttaacatcctgccaaccaagacccttgccttctctaggccgcaccttgccttgcatggcactcctccgacgtatgatcatctacgggtgttcggctgcaaatgctacccgaacttgtctgccacagctccccacaaactcgcacccaggtctgccctatgtgtattccttggctattccgaccatcacaaaggatattgttgccttgacctctcttccaatggcatcatcatctcgaggcatgccaattgtcatctttgatggaactgcctttccctttgctgatcacgatggaccacgctctcctgtagcgtttgaatttcttgatgatcttcacactgtgcctgatcctattggaccacagcacatgtttttgcctacaacaactcccggtgacccaaaatcatcggcagcccccacagaccctatgttgtcgctgccttcacccgcgccatgtgcggcctcgtcgctccttcccgcgccaagcgcggccccaacaacgccttccaccgcgccaagcacgacctcgactacgtgcccggaccccgactacatctcgccagcgccccgcacggtgcaaccgtgtgtcgccacacgcagc

SEQ ID NO: 152817 - DNA, 430 bp, Zea Mays
gcaaaacgagaaagtcattgcttatgcatcacgcctactcaagctgcatgagcagaattaccccacccacgatttggaattggcagccatagtgcatgccctgaaaatatggaggcactacctaattgggaacaaatgtcacatcttcaccgaccacaagagtctgaagtatatcttcacttagccagatctcaacctccgtcagagaagatggctagaactgatcaaagattatgaccttgagattcattatcaccccagaaaggctaacgtggtagcagacgccctcagccgaaaacctttcgggataaagggaaccaactttttagaagattggaagaaggaatcagctcaagtgaatgcatgtttgggaaacaacggcagcctagaagtcaaaccaatgctagaagacctcatatgcaaagctcaa

SEQ ID NO: 152818 - DNA, 419 bp, Zea Mays
ggttgccggcgttgtaaacagccatgacgacaaggaccatgtccatggcacgatcagacgcgtggccgaagccgattccgagaaagacgaagtgcatggtggtggccaggagccaatattctttcagtgccttgatcaggagcaaccccccgatccggtgcatttggaggacgctagggtcgaatttccctccgacgaggatggtgacggtgatgacgtccgcgtctcctttgcaaccgccgatggtgatcgcctcctcgaggagcaggcggagctggacctggacgtggaggaggagcaagaggacacatccaggtatgactacgttacgtggatggcgccggagcccgtgtccatccacgagcgccgccgccggctgctccaggggatgggcctcacgagcagcaaggacctcctcc

SEQ ID NO: 152819 - DNA, 398 bp, Zea Mays
accatcctcactttgtttgtttttgaaaacccattttgtaccgatgggatggcagttagaaggaggtggcaccaaaacccaaacctgatttctttcaaaattttcaagctcctcatgcatagcattaacccagttaggatcagataaagcatgtccaacatctcggggctcaaaagtagcaacaaaagctaagtgagcaaaatgagaaatgtgttgtgacctagagcgagtgactcgctcgtgaagctccccgatcatctgttgaggtgggtgacggcgttgaatatgctgtggagcctccttgaggaagtggcctccccctcaacagcagcttcaactcctccagtctcagcaggagctggcttgagcggaccccaagtggtggaaggagtgggtca

SEQ ID NO: 152820 - DNA, 552 bp, Zea Mays
gacagtataaccaaacacacttttagtgcgagagctattttagtcgaaggctcccacgtatatgaggtctaggattaaacgaccaaagccagccagcttaaacagtttgcaacacgcaacagaatatcagcgagctgatcgatgccaaagtgtcaaatggtggtgttattattggtagttcaaaactcagcaagcagtttgataaacaaaacaactcagcaatgtgacacgacactatatatctatgagagaacagaacctcaacatcaacgccgccgttggatagaataaaattacaaacctcaaccgccacatcagcatctatgtaagctagctagagtttgttatatacacagggaaggtgaggaggaggagggtcaggtgccagcagcagctcaaatccatccgactactagtataaatgaagaatctcaagtcttccctctcctctcctgtcctctcccccaccgcacccgctcttctctaatgtacacttcggtattcaaaatgctattacaccttagggatctcaattgtgcagcgataacacct

SEQ ID NO: 152821 - DNA, 541 bp, Zea Mays
cggtggcggccagtcccacggcggagaccaccgctggcgcaatgcctcggccgcacagcgcccgaaacccaaattaactaacgctgcactaagagggcgaccatatgaactggatgaggggcttattaccttggtttagtgtggatgcgacactgcccacgcggtggtgtggttctactgcggtgctacaactacgaccatctgtttcgaccaacggattccccgattacaaccccaattgaactccattcattaagggaacataagggaacaaggttctcaccggggaataggtcgtggatggcgcaatccgcggtaccacgcaagggggcggggatgatggaatccgacgagaaattgtggcccgccgaacgccacacgctcctaagccgacagatgagcacccccgctacagcttaaggaagctcccgtacataggccacggtccctccaatggtgctttggcggcaatcaacgatggcgaggtgtcgagggtaaggcggcgcgagcgcggaaaagaggaagcagggaagaggtagtt

SEQ ID NO: 152822 - DNA, 677 bp, Zea Mays
tctcattccccacgagcaggatctagggatcattagtgtttggcccaaaaaggcgccaacacactttttggtgaccccgctggggatgagaggtgtgacctaacaagattggccatagatggccggttcaaaggatcacttcaatatctccctaagtaacatcgtaaagctgactatagagaacctgccggctaaagataagaagaaattcgaggactacaaaagataaccgaatgaggccaaggcgaagtacctagcgcacttcaaggtggaccgacatcaaaagatcatccggcaaggggaatgcgacctggcatctctttgacctaccgcacctgcccctaatgtaagtaaaacagatgacatacaatctcttaggcattatatagatggcagcgagatcaattgatataatacatagagggcatgagcggaaaatttagggaaatggcacgcatatttgaaaaatctgtcgtttccaatttcccatcacatgagattgatgttagaaccaccacacgccaatcatcgactgtaaacatgcagtcacaaacctagccatcttctggcatgccgatgaattcatacgccaggcaatcgcagcctcctccatcgatttgggataaacccacaattctgcgcatggccggactgtctgggcctggcctcggcccacc

SEQ ID NO: 152823 - DNA, 498 bp, Zea Mays
catgtatctgatgaattctgttttcatgcctgaactagacaagttcgtagtggttttcatcgatgatatcttggtgtactcaaagaacgaagaagagcatgccggtcatttgcatgtagtgctttaacgtctgcgagagcaccgtctttatgccaaattgtcaaaatgtgatttttggctaaaggaaatcaaattcttgggtcacactatctctcaagcaggcatagccgttgatcccgataaggtgcaagaggtgatgaactggaagccgccaacggctgttcgtcagattcagagttttctgggattagctagttattaccaaagattcattccggatttctctcgaattgcaaagcccataactgagctattgaagaaagaagccaagtttgtttggggtcagaagtgcgaagatgcctttcatgcattgaggcaacatctgaccacagcaccagtgttagcgcaacctaacagcaacaagccatttgatgtgta

SEQ ID NO: 152824 - DNA, 379 bp, Zea Mays
agccgcaaacggaaagtgagtctcatcaaatacaacgtggcgagagatgatgatcttgcgagtggatagatcgagacaccggtagcccttctgagaaggaggataaccgagaaagacgcatgccatggatcgaggggacaatttgtggggggtcatggcactgaggtttggatagcacaggcaaccaaaaactcgaaggagtgagtaatctggcatcttgcgataaaggagatggtagggaatatcattatgtatggacgacgaaggccgccggtttgtgagaaacacggcggtggagagagcctcggcccaatagggaggaggcatagccgcatggatcagaagcgtccgaacgacattgttcagagtgcgaagcatc

SEQ ID NO: 152825 - DNA, 280 bp, Zea Mays
ggctgacagaaatgaggttttaataaggttcgggggaaatgagaacattattaaaatgaaggctctgaggtaaattagcgacgccgatggtggtaacgggaagtaaatgtctgttaccaacaataatgtgagggggaaaaagaagtgagggtgagtataccagcgtcgactgtcatatgaaggtggcactgaaatcaaaataccacccattttatcgtggtctagaaattggcagcaagcctatgctgatcctaaccgggcaacccatagctactgagga

SEQ ID NO: 152826 - DNA, 414 bp, Zea Mays
tttatgaataagaatacttaatcaataaatgttttgtaatcattcctttataagtgggtaataaacaattatttttatggttaaaaatctattctcccaaataaataatttgaaaggatctttaaatggtgcgatttaatttgtggagctatatgttttggcgcatttacttaaaagaatagaataataatagaagtcaaataaaatacactatgcatcatgttgggtctcttgtattgttgcattcatatttgaatttataatccagatttggatttgaagtaaggatttaaatagaaagcagaaattaacaaataaataaaaatagaaaaggaaaaaaatgcaagaaacgtacctgctgaagcccataccgcttggcccagtctcaaattctatccaaatggcccacacgtg

SEQ ID NO: 152827 - DNA, 494 bp, Zea Mays
aaaagagtcaactataaagggaggatactcaaatgaaaaatgaagcaatcaagagaaacaacacctacttggataatgagatcttcaaaacaatcaatggtgtggttgtaagcattctaaatcttttttcattgagagaatactaggcataaaatgtttattgcaaatcttgtaagccttgatcaagatgaatggtgcttctccctattcgtctctaaagttgaatgcatctattcctttcatttcaattctttgatgcatatctctagggggagcctatttctatatcctgatcatatcgagactatcgctttatcctagtaatctcatatagtctcttgtatgagaataagtttctcatgaagtatgctactacatatcaatccaacttgttaaaatagcatatttactggattctcctacttcaaagcttatataatgcatatgttgttcttttgatcccgtctgttatttgtttgatcattgaatgaaca

SEQ ID NO: 152828 - DNA, 443 bp, Zea Mays
tttggtggacagtacaattgctctataattctctctacaattgtcgaaggtacaattgtaaagttaatttaagttaagagaaatatatcatgaagatatcttgatcgagttactatgtctaaactcttttatattccttctacgttcatgtattcacttaataattaccttcattgtcgaaggagttaccttgaagggttaactacttcgtgttgaaggttatctattcttttaatagtgtgttgccttgtttcttgattgtgtttagcgatcaaaaacaagtgtgcaacattggcgcccacctctaatgaactcaacgactaccttcatcaagagaactctgcaagcaccttcgtcatgcccccgaagaagacagcggtgccaggggctgttcttgctcccctagacaccaatcgacatgggatccttctaagggaggcccg

SEQ ID NO: 152829 - DNA, 362 bp, Zea Mays
tgatcatgggagcgtggaggcataggaggcggaggaggaaccccaaaatcatcatcatcatcatcatcatcagctgctgtaccctgggtgtcaaactgtcgaagtgctgcatcctcggcctgagtgtcaaacacaggagcataagctggcactggaatctcaggagcaggacggtaagatccaaacacaaggcgtgaggcctcaagggtgctctgaaatcgaggtggctggatcagctgcgcaaagatgtggcacaagtagtgagcatagggtagctgccgacgagcacgaatcccatccagaacggtgtcctcaatctcacagatcagaaagtccacaacatcaaactcagagtgggatac

SEQ ID NO: 152830 - DNA, 997 bp, Zea Mays
cacgaaggcccaatcaacccgagcgaaaacgtatatagcacccaaacgagaatggttcgtgtccaacatcctcggatgcccgaaggtctcagcctccttcggatcatgaaccacaaagatcctctgaaggaacactttgtttcctccgaaggctcgggggggctactatcaggggtaataacccccaaggacccaaagctcatcggtccaggaaaggaaaaagcatgcccaaacctgcctagacaaaacccaccctactctggcagacagaggcaagccatgggtacccacccctccccagcttcgacgtaaaccataaatgggtcgaacatgcctgaagctgattcctatggtcaagcgagacacacctagctcacagccggattgcacccatatcaagacgaaccatcccatggacaaggtcgatcctccacatcactttcaaccttagaagcccgccaaggaagaatggaggtacgaataaaccacatagtgttatctgccctgcaacgcctactctagcttaggcctccagctgaggtcaggagaacccccaacctccatggcaaggtctgacgcacactttgcaacccacaaacctcacatacgcaacctcgccaaggaagtgaacaaagctgcaaaccccgatggcaggcaacatcagtagagaaagaagcttgaccatctcataggtgtgtcgcctcctccttcaccatgctagtgactacatgataaaattgtaacccttcttactcttggtctataaaagggagaggagacccctaacaagaaaggagagacaacacagaaagtacgatatgaactctcacacctcacatagacttggaaactctctttcttacccgtttgtaactccctactacaaacaatcaggtgttggtagcgcgagtcaccgaagactgaagtagggaaaaattcaatttgaacatgtataacctttgcgtccaccgcgcacaccatccagacctaaaacatg

SEQ ID NO: 152831 - DNA, 435 bp, Zea Mays
ctggcgttgtggtgcctgacgatattgttgctgatgtcaaggtcgcgcctgatgctgcaagtcgtccctcttcttctgttgcacctacgaaggatattgtttgaaaaaatgctttgacatggtgatgtcctgtgaaaacactttttgtattgggttagtatcattttgaaggatagatgtattgtaaattctatgtgcacgcgacagttgtgttataactcgaatattctgtgaacagggtgccggaaaacaaccctagcactagcaagtaaaatattctctttttctgaagtatttttaatcttagctagatgttctgctattagggtatagtggtcaccctaagtcaggtaagcgtgagcatgtcgcaccgacttaagtcgtcgccgacttaagccgattgcttcgttagtagggtatagtggtcacccttag

SEQ ID NO: 152832 - DNA, 678 bp, Zea Mays
gctcagttgaagctcaaattcacggaatcctatccacctctcccaaaattggttgtgcacggtgaaaccatagtcccttacagccgtgtagccctaatctcacctcctaattccacccagaactgtcacggcgtcgttttccccctttgctatcactggcaagcaaaaatcctccgtgccccatggccagctaccttcaggtctgctcctattcgttttaatcgtgtttcaacacctatatacactcgtgatactcatcggctccacccttcttgcttggccacgctcaatcgcccggaacacatgaacttgtgttcggtattttccgccaccgtggtcagactaagccagagccataaccacccgattaaagctcgttctgggtttccctcgggtcggtggtgctggccctttcattaatctgagcagccaacgtcggtcatggccagtccgagccgcgtggtgatcgacggcgagcgcgccgtggtcatgggtctgtttggagaataaacaaaagccgagagacctctgcgtaattgttagagagacgatgaatagtggctaggggctcttaacgaattatccaagcaatcgggggcctctgtgcaaatccgccaacgcgggcgcgttcccgttttctgtttaggttgggccgacttgggccagtttcgatccaac

SEQ ID NO: 152833 - DNA, 915 bp, Zea Mays
tggcggtggcgtaagatatttgttgaggtgtgcgggtatacaccgtaaaatggttatacccgcgacgaggaaagatgcatgtattgtgtaacacgatgcttaggtcgctattatataaacgtgtgaaggatgctcgtgatgggtgtgtgattgaggagtgacgtagtggcaagcgggaagtaagtttagtttttcaacggttagtggatagtatctgtcagtgttgtcatgaatttttgttgtatgacggatcaatgcgtagctttataaattattgcattccattcccttttgataaataaatgtcttgttgatcgattagaagtcttatatgagcgttatcgcagcacaataattattggaggcgagtagcgttcatgagtcagtccttgctaaaattgaagaaccatccgacaacatatgcacgtgagtgctttaggtccttcagtaaccaatgtaggtcttatggagttttatgccatgttttaatgtctctatgttagacctcctaaaatatggtgttttaagtgacttgtgcgttgactaattcgagtggagaaatggttaagaaaaactaattaacctgcttcaacccatgtttcgagttacaatgtctaaaatggttggctaagtcttatacggcgttagccaactcatgttaagtaagagtcgatggcgtaagagattgcgatatatatacatgtggtgtctcggactgcgttaataataggcaagccgacgtgtatgtcgtatggcgggctatgccatccctttggttaatcgactagttagatggcgttggttaagctcgtagttactttgaattacttgttgtggtctaaatgcgtatggttatggtcgcaggtaaaaattagtagtgctcatgtggtgtctaagtgaaaatgcggactagtg

SEQ ID NO: 152834 - DNA, 760 bp, Zea Mays
cgaaatagtagtgacgtactattcttcaattattatggacatgctatatatacttaattgtgtttcataattaattgtggttatgtaatagtttgtttgtcctctctatcttaattgtgttcgtagttcatgtacttatgtacaaacaagctacatttatggtgattcatggtaaaaaatctttatagtgggttttatacaattgaccatcctaactataaatcctagctacgccacgccctgtagtacctctcctggtcctctctaaggcatcctgcaaaccattcttgctgcctgatgttcacctcactgccatcgaggaatgtgaactagaggttgttgcttctttgctgacagcaggtttgccccgtcgcaaatatgctatagtgctggcggcaatgaccacctactgtcatattaagatatgataggtcgtcagctgcttagtgaataaagagttaattcctttcgttggctcatatattttcttgcttaataaaaaacgaacgctcattcaggatgttgcagtgttccatgccacacccctccttttgtgctttgctcacttcatgttcgcaacaatgattaatagcctaggtaactatccgtattttataaatcttgatgctaacgttagtttattggtttgcttcttcacaaaaagaattattagtttgattgctgcttaaatacatgaacattattgaggagtaacttcagatttcatctgtattaaaatgatccttggttagaaatattg

SEQ ID NO: 152835 - DNA, 1763 bp, Zea Mays
acggcctctagaacatcctcttctaactatttccgctgacatatccgggacaacaatattatgcttgagacaaaaatccttggcctcttcaaaaataacatcccaaccatggtgtcttatctcatttaatttttgtaatgtgacaccaaccaatcctatggcacgaataatattttgatctttcttttgcaagcattgtgacaggtcattagtcttacccaaaactttgatcatgaggtgtaacacaagaacaaactcaaagctctccattttctctaataaacctgtcgatgtggttctttgtgctagattagtggcatcttgacatacattctctaacacctctaagacagcactccacatgagttgaagatgacacaaggttttatgatgtgatccccatctagtatccccagctcttgttaaattagttgcttggtttctccctctcccccttaacatgtcatcattctctagcctttgaacaagattatcatggtgacattgggcaagttgatcatgtctcttacaagaaacattaactacgttgacaatcaaattgatatagttgaagaaatccataactgaagagcaacacttggccacagacacaactaccaattgtaattgatgggcaaaacaatgaatataaaaggcataggggttctcatccaatatccttctctgtaacccatggaattcccctctcatatttgatgctccatcatatccttgcccacgtaagttttttatagagagactatgtttagagagcataccatctaaagcttgtttaagtgaagatgagcttgtatctgtaacatgttcaattccaagaaatctctcaatcacctggccttgattgttgacaaatctacatgggaaagtaaatcagtataaattaccagcactgtttataaaaatttaataattacaacaataaattacctcaaaatcaaagccatttgttccttgatagatgtgtctcgggcctcatcgatgattatagcaaatttcttatccctaatttcagctaagatgactttttttggtctcttctgcacaagcctcacaaatttgcttctgaatctccggtgaagtcaacatacaatttttaggagtgctatcaaacaatttcttaacacttgaatccttcattttgtaccattcaaacatttctaagaagttgcctctattatttgagctagtacactcatcatgaccacgaaaagccagaccttgcaatagaggaaatctgataacacctaagacaataataagacgtcccaaatattcttcttcttgtttcctactcacttgtgacattacatgtgacacactctgtctttgatttttaaaatcatcaaaacatcttctagccttattatgagcactatcaatgttacccacatgtacatcaaatgacctaatcgcattcttccaattgttataccctgtcgcaccagtgtagctttcaacaccaaagttttcccttcttggttgcttgaaaaggaaacaataaaagcaaaagaccgcatctttagcaacactgtattccaaccattcatgctttttgaaccatgattcctgaaaacttgtttgtctatctcctattcgcttcttgggaaatatgtgaccttttggttgacaagggcctaacaataaatactctcttctaacaacatctcgaatgttcacatctaacttttcaattggttttcgaagtctaggatcaccaacaatctcactatctattgattccg

SEQ ID NO: 152836 - DNA, 465 bp, Zea Mays
gtgaggttcaacacaacgacgagctccagcgacgtcgttgtgcgacagcagcacggcgagcaactgcagcagctcggcatggcgacgtcggtaacagcagcaagcatggtgtagcacgacaagtagcccgcacggctcccgcgacgtaaggatggtgaccaagcacaggcgcagcgtacgccgacgagcactagcaaggggattcagcgaactataatgacgtgtcacgagagattggaatcaacgacggaaatggtgcggtggtgtagtgtgtgcaagcagctcaagcaagaggggagcaggcgagcagagacccgaaggactgataagagagtgtggcgaggtgagaagcgcggacgggtctgctcttatagttgagcagaggaagtggagagggtgtcgggtgccagcttaaaggtgccttgaaggctatttgctgtggtgttgaatgtcgtgattgaaatc

SEQ ID NO: 152837 - DNA, 403 bp, Zea Mays
cccagatagagtcattccctttttgcgtccggggcagtccggttacaaaatccatgcctatttcctcccacttccatttaggcactgggaggggttgcagtaggcctgcaggtttctggtgttcggcctttgttcgttggcaggtgtcacactgggccacatactgtgctatctctttcttcatccctctccaccagtatctggctttgaggtctaggtacatcttggtggttcctaggtggatggagtaagctgagttgtgagcttcattgagcaggacttcccgtgcctccccttttggtacacacagacggttcttgaaccaaagaactccttgttcatctgccctaaggtccggaagttgctctttgcgagctttttccataagtcttgttgtctctgt

SEQ ID NO: 152838 - DNA, 302 bp, Zea Mays
taaaattgcatcaagggacccctatttcctttaattaacacaaatgcagatgagcagatttaccagcataaaagcttggtatggttcaatatagtagaaattgattctggagttttaaaactcggcctaggaggtaagatagtcccgaacattgaattaagaaatataggtcgagaaaaccctcgaactgccccactcatacacatcagccctgtagctcatgtgaccatacacaacggcaccataggccatatgagaaccttgaacccgaccaaaaccaaggttgaccttagacatgtgct

SEQ ID NO: 152839 - DNA, 773 bp, Zea Mays
gcagtcgttgccgatgatgtgtccccttagttactccttgatttatgaaaggaaatctattcaggctcttgaaatcgttgattatagttactccttgattcattaaaggaagtctatttcttgaagcctttgatttgattgtaattctagaaggaaggtaaatggtttctttaaatgagtttctgtgtccgtattgtgagcaactgatgaatgcacatggatgatggactgtggtgcatttggtgtttcaggttgtgctaataggtgataggcacaatcttctaatttccattccggaggctgttctagtctgtcttttggaatggaacgttatggtaccaacctataccggtgtaccattctggattttataataatatatgagtatgcctatacatatatatacttgtgtgcacacaaaactttagtaataatcatgcttggattgagtacttcagattggtgaatagcagcggcagtgcgaaacaaccagttggcttcttgtattcctctagtttagtcgaatcaattataaatgatctatagccaaacatttattcgacatatctgatttgtatagttttccagaattagatggacctcttgtgaactcattatatttgctgcatgtttcagtctgttttgtgtataaagtaagatatgtatttgaaaatattatgttctttattattaatgctggagttttgatgggctcttccctgtatcacatgaaaatttctttgtatggattcaatggatagataattgtattg

SEQ ID NO: 152840 - DNA, 696 bp, Zea Mays
gctttatatactgggtacccaaattttcgggtacctaaattttttgggttcggtagcccgttctacccaatttaaaactacaagcttatccgctacattacttcactgtagttagctttgtacattccggcagcaaaaaatataatatttgatgcccaaattttcgggtacctaaatttttcgggttcgggtagcccgttctacccaatttaaaactacaagcttatccgctacattgcttcactgtagttagctttgtacattccggcagcaaacaatataatatttaatgtaaatatacaatgaaaaccaggaagcaaacctgcacaataagcatttagtttaaatttttttcacatagcatcactcactcacatcaaagcagccgagcatcaatgatcactgatcacagctcacggtctacacagtcacacatcactaatcacggtctcacacatcgttgatccactgtccacactcacggtctcacatgcacaacagacaactcgcagcaacagcaaggcagcaatacgggtgcagcacacaacaacaaggcaacattgtagcaggaaggcgagcaggaactaaacggacatctgccactgcaaagtagccgagcaggagcaacaaatcgggccaaacgggtatttcgggtaccgtaacgtgatactcgattaggcccgaattaaaatcggg

SEQ ID NO: 152841 - DNA, 897 bp, Zea Mays
aggcgtacagaggcagagccatgttttggtgctctgcccttctggctctggctccgaaggagcagcgtctggggagcccctcccaaacatggcctacgtctatgaacattgtgaatatttccgacaatctaacttttagaccaactacaattatttcctatcaagctgaaagtggcttagtcgagccgacaacactacttgatggcagtgaacaagcagttatattgctttgtcaggatattgatattatttctgttatccttattttgttaacgtcatttctatgttttgattagtgctgtatcatcgactggtggaggacttgtatgtaattgtaagcagccataccattatgtataattgatttctatgagacagaattatccaagattttaaggtctattggaaatgattaaaaaatggctgtaaccaatatgtcagcttttctggggttgtaaaggattttggtagctgttgtaagaccttgaacatatctttctcagcctttgactgtgcaaattaatttttctcgactctcatggttaactagattttgtgctaatctccaatcaatcacagataacaatatctgtcaagatacatggatgaacaattaatatatctcagtgctttatgttatgtgataaaaatctattatatcaataaaatttcatgatagccatttgacatgtcctgataaacattgtttgggtggcccaattgtatgatcgatggttatagttataatcctgctgcttactaacacacattgcatgcaggatggttctcggtcaatattcataataccatagacgtagggataaaactcgattggatctgaacggatagttgtttctttttgggattctaagttggatagagatagtgtcggatgtg

SEQ ID NO: 152842 - DNA, 592 bp, Zea Mays
cgctcggcgtcggggacactttggctggtgtggttgcggttgcgaccgtgccaacgctgccggcgccgttggtctccctggaaggcacactgcagaggtggttggacgacgctgaacgcgagccgccgcgccggcgcgacgatggcgatgagggcttccgggagtgcattgtgcatagcgcgaggcagatggcgacgacggccgtgatccacgcggcgtggaggatcgccggggaggaggaggccctgatgatgatcggcctgtgcttggacgtagaggtaggcaccattcttgccattggaacgtggtagcagtggaagatgcttgatcgatctgcaaggcgatcagcctacccgtatcaccaccgttaataagtgctgttgatttgtagcactagtggtaatgcagactctgtctgatgggcattgcattgggcatggctcagcagagaaaatggaatggatagtgggggcactggactgggtgtggtacgtgcatagaatggagagtggagggagttgatccgtgaaaggtggcgcgcgagtgggcatggttcagctctcaagtggtaaaacggaagagacgtgatggg

SEQ ID NO: 152843 - DNA, 1081 bp, Zea Mays
gctcaaacaattgctacacacgctggtaagtggtcggctggatggattgaatgaaaggcgttactgtgtgtactattttctaattattgtgcgtctctgttcctcttgcagtctcgctctgactttgactctgcgcgcggcgcgtccttgtgaagagttgaagacaaaagcttggcacatgcactgcacgtataaaacaaaaagatacaggatgggggttgagtgaaagacgtaacttttttcctccttcgaaggccacacagggtatacactagagattttcagtaagtttaagattcatttttgtaggcatcgatttatcacatggcgaaaatcttgtatgatctgagttgttttttttctttttgaactactgatggtcacaagtgcggtggctgcttaatcttaaatcaagatagatacctgtttaatgaacagcacatgagactaactaaatcgatttcaaaagaatgaacccaattcagttccaactatccaagtaacctgcttcttcgggaaaaaaaagaagaagatctggagctatgccaatttattgtcttctgctagtgcaaggaattgggatcggtgatgttggtttatagcagtaattaagatagctaaattcagcagcttgtgttcatagctccgtcgtctctgcttgccacaaaaaaaaagatcatagtaaacttaaattcaattaccacaacatcatctactggccgattcgaagtgacttgctatcccaaatcttagttcagtctagcttcatgattgtctttgtgatctgatacctttttgcaagctttttccccctttgtgattgtctttgtgattctgattctgacgtagtttctttctttctacagaagtgtccgtgagaccgtgacgtgctctcttgtagagagtgtactgccacagtggacgaggtgacatgaggcgatgtactgcacagtggacgaggtgacatgaggcgctgttgttgtactatatagctagccgcgcaatcccaattccaattccatagctgcgctccgcgtctggctcagatgcacggaccctcgaccaaaactcaaagctgagc

SEQ ID NO: 152844 - DNA, 497 bp, Zea Mays
ggcgagtaaaacgcggggtcctgccatgggcgttgtcgcggaggactctgcaccgccgcgtcgccgctccatgccgcgggccgacctcaccatagcgcctcagccggtaaaacttggctcattaattcaccttcgcctccgcattgttttgcgtgtatccaatcgggggttaactcactgatcgacgatcggggcgtcggcgggggaggggatctccaccgtgggccgcggctcggtgttcacggagtcggggggaggaagagaactccatggccgttgatctttgcgtggacgggcaagatcaaaacccgcgtaccgttttggtgtgggggtgcatctggccgttgatccgtgatccggtggtcgtggtcggttatgtgttatgatgtgatctagagcgttggcgctagatcggacggtccgagttgcatacccgttcggattaatatggatctaatcctggccacagaacttagatcgtgtggctcggattatcc

SEQ ID NO: 152845 - DNA, 540 bp, Zea Mays
actttcaaactatagggtttttgccctatgtcaccacatcaaaattgaagatcaatcattggagaacaactttgcttaagggtgtgagcatagttgttaagtaaagttgggagataattaagtccaaagttggactgtcaggtcactgggtctgaatttttagaccaacagtgcaaccactgagactttgagcatggattcaactatgatccagcatgaatctgcccatggcatctatgacaaacttgtagctggttagtagctctataactttgctgcagagtttggtatgtgttgccatacaggtttgggagaaaatcatgttcaaaaatggtctgtcaggtcgactgcatacactctgcgatggtacagtaactgtaatggatgagatcaccagcgcactgtcctcaccgtcgacgactccctccgccgtgattcgtgtcaccggcgtcgggattcgtgtctgagcggatggatagcatcgcggggtagggtgatcctcgccgccggtgagctggatgccaccccggccggccgtaa

SEQ ID NO: 152846 - DNA, 362 bp, Zea Mays
tattgactcttccatcataaaaaaggccgacttgtttaggacacttgtaacataactgggcatgcaggaaaggaatggaataatgcattacaacttgagttttcttctacttgtttctttagcaagtccccttgggtatggattactaggaaatgaacatttctcaaatgtgtcagagaaaaagaaatcccatgcatcagtatagtggtatttcaatttcaatagagccaaccatctttctttatgtttatgctttcatcgtatgtccttatctgcctcgtacagggctgttctgacatcaggccctgtgtcaaactctaaagtagggccttactaaatagaacagcaaacctgtcgatttg

SEQ ID NO: 152847 - DNA, 696 bp, Zea Mays
cctggagctgcaccacactccttcaccaatgccatgacatctctaattgagcacccattgtcctcctttcttgccaaagactcaacggatgatgtgctcttctcacttgctgtcacaagtttgctcaattgatcttgcacccaatgtcctcctaatgacctaggctttttacccttgtcctttcgaccaacaaaaacatgacgctttcctttagcagttgtaggtgaaacctcttcacattcttcatagtcttcatccttctcatcattggcctcatagtctccatccttgtcatcagtgttctcagtggtttcaccctctagactttgtggtgtagtaccactagacggagcccaatgatcatctcctgtgttcctaatatcttcatacatgatggctttttcttcctcatgcaacagaggcccatctttaaacttggcaattcctttgtattgctacacattaggagaaagaagatgttagacatataatatgtaacacaagatgcaataaagacaattatccaaaagttctattaccttattcaatttcttccaccttttatttgtcgcactccaggtttttttcgcagtgtcccatcccaaaccattttccttcgatagtcttttccaatttgtgtactcaatcctcatcttgtcccatttgttcttgaactgcattttggtgtaggacaac

SEQ ID NO: 152848 - DNA, 407 bp, Zea Mays
cctctgcatgccacgcctccttccctctatcggacgtcacgctaggaacaaggtgaagagcgatattgaggaggccatagggtcaggcatggaggatttcgttctccatatcgggccaaaaggacagaggtgagctcctacgacgttccttgctctcatccatggaggtggtggtcgagctagccgacgcggggtgaggctcctcatttgcatggggcgggcttcctcgttggtgtttgatctatcaaattggtgtctgcttcaaacttatgttgtttacttattctatatttgtatgtagtatcatctctattgtttttagcagtataaattttttatttgtagacacttgatgtcgatgttatctatgacccaaataaattattgaaggaactgttcaacatggc

SEQ ID NO: 152849 - DNA, 414 bp, Zea Mays
attctctagccactaactaggaccatttaggatggagtcgatcctaatgatgtcattggttggatgaaagttgaactagacctcgatcatctcgttaagcgataatcttgtctacagatgcaggagtcgaatgccacttttggagataaagactttgctgcatccgcacagcagtgtaggtaacaccgactctggcaatatgggggcttcactagtaccgggccaagtctgaaggatccaaaaacacgggcctttagcgagggcttggctttcccaaaggcgaaggccccctaaagaccatccattattgatgacctctaagaaaaggccacttcagtcgaagcggagcccccaaggtgtgtgaagggcccccggccccctcgtcgtgggctcatggggcagtccaagtgtaaa

SEQ ID NO: 152850 - DNA, 588 bp, Zea Mays
gccagcccaaagtaatagactcaatatcgaacaagaatatagcctaggtaacgaacgattcgttgatactttgagagtttgagatgctcattttctttcttgtgtccattatttcttgcgtccagggctaaagcgaacttgattccaacgcccatgactattgatttgcttgtgtcagggagtaattctggtaacgacacgtgatagagcaaggtatggcgaccaccctaccttgccctattgtctcctccgcctagagcagatgacgatgatctatctccccatcatagcagcacacaagtgtagggttacgggcatggaacggattgcgtggcaacagtaccttccactgcaacaacaccaatccacagaccatagagaagagcagaccagagcaggattttattgattcacatctcaaagtccagagaccccattgattagacctcatggtctcgtcatcagaaactggcagaattcgttagatggaggtgctgcagcagcggcaccggtggtggcttcatcctatccggtcgtggcaatggccgccgctcgagctgctctgttggcagctctagtggtttcagc

SEQ ID NO: 152851 - DNA, 998 bp, Zea Mays
gtcgaaatttggcaaatgagaggagcaggcagcagccggtctcccgcgcgattgcagtctcatggtcaaggtcaaccgtgccgatatgggtgtccctgttcctccgacctccattcgcgattaaacaaagcagcgtcagcttctattataagtagcgggaagagagattgataccttccgaactccctctccctcgtagccccaagtggccagctaattttagccgaggctccaactccaaggcaacggacgcacagaggatcaggaaggaagaaggggtcgcagccacaagggtgctttccaaatccacggctagcttacgcttacggaaagatcataggggcttactcggagcaaggaggcgcctgtttgcaacgacgaacgcgagattagagggagaaaccaaacgccgcaggggatgaagtcgccgttgcgcaggctcaggggcttcggccaccaccaccccaaggagcggagggggcaccagccgccgccggccaagctcgacgagctcgtctgcgccgcccatgttcgtaccattcattccccacctccaccctttttttccctattggaatttctaccgggcgattgggattccacggcctatttttgtgtgccgttcttgaggtgagtggatcctgttcgggtttcgttttgccgggaatgatgaaactatctagtttttgtaatagaagcgcggtggaaaggtagaacacggagacccatatagttttgattacaaaacctgcatttcatgctacctcaaactatctagctagttttgtagcaccaagatattgtcccaactgcattttgattacaaaaactgcatttcatacgtagattttgccgaggaaagaaggtgttgaacactaaaaattgtagcactgatactatcagacggtccgtgggtggtaggcaagcacagacaagctaagtccgtgtctagcgagggatggtaatagattacaatcaaaatgttgcttcacaataag

SEQ ID NO: 152852 - DNA, 547 bp, Zea Mays
ataggattttctgtagtgatttaagttgatgctgagcatgcactttggggatcagggatctgtagagcggccaaacgtccaacatttgtttcagtcattttttcaccaatagaaataggatctagtttctgcatgcaggatatagattgggtgcttagggaagggataaatttcagtttattaagcaaggcaaatatctttgctggccttcccacatatgctgttgtctatattgtcaagataaacatatgtaactaactggttctgaagaagacgacgaagtaataaaacgatgataatgttgttctaagtttaaaaacattattgtataaaacaacatgtaaatgttctttgaagcggctctggcagttgacaaaggtgggtcatgataatgttgttctaagtttaaaaatatttgatctaactatttattcaatcattgaaaagaaagcctaaatgcataaagaaatttattcaatcatttaatttattaaaaaatgttttgaataaacaacatgtaaatgttctccacgaggataacatgttg

SEQ ID NO: 152853 - DNA, 647 bp, Zea Mays
acacattcaatattaattcaagtaccatgaacgaattaatcgtatgaatatcccttacacattagtcatcttgtcaacactggattgcagtatttggttgacagtgtcgtagctgcctatttgctctcatctgaccttctgacatggaatatgagtaaaatccaagaattttgtattttatagactttaaccatgcgcatgcacatccatctattttgttgttgaatccagtgatttttttcaggcatcaacaatgcagcaatgcctcactggcatcatgattattgaacggcccaacactacagaaattcagccaaccattgacttcgctagacaacaacccacattcacggcttcagtgcgctgcttcagctttgtgaaacaaagggataattgcaacgaacggaaatgcaatcataatccattaagataattgaagagccagtgtccttctggatccaaggactggccaggaaacagagggattcacatggaagagttgacagttgacacactcgttgacgcctcttgtccaggcaggtaggcaactcaaccatggcaacaagaggccaagcttgtcttaccaaaatttagagacatcaaccacgctttcctcccctttaggacgtcgagccatcaactatgca

SEQ ID NO: 152854 - DNA, 321 bp, Zea Mays
cagccgggtcaatataaacgtattaacaatacccaagcgcgcgaagacatctacggatgcaacttagataaaacaaatacatttcaaaaggtaccacaatgaaaggcacatcatatttcaaatacaagatgtgcaatacgcacagggaaatcattcacatacatgtccccataaccgtccttcggcgaagggggccaagggcagcattatcacttaaaatcaccaaagaacggtgatggcgacacacattttttacattggctcttgcttcgagataagaccggcttcacggaaaatgaatagcatcattctcaactctca

SEQ ID NO: 152855 - DNA, 357 bp, Zea Mays
gagtgcacaaattacactatcagacgaaggtcagggcagacggtcttcatgaaaattttggctgctacaattttgcataccgcaaggatacgaaggctccagttcttagttatcgcaccaaatggccaaccggctggaagggtgaatgattttatatcaaggccgatgagaagaagagggggaaactgatgacgatggtcatgtgcccgttgtctttaagcttcggaatgaccagacttttgtgcaatatgcagccagggtcagcatgccagctggccgcagtagaaatcagggtggtggatgaacaaatcagcaccagagacctagtgcaagaatacctggccaacaggacatctc

SEQ ID NO: 152856 - DNA, 374 bp, Zea Mays
ggaaacctggttactaaagtcacaccgcaacatcagcctgatctcgtcatcactgatctagggcagccgctgtgctctgttgcaccactaaaaaaagatcgaaaccgttcctttgcacatcattttgcgatccctcttagatataggtgcaattgtgcaagttattatcaataatccgtccgaactccgaccaagtatcaattagctggcatgttagcacccatcctactatctgcattattgtcctgcactttagcatctatcctactttctgcattattttttcttgtacttgccctggggaaaccttgtgcaaaaatcagaaagtggttgcatactcatgtaagttttagctccatagtactcaatcactt

SEQ ID NO: 152857 - DNA, 462 bp, Zea Mays
gggaagtgcgcgcggccatggagatggcggccaagcaggagttcgcggccaggatcatgagcagatggaggagcagggagcttgggggaaagagaaaccatggtgcgcaggagcagagcgcgagctgcagcaggggccgagcgccatgggaactccgcgagcggcgggggcgcaacgctggagaggcccagcaggacgccatgaaagctgcgcgtggtgccatgggacctgagtacctgctgggtagagaagaagcaaagctcgcaggggaagccgacatggggacgaaggccgagcagagggaggaagaagccagacgcggcaacagggaggaaaaccgcgggcctgggcgagcaggacgaaggagctccgagcaggagcaaggagaagagggggcgccatggtcggacttgggcaggacgctggccaaggaagaaggggctctggccggctggaagctgg

SEQ ID NO: 152858 - DNA, 686 bp, Zea Mays
gtttctaagactcagagagtccctggtgtggacggagggttgttttctgcctagttcaggggctcttaagcaaatgtgctcgggcaaaacggtattctcagatgagggccgttcagatctgatccgagggccacaaatagatcccgcgcatcgctcaaccacccactcccgtgaccgcccgattaaattctaacggtcacgatataaaagaacccggatctaatccgatgcacacaatacgggatcaacggctcggatcaacgcagcgaaggggtaagatgtgatctaatctcagccgcagggaaccgatccaacggacatcgcggcacgcgcgctctccttctttccagaccccgccgagcggcggcgcacccaccgtgatgcggcggcgccatggccggagatgattatcccggcaaactaccgcctaaactccgaataaagtggtgctacgtgtgaaggacgataaggtgaactccatgggtacagaacttaccgaaaatcgagtcgcgcacgggctgttcacagtgggccgcggagttgtggcggcggcgaggtacggcgaggaattcgccgcgaaccgcaagcacttttcccccaatagctccaaggagacccttgccgcacccagacgaggacccgcagccgcaaaaccgcgagccatggcgtcaatggaagaaatggcg

SEQ ID NO: 152859 - DNA, 1121 bp, Zea Mays
cgaaccccaatgcaaagtgatgaagaaaatcaatgccttctcctatccaccaccaaaccttggtagagtgagaacaatatactccgccagggcgtcctacaagagaagaggagccggcagagaataagaagaccagaagttgacaaacttttcctgttcttcgagaagcccattttctctcttcttctccactagatagagaaaggggagagagagggagccgaggaggagaagatccctctcaccgtcatctgctggccaatctaatctccgtcgtctgcatctgggtctgctcccgtccatggcctagtgacggaggattgtatctctgtccatgtggatggcgataaattagtacttgtttataggtgttgctgtttggttggttggccttgtctccttgtttgaggaagtggggagaggcggaatcttttgttggatcatggcagttccaatgcggccggtgggcttcgcccccccgtgacatggtgagcagttgaggggacggattatctcctgttcttggctgcttccctctgttctattctggcctggccgccattgtttcagcggatgagttcggggtcggaagtcttgttcttggaggttctcccctctgcttattggccatatgatgttctactcctgcctaaattttgcctgtgcgaaaaatttgtgtcctttttgatgttgtggttttggttggataatagtgtgggaaagctgacaactttcttgattttggtttgataatattatccttgcagtgtgcttgtgatgttgcgatttttcagaaagctctgatttttagcgcttcattatttggaatccttctggctctgtagtttgctgtggtttgtgatctcgtcttcaatattttttgtcgcttgcatttatggcccttcacgccttctttttcttcccattccctgacgtcctacaaatgacaaattacaggtctcttgttgctgacactacctggacttttcttctgcttatgacaaagacgaactgataagctggcattcgtagatcggtttcttgggagatacacatacagaagctttagggtcggctcgtagaatctctcagacaccgtcgttttgcatccgagaacttgg

SEQ ID NO: 152860 - DNA, 580 bp, Zea Mays
tatggcatcatcagttcaccactactcatgtgactacattttgaatgcaggaaataagtagccacatgtgaccatatattctagtggaatgctaacctctattttttaaaaggtatttgaatccaacactgacacctgaatttacaaagactgcaagagcagaagcaagaaaaaatgtattttagttgttgtcaaataattgtcaattcaaattgcagctcaacatcccaagcgctgtggtggatcaaagtcttcccatcgttccattataagctgatcaaataagctacatcgaagttatgcaccatctgatcatttgcccacaagacccaaatggggcattgaagcattctcatgggcataaactgctactcggttcatggtgttaacatcataaaaacagtattggggacaattccgtatttgtaaacagacaacctccaaagctgagtagaaggactgaatcaataggaaatgggcagaaagtggaagaagataagctggtaaaatcaagttggctgaagcaaatagaaaacgaaggttattacctctgaggttgtaatgttgtcatgtcttgttc

SEQ ID NO: 152861 - DNA, 391 bp, Zea Mays
tgccaactgattacgagaaaataagggctatgaatatgatgaagaacaatcaattgtttcaacggctaggccttggacaactgaaatcactgatgactgctacagctgcaaacaacaaagacgactctcctcagcaatcagagagtttatatgatggtgaaaacactgacaattctaatgaagaggtcactacagtacttattaattcttagtttctcaattatctatctttagttttgggttcgcaatgaatttgatatgcatatccttattgtattctacatattcaggaatcccaatgtcgtaacaatggtcgtgccaacttatccaatgatggtgatcagatctcaacaaaagtaacaagaggaaataaaagaattgtggcacctgt

SEQ ID NO: 152862 - DNA, 616 bp, Zea Mays
agggagttaatagaatagaagtgaaaggcaaatgtcatgacaacttgacaaacatcgttccaaagcaaaagaggacaagaagtcgacaggatggtctctaaacagttaacactggacctaatgaccttccttggattttgttggaccaatagaccacccaaaaaatagacatgcatcgtcggtagtactcacttttccatagccatagatggtaatggtatacatcgatctggattgtttccaagtcgaagtcgaacaccatggcaacatgcattatcaccaaatcaccacatggcctggtgccctcgtcaaagtgtagccttcaaccaaaatgcaggattaaggagcttctccgtcatggatcgcgatctcttggagattcttgccgtgatacaaatgcagctgccaagagaaagagatcggtatgccatatcaaaacggtggccttataccaccgctccaggtgccgaagttctctccgggcaactcgtagccagccgcgttccctccaagatcatacagtgacatgccatgaccaatgccgccgacatcgccacccgtcactccagaagactgcgacgcctcctgttgctgtccttcggccggctccactgct

SEQ ID NO: 152863 - DNA, 522 bp, Zea Mays
gcccttcatctcgttccagcatgtccaccttctgcacgtcggcctcacaggatgtcgtcgtcgccgagcagctcacaacttcgacgacctcgaggaggccatccatgccgcatccatcgtgacctagacgtcgccggaccacctcccgcgggacccggtggcgagtcagtgtgggagcaggggaggaaggtagacgcggttggtagaggaagttcgttcatcgcagcccgcagaggtccaccaccaccacgacaacgctagcagatcttcatcctaattcatgtatgaaaattttcggttgttgttctagttaagaacatttgccttctctatattgccttttagatttaattgtcaacttgtcacaaatcgtgtatcaacaatgataagaagcctgctatatcacgtaacgggtgatctgaacttgggtagttgggttaatagctcgatgaactttgaattcaggattaactggataattttgatgcttatctgttgttgcgtagagcgcttcagttcttt

SEQ ID NO: 152864 - DNA, 712 bp, Zea Mays
acaacaacagacttggcacaggaggcaagagactctaggaggtgtagtgtgtagattgtagagtgggctggagttattggacatgatgatcacatttggggtagtgaggtcctttatagaaacacataaggggtcaaactccatcgaacacaaattgccagtagtgaagcggtggacaaaaagggttctgaatgatatcaggggtgagaaggatgttgttgatgtagactggcctgggaagaactgagccaccagctgaggtgcggggaaggaggggtagagttggatgatggcctcgatgtgctcaaacttcttgtttaggcctcagagaatgttgaagatgagtatctggtagttgatggaggcgttcaagttagccatggagttgtccatccccttcatcttgcagtagtagtcgttgacgaggaggtcaccgtaaatggtgcgaaaggtagcgttgagctagaaggtgtgtctcacaagtcccgagaaattgattatcgagagcgagtcagagctggcacgccatgtcgttgcgctccttggctatccgacatagctgggagatggtgtcggagatcctgcaaatgatgatgttgttaatccgattccagcatgaattggtgtctcaccaagggtcaggcaagatgtggtcgacgagggcgtattgcttgagagaaagcaacacctgatcacaacaacaaacataatt

SEQ ID NO: 152865 - DNA, 527 bp, Zea Mays
tacagggtaataaacaacattattataggattataggaattgaaatggattaatttggacttcaaatgaattttctaagaattaaataagtttctgcaattaattttgtattgaaaatcatttctaaaatgaattcatctgtctctggtccacgcacactaataaacggaaatccaggggcctcagcgcaagtgccaccaagaaacagaacccaactacgtggaccgcgggttgtttttaggtaaaccgaggggttcttgtgcaaaattaactggcgaaaggggtacggggtgatataggccacaggatcatggatgaacgatcctgattagatcggcatcaactgcgaaccggtatcgtatcctggccgacggttcgcaatccaacgatccacattttaaataccagaggtcccccgcgatccatccgatcgccaacgaacggacgcggacgaaactctaccagatctaatccccaccgcagcaaaaggatccgacggctagcacaaggctcccttccccggttca

SEQ ID NO: 152866 - DNA, 563 bp, Zea Mays
ccaaaagttgcaaggtttcgcaagaagccatttcctattttctactctttagaagcactttatgaaggtgagtgtgtgtccatttcctcttttctacttttttctaataggctatgagttattatacctatccagatatgttcatttttgtaggtagtgtggctatgggagacttaaatttcacatcaagacaacaattgcctccttatgctcctatacctgttgatatcttgctccccctactattgttcctcctcttgctcctcctcctagcattcctcccgctcctacttttgttgttcctttagctaggagtacgtcggaacagactctccatccattcaatacaaatccatttgatttggatggacaagagatgacaagtgaagctcaatctatatcagctattcatgaagcaagagagggagaaggtagcaaaagcagaaagcgtaaacagagccatgttggagcagctctcgaagactatgtggagttcaaaaagagccaaactaacaagacacttgatgctcttaaagaactttccatgaggaagtgtatgaagg

SEQ ID NO: 152867 - DNA, 794 bp, Zea Mays
ggcatcccatgtctcaacacctttttcccaaaggtctttgagctcatcaatcagaggctgcaaatatacatcaatattgtttcctggagagtttttaccgggtatcaacattgacaacatccagaaaggttgtttcaaacacaaccaaggtggcaagttgtaagggattaaaatggcatgccatatagtgtatgcaacattgaccatcccaaatggattgaaaccatcagatgcaagacccaatcgaatgttacgaggattagaagcaaaatatttgtatatgttatctacatgcttccatgccttagagtcagcagggtgcctcattttgttatcttggactaagccctccttgtgccaacgcatatattcagatgtggttggattcatatacaacctttgcaatcgaggaataactgggaaatatcttaggattttccatggggcacgcttgttggttgcctccttgtgatgcccagaaaccattggttgccatctagactcaccacatgttggacatgtatccatggctgcatattctttatgaaacaacaaacaatcattgacacatgcatgtatcttttggtagtaaaggccaaggtcatgaataaccttttgtactttatccaatgtgtccgaaacatagtggccttctgggagaacaagccggaacaactgaagtatggctgctaatgcacttttactaagaccaaacatgcatttaatctgaaagagccttactataaaagataccttagtgacctccttgcatcctggatacaattccttcttcg

SEQ ID NO: 152868 - DNA, 622 bp, Zea Mays
gctcggcgaggacgcttcgggtgaacactatcagacctctgaatatccaaagttttgccagcctctgggatgggcgctgcatccagtgtttcagcaggggctgcgtcagagaaatcttcagccaacatatccaacatgtcacttatctcaacatcacttggattcaaaggtacctcgaaatgaacctgcctctcgtcatcagggatttcaccaagtgaggcaaccaaagcactaacctcttcgggagagggtcgcactctaaggcccaaaccgctatcaccagctggaggattcgacacaaaattggtaaaaaccttagaaggaggcagattccaggccgagtatgcaacaagagcaccgatgttcgacaccttgcctctgagtatcatctcgagccagctgaccaaatccactgcaggaattcttctgttggtaacccgggtcgaatcagcgaggcctcgatacaaataagccgggtaggctctgtcctttaatggctgaatgttcttgaaaacgaaatcggcgaccacagcttctgcagtcagacccctttctttcaacagaccaacctcagcaagcagagcccctgcctcagccacctccaggtctgtgggggactcgg

SEQ ID NO: 152869 - DNA, 421 bp, Zea Mays
gtgcggctgtgggacacggagagccaggcgtgcctcaagacgttcgcgcacagcgactacggtgagcaaagcgagcgactgctgatagatgggcggctgcttgcttctgccaaccagctggttctgacatgccgccacgcccgatccttgtgcagtgacttgcatccagttcaacccggtggacgaccggtacttcatcagcgggtcgctggacgccaaggtgcggctgtggagcatccccgaccggcaggtcgtcgattggacggacctcaacgagatggtcaccgcggcctcctacacccctgacggccaggtctggcccatcaccacacacactgtctcatcctcaccattgtattcatctctgaacaaaatcttttgaagggggcgatcatcggctcgcacaaagggagctgccggc

SEQ ID NO: 152870 - DNA, 439 bp, Zea Mays
caccggaaacggttcatttgcagttactttcgggcaataacctgtggggccaactggagagtgaccccacaagtcagtaacccatttgtagctaattccccagaagtaactgcatagcatctagtccctcaccacagcatatgctgaatgtaaatgatgactcttctagaaagttgggagagctcctgcacgaactcttctatttatggtatcctccggttctgtgtcaacgatctccaatgtcaacgatgatatgaataacaccaggtttgggttgttgcatttctccttgacagcattgtaacagaaatagctagacacacacacacactactctgttgcatgaattgatttgcccatatggggaacgcaggatgatacacatgattgtacgagttgatatggatacccagcactgtacaagaaatattaagtgaat

SEQ ID NO: 152871 - DNA, 425 bp, Zea Mays
agcaaaggaaataggtaaatctgttctagcaatcaaacgacacaattcagtacgtgccctaacatcagagtactcccaacgcattagtgaaccatcaggattatatttaagaacagattgaattctaccagatcgttccttttctttcttagcagcacaagtatcaacatggcgtagcaaatgtccagtgccaccagaggatttagcagaaaatgtagccttacagtggatgcatatggcagagacccttaccctcttaccattcaccaaatctttgacctcttcgaagtcattccaagctttagacctcttcttccctgctctatcaccttcaactgtgctctcattggtcgggctcgtggatcccgtcctagtaccaccagcaacaggatctatctcgtcatccaaattgacagcagcatctg

SEQ ID NO: 152872 - DNA, 882 bp, Zea Mays
gttttatccgaagccatctgccagggggagagagtcactattatgcacatgccaattgttttcaaccaagttattttattcattacaccaatacattacaagcatatggctactacaagttgtactacacgcgagcgttttctgaggtactactgaactctttctctaaagtgtccccaaattccttgagaaggtcatcaaggctagctagggacatatcctcgatgtcggacaaattctctatcctggcgggagctggtgctgggggagccttcttcctccgctcagcttggcctccttggttcttggtcttcttttggattttcttcatgggggcgagcttctttagcttcttatcatagtccatctttagggttcgataggcttcacgggtgttggcctcctcgccttccgctatgtcgaggcactcttggagggatgttttctccttcttaagctccttgacctgctgctctaagctttccacccgggagtttaggtgggtgcagtgggaggagagatcatcgtagtgggtatcgagagtgtggaggtatccggccatgtagacaatggtggggtcatcctcggtggggtctctccctgacagggcctgaagtcttttcctccaggtgggggtgtttttgttgctgggtgggaagtaacgaaggggggtttcaaagatctctctgctgtagttttggcatagctgtttaagggcttttcgggcaacactttggcaagtgtctgggaagcggtgcccgatgaaggtgacttggaagggagggtggtttgggtagcttcggctttctcctaggtaaaccgccatagagcacttttctattccattttcgcggtattccttccagacatattcgggcttct

SEQ ID NO: 152873 - DNA, 675 bp, Zea Mays
tgtaagtccaaataagttaaggttaggaaataaagtgaagtgaaatggtttttttagtttagtcatggttaatacaagtttgatagtagtggcgcttgctggtgtgatcactaggttcattcaatgaatcttccttcttaagtaataactaattcctaagtgtatgaggtgtgttggataagtgtgtggaatgcatgagtggtgtgcttaggagtagaggtaagtgatgccctccaccgtgctaaatgtagacaagtaggtagttaagtgggataatagcagtagggtatgttttgtgagtgatggcttgcttaagggtagatactctgctaggttggactaccttgtagaggagaaggtgatgggttgtatgatttcttaagtagtagtcaggaccgaccaagaaaagatagactacatgttcttggatgacgtagactaccttatgacactgacttataatggaaagtaaaccataaaggatattaaaataagcatgcatccctaagcatcatgcatctcctgcactgtgcattacctactctcatgcctgcatacatgcatcatacaggatcacaagaggaagtgccagtaggagctgtcgaggagctgatgaggcttctattgaggaggttgagcctaaagccgaagcccaagagtgccctgaccaccgcc

SEQ ID NO: 152874 - DNA, 553 bp, Zea Mays
gaggaactgagtgcgcaggagaaggtcaagaagaccgaggtacctaaagacaagggtgaagaagatggcttgcaagaagtcaaggttggtaaagctgagaagagctgtcggagaaaagatccctaggcccctggggcccactagtcagcaaaaggacaagggaaaggtctaccccggtagcacccacccccagatagtcccgaggccccgagcctaggatcgagcgaggcagagccaaagggggcgagagaattgaggggaagccactagtgtggattccgcgccttatctaagactaaaccgtcgtaagtgaccgaccacattagctactccttgcactgagccaccatgggagagtcgatcctcttcccactcatgaactatgggtccttagacctacggccactcatgacctatcaaacctaggcctgggtgcactggctgtctataggatccgcaagatgatgagcatgctgagagcatgagacctaggctatggaggccaagggtcggcgtggtgcagaggcgataataatggtgccagagctcttcg

SEQ ID NO: 152875 - DNA, 397 bp, Zea Mays
gaagcgccctgctgaagccaaggagaaaatggtcgaagaaccagaactggcggaatcgacagggctgccaaaaatcctaagcctgccaccagagccggagttgccgaaggtatccaaagctcctgcaataactcccaagaggaggatggctagcgtgctagatgttgtcttggagtcaacaagggcaccaactcctgcttctgcaaaggaggctgccgaagctgggcccacagtgcctatcgaaacagggcatgttgaaactcttgaacaggataccaaacaaggaccttcggatgccaccctgatcttggaaaaagaagatgcattcaaaaaggctaaatctcctactctcgaagtgtgtaccgaagagttagacattatcatacgacatgcttcg

SEQ ID NO: 152876 - DNA, 338 bp, Zea Mays
ggtgcatcacttcttcgtggttggaacattcaggtagcattcagtttaaaagaaccatattgtagtaatgttctacagaagaatgtaacatgtttgcatgcaattagtttttctgcttaggaacatgttgttcaaatggtgcttaagttgttatcgacattcctccctttggattctggatcagaagggcgatatgtacagcatatgcctatgctgcatgctcttgtatcaggaatttcttctattgacactgttcatattctctcactgtatggtctggtaagaaacatcgctagtttaatagttcaggtctattcgttttgacttagtcatggata

SEQ ID NO: 152877 - DNA, 563 bp, Zea Mays
tctggctacgctccaagctcctcgtcgtactcaacgacgccgcctctctcgagcacacgcctgcgtccatctcacgtacgacgacacgtctctttttcctagcgccgcgaggcgagtggcaccttcactgatacagcgacacgactctgctactcagcgttgcaaggcgatagttcgctcccgttggccgcgtctcccacacgcactacgcgtcccgagatgaagggacgcttcgacggccggatgctggcgtgcaagcaaggcaacgacgactgtagaggcccgcatgcgagcgaggctccgaccgcccgatgcgtgggagacaaggtcgcgactgtttttccgactgctcacacgcgtgggagatgaacactgcgacgaaggcccatggcggcactggagcgaggcgagggtggctactggctatcgtgcggagcaggtaaacccaaccgcaatccaccttttcggaaatgaaattgggcgatggagggcggctccatgttctactactccgcaccccaaactcgaatccacctggttgtctcctaggtcatcatgtctgc

SEQ ID NO: 152878 - DNA, 930 bp, Zea Mays
cttaggggaaaacctgctccaatcccggaggcggtaggcgtggttttatccgaagccatctgccaggggaaaagagttactaccatgcacatgccaattttttttaaacagttactttattcattacatcaattcattacataatacagcacacaactaccgtaagcttattacacgcgagtgctatcgagggtactcccgaactccttctctaaagtgtccccaaattccttgagaaggtcatcaaggctggctagggacatttcctcggtgtcggacgagtttcttatcctggtagggggtagggctggaggggcttcttccttctgctcagtctgacatccttgacttttggttttcttgcggattttcctcgtgggggcgagcttcttcagcttcttgtcgtaatccatctttagagtgcggtaggcctcatgggtgttggtttcctcgccttctgctatctcgaggctctcttgaagggacaccttttcccttgtaagttccctgactttttgctgcaggctttccacccgagagtttaggtgagtgcagtgggaggcaaggtcatcatattggttattgagggtgtgaaggtatccagccatgtagacgatggtggggtcatcctcaatagggtctcctcctgacagggcctgaagtctcttcctccaggtaggtgtatttttgttgctgggtgggaagtagcgaaggggggtttcaaagatcaccttgttgtagctctggcatagttgtcggagggctttccgggcaacattttggcaagtatttgggaagcggtattcggtgaaagtgacttggaaagaaggatggttcggatagtttcggctttctcccaggtagactgccatagagcatttttccataccgttctcgagatactccttccagacatattctggctttttg

SEQ ID NO: 152879 - DNA, 1196 bp, Zea Mays
tgataagccaagggcaattcatttacaaagtattaatggggacattaagttccatgatgttacatttagatatgttgatgacatgcctccagtagcagatggtgtgaatcttcatattagaccgggagaaataattgctttagttggaccttctggtggaggcaaaactactcttgccaaattactcctccgtctttatcatccacaaaaaggtattgaactaaacagcagtaaaatactgagcaggttttgtatatatccttgtatatgtcttcgtcttttaccttaagttcaagatctcatatttccttttcttggtcatttaaactgtatagtttcttatagcatggatttaattatgtttccttgtagggtatatacttctggacaaccatgatattcaggacattcaatcgcaatgcctgagaacacatatcgcttttgtttcacaggacactgtaagtctggtgcatgcatgatctcccattctattgatgtctcctcaaatgctgttatcttcccagattagatcttttgtaaatataatgcaagttgcatttttaagatttgtagtttgtttgctactggtgaaacagtattgtcctgcggttttatcattgtatcatgtgaatagtagagatggaaagcaagtcatattttcatgtcaactgatggatgaatctaatatactaagtggttcaagttcttgatcagaaattatatgttcaagtatgaaactcttagctcattttggtgattgttgttctgcggtctgccgcatcacattctgtgtttgaaatgatattttgtcaacctttcatctgcacttctaatgaaaaactagctcagtagtgctaaatcatcaacacaagatacaattctaggcatctttctgttttgcatgtagagctatgcatgtttttcattatcatcgtgtttgtgcatcactcgtttcttgtttatttcatagatgctattttctgggacaattgctgaaaacattgcttatagagaccctgtgggagatattgacatgaatagggttgagtacgctgctaagattgccaatgctgaggagttcattaagatgttgccagaagggtacaattcaaatgtgggacagagaggttctagtttgagcggtggacagaagcaaaggtaaaatgctcactttccagtttccagactaccttgta

SEQ ID NO: 152880 - DNA, 535 bp, Zea Mays
gttctagtatttatttttgtattaaaaataaattcctatttcattttccccgattttctaatttcctggactgggcgcaatatttacagaaaacacaggggtctcgggataaaagttcttaagactcagggcacagtggagagggacggcgggtttattttaactttgctcagggttcctttagcaaaattgactcggctgaagggtacgcacggatcctgatcgtccgatcaaaaatggacagccacgattagaattgagccgcggtgaaccggtacgcacacgggaccctcggatctagatctgacgcccccagtttaatgaatcccagagttatgaccatcatccgatctcgatcggacggttcccgttaccccaacccgaaacgctacgcagtcaccacatccggcagtcaaaaagagatccaactgtacaccgccatcgtctttgacgcgccctgtttcccctccgtccgccgcagcccgaccacgatggaaaacccaacaccggtgatgaccgccccgaccagatggcg

SEQ ID NO: 152881 - DNA, 310 bp, Zea Mays
gttggatgggcatcgcaggtacatacatatgatagcaccacgatgcatacttgccttctcataaactttgctgctgctgccattcagtagctctggtgccatccatggaagagtgtcgcgtacaccaccagaaaccagagtgttgcgcttgaaccttgtcaacccaaagtctccaacctaagaattagcaatgaattattaatgtaacagttcaacgagagttggaaggccaaaccaaggtgaaactttgctgttcactgacaatgaatacaaactcctaacaatcgtaagttcgctactgtactgctgc

SEQ ID NO: 152882 - DNA, 341 bp, Zea Mays
ggacaaagtagtaaatgtcaaagttctcagtgtcgatggagatgtgttgccggagggctacgcctttgttggcgatacagtcgttgttcgtgaccttgacagagagatccttgtgtggcgtaacatgcaagcctagctaaaaggccacctcctgcagtacgaacatgtgtgtggagactgagtcaacaagcgccatgagtggggtgtcattgattcggatctttagctacatggtagcgccgacgtcgatgctcgttagggcatgcgacgagatacccaatgccttggctacttcatccatctcctggtcatcgtccagttccatcagaaatacccccatg

SEQ ID NO: 152883 - DNA, 443 bp, Zea Mays
tttttttcttcttgttgtatctctacttctacaattttgtacgccctccttattctagtaaatgtggcaaaaaaattagttgcacaatataccaaactatatacctggttgaggaccagaataattgcactggaacatcgggacatacttgtacgctggtgcaacataggagcatcgtggctaacaactagataaatacgagtggttagtaccggggtatgcaatgcatagatttcaggcatgccactacacataaaccaaaacagtcaggctccacggttctttgttgatctgtcgacaaaaaattcccccgaggcaagatatcatgcgtcaattccgggaccagggtaagctgggagactcattatcctcttgtcaagcacaggagcgcccactgtaaaatggtacatgctctgaaagtccaaacctttcaagccaagtgc

SEQ ID NO: 152884 - DNA, 314 bp, Zea Mays
ctggattatccccaggtttaacttttccatctcctgacacaaagtgttgtcagaggtcttcaccataagacagtggcaggaagccttacggcttagtgcatctgccaccacattggctttgcctgggtgataatggatctccagttcatagtccttagtaagctcaagccatcgtctttgcctcatatttaattctgactgggtgaagatgtactttaaacttttatgatctgtatatatgtgacagatatttcccagcagatagtgacgccaaattttcagggcatgaaccacagcagctagctccagatcat

SEQ ID NO: 152885 - DNA, 360 bp, Zea Mays
tgtgaagatatcagcaaaccgagaagtcattgggacgtggagaacacggacgtcaccaatggctacacgctcgcgcacaaagtggagatcaatctcaacatgcatcgtgcgtttgtgttggacatgattggtggagagataaaatgcactgatattatcacagtagaccagggtactcttggtcagagggtcgtggagttcatgcagcagttgacgcaaccagcaggcctcagcaaagcattggcgactgcacggtactcagcttcgacacttgaccgggaaacaacactctggcgcttggaggatcaggaaacaagattctcaccaatgaaaaccgcatacccagaagtagaccgtcgc

SEQ ID NO: 152886 - DNA, 603 bp, Zea Mays
agcatgcatcaaacaggcctgcaaatatgtagctttccttgcaagacggaagaaggaaataaagttccccattctgcatgctctgaatgtataggaaatgtaggcattagatgaaagctagtacaaatatgataagcacaaaataatgcttaatggtatgactaccttgcaacttctcttgcaaacaagatctctggactgcctctaatttcacgagacatcttagcaagatccagagataactcagcaggttcaacctaattcagatgtatctatgagtcagcaaatatcagaacgcaaaagaccagatctgctcaagttgcctcaccttgtaaccaggatgtttgtctaacttgagcagtgcataataaccccgaaactccttttctgttgagaagagaacaccttctctcctatggtcatcatacatttgaaatagctcaactgatgttttattcatctgctcaatgttgaggtgtgcatcaaaaccctcggaaaaaccttctcctttgttgtattcacataattcatgcatcgcaattatgtggagccttatctgctcaacaaaagacagcttcaagatgaaacattccaggaaataag

SEQ ID NO: 152887 - DNA, 948 bp, Zea Mays
ggtgcgatgacgaggtacacacaaccctgatcaatcgcctccgatggcgatctgatgttcaccttttacctttggttcgtattcgctgagcatccgatcttcttcatctatcgaggccagcattttttgtttctttttttttcttgctcggtttgctttggatcgagggacctggggatccgccgcccttcttcgtgcggcgtcatccagtttttacccctcgaatacggcttgcaggcgcgtcctagccatctcgctctctgcataatcctctgcgagacccgggctcgtatgccacattcgtcgttgtcaaactaaacaaaaaaaataggcttttgtcgcgaagatcccagcagagaggtgcgctgatgcctccctaacaatcataatcttcgcagagaaacgctcatgatccgtggtttcgtggatgtgtgatttggatttttgttccattacatctgtttccacggcgacattttcatgattactgcagcgaactgaacgagggacctatggatggactgctctttgtccgtgttgtgccgtccaagtttgccttcggatagtaaaaccagcaatctggtcacgagatctcgcaagccttttcatgtttgtgggaatggtgtgccaatttgccaaattttgggtttctatcgttatcttcataggtcgtaattttgccaggatatagcgccggaaccccatactgaggtcgtcgttattgcagtcataagcgacgatgaaactttgaacagaccagaatgttcttgcagtcacaagtggttgtctaaatttggatattgaacagaattacttccagttgaacctaccgcttcaacaattggcatacttgcctgagtggctaacgatccatgcaatactgcactattattaattggagcccgagacaccacctcaaatttcataacgtcgctataaaaacaaata

SEQ ID NO: 152888 - DNA, 364 bp, Zea Mays
aggaggtttgaaattcgaattgaggcatgaaatgacgtggaattgagccgatacttcacgaataggtttatatgggtaaatatgagtgaagtgtgcgcttggtttgattttaggcgaagaaaatggaatttgggcactcggctcggaaacgatcgctagaaacggggatttgtgtaaaattgaagcctgggatatcggattggcgtgaaatttggcgaatatgttactggaggtatggtgaaggtgcctaaaaattttgggttcaattggagcaattttggctggtttgggcatttcaccgagcacgtggcgtgcggtggattaggtttttggtgaaatgactagtttaggctgtgaaaccctc

SEQ ID NO: 152889 - DNA, 472 bp, Zea Mays
atcaagggacagaggataggtcatggatggttagcgcttggtacatctagggatagcaatttgatccgcggattcagatatgcgtcgaatatccgatccgacagagccggatatagatacattttttacccgtgggttaaattcgtatccgatccaaagtcaggtggacacggattaggatattatcacccaaccacagattattcgttggatatctgaaatcgacccatagtttattttttgtcgtagtctatatcacatagcaaagagcaaatcgtaactccatgaacctcatgcctaacgttctcaattcccaaccttagattgtcccttctagctttattggcttcttgcccccctgctcccgtgcccccttcctagtcccataggccgcagtgcagctgtggctggccgatggctaccccttccaagctctagtgcctttggtcatagccccacatgcccataataa

SEQ ID NO: 152890 - DNA, 567 bp, Zea Mays
ctaggataatatgaggacattgcctggctacccatctcatgtcctactgcaattgtcttagattcacacctgacaccacttattttaataatttgacatgctagagaaagattctgattccagatccagctacagcttccatgttgtctacaacatcacaacctgactgatttggacaccttccataaacagcagtgggtacatataaattcaccaaactccaagacccaactcgctaaagcacacttctacttgggccaaaataggagactgaaaagaactcgccctactcgctccttcttcccctctcctgtctcaacccttgatctcaacacagttgacaccagtacggtgagatgaaggtcatcatgaagatgctaagggctccagcttccagatcgaagtggaccccaccaacaaggaaccaatctatcgctatggttctagttgaacattaatagaactcctggcaagtgattgctagaatacctaaatggtttcctcaaacttagattacagttaagattatattcttatgctaaacaatttggttattgcggccctttg

SEQ ID NO: 152891 - DNA, 799 bp, Zea Mays
cagctcagcttaagcctgaacctgaacccgcttgtgcttgctcatgctgccacctaatctgccatttctcgctgggttcctgctccatctgaccatctatctcgctctccttatctgcatataacaattgcatctcatcctggtgtggctcatggccatggaggcaattgcatgcgacctttgcgtcgactaaacctgttgtcagtgaggcttagcctaaacctagccaccaatccacctactcctggctttgcaaagctgcagatccaccttctctgctgctttcggcacaagcaacgacacagatttgcaagtgacaccagctgcagctgatcctataagtttctttgctcatgacctggcaacacaacacttgagcaattgtacgtgtagaatctctactgattttgggcattccatacagtttcttattttctttttgagaaaagtcagttttacatctgccagcgatgggcttattctaggattgttgcactccattcatttttttataggaaagatagttgcacgtgtgattgtttagaacctaaatcagtttgatatggaatgcagttttgttggtttgacgttgtggaaaagggttagcttactctttagatagtatttgttttgttgtactgttacactttcttttacttataaaaaacttacttagatggtttcaaaatcttaaagccatgcataagttttttaagattcaaatactatttagctgcaaagtgaacttttctctttcattcttcgctttgaatagtaggcgccatgacttatgtttttt

SEQ ID NO: 152892 - DNA, 1180 bp, Zea Mays
gacgacgtttattaaacagatttctgctagtacaaatttcctgaaagaatttaaatcatttgccttttctcttgaggaaacacgaaaaaatgggcaattgtaggacgagcgccgcacgacgggtcccaccaacgctctcaggtctcggggctcgccaaaccaccaaacaccggtgcgttcgggcgagctcaatccttcttgaacaagtcctcgccgagagtccgagtagcgaccggagcaatcaggaccccgagctgtagcgcgatggcatccagttcacgaacgcagccagagattagcgccatccgaggagatcgtgcggacatctcccccgactttgaaaccctgagatgacaacatatgaggttgatggccggagacaaactggagcactcagcgttaagagcccgaaggcgctcctcctcacgcgaaacctccttcagcaccattagtgacaaaaacaagaaaccctgtgagacaaatgttggggccctaagggctataagtcaaggataaaagagcacgagcctcaccttatgttggaaacccagacgaaggtccctccacatcaaaacctagtggtcgcactttggaaaggtacgcctaggaccttagagagacctcccttgacttggtcgcatgatgctcggtccctgctgtcctactaagctcggaccccgctgtcatggctccccagcgttacgagcttcacacctcctcaaaaggctgggccactgccgaacaactcatgtccagactcaaggataataaaacgctctcacaatcgccgcaagacggccacgcaccccggatgccctgaaaaaaccatccccatcctcaggatgcgagcttgctcgacaatgaaggaaccgcaaccccacgcagatgacaatcgacgtgggaggccggtgctcctaggggagtgattcgccaaatatacatcccctttgggtaagagcatcagccaaggaagcccatagccgacctcgtccgttgcaggaaactcctagatcgcccgtgggggaggcatgggtgagaccaggggctccgacgacactcggactccgcccgcggacgatgcgaaactagggagggctgcgaagaaccgaaccacgtagggacgactgtcttgggcctggaattgaaccaatggcgtgggtatgccccgcggactacctcg

SEQ ID NO: 152893 - DNA, 854 bp, Zea Mays
ggttcgttgagtctgtaatgggaacgatgtctaacaaattcaagcattgtaacatacttgcggcctgagacatcgcctcctcccacgtcagaatattttattccaaggtggtatccacgatcaccgtaagggaaaagaagcgggtactgtaaggccatgtaggatgggtgcaagcacgaaacatgtttgaggccaccctctctagcatgcacgagaacatcgtacttgaactgtgaaggtgagcaatcgcccactattatagcagcaacctcaccattggccggtaggttatattgtgcatcatgtcgtgtgttgcagcctaacaatcgtaacgtcaccttttggttgcctgcttcatctaaacgttctttagcaaagcgaaatgctgcgaccagactgttatgctcatctagcatgttaagcaataaacgggccacctctgggtctggacgatcatggacgtcagcctcattctcaaacatgcccaacctattttgtacctcgtgttcagtgtcatatatgtaaagctgtgcaaactgtggtcgcaatccatggctgggtagcagcgagccaatgcgatggtgtacgacaccattgattttgaaaacataaggtgctgtaccgttatttatcgatctatcaacgacggcacccagtgaggtaaacgcgaaaagggaattgtatgagcgaatttgcctaaggaaccttttggcacgattatcaccatcgaatcgcagcaggtcacttaagggaggcggcggacatttgtaaggctccaaaacaatcttacctcctctgcaacacaggttgtacacaagcctgcgctgcgtaattgtagaagcgcttttgacccg

SEQ ID NO: 152894 - DNA, 476 bp, Zea Mays
cgtgccttccccgccacctggttacctccctaatggttcatctcgttcgccatttcaccctgcccattggtccgaatttgactcgatgcgcctcccaggcttccattcgtggtagcacagttgaccttgtggttgtagagttcgataacgcgtcgcgtggacttggcttctgaagctggagcattctggcctcaagctgagtacaacttagttgcccgttgcagcctaggtgtttgtttatatgcgtgctaatggacagaatgtctgcaattcggggtggatgtgcatgctctgcctaggtaggccgtggtttatgattgttggacatgtagccatcttgctaaccgtggactgcaatgatttttgataattgggacttgtttgataatattttagtggtggttattccgcgtcatgtgccttccctgtgcacgccagcacatacactgtagcctgagtttgtccactggtggtta

SEQ ID NO: 152895 - DNA, 316 bp, Zea Mays
gagaagttaagcgatggcgtccaattttgcgcagagagaccggcggccgagacgaagggtgagtcactggtggccgcgcaacgtggcttttaccatggcggcacctccggcgatcaccggatatgcgtagcacggttagccgcaacgtggtaaagtgtctggacacgcggcgggcgacagtgatggctcaacggcggcggaaatctatccgagtgaccgatgagcaaggggagggaggtacggcggctagccggaatagtttactgaccgggcttatccacggcggcgtgtcaccgagtgctatccgatcaacccg

SEQ ID NO: 152896 - DNA, 315 bp, Zea Mays
gagcaccaagagcagagaggccactgtttcttctcaagctggatgactaggcaggcatcgtacgtccctatttaatttctccatggactacatgcatatttggcggtgttgctgattttattcagcttagctattcttctattgcttgtcagcgcattatgcacgtgtagcatcgattcggtacgggatttatgtagcaggcacataattggttcagatgccagcagccaagtgcatgcgcgcggctggtttccagacatgcatgcatccatgaactcctgcctccttcttcggcatatcgaattcgggccgggg

SEQ ID NO: 152897 - DNA, 357 bp, Zea Mays
gttttctgaaagcgatgtggtctttttcctgtatctataatggtactaacataaaaactactctttgttgaagtagaatgatttatgggagaccaagttctgggacaaagctgaaggtggcctcataattcatgaacgagccaggggcgttagggtaatcggtagcttttgacgactggattaagagattttttatccttcttggccgatagttagtcttaattgtttggtggatcattaactacgatcaaatttccatgcttaaattcagcccagacctgctagcctgctctgttggctagattctcatcatcatttccttgtatacttttgcatattgcagttttgtaggctagc

SEQ ID NO: 152898 - DNA, 376 bp, Zea Mays
ggcgtggaaggaaagaggtcagaggaggacattgtttagtggcttggggaagagtctgtagacctcttgaaattggtggacttgggatttctagtcttaaagaactaggatgggccttaagaatgagatggctgtggctgcgcaaaacagatccggataggccttgggcctcattgcccatgcagatatccaacaaaataaaggcctttttctacactgccctgctcaatgacattgtgaatgggtcttctaccttattttggcaagatcgttgggtcaacggaaagaatattgaagacattgctcctcgactgcttgcagcggtgccaaaaaggattaggaacaacagaactgtgcttgaggccttgacaaacag

SEQ ID NO: 152899 - DNA, 312 bp, Zea Mays
ctctcccacgtttcctgtttctaaaaccatagtcgtgcattcaacggagacaaaccagcgccgatttgaagaaaacccgagccgcgcagattttcctttcgtcaggcgactccccaggcgatttccgcgccagcgcagcgccaatccaccgccgctctaatccagcgcccttccattccaccttacatccttcaatctcccagcattggagcgcgattcaagaagttccaggtaatccaacattgaaatacaccgagtttgccgtcgattttttgaagcctatcggtcgattgaagtggatttgattgtaac

SEQ ID NO: 152900 - DNA, 610 bp, Zea Mays
gctctccactcgccaaaaggtcactttcgtcgattgtgcgcggacggtgaagagaagttgcgcacggacagtccgaaagcctgtggaaagttcaacaaacatgtcttcatcccggtatttcataatctcatgtattttatcaattttttttttcaaatttgggattattcggattttctctctgatctataattgagcaatagattcacaaatctgattggtgggattattagtgctactcattgtgaatgttgtgcaaaaaattgaacaagtttggttagatattttctgcggaatcgtcgtttgaatgattgaggcgactagggttctagagagtcgcccctgaacggtcgcggaccgtctggacctgtggcgcggacagtccggccctctagcgcagacagtccggaccctgacagagaattgcacttccttgctctatgattgtggtattatcaactattcacctatggatgtttctcacatttattgcagtggtctgggtggtcttcgaaagaagcttgccggtcgcttcaaatcaaagcgccctcgtgcagacgatgctgactacactccaaccactgactcagaggcccaatcctcagctggg

SEQ ID NO: 152901 - DNA, 557 bp, Zea Mays
ggcacgactgaaatatgcaatggccccatccccttggtgaagtactgccccaaaactagtccctgatgcatcacagtccaccacaaactgtttagagaaatccggcaactgtaacagtgctgctgatatgagagcttgcttgagttgaagaaatgcctcttccgccacttcagaccaacataaagcctcacgcttgagaagagctgtaaggggtgcagatatggtgccatagcccgcaataaacttgcggtaatagccagtgagacccaagaatcctcggagcgcccgaatagaccaaggacgcgaccatgcctctactgtcgctaccttgtcagaatccatggaaactccctgagctgagataacatggcccaagtaagcgactgatgttttgccaaacgaacagttggactgtttgacaactaacttgtttgctcggagtgctgtaaacacttccctgacatgctgtaagtgggctgcccaggaagaactgaatgccatcatcgaagaagacaaggacaaacttccgaatgaagggtttcatgatatcattcatg

SEQ ID NO: 152902 - DNA, 300 bp, Zea Mays
ctgaggttgaggtgggggtggccgctgctgcacctgctgcatcgctgctaaggtctgaccaattgcttggactgcttgggtctgcatcaggaacatctgctcaatggtcatcgggggtgacggtggcaactgttgctgagctgcatcttcctaaggtgcctgctgttctggctgagcacgccttgcacctcggcgcttgttttcagacatctgtagaaagcatacacaaatcagatctgactctgcagtctctcagcataagaaaagatgtatagaaaatcttcatagcactgaacaatt

SEQ ID NO: 152903 - DNA, 1017 bp, Zea Mays
ccgacgaatgtacgacgacgaacacattctccatatgctacattcgtccatggttgaagacgaagatgaggagatacatgtacatagagggtcagttgtcggtcgtcgtgtcataaaccgggacagggaatccggttatgtcagactgatgcaagattatttctccgacaacccggtgtacaatgacgacatattcagacgacggtttcggatgacgaaggctatgttccacaacatatgtcaggctctcgaagcggcgaacccatatttcaggcaatcgtgtaatgctgccaacgtgccaggatttcacaccatacagaaggtaactgcagcaattcggatgctagcgtacggaggtccagccgacagcctcgacgagtacttacgcatgggcgaaagtactattcttgaaacagttggccatttcactcggacaattgtgcagttgtttggtaatgagttccttcggaagccaaacaaccatgacataggtggtctcctacaagtagcacagcaaagaggtttccctgggatgctaggtagcatagattgcatgcactgggagtgggaacgttgccccactgcatggcaagggagttatcgtggccatttcaaaaaaccaacactaactctcgaagcaataacatcacatgatctttggatatggcacacattttttggtttgcctggttcttgcaacgacataaatgttcttcacagatcaccagtcttcgatagcatagccacaggtgatgttcctcctgttacctatgaagttaacgacacacaatatgatatgccttattacttgtgtgatggaatttaccctccttgggcaactttaattagtggagtaccatcagctgttagcaacaagcaacgactcttcactatgaaacaagcagagtatcgaaaagacgtcgagcgttgcttcggcgttcttcaaggtcagtacgcaataattaaaggtcctgcacgtttatggcatccggtagatttgaagttcatagtagactg

SEQ ID NO: 152904 - DNA, 367 bp, Zea Mays
ccgattaatcggccagatgggccgattagccgagctgtcgagtaggggtagggttaggttaatttttccccttttggcttcaaatcatttgaaattattggacctccgattctagcaacgaaagacaaggttcatcttcacccctgcttccctatgtcaattatccggttggtgaggtaacacagcaaccaacgaggtgggtgtacgaatgggaggaccctgagtagcgtaggaccactcacacagggatcggacaccaaggcctacagcaagcatattggacccccgattctagcaacgaaagacaaggttcatcttcacccctgcttccctatgtcaattatccggttggtgaggtaacacagca

SEQ ID NO: 152905 - DNA, 715 bp, Zea Mays
ggtaattaacatggcaagttgtcgccctcctaattcttgcaatcaccgcgtgtgctgctgactcctccacggccatagtgcaaccagattgctgtgtctcatccccctcactctgcgcctcgtcttgattcccatctagtcctttttttattgttgggcgacctctttttcttggagtccaacctacagttttcgcacttctctttttgtccttgttctcgaccgctctgcttctgtttgggttctgagggcatgttgtgctatagtgccccctaacatggcaggtttggcactctcttatgccctgacccccactatatgtgttgtatggattagcaggttccacactatttttagcacatttagccccactggcagacttcctacccttcgtgcgcgacactggcggttcagtcaatcttagatcagtgaggcagtttgcagaatctggattgaggcccgattctggtggtggtgtaggtccagttggcatcacaacaggttctatattgttgtcagaactttgttgtgttggtgcaatgggaccaatattccgccgtccttctgcatcttgctgcaactcagtatttgttgcttcgtccggaccaatcggaccaatctccactgttcgtagaagctcaatctcaggagttatcatgtcgatgtgcctgatagtttcagtgtatgctctatcagatttgcttcccgctcttca

SEQ ID NO: 152906 - DNA, 1538 bp, Zea Mays
aaagtgcaattacatccaattttccataaaaacatatataatgccagtatgtgccaaaagggaacatcatataaagtaccatgcctattttaaataaataatgaaaatattgtaaaaaggggcaggcgacaaagcaggccaaatgatttgacaaaaaaaaattgctagatgaacggcttagataaaatagggtaaaaactcaattaaggcacattgtccctaacatttcattataagcaaaaggcttcctagcatatgcaagtatgcaacctgaaggctgaagcaattccataaaatgacttctgaagaagattagtttgtgcccataaaatatgaccaatgacttcacaagcacacctcatcaggctaccacctagctgcaatggaaaattcttaactgcccatctacaatactactagcgtgtatggataatcaaacactcacataagcacgttgcaaattgggattagcgtgtatgggtgaccattttgattaccctaattgctagccctaaggaggtttcagtaagtgtataaacataacatagcaacacgattctgctgcagttcgcgttgcatttaacactcaaactcacattttaactgcacagattcagcagagtcaatttatgttcagccaattaaacatgaaagatcccaaatcgagcaagatcccaaatcgagcatgctggacatgaaccttctggccagggcatttgcacagatgatttgagctgcagcctgaagcataattaatacaacttatggccatatattttcgtcatctggaccagaagagctagttcaattaaagaagatgattcttgtcagaacgacaaaccagtggtagtatgaggtatggaattcaaccgaacccctattttctaaataaactcatatagcctaaaagatccactagccctaaacagggtgagttaaagtataagggaggacatatgtttcttcccagagggacacaaaagttgtaaatatagtcgcaactcgcattgaccttgtatcgttagggatgaaaacgggacggatacaaccgaatacagggtcaacccgtatcctaccctaatgtatttctctcgggtacgggaccggatacgggtagttaagattcgggacggatacatgacggtaccgggtaataatccgggcgggtaagaaacggataacagatactactcgtgtaaatactggataattgtcgtagttcgtcccgataatattaattatccaaccacccaataaatacgtaaattaagtaatacataatcatgtatatgatagatcaaatgtaggaaagaaaaccgataaaattgacatcatgcagttcaaagttactaattacaaggacattgaagaaccaacaccgcaatattaaaaatcataaaatattctagtttcactaaaaaattgcaaataagttacaaaaacaaataaacattttataagaatataattcaagtcctcatatgaaaatgataaagtaaagtactgattatgttaaaacttggatacttatagtgatt

SEQ ID NO: 152907 - DNA, 590 bp, Zea Mays
gttgggtgggggaataagggataggaagctgcttacattttgaagagatttgattataccttaagcacgattgcactgacacattggctgtgggagatgggttctgctattttggtacgttctcattcatctctgctagagcagattcggaatggtgagtttggcggtggttcattgtttcagtttgttagaatttttcaaatgaaagttgtctcaatttttggatcattcttggtttcatgacgacttgatgaatgataaaagtctgctaaatatataactgaatgcccaaactacagattatctaatggtcaaactgaatatttgttttatggcaaaacaactatatagaaaattacatctttcatgtcttgttcggcggcggtccaagcggctaccaatagggatgatacaggttttgctgttcttttatttattaattggttcaattggagaattacctcaacttgttgggattaatgtgctttgttctttgatgaccccttgctgagtgagaaatcaaacgagatctgtgctggtacccaaatctgccatgtttatacttcatgttgattcaaagcaaatctgcc

SEQ ID NO: 152908 - DNA, 717 bp, Zea Mays
gggcgcgccgccgccggcggaagggtcctccgggtccgacggcggcgagggcatggacgaggagccggagggcaggtcaaggtcgtggaggccgtcgacggagctgtggcggtggtgggcgcggtgcgagcgcggcggcggaggcggagggggcggcggcggcggcgggtgtgcgccgaagatgatgcggtccttgtagaaggaggccggggatgggcaggcgggggagggcggtgaggagaagtgggacacctccgagtgctccggcagcgggtggaggaggtgcgtcggcagcagcggctccgtgtccatgacgcacgggctcccctcgcaagcagagagacgggccggggtttggactccaccgattccttgttcgtggggacgctgcgctgtgggaggggttgaggaggaggaaggcgtctcaggagatgttggaagtctgcggccgctgatgccgtcttcttctggtgtgctctcctgcttgacgacggcgaatcccgtttttcttgcgttttattgttattttttcctaaaaaagagggaaatcattaattattgggaggagaggagatgagatcagacgagcccaaacaaatcctctatctccactctaaacattgcagataagacgagcccaagcagcgattgtatcctcgtctgggtgacgcaagacgtcacaagcgccgaacctttcatctcaaagatgagcatgtg

SEQ ID NO: 152909 - DNA, 483 bp, Zea Mays
tattttcatacgtccactcatcgatctacggcaaggatgaatcgttgccgaagcgtcatctctactctaatcctatccctccatttcagatccgacgaccagtagatttcctccctattctaatcccaaccgtctgcttcagaatcaacggccaggaacctgtcgtttacctcccgatggtggctctcctacaactatggtggcgagatcgccgacccatcgtactactgcagtctagatcgtgatttcacacacagcgttgccgaaacagcgaagcagataccgtggacgagaaagactactaggtggcatatgacagcatgtggccagagaaccgaaactgctactccggcgtcattatcgaacctgggaccttgattagatcaaataatgctagcatttaaacccatacctcgaggtagcctacgacaaatcgtcggagcgaaagatacggtgtcgtcgtcacaccatggcggtgccccg

SEQ ID NO: 152910 - DNA, 484 bp, Zea Mays
agtgaataatcttatacttgaattagaacagcagcgaagcctatttggtgaccggctggataggtagtggactgaaggtggcagattggccagtcggcgacggcgagtgaggcgcgaaggagccgcagagggggctggagtagacttcttggccaggaagtatggagagctggtaaaattcaccgttttgatcaggtccgaaatctaaaaacagctccagttttctgtgtattttagtttagaatttaaaaatataaaagtcaactttgtcaataaaccgaaaatataatccctaagtagggtaggagtggatagtgggtgatgacaggtggcaggtcaagctagtgcagtagcaagacgaggaagatgaacagtacacgatctgatctagagtgtttattccaagttccctaagaatcaactccaatcacattatttcagtagttaacattggccattgatttctacccgacttctgttgagg

SEQ ID NO: 152911 - DNA, 784 bp, Zea Mays
actaacaacagtggggcgatgttaatgcaagtgaacttgaaggcggcacgatggtggtacaacgtcgagctaagagaaagacaagaataccgtctaccaccaccgattgtctagcgctcgccacaatcctacgctttgtgacacccaacatgttggttggtcatcgatagaggagaacatcaataacacgggcgatggttaagcagatctgcatcgaggtctagtcggtgagtgaggccaatacacaatagctccatcatgactttagcaccttgttatggaaggaggcagagaatacggaagatttcacaaaccacatcatccagcgacgcaaacatcaagaagcacaatggtcgcgagcgaggccgtcgagagcgttggctccgcatcacgcgaaggctacaagggctagtatggtgatggataggctcccaaccatgaccatgcaagagccgtaaaaaatggccattgtgctagggattgtcttagaaagcccaaggacgaggcccacatcacgcaaagagacttggagtccacgttgtagatgtcattaaagaggatgtatttgagctgcttagcagtatgatgaggaggaggcttagaggtggagttgtacgtagtcactattcatccccaaacgaccactattctttttatcgttgtcgtcaacaggttaaagtatggaattcataaaggtgtatgtgtacttataaatattttgttcttcgtcttagtttagtcttgtcatagttggaattgtaatacattgagaaacgcatactag

SEQ ID NO: 152912 - DNA, 536 bp, Zea Mays
ttctcagatgggtcgcgacgctcaccggcagattttactacagcagccaagttcctttttcagcttatgaggcggacacttctaccgcggatggaatacagggaggctaccacacatatccagctctggctccttggtgccctggtctctctgagtttgatgttgttgatttccttatttgtgagatcgaggacaccgtattggatggtatgtgtgctcgtcgtcatctgccatatgctcactacttgtgccacatttttgctcaactgattcggcctccatagttccagggcacacttgaggcctcacgccttgtttttggatcctaccgtccagcgcctgaggatcctgtgccagcttctgctccggtttttgacactcaggccgaggatgctgctcttcatcagttcgaagctcaggatgcaacagttgatgatgatgatgatgattttgggattccacctacgcctccacgctcacatgatcatgaggctgggagttctcgtgctacccctgctgcccctcctgctattgac

SEQ ID NO: 152913 - DNA, 752 bp, Zea Mays
gtttcagtcagtgagactcattccggggtgagtcttagagcgcggagtctgcaatttggatagtcgagagcagtctaatgagtggactaagagtagctctagtgttggtaggaatctaacctcgcggaaggaaactgagctatcaacactgcagcagtcaatcgctcactgtcagtagcagaattcgacctccaaacatggctctgcgagggagtaaaatattcagccttcgctgctctgacctctttagtgcagtacaatttcctctttctcttggctattttggagattgaactcgatgagaaaggagtagattacactattttatttggttgtaggctccaccaaatcgaactcagcagtggaggcgacgaactcagcagtggaggcagaggtcgaagggagggggagacgccatctagccatggagacgccatctagcttgaccttctcgacttgttcttcggaggtggcttttgcgaaggaagaaattagaaccattaagtagattgaagggcgaggaaaaacaatgaagcaagaagagacggtcgtacagtacctgggggcggagacggtggcggattggggctagggttagggttttgggcggggcgctggaggctgcgggtgaagcggaggaggtggtcgttgaggccgttcgacataggggcggcggcagggagacgacgatccttggggacgggttcatcgatgtcgtcgtcgtcgagatcgccgcagaggtcgaagggagg

SEQ ID NO: 152914 - DNA, 618 bp, Zea Mays
ggaatatctcgagaatggaatggagaagtgctctatggcagtctacctgggagaaagccaaaactacccgaaccatccttctttccaagtcactttcaccggacaccgcttcccagatacttgccaaaatgttgcccgaaaagccctccgacaactatgcctgaactacaacagagtaatctttgaaaccccccttcgctactttccacccagcaacaaaaataccctcgcctggaggataagactttaggccctgtcaggaagagaccctaccgaggatgaccccaccatcgtctacatggatggatacctccacactctcgataaccaatatgatgaccttgcctcccactgcactcacctaaactcccgggtggaaagcctagagcaacaagttagggaacttacaagggaaaaggcgtcccttcaagagagtctcgagatagcagaaggcgaggaaaccaacacctgtgagtcctaccgaaccctgaagatggattacgacaagaaactaaagaagctcgcccccgcaagaaaaatccgcaagaagaccagaagccaaggatgccagactgagcagaaggaagaagcccctccagccctacctcctaccaggat

SEQ ID NO: 152915 - DNA, 1121 bp, Zea Mays
ttgaaacgtacggcgtggctccgggcggcgcgctgagagcctacttcctggcggcagcctgcatcttcgagccgggccaagcagcagagcgcctggcttgggcacgcgccgcggtgctcgccaaggccatctcgtgctgcttgttgagcaacaacgacacatgcgcttgtaataagacgacggccgaatggctcgtccgggaattcaccaatggtgacaatgttgctggctactactacgactacaacccagcaaggagagacgacgacgagccgaattcaccagcatggggggccagcagcctcgccggtgttcttcgtgagctcgtccacttgcaggcgtccgggaatgctgctgtcgccgaatgtcttcgtggagctgtaaaaattccaatgcctctagctagctcattcatcacacacacacgcatacagccatacacacgtagtaaattgaattaatctgttcctatgattgcatgcagtggatggaatggctcatggcatggactgaaaaggagacggaagaagcgtcacacgcaggagatacagcgctgctgctagctcgcacagtcgagatatgctcaggaaggctccgtggtacggaacaggatctcgagctacgtctgccggattactccaagctccagcagctcactagatgcatatgctccagactagccactgaagctcctgctctggtatgtatactgtattcatcggtcatatgcatggcggtcgggtcgtatgtattcaacgtatgatagatgtttgttaattacagatcgaatcaaacgtcctcaaacagaatggagaaaccatggacaaggttgatgccctggacaggatggttggactcgagatgagagaactggctcaatgtgttttccgcagcggcggcagctccgtggacagagagacgaggcagacgtttctccacgtgaccaagagttactactacgttgcactctgctcgccggaaacacttgagcatcacatctccaaagtcttgtttgaggatgtcgtctagcaacgatgtttatattagagctcaaattccagtgtatccttgtgcatgcaccgtgaaggtgtcatatgatgatgttgtgcctagcttttctc

SEQ ID NO: 152916 - DNA, 587 bp, Zea Mays
caagtaagtaagtacatctttaataaccgacacgggagggtgcaggtggccgccatcgcggcgatgtgcgtgcagacgaaggcggagtacaggccgctgatgacggacgtggtgcagtcgctgatccccatcgccaagaccaccccggcgatgtcctgctcctccacgccgctcagaccggccctgcagcacgtcatcttcatgggcccgcagtgcggcgacgacaaggcatcctcctagccctagtcctgccatggaggtaccctacccaccactgcctggatcggagcgtggtggagtcggtggccatcgactatagcgcgcgctaagaattctcgttccttgatgtatagagctcctcccctcttctccaggatctgcagacgcaacgcatcgttgcagtagtgcatcgtgattgtattcgggcacaagcgtacggcgtgtcatttattggtacggactgttttaaagataacatggaaatacaaataaatattctttgttcatcatcttcttttttacaaataagtagagtgagaggacacttcttattgtagaaaggatttaattgaactggcatcttgagc

SEQ ID NO: 152917 - DNA, 601 bp, Zea Mays
gctggggagcgagggggtcaccatgccggagccccgccagccggcctactacaacgtccggatcagcagcctcgccgtgtcttcggactcgttcgccgagtcgtcctgcaggatgatcagcaacatcaccctcacggaccacgaggaaggcaggtagagacgtagcggtgcctgctgtagctcgctgacggtaaactgtacaggacggccgttcatatgatctgaaattctgaatacagagacacgagaagaaaaaaacacacggatcgggagatagtaggttaacatagttggtgcaagatatgcccgtgcccatcgacgtgttaacgaacgcttttaggctccagcaattttttggtccacagttgacttggtttgctgaactgcacacctgtggtatttgtatgtgcgcactttagtaggcgacagttagttttacacttgtatgtgcttccgaatttttgtgttatacacccatttttgtcaaaacagttttccactgcaataagaaaaaaaactgatttttttgtgggccaaaataatttccaccgacttcaaaaattggctaatttttatcggtcaacagccgcccgatggaaat

SEQ ID NO: 152918 - DNA, 301 bp, Zea Mays
attttttcagtggagacagtcagtttgcctatgtagctcagcatgatcagtctgggaaaaacatgtaccatgcattaatgagtaatcagtttatttgcaccattaatgtgtgctctcttatttgaactagtgcatgctactctattagttccaaattataagttgtttttgtcttttctagattcataactttttctacgcatctagcgattttttatctagggtctaggtacatagtaaaagctacgaatctagaaatgccaaaacatcttataattcgggacgaagtactcagcagcag

SEQ ID NO: 152919 - DNA, 395 bp, Zea Mays
gatgactaaatcttaaacagaattgtttagttcagagagcaagtatatcttcattggtaccaatacgaatccaacattattctaggacgaagtgctctagataataaaaagaaaacaagcacactgacactgaaaaattccattcttggactgcaaataaattaccaaacagtcatcttagtgtttcatccggtaaagtggccaccgttgtactaccatcagcacatatgttaaataagtagggaatccaaatgttttgtaaataaaaatgtaaaaaatagatgcttagtgtttctgttactaaattagcacgacgtatcctggaacgtgctgcattccaagtggaatgctcagctgcagcccatgccccgcataagtaccaatcaatcagcaac

SEQ ID NO: 152920 - DNA, 389 bp, Zea Mays
ggaggtgagcaaatgttgtacgttctcctcttcttgatcacataatggacagctctcatgatgcccaagtccacagtgagctaacctgactgcagtccaacactaatttagagtagctagccaaatgaaaaacttgcatcggaggtgcagcccaaaacagactacttcagagttcagagtaacatgtatcaagtatgatgcatatgtgtgctttgaaccttgtagagagtattccttatgtttccatcatgttcaactcagtaccatactaagttagtagtatgtgacaagacttgattggagaatttgctacctatattgttgtgatttattgatttaccgtttttcctgtaattgtccaacattggtaggatagatatcatagtttc

SEQ ID NO: 152921 - DNA, 346 bp, Zea Mays
caggcggatggatcttcactactacgaacactgacttcatcgatcgtgagttgaaaacttgtgctctcaccgtgcccgtcgccatggccctaagcccgttggaggctcacaatttatgttccatggcatcgcacgggcatgtacctagttacataatatgtctgcattgttattgtgctgatgctagtagaattaacaagacttgatgttattcacttgtttctgtgaagtatatttttctcttataaacttatttggtgtctgtgtcactgaaggttgcaggaactggtctggtgcaacaagcagccatgcttctaagaatgagaaacaagaggagaagatacat

SEQ ID NO: 152922 - DNA, 718 bp, Zea Mays
gcctaaggttccctccgcaccggcagcgggtgcacctgtccaaagtcctctttcaccgaagtcggttgaggtgtaagccacccccagctcctggaagaggttgctacggattttcctcatggttgtgttctcgagcggtctgaggcgcttgtcagagaggaattcagactccaacactgtgctttgttcgttgtggtcactggttcgcgacctcagtgaatgctcttgcagcggtggcagcagctgggttcggtttgctggagaactcctcattacatcgttctttccaggaggacatcgtgttgatctttgactcggagcgcatatcaaacatggttaacggtgttgtgctcaactcgccttcaggttcgttcaagttcatcaggtggtctaggcttgctcatgcagatatagttacgttcccctcccttgtcatggttgagttcagaggggtctcggttcatgcttagggtctgattactgctcagaacctgctgcgagatcactttgttgaggtggagcttcatcctgactctatcaaccgcctcgattttttctgctaggggtggttcccgccggggctcttgccgatcaaccggacgcagagacgggagtaggaacacctccatgaacgaccgctgcggaacccgacaaacgacctctccaggactcgccgctgaagaggaggggctcgtcgcagcccagcactgagccttgg

SEQ ID NO: 152923 - DNA, 660 bp, Zea Mays
ggggacggcggctcatcggggcccgctgccatcgagcggcggctcaaggcatggcaatggtttctcaaacaatggaacgtaacagagagagcatccatgaggaggaaggggaggaggggctatgcagggcctgctcggtcatgagactcacctgcgtcgatggcgatgtactgccggaggaggaggaccgtacgaaggtaatggtaaccgtgtcgaagagacgcctgcacagagggatttggatctgaggaggaagtgaccaggggttatgcgatggatggtaggggtatgtatataagagaacgcgggaggcagttgccaagtttgccgcgggtcgcgttctggttgagcgagagagactgttgcgcgacgaattgcgcgagacagtataagacggagacggagttagacgggtggtggatgtcgaaggggggtacatggggatagacgaggctagccgacgcaagcagcatggcattcgcgagaggaagcggttcggtgatctcgcgaacaaaggtacaagatctggaacatgtttgatgagaggaagaaatatatatattatcgagtttccaagatcttgtagttttcgtaaatactaaattttaggtatttaattaatattagaaaaactaaaattcatattttagtactcgaaga

SEQ ID NO: 152924 - DNA, 344 bp, Zea Mays
cccaaacgcaccacacattcggaccgcttatggtgtgtacccagtcaaagaagttaacaaagatcagaagtcgtacacaataataatcgatagaactgacgttggtgctacaacttcatgcccatctcttcataaccaaatacaaacatttctaggcgtggctacaatgcaccattgtggcaatatgggtggtgtactcagcaatgaccatatgtcctacaataacatggacagctacacaacaccataacacaatacctagacttctaggacatacacctcggtatacgaccccatatgtcttgcaatggcatgggcagctacacaacgctccaccatctcca

SEQ ID NO: 152925 - DNA, 347 bp, Zea Mays
ggacattgctaaagaaaacatttgggggaactgtggtttgccccgaagctatctttgctagttcgttagcgacttatttgtctttcaggcgtaggacctcctcacaaaaggcctccatctttgggttgtgacagctcaagttttcatgacctggttgatgacgagttggcagtcccctcgagcgttgaggctccgtactcccagctcgatggcaatgcacaggtcgttgattaaggcttcgtattcggctacgttgttggatgcgacaaagtggaggcgtatcacgtagtgtatgtgtattgtgaggggtgaaatgaagagcaagctcgtgcctgctcctgttttca

SEQ ID NO: 152926 - DNA, 773 bp, Zea Mays
ggcttcctactgtgttgcctcatcgagccgcaacactgttgcccggatgtctgcttcgtcgttgtatctacatcgccattcttcgtgcatcgacgactgttctgcgaaatctttgcttcaccatccgttcgcaaaaggtctttatgatcaggtcttcgctatcaacttggagcgctacctatgagcgtgaggccaccgttgatcatccactgctgccaccatgttctacatccgaactactcactctcaagcacccaccgcgcttgaactgctcacctttcggtttgacgcattcattcccacactgcttcttattcgtctagcacaaccacgtcgtcaacgttgttgttttatccccagatactttgtcttttcagacaatcgtgtgctatgtcggcaccttctaccccgttgttctgcagaccactaccatcatcgagatctctgctagtccctcagatgttgatacatggttggggctttctaccttgtacgtctggtattggcaacaccaatgcatgcttttgtctttgatgtgttgatgggttttgcgaacccaagccacaccttggtttaggcagcttggctacatcgacttcggcattgaccctcctgttcctacctcgtctgccttgatcgcatcatcgcctttcgtctacaacggttttgactacgtggacctcgacatcacctccttccacgacgatagcctctgcatgtctctgttatcaccatggcacctcttgtgcgcgtatagctccaacatggcaacc

SEQ ID NO: 152927 - DNA, 350 bp, Zea Mays
agaggacctcggctgggacgaggattctactgagtatgtaccttgtccgagggcaggtccgggcgaggcaaagttatgggtgaccgccgagaggggccttgggcgaatcgtggtttataccttattgtcctcgggaatgtgcctggtggcaacctcggggttaagcacgtttagggatgtaatccaggtacctctaattacgatacccgacaagtcatctcttgagttggatctttcggctagtcttgagtcttgacttagaccagtgactacactgggcatgaaagaagaggagagaagaacgatgcagtccttaaataccctaatttcgtcatcaaatcaaatttaaa

SEQ ID NO: 152928 - DNA, 651 bp, Zea Mays
aagctttaggtggcacatggattcctagaggtaagaactccgtagagaggcagcaactatctgagcccttgaccccttgcgtacaacagggagtacttgtctgaaatcacccccgaacacaacagtcctcccaccaaagggcagcctaggccgtcccattatatcacgcatgctattgtctagcgcctcaattgcttgtctcttagtcatcgatgcctcgtcccagataatgagcgatgctttttgtagcaactttgctgtcctgctttgtttcgtgaagctacatacagcaccatcatcaatagtaagtggtatcttgaagcgtgaatggacagtcctccccccaggcaatatggaagccgcaacaccagatgtagctgttgcaactgtaatcttgtcctgactgcgtagtgccgcaagcagtgccttatacagataggtctttccagtcccaccaggcccatccacaaagaacactccaccgttattggtgtcaacgacagataggatcttatcataggcagacctctgctcctcatttagggtttctttcatagcaacgtcttctgctgtcggctcgatactttcctcctcgtaaatctctctatcagtaccatgtgaatcgtcatatttgtcgatgatagcagggag

SEQ ID NO: 152929 - DNA, 408 bp, Zea Mays
ggagtgaggagttagtgcaggagagtggagcattgttgatagagtttgtggttgaggactcactagagctagtggaaaactagatgttggataggcaagcttgatgaagtgatgctttgctagcccccctcccatctcccttgaagttgatatagtcgatgatggactagttgaccattgatgtcaagccatcgtccaccatcttgccccatgtctagcctcgctcttcatcgaacatgatgtcgtgcatgatgtgcatgtgctttatcgtaggtcgtggatgaggtatgccttgacgccatcaacatagtcgatgaagacccctagcatactctatccatcaagctagttggcatggttgagcttcttggcaaacaccaaacaacaaaacacatggaggtggttgac

SEQ ID NO: 152930 - DNA, 450 bp, Zea Mays
caaaaaggggatgtcttggggaagtctacggtaaatggtacttagatgttcgcatagcaacaagaacattaatttcagtacgagcaacattcagcaatcaacatacaaacaacattacaacaacataattgacctcttacacgttggtggatacacttaaatgaccagtacaggatgacgaatatgaaaaccatacaagagtattcatggtgtatacacgttggtggatacactgaaaccagatttgttggtgtacatgataacgacggatcaattgaccattttaggcgattcggagtacacagtaaaccctatttgtccaagttggccatgaacaattaaatggatctatgtaaacaacctaagtacaagtaaaccctagggttaatcgaaatcaggttgatttgagagacagattgaatcagagatgtagaacatggagcaggggac

SEQ ID NO: 152931 - DNA, 781 bp, Zea Mays
tgcaaattagcaagtcaatttttagaatagttcggttcagaactttatgcgaaagaatgttggctctatgtctgcttatatgaaagaatgttttctctttcctttcctataggagggtgaaataagttttactagcagcgtcgtaccggaggtgccagtggcctcaatgtgccagtcgcttctcaagatggcctcactggcagcaaaatattctctgatgagttgactcgcgtgcttgactgggattgtactttatctcttctgtcagctaagctctggtgaattcctccggcatcaacattagcacgatggttcgtccaaccgagcatgtccccaattcacaaaactatatagttgggaacctcataggtagattcatagtagttaacagtttgcttaaacaaactgacgtggttgtttgatctacacaaaagatggcactggttgttggttttaatagtgaaatgtcatcctaaccatttaactagctatgtccaacatattatgtatttatttctctaaatattgccagttgctctccaatacaaattacatggttgcctcattatatgtttttaaaaaactttttgggggtaaaatcaaactgaaattcggcgatggctcgtccccttgcaatcggtcttctacctttcggtttctcctccttagtgtggctttgcatcaatctatgcagagaattaaagcagatgatgtctcctccgatattgagaatttttttggatgacctgatatgttatgagctaaactttgccagcatttt

SEQ ID NO: 152932 - DNA, 594 bp, Zea Mays
tccatatttgagcgataaaccaaatttgaaattcaaaatcagaaagtggacaaagttgagatatttgagtatcaggccgcggaccgtccgacgtatcaggatctggacagtccgaggcaacagaccagaccgtctgaattgacagggcgcggaccgtccgcagacccctcacggaccgtccgcgacaggcagataaatcgggcagaggcagtcagtttgtcactttcaacgcttgtctcctctctcacactccacacgccaaaagtgattcctgacgtttgagagcggacggtggaccgaaactgcgcacggactgtccgggagattgttggaagttcatcaaccatgtcttcatcttggtatttcaaaatctcatggaatttgtttgatttattcaactttgggaattcttaggggtttctttctgatctggaattgggcagtggaattacaattttgattggtggaattgctagtattactcattgtgaatatggtgcaaaaatttgaacggatttgtatggttattttctgttgaattgatgattggacggatggggcggctagggttctagaaatcgcccctggacggtc

SEQ ID NO: 152933 - DNA, 537 bp, Zea Mays
gtgggggccgaatcagctgagcaaagatgtgacacaaatagtgagcaaaaggtagctgtcgacgagcacgtagaccatccagtacggtgtcctcgatctcacaaatgagaaaatccacaacatcaaactctaagtgagaaactagggcaccaaggagccaaagctgaatatgagtggcagcctccctgtaacccatccgtggcagaagcgtccgtctcatgagctgatatagaaacctggccgctgtggtgaagtctaccggagaacatcgcgacccatctgagaagggcggttgaaacaaagccgcgatgtgagctgtacgaggagcaactctgccgtgagggcgacgaggagggtcagaggtgccatagcacatgctgtgaagacgagtcgatgactcgttgaatccaaacaactgacgaatctgactggcatgaatggtaacatcctctcgctcaaatcggaatctcatctagtggtgatcagggtcgatccatacagtagcatagaaaactcggacccattcctcaacatatc

SEQ ID NO: 152934 - DNA, 315 bp, Zea Mays
ggggtgccataagtaaggccagggttttggtgggtagccgattaaggaggtatgtagcggtgtgaagaccttcgacccaataggatgacatccggagcaaaacaccatgagtgagaaagaaggtgcgagtgtaagagttgtcgaactcacgaccgttgtcaaattgaatgcttcggatggtgtagccgaactgtgccttcacataagagaaaaaatagccaagatattgaatgtttcggatttaagacgaagaggaaacgtccaaagaaaatgcgagcagtcatcaagaatactaagataatatttataaccgga

SEQ ID NO: 152935 - DNA, 827 bp, Zea Mays
acatatcagttgtgtttgtttttgtaaggatttcagcacaagtaaaactccattccaaagaccttgtcaattgccacaactttcttacagatatagtccagtgtcctcactacatcttcattctgatttggattccctcattttgcgttattttttggcaaacacaggtaaaggtcttctccccactgcccactccactcccaacatctccagaatgtacaaaccattattaatagagttgtcagttcacgatagatgtggagtaataatcatatatattgatagagacaaagttgttcccatttaattaagtttggatgttgcacagagaaaaaaaaaaacaagttctgcatattttagttttttggtaaccatagtaggacatccaatcaaataataatctaggttacatgtagtagaactaaaaatcactctaaaattctaagtgcagcatcatcacaaataatctcttggagacttggagtaaagattgttgacatgtgaatgaatcattcagtcagggcctcaggggtaaagattgtcttggagacttggagtagcacaaaacagagaaatgcattcacttgtgcccatgagcacaaccattccacgccaatatatacaaccaccggtatcccacattgtgtaagcagcagcaataaagccagagcagcccacgcaccttgcggagctcgtcccagagcttgtaaaactgcgcatcgtggggcccgcgctcgttgtggcagagctcgtgtagcatggtatcgagcacctcctcgtacgggatgaagtcatggtcgcggccggcgcgccgtagccgcagcttg

SEQ ID NO: 152936 - DNA, 360 bp, Zea Mays
ctcacacggtcgacgtccgactacatttgggccaactgggccaattgtgtctttgccaacgggtaataatggaggacgtcctcatcattcccaccttcttaaaatgggccctagctctgataccagatgatacacccagcccaggtggggttggccgaggcccaacaaattagggttgcccggagcccaactcagggaaaggcccaatcgccccaaaagactagtccaatggggggaagggtggctctcccttttaaagtggcttgttgctcccaagttaagcgagatgggataattctgaggctcacacggtcgccatccgactacaattgggccaactgggccaattgcgtctttgcc

SEQ ID NO: 152937 - DNA, 280 bp, Zea Mays
agcgggtagcggtaattggggtatatgaagtcgatcgcgtcaaaaactctgttcagtcttttcttcccccgacctccgaaggctgtggatagagcattatcttctgccttggaatatgctccaagcagttcatcactggtagcttcgatgcacttcagccagtcgtcgtttggctcatcaaacttctcccagaatctgaaggtatacttcagtcggaccagaccaccttcgctagaatcagtggtggtctccttcggtatttcccagctttccacaagcg

SEQ ID NO: 152938 - DNA, 285 bp, Zea Mays
gtggaatctggggatctgcgggtgtttctagtccgagtattgttgatcgttaatagatcactcgaaccatttgctactgcaactcatcacggaattctcgtgggctattcattatccagggcgagtcgtttgcgtttgctcggggctaaaaatggcgtctcgtagttcataactccctttccagcgccgcggcatgtattttatgtaatttcagcataatgttggcggttttggagagattaagcaagccgttgcctttgaatcgttctcgtagtttaatccgat

SEQ ID NO: 152939 - DNA, 289 bp, Zea Mays
cggttacaaactaatattcgctctctaggtatagcatccttgcagggtaatgcacctatttcatcatcagaatcatcatttctgttgcgaactggacatggtctacaactaaaagcttgttgtctcgcattcgattcctgattatcttcatccattaagcccaacttgtcatacatgacagcctctgacacaacctcttgtgctccttcttcctcccatatttcctcaatttctatggagccccaatcaatttgtaaaccctaaaccgacatactagtcactcactgca

SEQ ID NO: 152940 - DNA, 318 bp, Zea Mays
gtgtccgcttgacatgaagaggctagagagcagcaaagttgtctagaagaggagctctgtgatcgccaaaccccgtgggaagggaggctgtgcaggggaggagtcgagtgttggagcaggagagaagggaagggaagagaaaaggagatgagctgtcctttgtgatttgaagaaaccagtcctgctgttggtaccatgggaatggaaggaagcctggtttgaacgagtttgaaggagctagaggctgcaaaagaggtagcaattaaacaacatgacggtggtaagactatctacaacagactacatatcatactccct

SEQ ID NO: 152941 - DNA, 431 bp, Zea Mays
tatttttaatatcctgtgattcctaagggggtgaaaacagaaataactgtgggggcaaacttgtcctaataacgggattggtctatcttgctatcaagccttaatatgataagtgctttaggttatctgtttataggatcaatgatgaaataagtgctgccctcatgtgccaactatgaaacccttcatgcatcccatggcacatcaatatctccggtgagctggatgatccagtaagtaatgagtgaccctttgtcggcaaggttgcagtgttacagtgtatggtagtacaaatgagacacagactccacactaagcttgattatcgttgtcctcgcaataaatgagtgtatgtaatgcctgcttaagcaccattggactggtgaagaacagaatgatggatgctcttgtatgggaaaggaggactggcc

SEQ ID NO: 152942 - DNA, 311 bp, Zea Mays
tgcacagcctaaaaagactcccctttggttttgacaaaagttccaatcttgtcatatgatattcttttacagggaatgtatgtatttagagttgaattatcagtggcctgttctaatgatgatttcaccattacaagttttgcatcaatccttctgttctagtgatgatctaatgattaatgttccagtgcatttgtttgtgtgctgcatgcaatttctaaatctcacaatgtgagttttcttaacaaaatgaccgtttctattattttacgttgcttatgtgccaacacattcattttacagaaaatgca

SEQ ID NO: 152943 - DNA, 979 bp, Zea Mays
aatcttgattgtaacttgattaaaatatcaaattataattaaagaacccacatattaatttaactatattagaaaggccaatccaatagtcatagattaaacaaattagatgtctatttttgaaaacatgttacatgatcaaataaggctactaaagcgtagacagttttattacgaagcaaacgcaacttgaatgggtcaaaacggagctaaaatgagtaagttatggagtttacaagtgtttaggtgttctattattgattttataccttaaaataaatcctaggggtgattttgcaaagacccgatttaattctatttattttaactcctatatggatggtagattctattctcaaatactatagggtatttttgcaatttagcgcagtcgaaggggtactagtggatctcggtcttccaatcaaaatttgagtgcctgaattagatccccattataacgaacccaatacacaatggacattgtaggattaaagatctatggtcacaacacgcagacgtcctagagtcgcacagatgtaactcaacggtccgaatcagattgttcaaaaatcgaaccggtattccactctcggccatcggatccacgatctgtggccgagattttaaaattgctcgatctaactttgcccctccatcatggatcctacgaccactatcctccctagaccaaacggtacgctggcccaaatctcgtgcgttcatcacacgatcgatgactcacgtgaacccgactccccctgcaactccaaccggtggtgcacacttacatggtggcggccatgaccagagtcccggttatgacatgccatgttctaatggcaagtttgaaaggctctacacgaggcgggaatgacaacaagtcttcggggagggttctcgccggcggtggagcattgtcggagttcgtccacgatgtgatgcggcgctgcaactctgttgagaaattctggggggg

SEQ ID NO: 152944 - DNA, 691 bp, Zea Mays
gccaaacattctacagctttgggtcatgaataactgaagcattggagcaaagcaaggaccatcagtttccaaaacttagctccaaaaaagttttgagtagaggcacacaccctgcttttatagaaagcaataaatcacatgattttttttttgcttcctagcaaagcagatcctatgcttatactcaaaaaacttagcctagatcctactatcccattcctagcaacgccatcaagagataccgtacgcacgtaatctcccgtcctagcatccgatacacactatcgtgtagcagttactagtgtcagacgaaatgaaatcacagcacgcgagcacaccaaagatcaagggagatcgaaccgatcgttctcgcctcgcccgcggaatcgctggctaccctgtgcgcggtctgaaattacgaaacactcacgagagagacgagggatgcggccgctggggaaggaggcagcgggggaattccgcggagcggtagtacctcttctcgccgacgggagatgggggcgcgttcagctccgacctggggcctccgaccccagctcttctccttcgggggtgcgcgggttggttggttggttggtaatggtggcggggagtggggcgtgccggggaggaggaaggatggaggaaggggaaagcggaagggtggggccgtgggcgtgtggcttccgaa

SEQ ID NO: 152945 - DNA, 356 bp, Zea Mays
tgaccggccatttcgtctcaaacatttgtatgaaaacggtactagatccacttttgtgttcctgacacgccgacaaacatttttatttggtatatttaatatggtgtttcttaagggaactctaataacttaatttaaaaactatacaagagtttgtctttataagactaccatatttagtctagcgtctaaagtttagtctctaacatatttaattccagagattaaaagtatttagaacacattaaattattcataagaagacaaaatttcctcttatcgttctcccaccattagaactatactagccaagtgcccatgtattgttgcaatttaattaacaaaatcaattattt

SEQ ID NO: 152946 - DNA, 2154 bp, Zea Mays
ccgagggttttgatgcacacctcaacattgagcagatgaataaaacatcagttgagctatttcaaatgtatgatgaccataggagagaaggtgttctcttctcaacagaaaaggagtttcggggttattatgcactgctcaagttagacaaacatcctggttacaaggtgaggcaacttgagcagatctggtcttttgcgttctgatatttgctgactcatagatacatctgaattaggttgaacctgctgagttatctctggatcttgctaagatgtctcgtgaaattagaggcagtccagagatcttgtttgcaagagaagttgcaaggtagtcataccattaagcattattttgtgcttatcatatttgtactagctttcatctaatgcctacatttcctatacattcagagcatgcagaatggggaactttatttccttcttccgtcttgcaaggaaagctacatatttgcaggcctgtttgatgcatgctcattttgcaaaggtagaattattgtctctaaaagctgttcatcaacataccctttcagtggaatttattcttcctaatctcttatttcctaggccaactgtgtttgaaatactgtaatggcaaccaaaaaaacattgaccaacctggtaggaactaggtgacttcttattaaggagaaataggcacaatcgaacttgggtggcttacgggtgcatccacattctcaatcaactgagctaggctcagttcctataatataatggaattacctgtgataatggatttagaatgcgagcattcttttcacaatgcaaaaaatctactgtggtataaagataaacttgattcatttcagttattgcatgcttaccattgtatgtttgtcctataacaatttggcactcgattgagtggaaaggttttgccaccctggcccattgccagtgactactgctcaagggtggcaaattatcatgtgcctcaatgattggaaaaggcactgaactcactcggtatatcatatgcctggcatcgtactgcatgctcagtatacttccaacattttgataacgttacggaaaagctttacagagagtaaaagctatatttatatgataaatggagtccatgcacaaagatacagaaaataagagatagagctccacaagttaaaagagtggacaaagaagtaaagaaccacctaacctgtctaatctaaaatcttgagcatcacattggaatttctaactttaaaagcctctgaacttaattcatcgtggcttaatgagtgcatgctgttacacattatttagttattagcattagatcattttgtgatagcagtgtctttcagtacttctaaatcactacttcggtgtactttcatgtagtaggctgctgttcaatttcaagtgcaccttttttttgtaaatttaacaagcgaactctcttcccagctaaggaggcaagcactcgcttccttgcacagtggtcttcagaatggccaaggcatccctatttcgcaggttgtggtgtggcttgctatggaggttagtatgttttcttcctttggacagaaactaattctgaactgggaacttgtgaaatccttatatgccttcattttctctttcaagggcgaggatgttgaaaatctattagaataccatggttttgggttgaggcagtatgaagaactgtacttagtcaaagaaggaccttttcttaacagtgaaagtgatttcccatctggctgttcacagcttgtgcattctaaaaaatcgcagagggtcgttgatgatgtttcttctgggccagattgtgctccaactagcaaagaaaagactgtctttccatatactggtcaaccagttgctggcaaaagagatctatttctaccacagaatgctcctgcgattcctcctgatggcagaatggatttggatccatcatttcctgggcctatttcaatcactcctgacagacagattagcccattgttttcagatcctttctctccaagagctgccagtaaactattcagttcaacacatccaaagcctctctccccaactgaaggtagaaaagacaggttttcatctgtccttactgctgtttctccacgtactggcaagagggacatactgtcaaaaacaccaa

SEQ ID NO: 152947 - DNA, 492 bp, Zea Mays
ggtccccttgccgccaatgccctaatatctggttaaataaatacagtctccccctaattaactccatgtagttcgctcattaaggataagatgtttttttgctcagcgagtataggaaagtaaccatctgtccctataggtaagctagaatatcgcttagtaccttttatatgacaattttgcatctagtgacacgtgtaaatacgatttttttgtgccatctgatacctaatttgaggaatctaaatagcatatgggggagtgtattgtagagaatgacgtgcatctcctaacaagcaagcaagcgtagcactgctagtagtaggttggatactcattgcattgcaccatctaacccactaacattgtccactcgcgcgtccatgcctgcttgcgctagctacaccatgtaggcaacagcgactgcaagtatcgatcggaattattacattttgttgagagtgcagcagttaaaaaataaaaattatttag

SEQ ID NO: 152948 - DNA, 715 bp, Zea Mays
tcataaatacgagcagtttgatcctttatccgaagatgagctttggccaggtctgcttcggcagtcttgatctttgaatctttttctgccagaaaattttcaagttctttcactctcttttccaaattattgataacaagctcatttttcatatcttcatcttcctattgtagctttaaagccttactcagcagtaggctctgttaaaaagccgaagttagcctgaaacttctcaaaattcaaaaattaaaaagttgaagaggcaaacatcaaagtttataccttaaaattcaaatagaataagctcctggtaatgtgttgcctcctatagttgctgagatctcgttcgagcttcggaaatccatactccttgataaagtattgacactttttgctcccgcgcggtcagggatgcaccctagaatctcttcgtcgacgccgccaaagagcacggatccaaacttgtaaccgccagcaatggaaaattactttaactcagagatatcttcttcggagagttcttgaccacccaggtgtcataggtccaactccatgtcctccaaagaagtcccttccaactctttcatttttaagggcgaagccctaccagtggtcacttcagccatgcccttctcggaaccacatcagccataattttgtcaatctctgacattgtggttccaagagggcctccgctgttttcagcttccgaagc

SEQ ID NO: 152949 - DNA, 522 bp, Zea Mays
agacatcggcatactcgcagaccactaggattttatctaagggcaattcaatcatggagaaagcacatgaacgtgcactcctttggttgggtaggtacagggtaaactgtccatagatcgggtaatggatctcaacggctcgggtcgtgacatctaatagaacttggtgtcgggtgaaccaatcagttcccaaaatgatgtctacctcctctaatgccaagatgataatattggttttaatggttgcacttcctagctgaatggggacctgctaatttagttgatgtgacacaactttgccactcggggtagagatcatataggctcccttggtgtggcaaaatgacaatcaacatttggcactgaacttttggctaatgaaattatgtgatgcgccaaaatcaaagagaataattgcatgttgattaaaaacggaaaatgtaccggtcatgatgggtgctccttccgaaagatcgaccaatgtggtgaagttcaacttgtcttgcctcacttgcacctttt

SEQ ID NO: 152950 - DNA, 1142 bp, Zea Mays
gtcaagagatctctctggacgcaactaccgcctgaccaatggaaattatcgcctaccatctgaccctgttaatgccatgaccagtcctcagtgcagacgcaacagaaaactctttcattggaaacagagtaggtgcagcgcggcatggatttgaggtagcggaggcaggagtacagactcccaaaaccccaagatccaagcaactacataaacatcgaatcacatatgtgaaataggtttagttggccatatacaaacaaaagttgccgaactgccagcacggtccccacataattaggctcttggattggaccacataattggtttgttaggccacaaaactacttcgtgcttcttatgcatggtatcagttacgctgtcactgtctcttcgtaacagctgatattgattgtcacacagcttcacttttggttcacctaaagacacaagtcctacagaaaatattacttgggatatcttgcatcccttgcataaaaataataaacaaaaataccaggcacatgtcctgcagaaaccaggctacaacaaagatcatctggaatgcctagctcccaagcagagagttgatccaagccaagagtgtgcaagaatcaatgagcatttatcattcaacaaatcaagatttggtcgaaagacctcaaagtaacctttactggagccaatagtcagaatagtggtcctgagtgaagccaactgaaatgcaagtgacagttaggagttgtacctgtcacattggttgatctgacagtattacatcaacaaagcgtagcttaagcgccaaagcgctctgcgccaagacgccacagcagacgccacgccttaattcgcatggcgtccaccttacggcgtccggaaaacgacactttggagtctgattcgcgccaaatcgtgtaaaggcaggcgccatagggggaagagatagagagctagcgcgcggagagaggagcgtgtgggagaataccagcttgcccgcgcgaatgcgttctcccgcgccaccaggaaaagttgccgccgcctcccctcttgcccgtcaagaagagcctctgcctcgagttgcgtgagcagcagccgcccacaggccgcggttatctttccctgccacctactctggtcgtcctcca

SEQ ID NO: 152951 - DNA, 391 bp, Zea Mays
gggcactatgttaatgcttgtctgatgggaaattctggtacaccagctaagaacaagcaacagactcctggcaagggatattctattgccagggtgaatcaagtcagtgttgatgatgctcctgatggtgctgacatcgtactcggtatgttttacattaatgccattcctacaaccatattatttgattctggtgctacacattcattcatgtctgctcgatatgccaacactaatgagatacccctgctaaatatgagaaaaccaatgatagtaatcacacctaaagggcctattgaagcaaatcaaatcacacgtagattgacattatcaattatgggaagagaatttggagctactgctataatattagatgccagcagtatagatc

SEQ ID NO: 152952 - DNA, 405 bp, Zea Mays
taatctagagtaagttacttaatgatggttcaaaagataaggccatacccctcatgcacttaaaactaaactagtgccttaaaccaactcagccacatgcatgaaatctaactcaaccagtagagtcatgatgaattgcataatttgacaatccccacctaacatcaaacaagaccttgatctacctcatgtagtctatctcatccatatatgtcttaaccatattccccaactccgatgatatacactaacttcgaatcaatgagaccaagacaaactcaaccttcagaggcattaccacccaacaaggagttctttctcaccataaactttcttacccctggctattcttaccctaacctacccatcttctataataaaatgactatacatatatatacccat

SEQ ID NO: 152953 - DNA, 839 bp, Zea Mays
tctatatccccttcaagtttcaagctaggggccggggctttttaaggcaacggtggagagcgtcagtggcagcagctcgtggtccgtccggggtttgctgctccgttttcttcagagcagcgtccatccatggagaggacgaagaaaccatgccttggtgtcgtcgctctgcttctcttcctgctcctggcgtcggccgcccatggagctcagcctgcagatgccaaggacatagcaggtatgcagttttgctcgtcttcagggctaattaagagtatgcatgagctgtatcttgtttgtcttccatgtatactataacttttgcttctacagcactgccgcttgctttctgtgattcagttcgattagtggaaaaaaaaacacttgaattggaacacacaaaaaagatcgttctgaaagagacaatgccctgctgcactgcacacccttgtgctttaagaattgccttttcagttcttcaggagtgcgtgcaaagcatggctggtcgaggatagggaagtagcaacataaccttgtaaactgagtcatatatgtttagctgatagaataaatacatttgtatatatgcttggacactaacaagtaatatgaaatgattatcacagtgaaatgatttgctttctcaaataacaagtaatatgaaaatgcggatgcagtctcgtggaggggaactggtgtgttctaaattactaagtttactatgatgctgcttctatagtatcagctgtaatatgatataggaaagtgagtcaacacctgatattgttcagttaaaatagttttgtgccctcttaaaaaagctagaaatacccaagaag

SEQ ID NO: 152954 - DNA, 644 bp, Zea Mays
gcgcggcccagcttatatgagacgctgacatgtggggcctaggaggtcggtcgcccttgcatttgctaccctcgctaacacctggggccatgcggtaagagtccacctcacgcaccttgtgccactgcagagtgggacccactagtcaactactgattccgcgcgtgttgtccagtggaagtagtgctggtcgcttacgagtggacccttcttgtcaggattgtccccaacttgcggacgagctattccaaccaccttgcgctgtgctaccgaggaaatcgggtcggcctcctccgtgctcagggttaaaagccaggacccttgggcctgactcgcgcatcccccttgaccatcccgtctcccgatccctccaccgtcagacccctcggccgtgaggcgatccgggagtcaacccaccgctagaaatcgatgcctacttcccttatccattggtgtggagttccctaggtgaccgaggcaactcagcggacatcatggggaagggctcggcggctacgtgacgtctgtgcgtgcggaattgctcgtcggggttgggaaatcaccactgtgctgcaagacattggtattggacctctgcgccacgcgatcctttggtaagaagtccttgttgagctcactagatc

SEQ ID NO: 152955 - DNA, 445 bp, Zea Mays
tgaagacccatttgcacgtgataggtacagcaccagcaggtaacggaacaacatcccatgtacatgtgcgatgaagggcattcaatccatcagtcatatcaagctgccactcaggtataccagaagcctctttataagatgatggttcaacaatgactgcaccagcacggggaaacccataacgttctggagctgcaatagtgccacggtcacgaagatgatacccctgattaaaaacaacatgagagtcatcattgttagtacaagtatcagcaacaggatcatcatcaagactggccgtgggagtagagcgaggacgacgaatgtaagtctgagtgacaagtggtttggaagagtaagactgagatggtgtggaagtggaaggtggtgtgatgggaataagaacatctggggtagaaacagtagatggtggtactgatgaagt

SEQ ID NO: 152956 - DNA, 921 bp, Zea Mays
tttacactatgtctagatacatttaggatagagtgcccaacggctgtggtgtttaaacttatgcttggttgtcactgaaaagttccatcgaatagatggaatactgaggataagggtcagacatgccaagtggccttttattaataaagacttattatccaatgagttcctctatggagagtgactatttggaaacactagggagtagggctatataatgaaatagaaaaatagtcacgacttgacaaataaaataaccgtgccttttccagccagctacagtcagtattataagcatcttgtgcattgacagatcacaaatgcacagaaatgtgccatgtatttgtcttcacaatccatgccgcactaaaatgttaaagagatgcacttgtttgctatattttgagctaattttcagtagttagtatactgtacacacacattcctttcaggaaaaaaaagctcaatgttttttcaaagacctcaaaaaacggaaaatacatcgtgagcataggtgcagatggccagttgcccaccctcattctgagccatcagagattcggaaatattgtaaattctcaaataattaaggttaatgtgaagcgtgtctctactgcactcacgtcctataaaatgagaaatgcaccatacggttcaggagcactgagcagaatattcttgcactgtccagaattccaggtccactcggtggatgctaactgtctccctgtgatagcacatgcaaatatcttattctgctacagaagtacgtacgttggctagttgcaacctctgcagaaggtatgtaaaattattgaactgaactaattcgatgagcacttattattaattgcttgttttggtttagtcaggacttagtatttctggaaggtcagcgatgccccttgtgcttattctgac

SEQ ID NO: 152957 - DNA, 295 bp, Zea Mays
tggaaatgttgcttggacagcttgtgcaaggataggggaagtcccaagtacttgcaaggaaaagctgcgatctcacaccgtagcagactttggacttccaagagagtttcttctgaacactgtatggggtagacattggatttttgcacattatttttgagaccagaggcactgccaaatagctgcaagatatcaagagtgatggagatttcatccaccgtagggtgtaagaagagggctacatcatctgcgtaaatggagactctgtgtagctgtcttcttgctgctagctgct

SEQ ID NO: 152958 - DNA, 467 bp, Zea Mays
aggacctaatccaaaataatgagatcttaactagttcaatctagtcgtaccaacctaatctagattctatctaatctattatgatctaatctagagtaagttacttaatgatggaacaaaggattaagccatactccaaattcacttaagcttaaactggtgacctagatcaactcggccatacccaacaacttgacctacataacagatctatcttagcctcttgtcccaaacccggatggagacaccaaagaacaagactggaaaaggacaagatcaacctcgtcaaggaaggagagaagtcaaactcgatcatcagatgcattaccacccaacgaggagtttttcctcaccataaactttcttacaccaggatattcttgccctaaccaacccatctttcgtcctacataataaaatgaatatacatatgtatacccatactttcctaatcactcaaaaaaaag

SEQ ID NO: 152959 - DNA, 346 bp, Zea Mays
gattgattgaaatatgaagaaagcaaggcttgtcctcaacagtatcgtctacagggtacttggtgcccgatacgaattcttgcacagatcctacgctgctagggactataggtggactcatgtggcctggcttgagttcaaatgatatgcattctgttttcttcattttgttcatcatgtcattaatagccttttgtaccctttcattaatagtctcttcaagggtccttttcgtcttctcgtatttcctatatgacgccgcatactctggaaatgcctctctccaggaaatcttagaagagattccccgagcccgtccagtgtgttcaggattgtctagtgctgc

SEQ ID NO: 152960 - DNA, 581 bp, Zea Mays
cttccccagcaagttcccgccaattcccgcgggcgacaaaacctagtatcctaccaaatctccgccccaaaatcccccaaaccacccttccaatccccagtcctaatcactccacccactcggccgcttctcctttcctcccgcgccaccgccttcgcgccgccatgacgcgccgaggcaggaacccctcctccagtgaatcgccgcctaacctgaaacccccatcgctaacctagcattttccgcgggaaccctaaccatcgtcgcctccattgcaggatccagtagcggccgccggcgccgccgcgaccaggaggatgaggacgacctcccctctgacgacacctccgacaccgatttcgtcgccgactccggggacgcggtggagaacgacgacagcgacgaggagttcgcgcccgataaggacaccccgcccgcgcccgcggtgcccgaggcggccctgccgccgccggtgccgatccggattaagaatcaggcgcggaacaggagggagaagaggaggcgaggtaagaaggcgaggagggacgcgccgcccctgccatgggaagagtggcaggtgg

SEQ ID NO: 152961 - DNA, 279 bp, Zea Mays
gtagtactttccgtataatggagaatgatttcgatccctcttgtgtgtattgttctgccctcttgctgatcgtcgattgtgttaacgcctactgcagaggctgtttttgaacgcaatgcttatgtagcgacttagaatcattgagtcgtgcttcagactgcctttttcacgatgtcagcgccttagtagtggtggccgagtgattatcagcgaggctggggctttaagaggtgatagccgagcgatagcgggccgcgtcggtgttttagaaataacgac

SEQ ID NO: 152962 - DNA, 487 bp, Zea Mays
attaattatgattctgcaattattttagtataggaaaagtgatttctattatatttttctcaaatttcctagtcactggtctgagcacactaatacagggaaatgtaggggctaaactataaaacttcagcggactcagaactaaccccgcgcggatggcgggttgatactatgaaacttcaggggctctttaataaaagtgctagcgcgaaggggtatgaaaagacttcgaccgttggatcttgatctgcggtcaggattagatcggaacccagataaacagacgtatgctccgagccgtcggatcgagtacgcgcggtcaagatttaaaataccacggagcaacccagcgcgttggatcaagatcgcgtggcacggaccagatcccaccaaaccggtacctaacttctaatcgcggccgtccgccattgatccgacggagcacgattatcgccccaacagggcactcacgcatggcggcgccgcc

SEQ ID NO: 152963 - DNA, 338 bp, Zea Mays
gtcacactctcacatgtggagtgctcatacaagagctttgtcacttgatctggtcagactacttggcactcttcacacctcagcacctcgctctaatagtcttgctctttgtgtctcctaagggtgggcatgctaccccccgcaatgccttctcccaagccacacataacttcgtgcgggattcaacaatgatcacaacctccaagcaatctaggatgtggcaagcttcaagagtgacaagcaccaccagtttgcaactggattgcctagtgccacaccttgcaatctctcaatgcaacggactaacagtcactcactagcaatcggatgcaatcact

SEQ ID NO: 152964 - DNA, 648 bp, Zea Mays
ggggagcggtgcataccagatacaatgcagtgatgaaaattgaagaagcatcggggaagtctcttgccaagtcggaactcaagaaagtttgggttcagttcattggaattcctcctgatatgttgcagttcaagttgatttgggcggtaggttcagttcttggggtgaccaaagcggtggatatgagttttacaaacaaatataatgttggtcgtcttcaggtttgcgtgcttgatcctagcatcattccacaatttgtggatgttgtgattggtgattttctatacgaactgcagttccgggtggaagagaaaacgttggaggataatcctgtgccgatggatatggatgattatgatagtggagaaaataatgcgaactcatcaaataataatgccccagataatcataaagggggagctgctcctaatgtcattgggtcagctagcaacattgaaggggaaccaaagaacaaggatgtgaacgaaaagaaagtggggctgctaggagggcaagagacagaggtactcatggacagtgagatggagggatccgatctggtaccaggctcaggtgctccagatttgtcttttggtgatggggccgtaattagcaagatttcaagattgttaactcctgaaggcttag

SEQ ID NO: 152965 - DNA, 525 bp, Zea Mays
gccgagggtgcggtgccgaccaatgaggaggggcctaggagagacgctcgagcataaccaggtgttgtggtggaggttgcagcgccgaataaggtagaggttggtctagcggaggatgcaggtgttgtggcatatagcgatggcgcagacgagaaggtggatctgaagccaaaagcggaagaggatgcggcaacgaacgaggccccgaacagggaggtctcaaaagtgggagcagaggcggcggcgacagcggcaggatcaccgtgcaggagtggggtgcacctatggtagaggggtggagtcgtggggagggagcaccagcctcgcggcgatcggattgtcctgcagcaaataggggtgaaaatgggacggatacagggtcatattgtatcctaccctaatgtatttccctcctatacaagaccgggtacgggtatttaaaattcgagacggatacaggacgggaccaggtaataatttgggtgggtaagaaacgaatatcagatattactcgggtagataatg

SEQ ID NO: 152966 - DNA, 518 bp, Zea Mays
ggggcatgaaaggagctctgactctgctgactgaaacatgatggagtgggtccagctggtctaatgaagcttggtcccttgggtggaaacctaaaggatcgagttctctggtgccggtcttgttgctgagctcggaggacttggaatttcctcttgaggtgacctttttcttcttcccttgccctttccacttgtatggctttgtttgagaggtgcgagaagctgaggaaatcttggctgtctaggatggtcttgagttctggtctgagccccttcaaaaagcggaccatcttcttgacttcggtgctgacgtcatccggcgcgtagcgggccaattctgtgaatttgtgcacgtattcactgaccgatcttccatcttgagttagttcctggaattcatcttccttgagctgaatgatcccttggggcactttggtgctctcggaaagcagtttcaaactctgtccaggtagcatctctgatggcagcgttgaaggtatcccaccaagctaaggcca

SEQ ID NO: 152967 - DNA, 354 bp, Zea Mays
tggaattcttggaacaaggcttgatatgaaggtggttatgtgaatatggcacatggagctttatgtatggagacacctttggacaacagacacttgtggaggtttggtttgattaacacaagacaattgaggatatcacaatgtataaccataaaacaacggacttggacttagaaacacatgaggttatatggaaggcatgaatgaaactcatgtgtataagccacaatcagagatatgattaacttgtggctttgacttgggtggatatggagtggggaggctacttgatgcttgggaaaaacatgtgatgaagataggtgttgttttgaggttaaaaggttggttgaggca

SEQ ID NO: 152968 - DNA, 531 bp, Zea Mays
ttgacacacaccatacgtgtggccttgccagcgtgtccatctgccccaaagaagtggacccctggcttgctcaaccgattcatacgatttctattagatatggccaggaactcctcagaagcccaatactcgcacatccacgcccaagcatccgaatggtggctcaaccaatccacctcactctctttgtactgctaagccgtcaggtggatttcctttgccgtattcgcgtcacaatagttcccctgacgcttgtggtacactgtgatggccctcaatcgtgctttatacatcatgccctttacaattctatctgctgagccattgaatacctcacgcacatatggatcatccatggtataggggtcgcacacgcgaaattggccctacaaatttgaagatcactagagacttacaaatgcaaaatctgaattcaatttgaataacacaagatacttacccaaaacaaatcccacactttgcttgtgtgtgtcccgtcgttcccgtacggcttgaggtcccaatgagccc

SEQ ID NO: 152969 - DNA, 758 bp, Zea Mays
cgggaaggcgtcagactctatactatagtccaaaggaggtcatcggaccaatctgacggggagatgtttgtaggcgttggaccgtggagactatagttcgacgagagtccaactggaggacgttgtaccaaaagctcaactagtcgttgggctataacaagcaaaatcaaacgactagtacatatggcaagatcagaaagcgttggactataagcagtggtccaatgataggtcgttagaccgttcgacagtatatagacgggtagcaactttttgcactagctagttctagcgttggaggctatatatatccactcaaccgaccatttgagtagggtgagagcacccaaatgcttaaaaatcacttagtgattggtgtaggtattttatgaagtgcttaggttagttagaccactaccattagcgcttcctctatgtttagtcctaacaatagaagtgaggttaggcacacctcttcccctttgatgtctacatgcaccattgtattgagttgtaccgggaaggaatgtaaatcttgtgagatcacatcagttgtgtttatggtgtggtcataccatgtattagagaaaacaagatccacaatttttctgctagaaactcgatagtatccaagggaggcaacaattggaacaccacttgcgcgtggagaaggccttagcctattcacaaagttacctaaccgggagcttggccccggcgtggactttccttgcgtcgggttccaatgaagactaggg

SEQ ID NO: 152970 - DNA, 1374 bp, Zea Mays
tgtaacacaggcactagccagcaaatattgttgaaattccaataaatgaagcatggaggaatttatctaatctgtaggctaaactgttaaataattttgaaacaatgcaagcgtatggatattgatcatactgatatttacccattatatggaaataagctttccgaaaaactgaactggtgacactgggaggctgagactcaattgaaattgatataaacaattatgactgtagtaggcttcaagaaatgaggcaagagtatacagatggaaaaggctaagtgtccattttgtcaaagttcttttggttcaccgttacattaaaataaaatcagcacatacctcaacacggatatcacatatcgctttcaagattagtaaacgaatagctggttctatagttttgtacgtctcaatttcagttctgcaagatggaacgattggaaaacttgtcaatttgaagttgcagtacaaggtttactcaagaatatcctgtgtgcaggactaacccatgagatgcaacaattggcagatcaccttctgcaacctgtagtttagatccttattaggtccaaccgaatggaatactgttattcatacttatctaaaattgtttgcaacatgggatatattgcatacccaatgccaccaatccttcagctttctgcacaggacagtcacccaggttccacgtcccatagccatgcgagttacaggaggaattgactgcaggtatgataaaaaaaaacatgagaatcaaggacagtgttggcatggcaaaaatgtaccatataaaactgtctaagggtatctaatcgcagctagtatgtatgatcagtaacaaaaatgcaattttgggccatgaatctatcgagcaagtgacaaaatcaccaaacaagaataatggtgcatgatgctaatattgcaggtgtgcagtaaagcataaaaaacagcagcaagcttctataaactgaaggcagcacagcatcccattccaaacttggtaacacaatacaggcaaacctagaaaatgaaaaaaaatggtaattgcaaaaaaaacttaaagcgttttggtatctgttcatgaagcaattaacagcatgcagcaaaaaaacatacacctcttccacacacacatacacagcgacatcgaagaaggggaaaacaagctcaagttgaacaaccaaggagcccacctttagcagtggcatatgcacatcatctagaatctcgttgggagtgataagcgccacctcgagctcctcagccgtgaaatcaccagtgatgttcagcagaggccggaacacctgcgcccaccaaaaacagcggaacggcggcgtcaaactcagacacctatctgtcagctcctaacca

SEQ ID NO: 152971 - DNA, 465 bp, Zea Mays
aaactatctcgctctacactgatgaaatcatatcctgacaaatctcttcctgtcaaacaccgcatattaccgtgctgccattccattggcgtttccatgagtgtgatacacatagcggtgtttgcttcaatcacctccacctgatcacctacccattgaaccaaaaactgatgcaaagtagatggcacacaaccattagcatgtatccagtctcgccctagcaaaacattatacctccctttcacatccaccacgaaaaggccgttgggacagttttgctgcccactgtgagttcaacagacataattccttttgcttgtgatggcctcccctgaaaacccacttagattcatatttgtcttaattagctcactctctttgtatcctaacttagaaaacacggatagcgacattacatttacacctgctcccccatcgaccaacatgccccccattggcttccca

SEQ ID NO: 152972 - DNA, 455 bp, Zea Mays
ttctcgatatcttaatgaaactgaagtcatcgatttgagtttatatttccatcgcacttaatctttccatatagtggtggtagtagcaaaaacatattctagagtggtttgcgcttaaaccccacatccactaatctcccattgctaatcctggcacaggtgattaatcaccgcccgacccttcacacgtgtcccggcgagatttttggtattatagaaagccacacactgggactggccaaaatctattactactccttaagagagtaccgtaggcgtgcacaagcttggttctgccagtctccccgccgtcaacgcagatccgcccccacactcctccgtcgcaagcaacaccgcctcccctctgctccgcgattatggggaccaaggccgccatcaacgccatccatcgcaggcaacatcgccagtcatggaaggttgccgaggatccccac

SEQ ID NO: 152973 - DNA, 352 bp, Zea Mays
caccaaaaatcatcggcccttcgttattttgttgtacgacgacatatgtcgttcctattttaatgatgtctccctttttcgtactgttggaggttgtagctgtatgccccccctgccggattagtcagcctttggggccgagttgttcggcaatcttgctgggcctgtgctcgtggaccagattgaggggctctcaatcggtcttgtactggaggtgtcaacctattgaatacagatgtttggggtaccttccaagcggggtactgtggcatcccaaatgagtatggtggcatgccccacatttgatttgggacatatgttggaggtatgtatgtgtatggatatggcatag

SEQ ID NO: 152974 - DNA, 725 bp, Zea Mays
ttcaacattttgtctcccacatatggccttgttaccttcatcttacccctctctagcacctcttgttcggtttgggccaacaaaatggctctatccaccgttgaaggcagttgtacctctaccacactttggatttcaaatttgaggcctctaacaaattgggtcacaaaatatgttccatcatattgtgggttgtgaactgtgacaccatatctggcctgctcaaactctaaaatataggcagcaagactttcaatttgtttgagtgacatcaatctccttaaagcctttggatatgcagtagctccgaacttagctattactgccccctcagactcctgccaacctccaattccgtttctcattttgtaactcttccaccactgtgatgctatgccttccaaatttagagaggccacagaaacccagatagacttaggcactcggtagattgttaaatactctctgcactagtctaaccataccacagaatcgccctccgagaactttggaattggtagtttgggtattgcttgattacctaaatcagcagactgacgaggatcacctctcatgcctcactgttggttcccacggtcctgaccaccacgagactgctgctgattccttagaacatctccaccatgttcctgagtagaggtcaatgtttcacccagctctcttcccatctgctccaacctcaattgagacacttctcatcctgt

SEQ ID NO: 152975 - DNA, 404 bp, Zea Mays
gagataatttttctatgtttgtgtttcgccaaaatatctgaagagaaaattcattttccaattattatctccccaccgctcttgccttcagcatttatcttcactgccttatcctcctaggattttttagcctccaccgctcaccccatttcttgattcctgctctaaatctttagccgtccgtcgttagcctagctcactggccgccgctacccttctctggtgctcgctcagcccgccagccgacgtccttcccctgctccggttcctcctcagcccagagctttgcctgtcgcttcctgttcagccaccatagccacggtcatcccaatcatctccggcagccgtgacatttcctgccggtgtgtcgccggccgatgcgagctttggttcaagctcgtctc

SEQ ID NO: 152976 - DNA, 1136 bp, Zea Mays
gcacctgagtctgtcaggtgttcgtcggagaacctcacgtcgcggtgactctgccgcggccacggggaaacgtcacagtggtatcaaagccgacgatcttcggagaccgtcactacggcgccgtcaacaaaaccgtccgtgcagacccgtttgctgctggaagctatggccggagcggagctgaagggagaggagcgttgggataagatgatgcgggtgttggagagggtggatcggcgattggaggcgctggaatcagggcaacagtctgcaaacgaggctgcgcgaaaggcggaggaggaacgtgtcatcctggcacgacaggtggacgagacagggaagacggtttcgcgtcttcgactggaatggatggcgcaggaaatggaaggtatggagtctgatcctgagagggagaatcgtggtcgacgagagtttggtagaagaaatttggaggagagggagcagtatcagtttggagggaatagaaatttggaagagagggagcagaaccagtttaggggaaatagaaatttggaggagagggagcagtatcagtttgaagggaatagaaatttggaagagagggagcagaaccagtttagggggaatagatatttggaggagagggagcagtatcagtttggagggaacaggaattttcgttccattgatttgccaaagatgtccttcccaaagtttcaaggaattgaaccagggatatggatcactaagtgtcttgagtacttcatgatctaccaaattccagagttcatgtgggcatcttctgcttctttacacatggagggaagggctggtaggtggatgcaggtgtacaaaatgagacaggggttgggtgactggtctcattttgttcgagctgtacaggacaagtttggttctgaagagtattctcagtgtatgagggaattggttcatatgacacagagagctagcttggatgaatatattcaggagtttgaggacagtcgatatgcaacaatggtgcataatccaaggctggatgagactttctttgtgtcccagtttattaaagggttgaggggagaaactaagggatatgtgatgtctcagttgcctagaacagttgacagggccatagctctagcccagatcca

SEQ ID NO: 152977 - DNA, 374 bp, Zea Mays
gtaaaattggcgacaaatccggtccaacactcaagaaccaagcatattgatatacggcatcacttcttaagggatcatgttggcaagagagatatttgtatttattccattggaacggatgatcaattggccgacatttttacaaagcctttggatgaaacaagattttgttccctaagaagtgaaatgaatgtgatcgatctctcaaatgtggctttaagttgatcacacatgtgtagtcttgcatctcgggtctaaacatgctttttatgctatttatttggtattattggcgcatttttcatttcaacttgctctagatagttttattcaaaagtctagcacttctcaattacataatatgtatatgcatg

SEQ ID NO: 152978 - DNA, 885 bp, Zea Mays
gccttatgtaacacagcctttggcatccgcgcacgccatggcactccaccaggcagagtccatgaacaagttgtactcctccatggtgtccatttcctcccaccttatcaagctcgtgcacggacaccttgacacctacccctaacaaccttgcattgtattgctggtaagtctgggaggtcatggattcatagtttttaaggcgataaagtgaatcaaggcgaccgaccccctttttaccttttaaacatcaaggcgtaaggcgaggcaacgccttagtaatatatcaaggcgaccaacccccttttaaccttttgaaatggtttgtatatgtccaacagagacctccagagacatcagtgcgtagtaggatcttaagacgtggtagtaataaaagaaagacaaggaaagaccgaatttaacatgaaaagaagcagtaaaaggagacttaaaggacgaagtatcctcaaagatttagctttgaatatgagtacgtaaaaaatagttatccatatggccgaaccttaacttgtggtttccattgggtttcaactctaacctatcccgatttatttgggagtaaaagactttgttgttaacttgttattgttgttctgttttacatttgcagaacaatcaattatagctaatgtccccttgaactctacaattcaatggtgttttatttgcataatattcacttgagagatgttttgggagctttaaattgtgggaacacgcaccttacaaatggcgctgacatgaagcgttcatgagtgcaccacaatagacatacagcatgtctttacctgctacaattagtcagaaatcacacccggagatagaatgcctgaaaccatttacagggaatagagttcaatgatg

SEQ ID NO: 152979 - DNA, 552 bp, Zea Mays
aggaaagggtgattggtgctgttcttatacaagaacatagcgggaaggagagtgtggtggcttatttaagtcgtcgcttgctggacagcgaaagcaggtatgcgtttatcgaaaaactttgtttatccctatatttcgtgtgcaccaagtttagacactatttactcttaagtacttgtaccgtagtgtgtcaaacagacgtgattaaatatatgttacagaagccgattcctagtggtcgggtcggaaagtgggcatatgctttgatagagtacgatctaatttatgagtctttatcttctatgaaaggacaagttatagctgattttataaatgatcatagggttgatgtagagcaggaaatctcatgtcttaatacttgcccttggcaattattttttgatggttctgtgtgcaaagaagggcagggaatcggctatgtttggtgtcaccaaatggtctagtacatgaaacatcaattaggattgaatactgctgcactaacaatcagattgagtatgaagctttgttgtttgggttattgcatttaga

SEQ ID NO: 152980 - DNA, 351 bp, Zea Mays
gtctagatatgttctatttatgcgaaatgcaatgtactggttaggcgaagaatatggtggtagacgaatatgcgatgtatagtcaagcaacgattgaagtgcaactcatgcgtcatgtgattaaaaagtagaacatatatgcgttgtatggccgtgattgaattgtagtgcgaaggataggttttactattttaaacggttagtcggcagactcgatcagtaaagctaagcttgattatgcgattaagaggaggtgacgacatgccgtagtagtcgtcgccttctctatgttttcgagtcggataaataccataggcaattaattgttgatacccaaagagtgttagaaac

SEQ ID NO: 152981 - DNA, 796 bp, Zea Mays
gactagcacaacaagtgcacaaaatcgaagtcttcttcaaaaagactatccgtgcaaaagtcgcctaagggtgcagccggactagcacaacaagtgcgcaaaatcaaagtcttcttcaaaaagactatccgtgcaaaagtcgcctaagggtgcagccggactagcacaacaagtgcgcaaaatcgaagtcttcttcaaaaagactatccacgcaaaagtcgcctaagggtgcagccggactagctcaacaagcgcaccaaaacgcaaagcgttacatccgtgcaaaagtctacaccaagaaactgtccgcgcacagaccaactacaaggcacagccggaccaacatatgaaatgtgatagaccaagcgcacaatgcccccatggacatagccggatgcgcgaaggcgtacaacctcattatacaaaccatatgtacacacgtacagcgagggcatcaaaccttacattggttcgaccttcggaatgattcccatctccctatagttgaatagcattatcctaagctcctcaccctcaaaaagacttcgcaactccccctcacctacactcgctccaaccggcgaggatagcaattcccgcttgccagccctgcccacacgaagtcgaccgccatccacctcactcaccctacgcttcgccaccgcccttcgccgcctgcgcccagcactcggaccaggcacaacttcagcatttgtaacacgcggagaggcctccgccgcagccacatccaaagccacaaagtaatccaagtcctcatccgaagactcttccgtcc

SEQ ID NO: 152982 - DNA, 296 bp, Zea Mays
acactaccagcccagctctaggccacagctaggcatctttgctgagggactgaactcgcagtggaaccagcccggctctctccctccctggcaacaaactgcggctgcacgtccacagcctggcaatggaactcgcggtggcaggcgtccaattcgctgctggcagcgaactgcggctgcgcgaccagcgatacgttctgacggcgtcgggaggaatacatgcactacaagtaccgtcaaaggctaaatttagagagtatgtttgtgaccccaccctttagtaagctgtctatttt

SEQ ID NO: 152983 - DNA, 351 bp, Zea Mays
caaaaaagaaggttattattgctccatcttccaatgaaagagagatgcaattggtgatatttcaaggacagactgaagctagtaatgcaacacccgcagaacaagagagagttgagaaggaagatgggacaaaaaaatttaaatggatgcttggttacttttattgaaaggcaattcttcttgcaagtcaaggatgaggacattgccactcaatttcaaagcttaaaggatcagaaggttgtcttgtaatatgtaagcttccttatactatttaatgttcttctgacctattatttttacatgagttttgatttagtttactacttctgtattgtgtatgttctattatat

SEQ ID NO: 152984 - DNA, 471 bp, Zea Mays
gggtgatcacatgtaactagaggtgtcaccgatccagggtatgaggaggtttaaagttaaagggaggttgtcccctcgctttattggacccttcatgatcctaaagcgagtggggtaggttgcctaccaactagaattacccgaccatcttgcggatgtacatgatgtcttccatgtatcctagttgaagaagtgtcttaggcccgaagagcaactgcctatggaggagcttagtgttcaagatgatctgacttacactgagtatcctatcaagatccttgatactttgacttgtgtcacgaggagtaaagtgatcaaaatgtgcaaagtgcaatggagtcatcatggtgaagatgaagctacttgtcatggaacctcccaaggtattaggcccacctacagatgtccttgtcataaggacctcagacagtcatgtaggtgtgcataatggctcgacaagttcggttatcc

SEQ ID NO: 152985 - DNA, 613 bp, Zea Mays
ggcttcatgatatgttgaaagagaagataggtggagagcttgttagatggaatgccacgaagtttggcacacttttttgttcctacagagtttttgggacagacaagacaagttccaagcttggatggtgtctagtgattggaaaaataatgattggagagatgaagaagaccacaaattcacctacaattgtttgataaataggatatggtgggagaaggttgaaatggtactgaaaactgtgacaccactctattctgtgcttcgatttgctgaccaatagaaaaaatggaaccatttctagctttcttctaaaaattttatctactcaagctgagatcttttgctaagttaaagcatgacaaaaatgtcaaaagagatttcatgaagaaagtgaatgaaataattaaaaagagaactcagtatcttcttaatgatactctcatgcttgtaggtattatacctattacctatttacactctcatgtttgctgctagtatagtttacaatttctgaaagttctatctagttgtcttgcttttttgtggatgcctattgtaggggctgcacttgatccaaaagcactttatacatcaaaattagccacccatc

SEQ ID NO: 152986 - DNA, 516 bp, Zea Mays
tcgatgtgttcctctcgtatgccaacagatcaataaataaattcctacgcagagtcgcaccatcatgtaaagaaatgttataagtaatattatccttaactacaaattacatatatgctattattctcaccatactaagttgtgctcttaaaccactatcccaccactccataatgtgcagagcaaaatgaccagtattaagactgaaaaagttaccaactttgttatattatgaaattataaacataacatctatatatatgacataataattttaagtaattactattttaatttgattgttgcatcaggtcgaattgaatgtcaccacatataaatgtcatgtgaccatccaatacgtttgacaccgtatgtaaccttatatttcttcgaaataagaagaatagttttccaaaatctttttagtggtatatctttgcaccattctggagtaggtgtgaaattaaacacagacacaaatttgtttgcatgattaatacgaaaagtacatagcct

SEQ ID NO: 152987 - DNA, 399 bp, Zea Mays
gtcaaaaagctggaaaagatataagttgaaaaggaatccgaccctctttttataggttgtttggtctttcgtcattctttagctagcgaggtagtatttataggttgcttggtctttcgtcattctttagccaacgagttagtactatatacgagtgttgcgctgtgcgactttctgttttattgggcttgggtggtttctcaaaacattaacgtctcattgttagatgacaagcggggaagagtaatagacctacacgtatcgcacagtacacactctacacaaaattgaagctttaaagtagtagagattaaaaatggtaactaggtcgttggtccgaaaaatgaaatcgagagtaacaagatgacggtaaatgatacagtcgataacaattagaaa

SEQ ID NO: 152988 - DNA, 311 bp, Zea Mays
ctcccaattacattctcctagagatcacccgttactgaaatggctgccgtgtgctgctacttccattcctgaaatgatgtcagtactgaaacagtttgagataatgcattgcttgactaacaatgctccgtgggtatgtggtagcacgggatgcctgatttggttggtggaaaacaggaatgaggctgataaacttggctttgttgacctgaataattgttacgttgcgcacatataactgcattgatcatgactagcgtgccttgtgctgctctagtgcctctttgggcagcttggtcgcatacatgctt

SEQ ID NO: 152989 - DNA, 847 bp, Zea Mays
gggatatgcatcagtgttgcccacccacgcccgaacccaaaccaaaggtaaggttaagctgatagggaaagggggattgacttatatacttcagcataggcgaggcgaccaagaaaatgtagaaacagatcgtcccagcttcaggaaacaatggagctcagctgctcacatatatcaagtaaaaattggataatatgtgggtatacccataccctacttggtagatcgatttctacccacgccttccacattgcacatgggtatgtatctggggactcggtagtcggtgcaggactaaacaaagctatgctcatattggtttcatctactttaatgtgaagatgcacaatgctctttcaaataaatgtttctaaacattagttaagtgtcttatatctaatttgtagtatggccggtactgtgtgttaccattatctaaaaaatctaatttgtagtagagctatgtttctaagtttgtccataatgcacatttgtagctcatctttgtttttggttgtagaattcattggttccataacagtttggacatttcttctgtttaatttgtatgtgaaccatacaaaggttaactttatgaaccatgctttgtatatttgtgatatagaactggaggtaatttgtaacttatgtccagatgttatttgatattaagaagcatccaagaaaacttgagcgaagtaatccaacaacataatcattatgtctatgaggtgtctgtctttggtaatttatttctttgactatgcatatatcatgatactagatagttttgttgtgtactgttgaatttcagtatttcacaccttgatttaacatataatactag

SEQ ID NO: 152990 - DNA, 284 bp, Zea Mays
aaaagcgggccaaggaccctcttgcttttcccccttagccccctccttctttcgccacaggaaaaaggaaaacgtcgccgccgccgcggagcaaaagtagccgccgacgaaaactgccctaccttccttcccatcttcaaaaaagctcctaggtggtttcgtgttgatgcacgcatcgcgggtagagattcatgattggtggcggtggaatttctcgccgtcgatcgagtgcaccatgagattatggcccattgtcagtcgccgccttggcaccttcctcgtca

SEQ ID NO: 152991 - DNA, 715 bp, Zea Mays
gggggagaaagcagaagagcaaaactcgactgactactgagactacaaatcctaagccactacactagagcgccaacaagctctctcactaaataagcgacctgatctgagttcttctgctgatttctgaagatcctgttgtttctttctaaccataagctccaccaaaagtagatcataagcccatcaaattttttcctagattgcctattacaaagacctcttagattcctccaccaatcatataacgactctgttgtctggtttcctcccagaaaagaacagtttccccatatcaatatttggctccacacctctctactgaaagggcaatctttgcataaatgggttaccgtctctaatgctgagttacaaagacagcaaactgggttgcattgccaatgtcttttctgaagattatcagcagtcaacactttattatgcaaaagagtccacgcaaaaaaacgacacttaggttcagtttttgctttccaaatggggtcaattttcattgtgcaataatttgctgtaaattggatcttataagcgttgcttgcactgtactcaccatcatctgtccatctccaagaaatggagtcttctaaatcgttgagctcgtgtgtactattgatggcctgccaaaggccgagcaattccttgaattcttctgcaccatcatagggagagcataattggatccaacggttgtttctca

SEQ ID NO: 152992 - DNA, 735 bp, Zea Mays
ctccggatatttcagtctttgggcgtagtgtttggcctccaagatttcttcttcagataattttttccccaaagcatgtcgaacaatgtaatcaatatcttcaactaaggcttcggggacaagagattttgttgtttctgccatgtcttgctctgtcgtcttgccagtatctgaatattgctgacccaccttatcttcaggcacggcggcctttgtctcagtgggcgctgaaggcccagcttcagcttcgacttggtttttggcagcttcgacaactttcttagtaggagcaggccatcctcctccttttgggagttgcggcagcaattttttgtacctttggcaattctgctcctgctgatgggctcagaatttctggcagtttcaataccttttccactatcggctcttcggccgcaccatctttggcttcggtaggcccgactgtaggcaccttcggcactacaatcggctcttcagcgctctgcgcaatcggagcagattgtcttgctttggcagttgaagaggctccttcgccaaattcaggcaccacggtcggttcaatataacgcggccgatgggtcagaaccttcatctttttgcccttcggcacaactgtggtggtcgaagcggcagtctttctcttttttccctaccctcgcagcgggtagcggtaatcacggtatacgaagccaatcgcatcaaataccctgttcaatcttttcttccctcggc

SEQ ID NO: 152993 - DNA, 685 bp, Zea Mays
accgagtggatcctacacaatgcggtgatgaacacgagttcgggcaagcaactattaccgataatcgggcgcgcagtcgcactatccacgacgaggggcggctccaccgcgagtcaatggctccagtgacaaatccaggggtccctggtcgcaaatcccgcccaatgaggtcaccaacgtcttccccgcggcccggtgcaacacttaagcccacgggtttgagcttcgagccacggcgaggatgaaatccccggtggcggaaactccctacactgctccctcacgcaacagcggtggcaagggtaatggcgtttgggtatggcttgaatcaagttaccaaggacacaaaaggggagatttatatcccaagcccgcacaggcgatcccatcccaacggactccggagctgacgcgtggatcacgcaacggcatgcgagggcgacgggtttagttgcgcgaagctaggaaaggactgacaaaccgagccaccgtccagtgacccgcaacccggtgaggcgatccgcgcacgtgatatgagactgggcagcgggccccacgtgtcagtgagatggctggagcgcgggaaaggtgggttgtgtggaagagttggccaaatgggccgaaatgaaggcctgcagcccaggtgagtttttctttttcttttgtttttattttctgttttccc

SEQ ID NO: 152994 - DNA, 275 bp, Zea Mays
gtcgaagcacatgcttatgatgctttccgcaacattacgttcttggtgcatcaaatctatattatgtggtaacagcaatgccttcgtgtaaggtagctcccagataaacgagatgtgtgtccaattgtgttctttaccatacccttgaaaccaacctcctacgcccggttttaggtcacgatgttgtctcatgatattttcaccagtttgtcgcttcggtggcccatctctaatcctcttgccttttcgaaatgactttgtatcctttctaaaag

SEQ ID NO: 152995 - DNA, 603 bp, Zea Mays
ctcagtccaaaatgtactagtgaaaactggatcacgatcactgacgatggagcaaggaataccatggtgacgagcaatatgatcaaagaaagccttagctaccgaagatgctgtatagggatggctgagaggcacgaaatgagcatactttgagaagcggtccaccacggtaagaataactgatttgcctccaacctttggaaacccctccacgaaatccatggctatatcgctccaaacccctgaaggaaccggaagtggttgtaacaaacctgccggatgaaggtgttcggacttattacgttgacagactgaacagcccttgacaaaatctcttatgcggctggcagcaaggggactatggaaggaagccctccagcggttgagggacttttcgatgccctcgtggccttcttcatgaactgaagctaacaacaggggccacatggatgaggcatctggcacaaaaaattttcccttgaacagtaagagaccatcaacctcggaccacccttccttcgcagttccagccaccaactgttgcctgagcgccaccgcgatcccatctcagcccgtagagtgtcaaacagagcaaatgtgggg

SEQ ID NO: 152996 - DNA, 478 bp, Zea Mays
gttttgcttacttctgatttttgtaccatctagatatacgaataatttaggtttggttattgaagatgtttctcattgcatatatttcaatatgcaagttctgtataaaaaggattggtttgtctatcttattcatgtgaaccataggggatgatcacacttgaatatatttatatgttactagggtatttgcacaaccagaaagaataattggaacaaattatcgaggaatgcaaaattatctccccgaataatctcagaaatagtattagggtgcccaatactattttaatatggacgagatattggagaactagtggagatgctctaacaaacatctttctaagagtacgtaggattcagatatggtgctcgactgctcgtaaaacagatttcttagaagtttttaccacatgtggaaaattcatgctatagttaaatcacatcggttaaagagtagccttaaatgttgtgtcat

SEQ ID NO: 152997 - DNA, 478 bp, Zea Mays
ggacggaagagtcttcggatgaggatttggattattttgcggcattggatgtggctgcggcggaggcttctccgcgtgtgatggatgctgaagttcttcctggtccgagtgctgggcgtaggcggcgaagggtggtggcgaagcgtagagtgagtgaggtggagggtggtcgtcttcgtgtggacagggctggcaagcgggaattgttgtccttgccagttggggcgagtgtaggtgagggggagttgcgaagtctctttgagggtgaggagctgaggataatgctgtttaactacagggagatgggtatcatcccgaaggttgaaccaatgtaaggtgtgatgccctcgctgtatgtgtgtaattggtatgatgaggctgtgtgcgttcgctgatccggccgtgcccgtgggggacttgtgcacttgatctagcgcgtttattatgtcggtctggctgcacctatagtcggtttttg

SEQ ID NO: 152998 - DNA, 1191 bp, Zea Mays
gcacttttagcttttctagatgtgttattatcttctatttcagtgaattggcactgctgctgacattttctagccaataaaagtatatggccaaaagcgagcaacagcgtcatatttcaaatgtgcaaaaaaaaacatcaagcttatcagccagaagtaaccaactaaacaaccaaagcagagcaaacagggattcaaatccttaatgagttcataactactcatagagcaatcttgttgaaaaaacggtacacaattcttcagattcaagctttaaatagcaagctctagttaaggaatgataacttaaaacaacatcatgcctatgaaacatcagcaaaaacccagcaagtaatatgactgtacaaactagtaagatataagtgtgattatggccgcttaaaaatctcaacacatagcctctgtaacaagggcgtccaactaatgttcatgagcaggcatgtcgtccaaaaactattagcagacagtttatccaaatcataacacaaagaaataagtagcaacagacaatttctccaaacttcataacagataaaaatacgtagcaatagagagatggcattttcgtcacctttactacctaaatcataacagtgaagtaaatgtcgagcagcacaagctaaaaaaatcaaacaagataagaaacagttcgtcataaattattctttagaaaaaaaattgcttggaactgtacaagcactcctacaattagcaacctttgaagaattgtacaaattaacgtttacgtgtacccatgacaacatcacacattagacccttggaagaagacatagcatgcttccaaatattaggttgaatgtctgaataaaagaataaaatattattttctccaacaatacagcagcaagtcatcaatctatgaaaactaaaaacagcagcaaaacacagtaacaagaggctgtaacatgatatggttatttcctactttaagttgcactttagggtttaggaattgatgctgaagacaaagatgatgacgtgttgacttaacaaaaccagtggcataagcaccagtttattttatcttaatatgatttatagctattcaaaatttcataggggtttgacccgccctttcatagtactttactgcagaataactatcagaatgcaattccagttcaaatggaaaatggcagaaaagttgca

SEQ ID NO: 152999 - DNA, 371 bp, Zea Mays
tgtttgtgcgggcagtagggtggatgaacatagcgtctctgtgaactttcattctagcaccagctcaccatggcggcttacatgtgtgtatggtccgcaagggaaccatgagaagattcagtttttgcaatctcttagagaaattagagctctctgtactgggccgtggcttgtgctcgaggatttcaatctgatattaagggaggaagagaagaataacaataacttagaccgtgccatgatgggtaggttcaggaaatgggcaaatgacttggctctaaatgaaatcccgttgattggccggaaatagagcaaaggttataaatttcgaaattcgcaattgccccaaatttatttaggaggaagtctat

SEQ ID NO: 153000 - DNA, 468 bp, Zea Mays
tacgtattctttgaaagcaacacttttgcaagaataggacttcattctatactccaattattgcttatcttgttctaatcgctaactaggggatcaagtgttgtttatagttgcaagttttaggtttcgcctattcacgcccctctaggcgactatcaaatacttcaccaaatggattgaagcaaaggccttggccaccataacttcgaccacaatccaaaagttttattggcaaaacattatctattgtttcagagtaacaaagtcattgactatggacaatgacacccagttcgattccaaagcatttatatcattctacaaccaagtgggcacaaacatacacttcacatcttccaggcacccaaaatccaacatattagttgaaagggcaataaacatcaatatgatgggaatcacagagtcccttgttagattaccaaggggaaagtggccagaagaactgat

SEQ ID NO: 153001 - DNA, 1236 bp, Zea Mays
tagaaatgaaactacctgatttgtagacgggccgggtggttgatcgccgcctggatcataggaaatgagctggaattgtggtaacgtagtctatctatcaatatggtaaagttggtgactgcatgtacgtcttgcgagggcattgtgtagcaatttgatttggttgcgggttcaggattctccgcgtttccaacgaacttgctgtgctgtgtttcagtgtttggaaagccagcatttcacgtcccattttgcccaagctcaaatttctaaccatttagaaatttagaaatgcggcagtctgttgagcccatgcaaacacgtactagttccagtgccataacctcttcgtcactgtggtctgtattgcttcctgtcgggccctcttgcatgttgtcttatgcgggacatgagtacaaggcatgaggagggcactagtttgatatttttggcacaaagttagtaatggctggttaatgactagttttgtgaccatctgaaacatcaaggcaaatggtctgctagtagtggtgcgaatagttatagatctctgttctggcatgtactcttgtagtagtagatgaggcgcttgtgggggcaagtcatcaccaacacctagccaaaataggggaggatagagctcctgccatttgtttcaaaaaaaataggggaggatagagaggcatgagaatacccagtacatgtaaagcttgtggtagtcttgtgtgaatagacataggtctgtacatcagtacatgtactcttctagtactagacacaattcagtaccaggcaacccagtcattttatgcatatccaggaattagggctgtttggatagtagcagtccaacaggaattttcaggtacatgtaggaaccaatacatatactgatggattcttttttggaggggttgtgtgatccaaactggagaaaattgttggttgttggatttgtttagatgcctttactcaatatgcatgtagtagaatttcatttccattttagctttcgacagcttgatcaccttgattggttttcagtcctaagagtacaccagctataatgtggagtggggactgtcccttcttctatggtgggctcttcattccaggtcttttggcacactaacagcttgtcggcacttcacaactcttatacactaaatttgcatgaacattttgatcttgagctcgtaactgtttgtttaggattttttggttctgtttgtttaggaa

SEQ ID NO: 153002 - DNA, 373 bp, Zea Mays
caaagatatctaatagctcgggaaggttttatccatactttgaggtacatatatataactggagtccatccttatatcaacctttaacatgtactaataaaattatgttttttcattgttgttagaaatgtattggagcactagatggcacacatataccagcatgggttcctatttatatgcaagataggttcaggggtagaaaacactacccaacacagaatgtattagctgcggtggactttgatcttaggtttacgtatgtgttggctggatgggaaggatcagctcatgattcctttgtgctccaagacgcattgtcacgcccttcgggcttaaaaattcttgaaggtattagtaaagtcataaatat

SEQ ID NO: 153003 - DNA, 1378 bp, Zea Mays
cctagctcgacaagaacaagtccgtcgcattggcgaccagttcctttgtcgggtccaatcgcccgacggcgatagaaggtttgaaagatccgatggtgaagacctaggctttaccggcgttgaagaaattgcaggtgagatgcaaggtcatgtttcgttgcaaaaaatcctggttttacgccgccgtaccggggcaacggcgcctcctcagcaagatttcaacacatagacatgggcaacacatttatcaatggtatgtatcataatcactttgttcagatttactatttcttcactacttttgtttgtcagaactttcactgaatcattgagttcactgggtcttcttgcagcatattatttgtggtatttattttgtatacactttcatattgttcgccgaagaattatttacctaaaccaatcgtaggatgataaaaagtggagaatgtgttcagtgctttcaagtgaaatattgtttgtgctatttgttttgtcaatgtatattggactgtagcatttgctcttaaactctgaactaaattgtgataattctgttacttgcatggtagctgatgttatctcaaagagaatagtagctcttttacatataatgcatttggcctggcacccatatacatggttttcaggtcggacttgcacataacatagcattagctagaatttaaaattctattttcataccagaatgacttacttgagtgtagttttttcatatggatagtttcagttcttgttggaagcaagtaaaaaatgtttgtttcagtcatcttttagtaacacattttcgtagtgtttgcactttcaatgtcagaataagcgggagaaaatatgcactctaattatttcctaatggcagagatcctaatctcataccccatcagccataatttaacattacttcaaaactgtgcacaacttcactttctgcttacacttgcctcttggataagtcaatttaaacgaacattgtagggaatggattttttccaacatgatgatggatggaagcatgcaaggggatgtagataactataccaacacaagtgttgcacagtattcacaagcaaaacctgttgggacaccagctcttattgcaaggccaaaccataagacatccaaaaaagttagtgatcagaaagatgaagtactggtttccgcatggttgaatgtaagtttggatcctgtggtagggaaatataaaaaaggtggcaggtattggtctcatatttatgagtacttcaatgaacacaagccatgccaatcacagtgtaccattaattctttaatgcaccgatgggagaccattcagaaatgcaagaataatttttgtggttgtcttgcacggattgagcta

SEQ ID NO: 153004 - DNA, 508 bp, Zea Mays
acctcaaacaaattagggaacttgtcagccagcgtcacattgccacaccaaatatttttccaaaaactggaactcttaccatcaccaatctttattttgcagtatttataatatttgtctcgaaccgagagaatacctttccagaaatgagaatctgaaggtctttccttcaccgaaataataggtttattcttaatgtatttgctttttataatggattgccacaaaccactagtattttctagtctccaaatccatttagccaacaaagcttcattcattttttgcaaatccaaaacaccaagaccgcccatatttttaggggagcagactaaattccaagcagccaaatgatattttttctgatcatgacctccctgccataataatcttttcctgaagatatccattttttttaacacagctttggggcatttatacagagaaagcatatacaggggaacgttggtgagactgctgttaagcaagactaaccgacctcccaaac

SEQ ID NO: 153005 - DNA, 330 bp, Zea Mays
ccaaataggtgtgctagctaatagaaagaattagcaagatcgatgttgctagcaagtgctaaaagagttatgaatagcacactaattttggcaggatccataaataccctagtacgacctattaactgctaattccttcaactttgtaactcatttaatacaggcaaagctcatccactttcataacagccaaatatgcatttctcctttctaaattttacaaaactttagacaaagttgttgaggtgtgttagcaactacatgccagttgccatacaatgctaccagccgtgcaattcttagatttcagagttcaagctctaatttggc

SEQ ID NO: 153006 - DNA, 439 bp, Zea Mays
cttcaccaagggcctcccaacgtcgttgttcttggagttacgctccagtctcaacatctgtcgctaatagagtttcgactgtgggaggaggcgagggggtgttagagtgtattgttcctattgggcctaggccttgtatccatcccactatggggcttttatttgtacctacacctatgtcctgatattgtattccaactcttcctctccaatatcttgccttggcatgggcggatcctctcctatatcttgccttggcaggggcagagctatttgtactgctctgggtgcggctgcacctacacccaaaaaaataactttggcaagaatcaatttattactatatttgcagcgtgcatgtgccacaaagcaagcgcaccctctctgatttgctctagctccacccctatgccttgacctggatttcttgttagttctt

SEQ ID NO: 153007 - DNA, 408 bp, Zea Mays
aaggatcgagtcttctggtgccggtcttactgctgagctcggaggacttggaatttccttttaagatgccctttttcttcctcctttgccctttcaacttgcatggccttgttggagaggtgagagaaactgaggaagtcttggctagccagaattgtcttgagttctggcctgagtcccttcaggaaacgggccatcttcttgccctcggtactgacgtcttctggcccgtagcgggctaactccgtgaacttgtgcacatattcactgacagatcttccgtcttgagtcagctcccggaattcatcttccttaagctgaacgagcccctgggtacatggtgctcccggaaagccgtttcaaattccgcccaggtagcatctctaatggtgacgttgaaggtatccc

SEQ ID NO: 153008 - DNA, 932 bp, Zea Mays
gttggcccagaaaaaccaacacgtcttatttgaaacactcaaaatttcaaggatccttgcaaaaaaagatcagcactttttcttggagagctttaccaaggagggtgtaaagcatgcaattgagtatatagtatcacaatcaaaaaataccagtcaccagaacatgaaagaattttgcctttgcttttacatgaaaacttcctcgactgttgaggcatgcagcattgcgaataattctgttacggaactagcaaaagagataaagaaaaacttcttatcggtaaaagggagtaacaaatctccaaataggtttggattcactctcaaaagtgtcagggacttttttgctaggttgaatttatattcctcgacacaccttgctgaaaatcctgatagctgcaagcagttgtttgatctttcaaggagattattgtcagatgaactgccagttacttctaattttgagtttgtgcagagtgggtctatcaaatgtttgtcagtttatctctcaaacggggcatactgcaatgcagaccttaatgatggacctgtacttgagcagcttagtgtggtgcatagtcggttgcataaatttgctaatttggctctcacccccttcaatgaaagttcagcaaatccacttgggattttggtggagaagctgctagacactttgcacatgtgctatggcagttttccggtactgctatcttatgaacagatgccacgtgaggacatgatgattccgctgagatatcctaaggccaagaaaccaacatcattgctattaaaattccggaggtcgcagaaggagagagaattgtataactacaatggtgttcttagtgtcgaccttttctcaacaccagatagcaccgaaccaattctatttcctgagatctttagaagaactgatcaggaacctgcatccg

SEQ ID NO: 153009 - DNA, 762 bp, Zea Mays
ctacgtaacttgtgctagaaatacatattttacaatggaagaactagtgtatggatctatacaaaattaaacatagtctataggtgggcggattgtgaaattttattcatcttatacctcttgctcactggttccttgcgcagagaatacgaagagcaggggaggggctcggtcggctgttaggggaggccgatggggcgtgctccagttcttgtcgtcgggggcgcggcgtcgggctccgggcggttctcaccgacatcgaacgacggcattggggctctagcagtggcgagcttcgggcggcggtggtcggtgtgagcaaagaggtgggagcgttatgagaaagctcggggaggtcgggatcggatccaacggggcgtgtggctccattttatagagaagagggaggatagaggatgccaaggaaggataaggaaggttagcggctggccatcaagcgccattgatggcgttggtttggtggggagagagtgggggagaggaagagggacgactggccgtttttggcacaatgacacgaggcggtgagggaggcgagtggccggggagagggagaggcatggggtaggctacgcagcggggcgacgctgctacatgctcacgcatgagtgcctaaggctggggtcaggaccgaggagggcacgaggccagggtggggcccgctagcagtgggagaaggggagatgaagggagggagtgggagcgtggctaggcctggtgggccgaaatggccaacacggc

SEQ ID NO: 153010 - DNA, 298 bp, Zea Mays
agccaggctgcccactcgggccaagatagtgaacggtccaatgtatctcgggctgagttttccggagacaccgaaccaaacaactcctttagtaggtgataccctgaggaggacttggtcacccactgcaaattccatgtcccgcctcctcacatcagcataactcttctgacggctcttagcggccaaaatattctaacgaatttcctgaaccttctcaaaagtctgctgaacccaatcaggaccaaccagggatctctctcccaaggtctcccagcacagaggggagatacaccgc

SEQ ID NO: 153011 - DNA, 605 bp, Zea Mays
cagagcgaacgatccaaacattggaagatatgttgcgcgcttgtgttctgtcttggaagggtagctaggaagatcatcttgcattggcagagtttgcttataacaatagctaccagactagaatcaagatggcaccatttgaggctttgtatggcaggcggtgtgtctcccctctgtgctgggagaccttgggagagagatccctggttggtcctgattgggtacaacagacttctgaaaaggttcgggaaattcgtcagaatattttgaccactcagagccgtcagaagagttatgctgatgtgaggaggcgggatttggaatttgcagtgggtgaccaagtccttctcaaggtatcacccactaaaggagttgttcggttcggtgtctccggaaagcttagcccgagatatattggaccgttcactatcttggcccgggtgggcagcttggcttatcgcttgcaattgccggattccatggcaggggtacacccagtttttcatgtctctatgatgagaaagttcttgcgggatttggaccatcagattgagatggaaccaattgcgatgcagcaggatcagaccttggagtgtcgtccggtg

SEQ ID NO: 153012 - DNA, 350 bp, Zea Mays
gcttggtgagatctgtctgctgaaggagagaggtctgactgccgaagctgtggttgctgactttgttttcaagaacattcagcctttgaaagacaaggcgtatccatcttacttgtacagtggtattactgactctacccgggtcaccaacaagaaaattcctactgaggatctggtgagccgactagacatgatcctgaggggcaagatatcaaatgttggtgctcctgttgcctattctgcttggaatctaccacctcataggtcatttttcaatttcgtgtccaaccctcctactagtgatggtggtctgggtcttagagtgcgaccctctcccgaggacattgagg

SEQ ID NO: 153013 - DNA, 444 bp, Zea Mays
taatctggaatcctaaacgactccaatcttcctgcgaatctcctggaaacgcagcctgctcaaagctttggtgaacgtatctgcaagctgttcatcagtcccaacttgcaccaattcaatatcaccacgttccacacattctctggtaaaatgatatttcacatcaatatgtttgcttcgatcatggtgaaccgggttctttgccaacgcaatagcagccgtgttatccatgagaataattgttggcttagcagggatgccaacgacctcctcaagtagcttctgcagccacactgcttgagctgccgcggctgcgctcgccatgtattctgcttcacacgacgatgtggccactgccttttgtttctgagacatccatgacactggactccccccaagaaaaatatagcacctgtagtactgcggcgatcatcaatgtcaccg

SEQ ID NO: 153014 - DNA, 519 bp, Zea Mays
gttagattagggttccaaacctcgggtttgaaaattgggatgttacaaacctaccccacttaaaggaatctcgccctcgagattcagacggggctcgagaaaaggtaagggtattcccttctcagagagtcctcactttcccaggtagcttccttttctccttctctgctccactgaaccttacagagtcttacttctgagttgcgggtctttcggactgctgagtcaagaatctttattggcttttcccggtactggagatctttttgaatttgaattgtctctgcctcgatgtggttctctggtacttgcaggcacttacggagctgggacacatgaaacacattgtgaatatctgacatggattctggtagtgcaaggcggtatgctgcgggtcccactctgctaatgaagggataggggacgacgaaatgcggtgctagctttcctttcatttggaaccttttgaccccacgcatcggggagaccttgaggtatacgaagtctccttcctcaaat

SEQ ID NO: 153015 - DNA, 373 bp, Zea Mays
gttactttggaagatggctaccttacgagatttttgcttggattttcatcatgtgcctctgctttgtgatagcatgagtgccataactgttgccaagaaccatgtgctacattcgaggaccaagcacattgatgttcgctttcactttcttcgtgatcattatgagaaaggcgacatcgaattgcgctatattgataccactcgccagcttgctgacattttgaccaaaccccttgatcaaaaaacttttgttcatttgcgaggggaattgggtgtttgtttcccttttttattagagggctcccttttggtcttttcttcttattttctgctttcactttcttttgtgttatatctgcatgccatattgagt

SEQ ID NO: 153016 - DNA, 814 bp, Zea Mays
tatttatactaaaaatcaatttcaaatctatttaataaagtatctggactgtgtccactaatacctgagaactcaggggctatagcgtataaatctggaccttcctaaaacgatctttgcatagatagggatggcaggtttatttgacaaaagccaaggagtctcttatgcaaagtgtcggccgaaggggtatgggtcactatgatccgtctgatccttcacctacgaccttgattagattaccacttaaaacaaaactgtaagcaataacaatcataggatgacagattagtggtccaaaatttgtccacgacacacgctggtcccagccctcggatcttggatcaatggcgtggatcaagatccaaccggtattcacctgatctaatctcgtccgctcttttgcaatccaacggcctcagaccaccctccaccccatgacacgggggcgtggtggcgcctagagtcagcggcgacgctcgtggctggagaagatgatgttgtgccaagagcctcaaatcccaatctgaatggtgctatgcgtagaagagaccaaaacggactagttaggagtgttcttagcaaggtgggcgacacagggatgtgtggctttgtccatgcgtggcagcatggcggacaccgacgtcggtgagaaattcacacctcccagaccaccaatggtgcccagagaagcgacaagcacccccgtggaaactctgcgaaactcccggacccgattccattgcttttatgacgatggtgtagagctctatttatgtgcgaccgcggcctaaccctccctctgctcgacgac

SEQ ID NO: 153017 - DNA, 369 bp, Zea Mays
tggacagcgagtttatttgtaataacccaaggggctcttttgcaataatgtcggactggagtatcttaaggtcttagccgtccgatctaataccgaaggcacacattagattgtggatggaaccaagcgttacgcggctgaggccgtccgattcgagatcaatggcccacattttacctataggataacagcttagatccgatcgatgtcagatcaacggcccggatcacaccaccgaatcggtatagcactatcagatccagaccgctcgcatgggatccaacagcaagatttctatgcgacgaagggtatgtgctatcacatctgaatcgtatgctctagaatctacggttcacaactcattttcct

SEQ ID NO: 153018 - DNA, 882 bp, Zea Mays
gctcaaacaattgctacacacgctggtaagtggtcggctggatggattgaatgaaaggcgttactgtgtgtactattttctaattattgtgcgtctctgttcctcttgcagtctcgctctgactttgactctgcgcgcggcgcgtccttgtgaagagttgaagacaaaagcttggcacatgcactgcacgtataaaacaaaaagatacaggatgggggttgagtgaaagacgtaacttttttcctccttcgaaggccacacagggtatacactagagattttcagtaagtttaagattcatttttgtaggcatcgatttatcacatggcgaaaatcttgtatgatctgagttgttttttttctttttgaactactgatggtcacaagtgcggtggctgcttaatcttaaatcaagatagatacctgtttaatgaacagcacatgagactaactaaatcgatttcaaaagaatgaacccaattcagttccaactatccaagtaacctgcttcttcgggaaaaaaaagaagaagatctggagctatgccaatttattgtcttctgctagtgcaaggaattgggatcggtgatgttggtttatagcagtaattaagatagctaaattcagcagcttgtgttcatagctccgtcgtctctgcttgccacaaaaaaaaagatcatagtaaacttaaattcaattaccacaacatcatctactggccgattcgaagtgacttgctatcccaaatcttagttcagtctagcttcatgattgtctttgtgatctgatacctttttgcaagctttttccccctttgtgattgtctttgtgattctgattctgacgtagtttctttctttctacagaagtgtccgtgagacc

SEQ ID NO: 153019 - DNA, 654 bp, Zea Mays
tgcctcaattcaacaacataacatacgatgttctcatattgacatgataaggaagagggggaagaagtatagtacttgtggcggcaacatggcgccctcaaagagcagcgcgtccaagcgctcgacggtcgcagcctacttgctccagaagcacctgatctctcaacggcaggtgtagacgttgtcgagcgcgatggggatccacatccatcccttgacgagcgccccgatgtggtgcgccgctagttctagtacctcacagctcctccccaagcggaatcgccagtgatggataccgcctccgcgcgagacgccagagcggatgaagtccatgagcatcggcccttcttatcacactctccatgggcttcctcctcgcggactggaacaacctcgaccgtgggacgctcaacatcttctactggatgctggccaggcgatggggggcatacccagagtcgaatccttgcggcgacgacgaagcgatttcttttcccactacttcgtgcatctggaaagctccgaagaagtcgataggtgtccatatccggagatcgttcctcagctagagatacgaccgtgaccatcgattgtgtggctgagatgcaacacaatgacgtggcacactgggagatcaattttgctcccgcatct

SEQ ID NO: 153020 - DNA, 358 bp, Zea Mays
ttacatgatgttcgacagtttatttagactgttgcagctataatctataaagacaaaatatcgtataagtgctattgtagctctaatctatagagacacacaaaaaataccgtatataagaaggtggtacggattaattaaagccaagcgtactatggacacaatcctgtcaaggtagagtttggccctatattgcagcatgcatgcattgcatacacgcacatggccatcttaaatgtttggatccatcggttgcgcagagatcaagatccccgtcgattatcgttgactccggagctcccgctcatcgagcaggttctcttttgcttgctcgaggtcgaggtcaacccattcccat

SEQ ID NO: 153021 - DNA, 428 bp, Zea Mays
tggcccggcacgcgttgcatcaaggccgactgcacctgtcaagcaaaggtgagtgctttctgtttaatttcttgtatggtgcctggtgcgtgcgtgctcgagacggtctcggttactgccggagctgtgtgtgcgagtgtggtgccatggcatgtaacgaacgcggtcgtgcccacagcctgttcgtggaaacgtcctcaagcagaagcagtcctagggatggacggttaacgtgttcgacgttgacatgcacgtacgtattgctggatgctctgtggcgctattgctggagaggcaggaggagagcggcgcctgtattttcagctctcgtcaccccactctggaaacaaacaagaatttgcaccaaccgagcacatacgctggttgtggttgaattcttcaatttgttatttgtcttaaattaacac

SEQ ID NO: 153022 - DNA, 475 bp, Zea Mays
ctattgcttgtaattctgagttcatagctactcaccaattcggatctactaaagcactttcaacagacactgattcatcaacagcaagcatacacatcagactgtattcgaagtcatgaatctcttctgtagcatcaaacaagtctgataaatttctgtatctcagttgaaccatgcctgaactttcagtgttatcagaattttgaaggttgtttccagctgaacctgaagctgatgttgaatgctgcacctatggagtcagtggtgagggaggtggcagatgattcccccctgaattctcaccaacttgatcagatgtacttgggtcttggattgcttcatcaggagcattaaactgaaactgaaagactgtagtttctgaattttcatcaggcaactgagtattttgactatcctccagttctccccaattccatcccattccctcttcaaacttaacatctctgctaatcac

SEQ ID NO: 153023 - DNA, 378 bp, Zea Mays
aactaatcgtcgattagggcaactagtcgtccgatttatgtaccctggtcgtcccgggtagggtttagttattgggccttttttaacccatctacagtataatttagagcaccctctcctgttctaacctagccgccaacacagtctccagccggctcgtctcctctcctctcctttcttggcaccgcccctgtagtcctgaactcctgatttgtcggcggctacaacaccctgctgcagtccttctcttgcagtcttcaggaatcaagtgttcaagactcaagaggtaggtctgcaaggttgatggacagatggagagatgaagaattggagattatgccattatgggatgtcacatgtcaagttcaggtaagtcac

SEQ ID NO: 153024 - DNA, 272 bp, Zea Mays
cccctctgtgctgccttttggaaagactgatgttaagctttctcaaagcactgtttgacttgccctagtgaactgttgaggtgcaattgtgcaagttagcatcagtagatatgtgtgagtgtgacctagtatagattagcttgcacgttagcacctatcctgctttctgcattattatgtcttgcacttgccctgatgaatccttaaggaaaagttagaaagtaatgcatactcatataagtcttagatccatagtaagttaatcacttggg

SEQ ID NO: 153025 - DNA, 411 bp, Zea Mays
cagttatctctaaaacgccgacgtcgtcttcagtcactcggcagttatctctaaaacaccgatgtcgtcttcagtcactcggcagttacctctaaaacgtcgacgtcgtcttcagtcactcggcagttatctctaaaacgccgacgtcgtcttcagtcactcggcagttatctctaaaagcgccgacgtggtcattagtcattccaaagctgatgtggcttcatcatcatctgggcgctacttcagaagcgtaaatgttgacaataatagctcggccatcactcctaaaagcgacgatatgatgcccgaattactcagccagaggaatcgacttcgcagataaggcaaacggaggaacgattcgagaacttcaagttacgacacaaacataacaaatagagaacatcacgg

SEQ ID NO: 153026 - DNA, 308 bp, Zea Mays
agtgatttacatgtgggccaggatgtcaaatctcgaaaagcatgcgaattaggtggccagcgcaatgcattggtggtgataaaatgtgacacttaatgcaaacttgaataagggtggtgtaaaatggagggtgggctactgggctgagatgaacaaactggttcctgggtaggagctggacgaaggattgttgattccttacatgcttgcaaactttaggctaggcagacaaatctgtcctgctttagaaaatccctgagcaagacttgttgctattggaacattaggatgtctcccgtatacggaaa

SEQ ID NO: 153027 - DNA, 555 bp, Zea Mays
aatttggagatgatccaaatcaatagtatgagctcgatcagacgaacaacccagcaacttgtggaaaaaatcacttatagtttcctccttgtcctcatgccttgactttattaaaccatcgtcggataacagattaccaataaaattcttgcccttgcggtatttagcgtggaggtggaagaaggcagtgttagcatccccctcagctaaccaggtaatcctagaacagcttcgagccatagaacgttgcaaggttgaaagggccacaacatgaccatcaagctgcttcaacagccaattttctagcactgacaagggtctgatatcttgagcagactgcagcttgtgcataatttctcgtgccatcccaagctgagaggagatatggcccacccttttttgagaccagctttggagacgcctgacggtggctccaaacttcttggaaagggtttcaaaagggcaaggggaggaaggaacagaattccaagcagcctccactgttgtaataaaatcaggcaattttgtccagtgagattcaaagtgaaatctgtt

SEQ ID NO: 153028 - DNA, 565 bp, Zea Mays
agatccacctagggggcttggagaaggaagccaacataatccgagtcaagcttgaaaattcaacgaccaaaagaaatcaccaaccagaaagttgaggggaggcctggtcgcacggggcacaccggagaggccagacaacgccgaagagaatcctcaaaggcgatcctcgaccgaaaatccaacttggccagatccatccagaaggaagcgagaataccaggggcagagaagcgagaggaagtagatcacctcaacgaagaaaccaccggggagacgaggagagcacaggtcaggacgggaaggggacggattccagccatcataggtgctcttgttcttgatacatacttatgttaccccaatatccttttgattatcattatacgatgtttcttataatatgacttccatgttctccgattcttgatatgcctggtaggacatgggcatgtaaaatatggtggacaggtccgttgcttctttggtgttcttaatcgagatataagagaggcacaaacgtgaaggatgccaaaattggaaacttgatcttcatggcctccccgac

SEQ ID NO: 153029 - DNA, 862 bp, Zea Mays
caatagaccttctgtttttttagcttcgacgaaggagaaacaggtagaacgcctgaaagggattgcaaaatcttattcatgaattccttagccacaccaccatcgtccgtagcttcctgagtttgcaataggtgctttcttctagtatgaacttgggttactttgcaaggtgtctggggtaaaacaggtggaagctgcacaatagccatagaatctggtacattttcacaactgtgagaaaaccatccatctgttggatcgctgagaccagaacatcattattagcatcctttgcgaagccctccacttgaatcaaagttggagacattattaccagagaagcagcagcagacgaagagacaagatgggacccaggcgcctccagctcaacatcccaagttgggagagcaaggccatcaactggagtaacagtcaccacccttcccgccagattcaaacttggagactttactacggctgacggctcagcagacagaatcctcgcagaatgtgctccgccgtctccatcccccatagatgagcaagaataccctaaagattaatatccagcagcgccaccaccggataccattgcctgacgagaccagcgcttgatgatcaaccgaatggggggcacatacaaagattgtcctccagatagaacctgatcatccatcccaacattcggaaatagagcgatggaggaatttggtgcgaccatgcgtaggtcgatcacatcagcatcaaggttaaaactcaagcttagtgcgatcaagacctccgtggcgccaccagaaccctccagatcaacagctgagataagaagagtgcggtgaagatcttgctcagcctgccaaatttt

SEQ ID NO: 153030 - DNA, 650 bp, Zea Mays
aatatatctagcttaatggatccatcttatcttaaaatatactctattaccttagtagatccacctaacttaaactagtctaatctagtcatatccaacctaatctagattttatctaatctattatgatctaatctagagtaagttacctaatattggtacaaaagataaggccatacccctcatgcacttaaaaactaaactagtgccttaaaccaactcagccacgcgcatgagatctaacccaaccaatagagtcttgatgaattgcataatctgtctatacccacctgacataaaacaagatcttgatctacctcatgtagtctatctcatccatgtctgttttaaccatattccctgaccccgatgatatacactaacctcaaatcaataagaccaagactggagaaggaaagatcaaccccatcaaggaaggagagaagtcaaactcaatcttcagatgcattaccactcaacacggaattctttccaatcataaacttgcttaccctaggctattcttgctctaacctacccatcttttataataaaatgactatacatatatatacccatgccttcctaatcacgtactcgtttgtagcaaagactaaaaaaaacttcttaattttggtaccaactagaaa

SEQ ID NO: 153031 - DNA, 444 bp, Zea Mays
aggtaatgaaaataaacgcacacggaacgcttctgtgtcggtcaattctcctaattgtgctagaaactagcctatgtgttcacattttttcccttggtcacccgaaaattttgcgaattcaggtatcctgattccctgctggtatgggtggtggtcaaatcgtctgtcataaggcttccgatatgactgccccctagggaccatgcttactccgagcttatcttggaacgcctcggctattttttatcttattatgtcaatggcagccggtgggagaccaccgactctttgtcccatcataggtgaggttgtttggacactagtttgttgtcttccccccattggtttgagttatgtggtttattactatttgccctatatggttcataggattgtccgttcctttccggccttctaggcagggctggaaagtactcgcccccg

SEQ ID NO: 153032 - DNA, 851 bp, Zea Mays
ggcgagcgcgagttcgggagcggaggagagaagcgctccgcgagacgactgggacccccaccgcgctcgggtcggaagctggatctgcctcggggctcgtgcccgcggctggatatcgtggggcgcgggggccggagcggctggtggagcggactgccggcggacggagggcgccggtaatcgaaggcggcggtggaatgcgggtgggtagcatgtttttcattttaaatgaggtggaaatgcgtcttgccgagctccttcctgtttttcatttttaatgaggtgaatgatttgttcttaattttgtttgggtggcctgggaggagaaatgtggggcatgggatttgggtcttcgccaaattagcgccatcctggatggctttcgggggttggttgttcataaactgctagcttctgggtccaattcgttgctctcagactctcagttttcgaatcatttttgggcacatgattttctagtttatggttctgggagcacgttgcttgctgggatactagtagaattgaactcgtgttgtgttgctctggtgtctagattcggttttggactagaaatacatgcgtcacgacccgttggagggatatatgctgcaaggttgcaaatggatatgttgcaaggttgagtttgagctcaatttgtgctgtttgattttctgctaggtctaatttcgatttgttatcatgctggcttgtacgaaatgttattccctccaaattgcttggtgatttagctctaacacgggacgagtggagcgtgtttaatagttcaattgaatatgaagttttaggttttctggagacacttttgttgtccataagcgactttgggg

SEQ ID NO: 153033 - DNA, 352 bp, Zea Mays
ctgggactataaatatgtatctgtagacacttatgaaagggatcgtaatttctccactaattgcgaccgcaagctttggcgcattgccacccctattctgagggttctatacgggtaggtgccacgccgccctgattgtgtcctacgatcagggcggtgctgttattactcattcaatttagtgttttctcgtactgaagcgttttttatggcgagatgcactagttatcgtagaattatgcgtcggcggagttgttacgtatgcatgtttcctgcagattacgagcattgtaccaccccttgcgcaaggtgctcgagcgcgacggcagtgccctgttttgatcccacttgg

SEQ ID NO: 153034 - DNA, 655 bp, Zea Mays
gctagaaattgtgtattttgggtccctctatcaggcacagcacaaatgtaaccgtggggagggccgactgggccagcacggagtgagacgaccagggctacgtcccggcaattatcgacagaggatccactcggcccgagatcaagtaccccatagggttaggcacagccaaggtaggtccctagaccatggagccccaggagctaggacaaccgcagccccaatagatgaatcctacggtaattttgtataccaagataattgaatacatcttggtagtattttgaggtagggtcttccccacgtattgcaacacatttattaaagttaccaaaatcacaaatggttgacttaacaaagctaatatgacatataatttggaaatggattttatatttaccagacacgacctttccagatttcgagcaaaagaattcaaaacatgaaccactaaattatgagcaaattactaaatacgcctaaccaaggctataatctggacggcaagcagaaaacagcccgtcccagatacaatataccccatgtataaattaaaaaataatgtcagctaccataccttctcgaccaaagaacttacaggcctatttcaacattgttgctatcttgacatctcgaaaccagttcgggttagttt

SEQ ID NO: 153035 - DNA, 679 bp, Zea Mays
ctcaaacttatcacaaacaagaaggacatagttaagattgttattgtactacacatagaggttttcttacaaccacacacatttcagggtccaattacttcaatgcatacaataccaacacaacaagaacacactaccaacagaatcaacatcttcactgctctgagcaggacatctactgttcttgccaaaccattaatgtctacattgtattgatgttacattgttactagcaaggttgtttcttctatgctgagcggctgcaagtagcatctgctcctcgaaatgaagtgtagctagcaaggatatatggctggcttagcatgattatcccatcttatcttaggtagcacgtagcagagtagcgcttcagcagcggcgttagtgttcattgcagactacagatgaacactggatcatggaatattagagagaacatttgtttctgagtgtcttggttcctcgtgatgccactgcgatgttcgtgtgcatggtatcttgcacgggttcagattagaaccctgctctgaagtgcgaagcgaaccttccttgcaaggagtgcgtgcaggaagtagaccagtcagtgtccatgcttgccacactccgctcatccaaataaaacgcgtacctgccggccttgctgatgagaacatggacgcctcacgcctgccctgcaaca

SEQ ID NO: 153036 - DNA, 600 bp, Zea Mays
atgatctctgcctatgccagggcttggcgcccacaggaggccctggcattgtttgatgcaatgacagtgcagccagatgaggtgaccatggtgagtgttgtttcggcatgcactgcacttggggaccttgagactggtgagcgtctgcggcaatatgttgattccaatggctttgggtggatggtttcactccgcaatgcgcttatggacatgtatgctaagtgtggttgcctaactgaagcacgtgttttgtttgatgggatggcgataaggagcttggcatcttggaatacacttatctcagcatatgcatcacatggtgatgtggaaaacacacttgctttgtttcatatgatgctggccgatgacaattatgtgaagccagatggggtgacgctgcttgcagtgctcacggtgtatgcacacaagggctgtgttgaggaggggcgcactgtgttcgatgcaattgaaagaggagattatggcaaagtggaagtgaccattgagcactatgggtgcatggtagacttgcttagtcgggcagggcaacttgatgaagcgtacaagatgatagagcaaatgtcgattccaaacaatgat

SEQ ID NO: 153037 - DNA, 317 bp, Zea Mays
tatatgttgccacagctttgttactcatagtgcttcacttttgtaagggttagggaataaccagatcggaactccacagcgatggtctgctcgtatccagtgtggctgagatagaagcttggagtgtgtttgcatcccatttttccttggaaaagcatagtttaccttagtgttggattctttgctgatttccaattgagtgcatcagatgattattttaatttaaactcatgctcaccaattcaattatattttgttaaatttgagtcacatctctgtgattcgaactggtagtttctcgtccatttgtagcagct

SEQ ID NO: 153038 - DNA, 1033 bp, Zea Mays
gtggattataaccccaaacaaacaccccctaaaccatgtatctaataattctaacaaaggtaaacagagttcactaagcaaagtaccagcataattcagtgctcgctcagtaccaatatgactgccatcctccggtattgtcatatatgctagatactatgctggaatagattgagcaccattgctcaaatactaaaactcgacccaacacattgcttgaaagtggagaaaaggcacccgaaaacaggttcttacctgcacagggacacctttactgaaagaatgaccaaagtgagtcgaactaatggctgtatatagtacggaaatttgctaacctggcttatataatacagccctagctcataaagaaaacaaaatagcatcttagtgcctccttggtgaataaccacaagacctcacaaacattattgggattttttacagaagttttgcaggcaacaaacatttgcttcacattggtttcaaattccactattccaatgcaacaagtttgccacttgaagctagaacattatatcgaatattgcaacaacccagaaaagaaagataaatacatcataaagttacagatgccaaattaccacagttcgcatgtaagtctgtaagacttatttgatctagtgaaacctagttctttctcagatgaagcaacttactgactagttataaaggtgcatcatggaaaccaacgattaattgagatcaggggcgtcttatgaagagtatagtgcacattactacggcactaactaaagttacttcttgaacaggaagatatagcgcacagtgctggagtaccaaacattgttagaaccagcggtggtctagcatggttgctgtgctgcactctttgtcggcgttaaaaaacccaggccttcaggcccacgagtcaatgagagcggagatggtctagaaccaaacattgttagaaccatccggacctaaaatgcgcatcataaatttactcgtcgatgtttactcgaaacaccaacactctttatattcaactatg

SEQ ID NO: 153039 - DNA, 1214 bp, Zea Mays
gccatcccggacgacatcggcaacctcaccagcctgacgtatctgacgctctacgacaatgagctcagtgggccgatcccgcccagcatcggcaacctgaagaagctgcaggtgctccgcgccggcgggaaccaggggatgaagggtcccctgccgcaggagatcggcggatgcactgacctcaccatgctcgggctcgcggagaccggcgtctcagggagcctcccggagacgatcgggcagctcaagaagatccagaccattgccatctacaccactctgctctccggccggatcccggagtccatcggcaactgcacccagctcaccagcctgtacctgtaccagaattctctctccgggccgatacctccgcagctcggctacctcaagaagctccagactctgcttctatggcagaaccagctcgtcggcgcaattcccccggaactcggacagtgcaaggagctcacgctcattgacctgtcgctgaattcgcttaccgggagcatcccggcgagtttgggcgggctacctaatctccagcagctgcagctgagcacgaaccagctcactggcaccataccgccggagctctccaactgcacgtcgctgacggacatcgaggtcgacaacaacttgctgtccggggcgatcagcatcgacttcccgagactgcgcaacctcaccctgttctacgcgtggaagaaccggctcactggcggcgtgccgacgagcctcgccgaggccccgagcttgcaggcggttgacctgtcatacaacaacctcaccggtcccatccccaaggcgctgttcgggctccagaacttgaccaagctgctgcttctcaacaacgagctgaccgggctcataccgtcggagatcggtaactgcaccaacctgtacagactccggctcaacggcaacaggctgtccggcgcgattcccgccgagatcggcaacctcaagaacctaaacttcctcgacatgagtgagaaccacctcgtcggcccggtgcccgcggccatatcggggtgcgccagcctcgagttcctcgacctgcactccaatgctctgtccggcgcattgccggacacgttgccgcgcagtctccagctcattgacgtctccgacaaccagctcaccgggccgttgagctccagcatcgggtcattgccggagctgacgaagctgtacatgggaaacaaccggct

SEQ ID NO: 153040 - DNA, 482 bp, Zea Mays
gcgtcgcgtcgccgttcacgcgctccgccatgcgcggcgggttagttgaagacgagctcttacattccgggcccacgcgtcaacgagacaggcgagagcgaacgcgagtgcagtaagtctgaccgatggccccgccgtgtcagcgccaggtgaagcgcgagcgcgcgatgagtggggcactggcgtcgcggacccactcgtcggcgcacggcatgagggggaaagttgggccgcgcggtgagggtttcctaggtgggccgaaatggagtctgccggcccaggtaaggctttatccttttccctttttattttctgttttcttttcttttacttttgaatctaagttttgaatttcaaatttgtgatgaacttgtactcaaattttttctgagtatatgatttggataaagcattgtggaacaaatttatccctttataagttttatttctttgtattacatagcatttttctttctttcttt

SEQ ID NO: 153041 - DNA, 532 bp, Zea Mays
ttataagatgatttagaagagaactgtccagaggaagaatgaatccacacatgtctatcagcctcctgagtgagcaccactccccttaatgcgtcccaaaggtttagatattgttgtatcccagacaaattaagaggggtctcaatgtcgctgacccactgccagttctcaagagcatgggccaccgtcctggaagaaatagcttgtttccctacattagccacaacagcaggggcaaaatcttggatacaagacccatccacccaccgatctgtccaaaataaagtattacacccattgccaaccagggtaacaattgaagaagaaaagaagctcttgacatgctgctgaataggaaattctagactagaccacggcttgttaggatctgttttttccaaccataaccatttagcttgtggcgcccaactttggtacagcaggttagaaatcccaagcccaccgagatttaaaggccttgtaacaatgtcccacgaaacaaggcaattaccaccatttacctccttcttcc

SEQ ID NO: 153042 - DNA, 788 bp, Zea Mays
acgggctgggatgcagggttggatgaggagtcccaagcactgccatgtagtcatagaccctctcactatccttgcgtccagttatatcctagccattgagagaattatgtaaatgaactgctatcagtgctgcatttctatataaaccaatttgatccaattatgtaaatgaattgctatcagtgttgcatctcaagcatgtatgtaccttgacaaaacagtggtaatagtgtggtgattttgtccacgtgtagggttacctgatcaaacaaaacacttctcagtttgcaaattcaactcaactgaaaattgaaaattatactaaaaacagatggatgaaaccttgtacgtttgaaaactgaaaatgtacgtaccttgacaaaacaatttgcaaattcaactcaacgagaggaggatgaaactggggtggcggccttgcctgtgttcaccctttggattaataaataggaagctctcgacttgtggaagggggagcagatggtgggcttcccagatcatcctcgtcgcatatggaaggggatggtagtggggtgataaaggaagagcgccaaggatggaagggttcgcttgtgaggagtggattttggccatccacaatgcccacatggatcccatctagcatggatttgagcaaggacaacaccacagtagataagcacagggtagcatggcttggcttttgcctgccaagcacagattaagattcctacactggtaatcagctataaattagaattaagattcctgcactggtaatcagtgttgac

SEQ ID NO: 153043 - DNA, 654 bp, Zea Mays
ccaagaatttcattgcacatggtttctattaattctaaccactcattgcatggttctttaaatcttttctgaaacttgaaaggtaaggcagacggacaagctcatacttttcccctcttctttcttcttcggcattccccaaccgctagaagtcgggaatgtccagttcgccagatattcttgtatcaagtctctagttctgattgctcagccatgaccctgaactccacttcagctagctggcatggagatcccaactgcatattgcataggggccaagtcatgctgaagtttaatctcagtggactcatcaccatgctcataagtttttcccttttcttctcgtctgctttcacgtaaaaccattcgctcgtccaaccagtcggccacttggtgcggtagcctatcatggggccttcgtatcttttcggtatgcaaagttgtatcatttgaagtttttgtgcaggccgtcagcccttgcctttgtctagtaatgaaactcatatacctggcagaacccttcggcattagcactctttccttggcttcagagagcccagatgtaaacgctgagccagacaatggcattcgagattagctcatgggggtagatctcaaacttctttaaaacttcacctatcatctcataaagag

SEQ ID NO: 153044 - DNA, 426 bp, Zea Mays
aaatgatctagggtttacataccgattgtgaagatgatgatgttctccggccacggcgcgggaggtccgacgacggcggatgaactccgatgcaaatttcattgctaccccaccccttgtaccgcacggagaggacacagacaccatccttgtgcaaccgcgaatgtcccaggccgaacatcgcgggctcgtccacgttgtacccatgattttaccacggcggcagccaaatccctctccttgtagctcgttggtggttacaatctcggccagagattgcttccaaggccaagacacggctagaggggtagcgttggctagtatataaggccctggggcgcccaggagccaacgatccaagattcccagcgccatccagtgatctgttccgtaccgaactcttggaggagatacaactgacaaggc

SEQ ID NO: 153045 - DNA, 486 bp, Zea Mays
tgtagctcgcctcgatcccgaccctcgccgccccctcctctcgtgttgctagggttcgtcttgccccgtttactatttgtttaggcttcatccatggccggctaatttccagttaattcagtacatcataacgggtatggatcgacgtactaactaattttttgtccaatggcgccttcagatttccgtatcaactcggggtctttgtcttcagttccaagatccagtgcaaccaaggtaatgtgatactcaatttgttgcacactttactgtcaacatgggctgaaccaatttttgtttatggtttactagggataccattgatctattgtatcactattatttgttcagggattagttcttagtttgtttgtcacaacctgtatgtttaggggttcagttcatactttgtttgttactacctgtatgttagtagcttcaaccaaagtttgtccatgttagcacgcattcatgtcaatacatgga

SEQ ID NO: 153046 - DNA, 492 bp, Zea Mays
gccgcgtgtggaggttggcgaggctgctgatcttcctagtgcgagtactgagtataggtggcgaagggtggtgtcgaaacacagtgtgggtgagttttcgcgaagtggtaggcgccgtcgtatggggatggagcgtggccgtcttcgagtagaccggattggtaaacgagaattgttgtcctcgccgtttggggcgagcataggtgagggggatctgcgaaatctttttgagggtgaggaattgaggataatgctgttcaattatagggagatgggtatcatcccgaaggttgagccgatgtagtatatggtgccctcgccgtgtgtatgtaactgtaacttgtattgcaatgtggcctgttggccgttttcgcacgcctgtgctgatccggctgcacccgtgagcgacttttgcgcggagtgtagattgacgtacttgctgctcttgtccgtcggcacccttaggtgattttggcatgtagtgtttgttcg

SEQ ID NO: 153047 - DNA, 425 bp, Zea Mays
tgccgcttcgtcgtggcccacgccgccggctactccaccgtccgggctggttggttgggacgcggccgccctggctgccttctagactcccactatgactccgtcgatgggtcccgagtggatcgcggacaccggtgctacctaccgcaccactcccgaccctggtatactcacctctgttcgccctccttcttcctctcttccttcgtccatcatggtggcgaatggctcgtgtcttcctgtcacatctgtgggtgccgctggccctcctggctcttttcgcattcccgatgttcttgttgctccttctttggtccacaatcttctttctattcgtcgttttactgctgataattcttgttctgtcgagtttgactcttctggtcttactgtgaaggactcggtaactcggcgcccccttctca

SEQ ID NO: 153048 - DNA, 867 bp, Zea Mays
catagcccgattaatatgcgagttgtttttatcctcggcctgcaatatgagattgaaattcccaggaatcatccaaggaccctgacaggctgctctaatttgtctcagctcttgcagaaactgaatcttggcttcattagattgaggtccatacctctgtttacaaatcgtccgactaatcgcgattaattgcgattagtcgggctggtcgcctgtaagtggccgaccatggggacgacgcgatttgtttttctggtcgtcgattaggcgtccaaatcgtccgattagccatctctggtcgaccagtgcgcggcgggctagatgtgctattgggcttcaccgttttttgggcccagtagccgcataaatctgttggcggccctaaaccctaaagcctcccctgtgcctgcgcccctctcctaaactttctgtcctctgccggtggcggctgctccagcctccagggctctccaccgtccaccagcgccggcgtgcagctcatccttgaaggccgtccctgccccctgctcatctacaaggcacaagatgagctcatcatccgaaggtcatccctgctcccctccttcccccttgtctgcactctgcagttttgcattctgcgtagcagtacccatttgtttgcagtctgccctggccctgctcatctagtgttctatacttctattttctatttccttacttcaatagttcttagcttcatagcagcgaccagtttatcccaccagtccagcagcaccaatgatgttattcttaccagtttccatcagtccagcagtagcacatatctagtgcctagtagtgacttgacctctatctgttgacatgttcagagtttcatgctgccgg

SEQ ID NO: 153049 - DNA, 297 bp, Zea Mays
ctgccttctttttgaccttgtacacccatctacaatcaataatatttttaattccttctggtggaaccaagtgccaagtcttgttcttagccaaggcctcaaattcagcatccattgcatgtttccacttttcatcacccaaggcctccgctaaatttaggggctcactagtggcagccaaacagccatacttgatgcgttgtattgtaccattctgaagccgagtatgaggtctcagatctatgtaaccacctgcagctgaagcactttcagttgcttccatgagagacacatgtt

SEQ ID NO: 153050 - DNA, 354 bp, Zea Mays
attttttttattttttcccagagatagaactaactcatattcagatttacttcacatgtgtatctcaagaatcatttgtttccattttttatggagctagtagtttcaatctcaactgcttatgttcattgttggcatgtcttagttatagaaaagtacataaaagttgatagtgtgtttcacagatctagactcactcaaaataggtctttctgtactcaaacatttctataacaataatttgatccaataaccctgtgactgtaagctgggtgaagggacatcatctatcagactatgaactttagaaatccgggtcatcttttgtggctctcttcgagctcaataatgtct

SEQ ID NO: 153051 - DNA, 310 bp, Zea Mays
gttgtagacagtggaacagattaattacgagtactcatttcggttctagttatctcggtccgatttaattttgcagcacttctatcgtggagttctagtaatattcacttgggcaaaaatacaagagtggatcgggattccaaattcatattctcttaatccataaattttaaacaaacaccaggttcgacatttcgcgaaataaatacgcgagatcgatccggcatcgaaattgtgaacccttcggaagcgaagtcacacatcgttcacgtgggcgagaggttgtgcgctgtctagacaccgcttatca

SEQ ID NO: 153052 - DNA, 330 bp, Zea Mays
gaggacacttgccttcaccaaactgctgatcagggacctcctctgcaacttcctcgggaaacacagactgctcgttgtctacgtaaagtaatcattcacactatgcacttggggaaaataacaaacaaaaagcaacataccaaacatatgcagcagagagggatcacaagttcatagtagaaaagggataggcactctggtgttccctaggtctggggtagaggactatacaaagtgattcatcatccactaatcaggtttaagtcaggggtgggattaaatcattacatggttttaagttcctaaacctaagtgtttaagtccataaac

SEQ ID NO: 153053 - DNA, 512 bp, Zea Mays
ggaatattgtcagccaatgaggcctgtatcgagcgacacgacggcttccgattctgtacatgccgccatccacctattggaaacagcaaatccaccagctctgttctcttcttcctcaaacagcaaatcctccgttctgagctgttctgccggtctatttacttgtatgttacctttctgctgacagtcactactgtagcagttataaataggcataatcttagatcagatcaccgtcttgatgcctatggagatattgttatttagacctgaacaagataacaatcaccggcttggcttgccgggttcgcaagggtgagtaccttgctcctgtcgcgtcacccaactcaacaccgggtgagaccgtcggtgctcagttgttgttgtggcccaggctcccaggcactttaagaaaggccgcgctcactaccgtacggaagttcttcgcatattggattcgaactgtataagcacggattgaacatatttttagtggcttccggtcgctgttg

SEQ ID NO: 153054 - DNA, 562 bp, Zea Mays
ctttttaagccaaatcttgaatgacggctttgtttttctcttcctccagatcttgttgcattttcagaaccttgcttaataatatgctctgtcgaaatgatcttcgttagaacacgacccaaaagttaataataatagtaataaaataacaaaaatattcgttaccttgaagttagcataaagcaagcttccggcgatgtggtgtcgttggtaacgacacaagtccgcctccacctttggcaagccaatgcttttggaaagggttctgacaattttggcctcggtgcggttccgaaggcaccttagtttcccttcgttcaccccaccaaatagcatagcgcctgatttatatccacaagatatggcatattttttcaactcctctttctcagcgtctgttaactcttgtccaagtaggtcttgaaagttaaaatcttctccttcagaaatttcatcaatttgctctttccccttctcagttgacgtattcactgcagccacagtagcttcttcttcggccattttcaggagaatattgtcaataacctcaagtgtagtttcc

SEQ ID NO: 153055 - DNA, 531 bp, Zea Mays
ttcatctcggaggtgatctgtagtgaaagtttctcaggacagttatggaagaaatgaccttcatgtccacgttgatagcaagcttttcttgaagttatttcttgactttttccatgtttccctttttgtttcttggacctgatgcgacgacgaggctaaaactgtgtgcaagtaatagtccatccatcaatgtaacactcatgtgtttcttcttggggctgggcatccttgtgatgtttcctttctagaatactttgcaattcatcaactgtcagtgcattaggtatgagagaatctgttattagttgttcttgaggagacatatgtgtgtttatgccagaaaataaaatctggttcttctgttttgtggtttcactttcgtttgtactgatctggcgacaaggaattccatagtactcacaacaacaacatgtaccaaattcacttgtttgttggtttggttgtgcatccttttgtgtcttgaatgtctttccatcagttgttttacttatagtgttgttttgacttgcc

SEQ ID NO: 153056 - DNA, 467 bp, Zea Mays
atcttcaattgtttgctgtattaagatttttttttaattgtgaactttaaagaatagaaacttaatttaactttgcacataataaatggataaatttttgctgctcttctgtattacaaaacatgagcacaggttgaggttattatactcttggtgtgtgggcatcaagaaatagcagcactatattttattgttggcactaaaaaagttctgctaatcatgaatcgacaatagtggttgtatagagtgacacaaaaggttaggtacaagacatcaatatttgtatctgtgaagttgcaatacgaatgtcatcatgtcaatttatcctgtgacactgttttttgaaaccatgcatcgagcacccccttttcttttacggcatgatgcttttttgctgggtatcactacaatttatactcctattttaagcattgaacacacacttatagcggcgatatatatttggg

SEQ ID NO: 153057 - DNA, 318 bp, Zea Mays
gccgtgaatgcgtccaggagggcctgcatgagatcgtcgcccgtgctggactggacggtactgcctgcccgcgccagcacacctgatggtcgtcgtttcagaaagacatggtcaaggcgccaaagtcccacaggatgggacccaacgaggcgagccactgggtgtcgaggaccacgtcgtagccggcgaggggcaggatgaagaaatcggcggagaattcctcgttgatgaagaacaggacgccgtggtacacgcccgggcatggcacccggtcgccgttggccaccgtgacgtggaggttgtcgtcttggtgacgcg

SEQ ID NO: 153058 - DNA, 810 bp, Zea Mays
ctcccaccttccaagtgatcgaggtgatgtcaagagactcgctcgtcctaggagtctgggcttcggaggccttgttcatcattcctttgttgccgagggcgttggcagagttcctaaagcgttcggttgctccgagagcccatgctacgccaacatcaatttcagccatctagagcttggagaatctcatcgtggaatgtcggtgtttgtgacaccgcacaccccggggttaccctcatggtgcttttgagtaggatggcgtcattgattgtgactcgatggttcatgcgatatcacgatgagagaaacgctcgggcttgaacaggttcaggccgcttcgagaggcgtaataccctacgtcctgtggtggttttctgtattgaggtgagttacaggttgtggctatgagagtggtgggttgagggtgagatgaaaatggtaggggttcctcctggccttatatatacaaccagagagagccccctgcacaggtgtcgattacaatctccttgcttatctcctgatttgtagcgaacagtcttcctttatactatggaaatcttgcactcacgcgtccgagttattgctggtggtttagtctaacgggtgggcgcaaaaaacccggcccgacatacccgtactcatgcagcagctaactcggacttgggcctcttttgtattagaaccggcttgcctctcctagtttcctttatcccgcccaccacgagacgccctaggagggcgtctgctgtgtggccccggacatattttcgtgctcgtgtggacccgggggatatccgcccccactag

SEQ ID NO: 153059 - DNA, 610 bp, Zea Mays
gcaacatcgagctaccactaccattcggcactgcaccgaatcgcgaagtgagcaggtcaccttcgacatagatgacatgatctatccctacaatgccatcatggggggcgaggatccatcaataaattcaaggcagcaatacacgcgttgtacccatgcataaaaatcctagggccccaggcgcaatcaccatatatggaaatcaacatgtagctaggaacatagaaagagacttcatccccggccagcgcaatgtgcattgtcttacaacagaatgtgaagaccccaacatccctcgcacaaagaaaggcaaaaagatcaatgcacagttacagagtaattagggagtcaaaacagtccccctggactccgccacccccaaccatacagttctagtcagcgaaaaccttctgccagcagaagaagaaaggcttctctcttgtctaaaccacaacaaggatgtcttcacgttgtcaccctagacctcgtcggcgtcagccgcaccatcattgaacacatcttgggcattggtcccaccgtgttccccaagaaacaaaatctacacaaaatgtccgatgaaaaaaccgaagcgacgaaggcagaagtccac

SEQ ID NO: 153060 - DNA, 1234 bp, Zea Mays
agtgttgtctaagagagcataaaagactgcttcgtctcctccccctctgtatacctctccggctcaggtattgcttattccatcaaatgcccaatctgttgttgttttcacttgccatgttttgtatgccatatgcatgttattttctatgtttccttccttgcacacctctaaatcttgtatgtcaaactgatattttaactgtaaaaaaattggtcttacagtttcctttgttgcacagtttcctttgtttgacatttaaaagctcaaaaattatttaaaagtacatgaatagcataatcgatgcctacttatgtgcagatcatagtatcaaaattcatgaatgcagtttcgacttgaaggagcaatgtgagtgtcactttttctcatatttgggtgtggtaaaaaccatctgaatattctaaggcaatacttggactatattttttagtgcttcttcccttaagctggttgattctattagttctgttgtttcttataagcgatgtcttaacagggactggtcccattgatgattcaaattattgaaggcttgcattgtgatcccaaaacaaattcttgaagcctcttcttggactgcgaatggatggagtagatgacttcaggttttctgcttaatcaattgcttgcatgttgcgatggtcattgtttcttccaggatgtctcattctggtgtgtaaggtgatgtgcagctcctcctacatcagcgcaatgtaaacataggatgctatatgtttttcattaacccactttcgtctctgaactagatgataagttgaactatacgatgttgttataagtttttgaactctgaaggatactcttattgattgttcttggttgaaagggaagcattgggttgctacgcttcttgattgttcttccacctatgtgtttaggtctttaaggtattagcgaaatatgtgaagtaataaatattctaatttcactgtataaattttactcgagataagttaggtgtgtactcaaaggactttatttcattaattagttaaatacatgatgcttaaaacttatgtaatacatgatctagcacccagttaggaactatcgcacgtggtactctcgtgctatatatgtctgatgttgttttgaacatggttcaatttaattgtatctctccaaaaatggttgccattgctataaattttccttaccctacaaagttcagattatttgtgtgccgtcgcaa

SEQ ID NO: 153061 - DNA, 976 bp, Zea Mays
gcatgcagcgtggcggctgaggaacacgatcaccagggcgcgtgtgggtcgccattgtgatcaagcaaccgcccacgcaggtgcgacttcttttgataaaaaaccctattacaatctgaggcacccttatagctccggggcctaacaacttaggagattattaagagataagctccagagaacaacttaggagattattaaggagataagctccagggaggataagcctcctaaaacttctctaacactcagccaccatctaacaaatagctgggtctaattattctggcgcctggcatattgccggcccacaaaagagtctataacagagttccaaggactcacttgacagatactgagaatggaccccccaaggaggcaaggacgttcaagcaggtgacatcatgcaagcatcagcaaagcagaagtgaaacgtacaagtagaactggagcagtagccaaaattctcgcagaggaaacttgagcaagcctctccggctctcccacaagtccagagcccagctgcccacgatgaagccagaacagagtatagtacggaacaatggaagtaggagtatcagtgaaatccctgtcacgacttcgaatgcgtagccatgttcccgaagcacatcaatgcatagatcaatgaaaaacaaccaccaacacctagggaagcgaaccgaaaaacagcagtcagtgtcagtgtacctcttgcacagagcacagttgtgctcccatcactctctgcctctggctccacatgactctcatgcagccatgcacgggctcccgatcccgtagcaggatccgtcagtcgtcactcgtcagtcatcacgaaccaccatgaacggtgcacggatcgatccctaccattatcacaaggtcctctcaaaaaatggcagctggcagagccatcaagccagacctgcggtgcagtgcagaccatgaaacggacgcaacacgggtgacggaccgg

SEQ ID NO: 153062 - DNA, 990 bp, Zea Mays
ttggagatcatagggggggaggaggtcagaaaagaagtaactttgtgtccttaaaaaaatccagatccagtggagtagttaaggcctagcagtcacattgaacaatacaatatattgtaatcaacagtctgatcaaatcattagcaaacttactctgcataaagggtcatggtggattgaattttacagaactacaaatgcttccagagcttgtgatagctaattgtatccatcataaaaaatgaaggctttagacctgtcattggataccctaacccattccccaaattcacactcgtgatttgggtcgggtatgggtaactgggtaacttgctacccttaggatcaagtgtaagtacgggtcccgctatttctacacgtcatcgcctctccttcccttgtgacctcctaacatagttgtttctgaaagatatcataggaaccgcaagccccctccatatcagcatatctccattgcattcctttgtgcctccaatatctcacaggaccgtgcacgagtgacggcggtgaaacctgggcagacccagtggaggggcaggtgtggaagtgtgacacgtaggtgtgctgatgtccagctgtggcagcagcgacgagaaacccacgtcacctcacccacagcacttgacctgtagtgttatacgaatattccagcacttgtgaacaagagcccaagcaggaaaacacaccataatgagtgacatgatccagattgtccaatgggtagggggttatgggaaggtgtgtagactggacatttcagaaatggggttgagcatgggtgcggcctggtgtgttcataccctcaccatagacaggtctaggagtctttatatgaccaattcatgttttgtgctctgttgttcataatcaacatacgggtaatgactaacgaattatgtagtctataatcagccaggggctgattttgtgtaagctactgggaaatgccttggatgagctatgcaagag

SEQ ID NO: 153063 - DNA, 339 bp, Zea Mays
ttttccccgaagcatgtcgcacgatatagtcgtacattttggcagatgcttcggggacggcggtatcaatttcttcgaccgaagctgcctctgacattttcatttcttcggttgcctctgcaatttttacttcttctgcttccgaaggtattaccttggttggttctgaaggcccggtttcaactccagtctgttgcttcgtagcttcaacaacggacacttcggcaagcgcttcagaagtttcagcagtcttctttggggttgtgcttggaagtttaattgtttccaaaacatctaatacattaaccattcttttccttttaggggtcactgtcggcc

SEQ ID NO: 153064 - DNA, 349 bp, Zea Mays
acatctgctccaaaccagatcaaggggataccaagggattcttgcgagagggcaccgaggggattcaggggggtgcggtcaaggaggacacaacggatgcagcgatgggtgggggggtacttcagtgggatgcaggcgacgtgtgcaacgatagggagatagagaaagatggagaaaacagttaagcctgagaacctgcggagatggcgaggtcgatggggaaggattcagggcctggggcgagggattcgtcgtttatgcgggattttagtttcgggtagatgtggatggaagggggcgggggtgtatgaggatggatgggaaagacctctcgcgtaggaaggcgagg

SEQ ID NO: 153065 - DNA, 475 bp, Zea Mays
ggagttactagtaattggtcatttgattgctacatttactgttaaggcctagaagctcaggggtcccctggtgcctataagagagacactctctctcatcttcttgtttataactagaaccactagagctacctacactgttgtgttgtccttttgtctcctgttcccgtggtctatgtgcacggaaccgtcggaagagtagaccttcaaaactatgtcttcaccagagactctgcacccgaggagtagagggcgattaagtttttaggaagtacattggcgcgactgctcactgcatatgcctacttcccgaatgcgtacctgcactacgaacatcttcactgcatcaacgtgtgatggaccacatcgaatatgatcgactaatgatgttgggtaatgacacctctagttcctttggaactggccctgtcacttggtactccctaatgaacttacttgtaatcttacattctat

SEQ ID NO: 153066 - DNA, 1003 bp, Zea Mays
ccactcctgcagtcctgccttccagcttcttgttaaggctcataatatatatggcctctttcttctctcttctctaggcttcctcaataagtaacatggtaacagaacaaggttagggttagtttttttagccgccggcctctcctgtcctgccgtcgcggccccctatctcgcactattgcggccccatctctggctgccaccgcggtcgccggtctctactgtcaccaagccgccggctggagctccgcagctcgacatccggttgtcggtcactgcgctcctgtagtatcagacgcaggttgtggcctcgtcatccctgcagtgaccatccatagccgccgccgtcagcggctgcgccataactacctcaagacgaattcccggctcaaaaccttctctcggctgctgctgctgttgccactcctccggccgtcgtcgctgctgctccatttcgctgccatcaagcttcatcggcccccgtttcttctttcaattctgctgcagtccctcatcctccatggtttgctgtgtgatcggctcgtcattgtctctctttgtttatccggtttgttagcgtgatgtatagggaaatagggcccaggcggctcacctgccctaacagggtgcggcggctgcctccccccctctgtatttggttagttggctgtgtttggcaaggatcccctagattagacctttcctattgatagattagatctttcctttattagggatatccttgcctatatgtatgagccttgggctcctccaatttatcaatcaactattcccagccatactactctttcatggtatcacgagaccgggatctccccaacccctctcacccttccgctgcccttacgcgctgactccgcgccgcagtatggtcgggacccccgccccctccgtcgacgaccctgctgagcaggctcgccgcgactccgacgccttgaagcagcacctcgccgagactcgccgcgccgccctcgccgaagcc

SEQ ID NO: 153067 - DNA, 694 bp, Zea Mays
ggaagaggcgcggcggccgcgtcggcctggaagacggaggcggaggtggcgcgctgttcggccacctcaagggggagcagcagccggctcgtccgggcagcgccggccagtgcagcgacggcggcgacagcgacggggcgcgcagcaagctggtgttcttcggcgcggacggcggggaagaggaccacggcgacggcgacggtgacggtgcgccgctgacctcgcacctgcaggggcggcgggggacccggttccagctggaggagctgctgcgcgcgtccgcggagatggtcggcaggggcagcctgggcaccgtgtaccgcgcggtgctgagcgacggccgcatggtcgccgtgaagcggctgcgcgacgccaacccctgcgcgcgcgacgagttccaccgctacatggacctcatcggccgcctccgccacccgcacctcgtcccgctcagggccttctactacgccaggcaggagaagctcctcatctacgactacctccccaatggcaacctccacgatcgcctccacggtacgcgacctccgccgcaagctggttaatcacttccctcgcttgctaattgccacttgccagtcagtcacacgacactgtctgtcgtccgcttgtctcactcactcactcacaggtcacaagatgtcgggagagtcggcgctggactggacgacgaggg

SEQ ID NO: 153068 - DNA, 330 bp, Zea Mays
gcacaaccgaataccagccgggcgcatgctcacaagtccgtaaaggtgatggcaccgcaaccctctttcctccccgtttgaggatttctaagctaccgcgagagaaatagagagaatggggagtgaaagtcggagcaccgccgttgtagccgcatactggtgtttgccgcaaacgggtccgatcgggagtcttcatcagagagcggtgaaggttgcagcggttccggtgctgggagaagaccactgggggccatgagatttctcaccagagccagggaagggccaccggccgcaccacgccgtggccaaacatcgtcgcgtcatcatcgt

SEQ ID NO: 153069 - DNA, 533 bp, Zea Mays
ctgagatgctctatattccatgaattccctatttccgtgccatccatttgagtaagcctatatgatcctggccgagtgacctctgctactacaaatggcccttcccataatggtgataatttgtgccgtccttcccccgttagaattcggtgaaggaccaagtctcccactacaaaggatcgatgtcgtatggccttgtcatgatagcgcctcagggtttgctggtatctagctgactgaattactgtattcaatcgctcttcctccaatatgtcaacgtcctctaatatggtagcctctgccttagctatgctttcgaagaccaaccttggtgccccaaacttgaggtcagcaggtagcactgcctccgaaccatagaccatgaataaaggagtatttccgtgcagagctcgactaggttgagttcttaagctccaaaccacatacgataattctttgatccattttcctgcaaacttttcattcttgtcaaagactttcttccttagtgcttccagtatcattccattagc

SEQ ID NO: 153070 - DNA, 462 bp, Zea Mays
gcggagaagcccgggcgcaggagggagctcgccaaggaggactggccgagcggacctggcagggagccacccgccacgccatttatattcgggtgcagggagaggaagaggattacggaacccagctggcgcgaggatcggtaggtagttcgggcaggtcgttaccgctgcgaggaatcggggaagaagatccacagggcgcgcttggatggaacgacgaggaggtgaggccgagttcatattgccgcgaggtgacggctgattcgcgcaagctccgggcagggtcgttgaacccgcgcggtttttttgcggagggtttgttagcgaggaggattgcgacggagatcttgagcggcttgcaacgaaccgagcaaagtgacggatccgacgagatagccccaccactcagggtcagcgagtacgcaggtgtctgcggaacagggatcccaggcgcgcgccccg

SEQ ID NO: 153071 - DNA, 358 bp, Zea Mays
agttttgagttcgtgttctagttgagttcggttgctggattagatttgttttggttcagtttgattctgtccatccgcttccatcctacaaaaccgaccctatctacaaaacagatcttatctctaaaaccgaccttatccacaaaacagattctatccacaaaacagatcctatctgtataaccgaccctatccacaaaacagatcctatctctaaaaccgaccctatccacaaaacagatcttgtatctaaaccaaccatatccataaaacaaaacctatctctaaaaccgaccctgtgctccatagtcgtcgcttcggttcctgccgatttgtgcctttgaaaaccataacttga

SEQ ID NO: 153072 - DNA, 362 bp, Zea Mays
gtcccaggtgccggcgaagtggtacatccctgagaagaatggctagtatgtctcctatctagccagggtctggtgcctccctatattaagggcaatgtcaatgggtcgtctatctatcgccatgtagtaccttgtttatactactggctaatcttttgacagcatttcatgcatcataaaatgttctactttaatgttccatgttacttgaaattctcagaaattcaagaacatggtacttgagtgtttttcctttttcagaagaatattgcttgtctgcaacactgtcattcttgactactatgttatggtatgtaaggaacacattatgtgtttaaagtattttgtttactgctgcttac

SEQ ID NO: 153073 - DNA, 552 bp, Zea Mays
gttcggcttaccatcgtcggactgatggacaaactgaaaggactaatcaagtattggaggacatgttgagagtttgtgcccttcagcatggtagtagtgggacaagagtctaccttatactgagttctcatataataatagttaccagaccagtctaaagatgtcaccgttcgaggctctgtatgacaggaaatgtaggactcctctatttttggaccagactagaggaagacaattctttggacctgaacttattcaagaggtagaagaataagtctgtataattagggagaatttgagggcatctcagaccaggcaaaagagctacgctgataatagaagaagaccactgaagtttgaggaaggtgatcatgtgtacctcaaggtgtcaccacttcgtggaatgaggagatttaaagttaagggcaaattgtcccctcgctatattggaccattcttgatctttaggcgagttggggagatggcatatcaactcgagttacctgctagtctatcagatgtgcataatgtgttccatgtatctcaactgaa

SEQ ID NO: 153074 - DNA, 1373 bp, Zea Mays
atagagggcacgaacatcatcaagtgcaaggcgctccagaacaaagtgtagataaatctctatgtgcttggcgcggtggacatcatcaagtgtaacgcgctcccggacaaagtgtagatcaatctctacatggtgaagatgtcggtgaactgagatgtcatgtggacatggaggacacgaacagagcccacagattgtggcccgtgatgcgagcagaacggtggcccactgaccaagcgcaggtacggggtggggagtcgagacaactataatgtgactaagagatgcactagaggtggttaatctagggcgtcgggtgacgcacgtggctgtgtgatggtgccgtaagccgcacatggccttacggtagatgcatcaaacacaatgatggtgcaaaggggaccaacacaagattagtgaaatcctccaggaaatcaaaggacactcgtctaggagaaggatcctcagaaaagggaaaggactcttcaaagatcacacgacgagagatgtgagacgatctgcgtaaggatgaaggcaaaggtagcccttgtggtggggggagttgccaagaaagacacaagacagagaggggcaagttttgagcagcggtggcagtaaggttgtgataacacttgcaacaaaaaacacatagatgctcatacaatggctgagtccccaaaagggagagatgtgagtaagagtcgcaacccaaaacgtgggaggaacactagcttggaagaggagggagtgaacaacattatttgtacaatggataatgcgttcaacttgactgttctgaggagagttgtaggggtaggacatgcgccagtgtatgccgtgggagaggaagaacatgcgagcgctggggttatcaaactcgcgggttgtcacattgaacccccttgatggtgacaccgaaccaggtacaaacataggcaaaaaagttagaaagagtggagaaagtgtcatacttaagtcgtagcggaaacacctaaaggtaatgcgagcagtcatcaaggaccaaataatacttgtgatcatagacactagtaatgtgtgaggtccaaagatcacaatgtattaacttgaaaattatgagtggcatgtgatgatggcacatgaaagtgaagttgtgtatgatgaccgagccaacatgcatgacaaagagtgtcactagcacttttattacaaggaagacaaacattgtgctagcttggagaggactgcaggatcatggtgaccgagacgctgatgccaaacgaaggaggtggtggcaacatggaaggtggaggccgcaagttacaacgagtaaaggggactagagctgtcacacctgatgatctctctctgagagggaagaacgttcacataac

SEQ ID NO: 153075 - DNA, 368 bp, Zea Mays
gtcgagactgcgcgccaaataaaaagaaactcaggggccagagcgcaaggttccctagactcagcgaacagtgagcggggacggcgggttgattagctaaaacagcaggggcctaatagctaaatcgttcagccgaaggggtacgggacagtgaccgtgggatcacagatcgatgaccatgatttaatgaaaccgcgatctaatcctatccctctgcaaccgatccaacggaccacactacatcgcatgaacatctacgccagatcgaaccccaaccgtacatctgaggatcaacggtttagaattggtcgcgcgaaggggaaagagataacctgatcccgaccgcaccttactagatctacggtcag

SEQ ID NO: 153076 - DNA, 362 bp, Zea Mays
aaccgaaaacgtgcctacaaaaagaatgcaatgttatctaactttttaatgattgcttccatataacacacacaagattacgtacccagaagtcagcgcgaacaagcccctgggcatcgccataagtgacatcgaccttcagcttgtaatcgtcccaacatgagacgaggaccggcgcagcgtctgcatcgtcggacgtcttcaccagtccagtgtagtgaaacttcaggagcgaactcaacacagagttcacctgcttttgacgaccctggccagtgaaagagtagtccaaccactccctacaaaaagacgggcaagcatcaaacatgcttacatttgatgaatacagctgattcaaatca

SEQ ID NO: 153077 - DNA, 557 bp, Zea Mays
caactgacaaggaaaaaatacaaagcaaagagagatgcatatgttaacaaaattaaaatattttggcacaactgtgaacagaggtaagcccagaatcaaatcttagtgaagctggacacatggggttcagcatgcaggaatgaacaagataggactatgagaagaaaaaacttagccttacaaatacaataaacataactacaaaagataaccaaattcttagccttaccaatacaataaacaaaaccacaaaggataacctgaatcaagtatatgtgaaagggttctggaacaacagaagtgcatagtgcatagataggtaacatcttaagtgttaaaagacatgggctaagagcagattcaagaattattgcagtaacacatgactactaacttagttttgtctggcatcgcgttttatattagcttaattagaaacacatttatggcagtctttttggaggtattggatagttagcaatagcagactacgactacctcatagattacatgcacacagttccactacattttttaaagtaatattaatataactg

SEQ ID NO: 153078 - DNA, 637 bp, Zea Mays
tgaacacggacctgcccgagcgacaccttctcacggacaaaatggatgtcgagctcaatgtgtttcgtccgccgatgatgcaccggattgtgagacatgtagactgctgaaacattgtcgcagaacaccacggtggccttcgatgtcttccttcgaacctcattctgcgacagtcacggttggcaatggtgcccttttgcctgtccacaaccgtgcctccgccactctgcccacctctcattatcctcttcgtcttaatcacattcttctttgtccttcgctagttaagaatcttctttccgttcgtcgtttaactcgcgataacaatgtttctattgaatttgactccgatggtttctctatcaaggctcaaccaaccaaagtggagattctccgatgtaacagcaccagcgatctttatccactccgcccaccgcagcacctcggcctcacatcttcatcagccccgtcggtctccttatggcatgcaaggcccagacatcccggcactccggctctgtctcagcttcttcataatttcccttttcattgtaataaggctaccgatcacaattgccacgcatgtcgccttggcaaacacgctcggctgccattctctgcttcagcaacaactact

SEQ ID NO: 153079 - DNA, 305 bp, Zea Mays
gtctgtgtgatatttgaagcagctatttggaggtcgaattttagtatatctagacatcctcgtcccagtggagtcattaaaaagtgttttggtcctaaattagagccaaacactaggatgacatgcctcgcggtgctctctgtggagcacagaccgtccacgacttcgatgcaggaggagcgccttctccctgtgcgcttgtcggacggtctacgaagacggtcttcctcacgaagaacctaaatctcacttcgtgggagtgaccttgttgggaggacagaatctagggttgcattagggttggc

SEQ ID NO: 153080 - DNA, 515 bp, Zea Mays
aacgagagtggtcagatcgggtagtggggtgacgcgcgcgtcgatcgggaacgtgggtcggtcacacgatggggtgatgcatgtttatggaaatgtaacacaatggtcatgtaatcgtaacggatagctcacgtaaatctcgggagatgcaaactgcgcagcaaatcgcgcaggagattggattatgccatgaatataggccaggacggtttaggcgagtataggaggtgaaaaaaaaacgacctacacacagccgccgcagcttttgttcatagctatcgaagagttagggcatacacaaaggagacggcgatgacgacaccctgtacgagcgatgggccggaatgctgtaactccaccggctgcgttaccggcgccaggaattgttgaagaaggcaacacagttcatcaaagtttgatgggaacaagtcagcggatacccatgcggacaattggtgaacatgagcaggacacaccacacattctccaaagccatgtaagttcaaaggaatacc

SEQ ID NO: 153081 - DNA, 362 bp, Zea Mays
gacagattggacgtctggtagatggctcttggctggtcttcatttcgctttgtgcttcaatgcttctgttgattagacttgtactttagtggctatatttggctttcctccgatctctatcgatatctttcttctgtcttgatacattcattgcatataatgtgtggatgtgactgcttgggaaaatctattgaaaattcttggatgtcctccgaatggtgtcgtgttacgtgaaacggcgcctgctgcctgccttgcttccagacgatttgaattgcttattgaatacttgcgattattcagtgaccatggtaggagatgagcggttgcttctggcctctataaatagactgccttcctcg

SEQ ID NO: 153082 - DNA, 435 bp, Zea Mays
cttcaaccaggtattaagtttcctactttagttttttcgttggttttgcttgttcagtgtgcgttgaactgttgatatgatgatctctagcaaggagcaagtaaatcctgttcttcctagaacttgccaaatattgcttgtttctctctcttggttaattcctgccaggttgaaacttgagagcaacaaggcatggtttcctgggcctaacacttgcatgtttagcttctcagttgctgtgtgtgcttctaaaatctaaatacgactgcatgacttttttggaccttagtttaatcatcatgctcaatttgtcgttgccttcctactctggatggctgacaagttgctgagagaggatacaaaaacgaataaccgatcatactattactggctcctccagtaagtctggaacggcgcttctgaacctgagtttac

SEQ ID NO: 153083 - DNA, 935 bp, Zea Mays
aactcccaagtcgtgggaagttaattgatggctcgatgaaggatcaccaaccggaacaacctgcaatgcatcagtggggaccagatcagtatcatcaacagaggtcaaaactctgtcatcaggagcgctggcctctaaggcgacttcctgactcgaagcttgggctgctaccatgcaaccaaaatgcggaggagaagaccctacatgaacgtccatggaagtgtgagagggagaaccaactcgaacacccttgggggctgggtcatagctcgcgctacccatccgagccgggtcatccccggcaacaccctcgggggctgggtaagcgctagctccatccttgagggccgagctctctgtaacagccacctctaaggctgaaggaccttcacccacttccatgagagcagaataatccagaccagcctcctgacccttaagaccgcgctccaaggtcgatgaggcgcgggaccccgcccgggataactccagcccagcatcaagcacataagtgcaaacatccatcatgccaccgtctgctggctctgacaacagatcttctgggaccatgtcttcaagagtctgatcaaagttcgccagagataattcttgcagaccaatgagggcagataaagctggagaaggaacaccactgctttccccgctggctaggtaacgccggctgttcttccgaattagagggatttcatcctcctcttcctcatcttcatcaacaacacggatagtacaccccattggggtcagctttggccagatcacacccattgggttcaatatcatctaggtcacacccattgggatccacagcagtcgggtcacacccattagggtcagcttcagcaaatgcaggcactggcacttcctcagcagcaggaacagaaggaccggcatcctgatccaagctagacactcga

SEQ ID NO: 153084 - DNA, 578 bp, Zea Mays
catataaatgtaaataaattggtaaacaaaatgaactcgaaatagtaaatacattgaagttgacttacatttggagaaatgtttattgacagtttgcacattgttgtagaaggtgaaactgattggtttgtaaatatattgaagttgacttatatttggagaaaccttagagtgacttgataatagtccataacatagaaaagggtttggctcatttttcttataatgaaaacgatagcaaaaagaaatcttgcatagtcacatgagaccttctattcttatctgcattctccatttcaacatatggaacaccaatttgaaatccacgctcaccaaaagtaaatatcacaatggatattgcagtggcatataaactggacatatggaacaaatacgtttaaggtctttgttgtgtttttgaatgataatgtctcttttaaatgtaccaaaagatagtctccgtaaactattcagtaaatgcatgtaaaaaggaatatactccgtagaagaccaaaataagaaaggtgcgcaagaactgttccctttttctagggaaatattgcaatcataaaacagaa

SEQ ID NO: 153085 - DNA, 574 bp, Zea Mays
gccgtataaggcgtatttcagtcgcgtaaggagtacgcctgccgcctgcgtaaccctagcatcccattttctgtctcggcctctccgtctcctctcctctccagctcgtgaccgcgacaggcgattcggctccgccgctccggtgtgtcgacggagcggtgaactccggtgtcctcgcctcctgctcgctgctcctctcctctcttgctccatcctcgctcctctctccctcgaccctcactaaccctaaccctagaactcgatcttcgccaagctcgctcctctgcctttgccgtcagccatccggttcgtggatccggtgctccggtgttgcaggtaaggttttcttgctcttggtctcgtctctctcttaatccgattcgtcttcttgtgcttgatcttgttgcttcgattcgtctaggtgtgcaccgtgtgtgtgcgccgcgcgccgtgaggagccggagaagccgaccgaggcggcggccatgtccacggcctcggctgacgacgagctcagtctcgaagcagtgatcgaggagcggaggcttgaagcgcagaacgaggccgacgatgc

SEQ ID NO: 153086 - DNA, 2745 bp, Zea Mays
gccacctgcattaccaatctgacctctgacaatccttttattttaggaattttggggcaaacatgtatggtaataatggatgctgtttactagtattacatacctggtttctttgcttcccaccatgtcttgtgggcagcatgggaactgtcctcctagcattgctagatgaagctactccagtaggctgattatgctgtttttgccgtacatcaacaggggctatactcccattccgtagaccacatagcacaacttttcccttataggagtgagaaaatccagtgggcatagcagagacaggaatagtgtgtcacagtaaattccgaagtaatcataacatggatacagggtcaacaagaaagaataaaatccatattacgtaggtctgcagattatgacatatgctgcaataggaaaggtcacatcggtagcatattgctttcctttcaaaactttgagaatcatgtagtcatgcattagatgcacatgcaccaaatttaagcttaactggaaagtgggggcaaaaggttgaggcaagcaaaattttcaataactgtcatttgacaacaaaccataaaatgatatctcaaccagttaaaactacaaagtgggaagaagtttaggtagattaagattgttaccgagtgcacaaatttcagggaaagaatgtcgcttttagaacgacataaccatgatgatccccttgtttccaaatcgatcagaccagcaccaaggtccgaacctagaaataagatgaacaagtgaatcccaagcgaaaggatactatatgtgtctgtaacataagcaggctgcaaactgccaaaactgtaagaatgagtacagcttgctatgacaattaaattaattcctccaactatagcaatgactaacctttaaattgcaaaacggccatcacaataaccaaaactgagttattgtgaaaaaaatcacatatgtatacaagtaccaaaacaagcaggtcttgctatatgggttcaatattcaactgtcacgtttaaattatcaaagaatttcagaaatgctaattccgtagtgaaattcttagtgaatgcatccaacttgatagagttacgtaacacaaggttcaatcagaaacaagttgcaaaaatagtgtacctaagtgcaagggaaactttaattatctccaatatttaagctctgactcaacgaactcaccgaaagctgcatgtgtgccatcagaactacaatcagctgtccacattgttcgatcaagtgaatgaactctgtaggtagtccatggtccgattgccaagtcaacagcttcagaaagatccataatatataaagaggcacgagattctccagatccaagagtagccaccatgttttacaacgtcaagggacacaagctcacaacatatttccagttaataataaagaaaacataatgcaaacatgtgcaactatggcaacaccaaatgtccaaataaatagagagtacaataagtaacgagttcaggatacaatgctcgctgaactgatgaattggtgttcgatgcatcagggacatgacgtccgagcttctttatgcatgatatactggatgagaaagctatgaagcctgttccaggtgaccaaatgctggggagtggtcctggcttgtgctttcccacaagagtacaagcaggttggggcaaaaactctgcctcattctcaaagttactcagagcagtccctaatccgtataacctattaagagattataggaaaatgcaccgtgacatttgacattagtaaggccatgaacccatgctcttacacagaagtaagaacattgagagataaaacatatcgacggattgtgagaattgaagtatagataaatgcacactttctcttagaacaaccaacagttaagacaaaagacaatctgtgcgactgtgccagcagacaatacagcaagtgtgacatggtgataccaagatagtctcaacaaggcctgcatactacaatttcagtctcataatgccatgactctacataacttgaacaaaaaaaaacaaatgaatccaaatagtagatagatagtaaatagaaacagataccaacgaagactcttaccgaatcgaaccgttcatgctgccggagactagcagcctggactctttcaacccttgcggtgtctgaaccatggcgtccaattgttcgagcgccttatcagccacagaggtggtggcttggtacttccagacctgccaagccgcacgatgatgaaaaaaatagagtattacaatacagtaacgcacaagaaagcaaggagtaagtagcccgggcgatcaccatgggctgagacgcctgcgcgtagtggcactgctgcttgaacgtggacctggcggctttattggagaacatgactccgccgccgtacatctccctggcgttgagcagctccggccgcctagcccttttcctgctgcatcccgttgtgtccacggccggaggtggcgctggcgtgccgcggcgggcggcagcgcccgggatggggcccctgatggggaagtagcgattcttctctgggtcgtagtagaaccccggcagctctgcaggcaatcgtcgactctctacgtcagtggagcgcagggaggggtcttcctccgtacaaagcatagagataagagtagaacgcggacctttgggcggcatgtcgccggcgcggcggttggaacggaggctgacgagcggcggcggcggagcggtttg

SEQ ID NO: 153087 - DNA, 376 bp, Zea Mays
tgctgctggcgcttaggcgccgtgttcataggtggcagacatgagctgcagggggttttctatctcccagagggaagccaacaacggattgattgctaattgcttaatcccaataggcttgtgtacaaggtacttatagtcccttaaggggatctaatctaatcctattcccttatcaaataagggaatcttatccatataactaatacgaagatctcatctatagatccaatctaatctgaaatactaatctaatccgaagtagtactatagactaggcttacgaccttcgtctttgatattgtacttcggtcattacacctcacctctcccccattgctgggtagtcgcggtcgctgcctccctttcagcccct

SEQ ID NO: 153088 - DNA, 481 bp, Zea Mays
cagaaagctccgaacggggtgatgaatgctgttttttcctcgtcttcttttgccaaactaatctgatgacacctagagtagtaatccaagaaagacaacatagaacatctggcggttgaatccaccacctggtctatcctaggaagcccgaagggatcctttagacagtgtttgttgagattcgtatagtcgacgcacatgtgccaatccactttattctttttgagtacaagaccaggattagctaaccactcaggatgtaacacctctctaatgaaccctgccgcgaccaagcgagccagctcagcacggatggcttctctcttgtcgggcgtgaagcggcgtaatttttgtcggattggcctcgcctgggggtagaccttcaatttgtgctcggccagttctctcgggactcccgacatatccgcaggttgccatgcgaatacgtctcggttatcttgcaaaaactggacgagcgcgc

SEQ ID NO: 153089 - DNA, 987 bp, Zea Mays
taactattaggatttctacttcaatttgtcattgtcctcatattcattagccaatgattcatatcaacaattgccataacaattcagggccagctctaatctcaccacaaaatgatttgtgtttgatagcacaaccaccacaaactgagcagagcagagcacgcaagcataggccagcatggaatacacacaaggcagatcacaaactagttgctacaatgaaatgaatccatagagaattagcacaagcattcatggagcagcacaaaaagagagcgctccacaccaagcgctggagtctacaacaggagaaccaaaatacctggagcttgagtctcagatttgggaaggttgcagatgagagctggacggatggtgaagagccgaagagaagtgacggaggacagctagactgcacagctcactaaggagtgaggacctaggtcacacatgagcagctgagttgacatgcaatggagaacaaaccggctgctggacaatgagtggttgcgggagagaggaaccctaaggttgtgcttcgttgctttcattagggcctatccagacttgtacagtgcaagctcgtaacgtttggttactcaaattgggccttaagcaggcttagagggtgcagaagcaggctccaaaccagcattatggagcatgccaaaattgattgtgctagcttatgtactcttgcacaagccatgggtccacaagattgaagtgccctcgcgtcccaggccccttaccatggctaacctccacctgtaccccgtcccttcaccaccccctcctggcacccaccatgacaccttgacacttcccaacacatagcagccaccgcagatctggcaaccaaagatagcgagcccccatggcccttgacaaggttgagatccaggtgtaaagcgagggatcccttttttctgacgataaggcgaccaatcccttttttaccttttaagcggtaaagtgtaaagcgag

SEQ ID NO: 153090 - DNA, 361 bp, Zea Mays
cacaagtgaagcaccccttttccaccctttgtgtgccaattccaaattctgtgaattccagtgaatccaagtgacgcaaagtgttcctatgtgcttcttgagtatccttgcaggttcctagctccttcgggagggttttcccacctcaaatagccatttcccccaaaccctaaaactccgccccccacgtgttcggtgaaatgcccaaaccagccaaaaatgctccaattgaacccaaatttttcaggcaccttcacaacatctccagtaacatattcgcaaaatttcacgcccatccgatattccaggctttaatttcaccaaattccccgtttcgagcgatcgtttccgagccgagtgc

SEQ ID NO: 153091 - DNA, 659 bp, Zea Mays
gaaggggtattagctcattctagccgatggatcaccaacagacggttcatattagatcttaggttatacccaaccgatatgcactcaacgccactggatcagggatccacggcctgcgaggccaccacgccagcagctaccgccagacgtccgatcgaatctgacgtgtaggatttaattacatgaaggggtattcgggtttctaatccaatccgtttgctacaagatcaacgacaccggtcgcatctccttccatctccttcctctcaacgaacagtgccgccggcgcctcctgcccgtgacgacgctcttgccggtggagccaagctcgaatctactcgatgcaagagaaataggacaggaaagcaaatgttatggcacacttcttaatgaagaatatggcgatgaccatgctgcccacgaactgaagcggtcccatggcgacttccccaccacggcgagaaattcgccagtgttcttgtcgcaaatccacctgggtgcggccacgaccaccacccagtgaacgtaatgaagcgcttaggcccgcactcgcattccgaacgacgatggaggcgaggttccatggcgcactgcggcatggcggctccgcccaatcaatggagtgtgattcctcgcagatcgatcgtagccccgcacgg

SEQ ID NO: 153092 - DNA, 335 bp, Zea Mays
ggccgcggcaggaagcagcagcaccacccgccgcaggccagcagtgccgccgcgggcgacgagtccgccgtcgacctggaggcggaggaggggtccgaggcaggccggtcgtcgttctctggccttcttcagagagaggagtcggtcggcagcgtctctgatctaccagatgtctgagcctgacggattcttttgtttttgttgcctagagatgcagttttgagcagtgagggtgggtgtaacttgtggtggtgcctagtcaattgtaagtgtgttgtatagagtgcattgtgagttgtgactacttttgttgatatacacaagctgattgttac

SEQ ID NO: 153093 - DNA, 467 bp, Zea Mays
gggaaactagagctagggttctatgagaaggagaggggaaccagagatagggttccgtgaaagagtgaggcggagccatggaggcagcgttgttgggatggagggacttgaaccgtggtttgattacaaagaaatatatgggtgtttttaagaatgttaggcacaacgacgatagaagccagtttccccacgttaaaatctaacagcaacaacattaattaatcgtgttcttgacgtcccttattaacgaaagcttctagtaccttgcatggcggtcatggcagcaggacgacgacgggttagcgtcagtcatgatgactactcgagttgattgctactgctagctagatagatagagtagtatatcaccgattcttgctctcttcctcccctgcggcgccgtggcaaatccaccacgacagggacggccactccatttgcacattcccccattccgatccactgca

SEQ ID NO: 153094 - DNA, 304 bp, Zea Mays
gcaccttgttcaatggcttcctctgtcacaaccagtcccgattgtctcatcacttcggagatcggggcagtctcggtagcttcggcctcctctccgtcatgggtcactctcgcagttgaacatactctggccatctgatgttgaatctcttacagttcttacgaagttgatgatttttacagttttgacgaagctccctcttatgccgaagctaaatcaaaacgatgttttgctcgagaatgcgatgaaaaagcttcagctatggttaaatttttcagcagcacaacagtgcaatgaatgctat

SEQ ID NO: 153095 - DNA, 563 bp, Zea Mays
gcttggaattctcattgttgtgctaaagctattatcttttgaacaaagggtgatcttgcgttgtgaacattagttcaaagtagtctttgttgtgtctaatctctaatgtttgtttgatgcacacctctcagatcgtgccgctaaaacatggtactaaaataggtgataaaaggcgctctttgctgtttttctaggctcgtgggtaagcatggtattttataactgtgtttgattctcaatagttttagctgcagatcatctatagtttttcttcctttcaatctttaacatggggccatgggcagccattcccctgtcagttcaggaatgcatcggtctttgaggaagactgaatgtagtcttcattgtatggaaggttgtcctttaaggttgcacacattgtcttataccctgataattgtacattttttatgttttctggttgcaaatcacagctagttgatataggcacttctgtgattaatgggtgagaaagcagtttgtttatcttccatgccagttttcttcccattttatttgattattttccacattggacaaga

SEQ ID NO: 153096 - DNA, 563 bp, Zea Mays
attaacatgtgatcttttcaccattttctattagtttgggcaattcaagctccaggtagcaaattgagctggataggtgtaaaacacagtaaataacacctgcctgtagataaggcggagccagagcaatatcttggcctcagcagccgttgttgacattttcggttactagtcaaacatgtgatgaacagatgcttgcaaactacaaagtcatggtctagactgtggtgagagagagcaacacaattagcaagctggctttggcatagggtctggcatgcgctcaacgtggtcaaaccggtccaaatcaacttcagcaagcacatgcctcaatgcctgcaagcgagaaagaaggttagtcacccttaatgacatccgtcttgagtttcgttcgatcctatatataatcccatcggaactggttacattctggaatctctgaatctaatggaaatatgttaagaattcgtacccaatccaaggcctatgcccctacaaaatccagctcactcaacattgttagcttgctgcgttattgctgttaatcatcctatttttcagca

SEQ ID NO: 153097 - DNA, 470 bp, Zea Mays
agcctgcagtaaacttggctttccgatccctgaccgagctagaccgtgctctgtttctgtttctgtttctgtttctgtttcttcttctctggaactgcacggagaacagggttcgatgtggacgagacttcactggacggccacgctgacatcgaaggcatggacgcttcagccgcgcatgtggcgaacctgctgtcctccgagccatctgatggtacgtaccgtacgtactagctaactctgaacaggattgcaatagaacaactaactgttaacgctgactgactgacgagaaaatattgcaatgcaatgccagtgagccttgggataggagggttcagcatgggcgctgccgctgcgctccactccgccgcgtgctacgctcacggcagattcaccaacggtgtcgcctatccgatcaacctcagggtcgtcgtcggtttgagtggctggcttcctagctccaggta

SEQ ID NO: 153098 - DNA, 767 bp, Zea Mays
agataaaactataaaaacgaatttagatacatgcacgtatttggtatttgtaatttgatactagaattttatcggtatggattcggacagttcagatttttagatgtccatttccatccctttcctgttcggcagtccgggcgcgccgtgcagcagcagcatctagcttctctcggctctcgatctcgttccttgttgtttgcgccgccgcccggccgggggcaacgtacgtgttcgtccaaggagacaacaaaagcagaaagcacgcttcctatatacagcatataatatatatagagtcgaggtgatcttttatcatagccttttgtacgcttccgccaacagattactgatatattttaaattagatacgagagagatgtgtagattttaagtaactatatttaaaacttttatatattagttggtattgtcaatgggtaattattggagatactctaagcatatcaaggcaagagtaacatctgctgttaacccatcacaattggtccaggataaaaaaaaacaccaaacacatgcaaccaaaatattgaaaaatggtagctactcatgataagtagaaaaaatttatactttttttggggacctattactatcaaacaacattgataagacagtcaaattttcctctttgtatttatgatcagattacaaattaaaaacactatagaattaggcaaaaaattccttatttctcaaaacattattcccaagcaagggacccacaaagtttttttaaactgaaa

SEQ ID NO: 153099 - DNA, 428 bp, Zea Mays
ctagttttgtggaaaatcatggcattcccactacacacctagaaactcctttggtcacccgaaccccagggtcagaccttctatgccatctcaaatgctctcaagtcaggattcttttaagtggggtagtgttcttggcagacttagctgtcttgccatcctaagggattgatgtgatcttaggaatggattggttaaccaagcacaagggcatcataagttgcgcagataagaccgttcttctcactgaccaccaaggaaggtcagtttcatgtcaggctcaaccaccctcccaagatccaatggtgtttaatcttgcagcagaaagcatatctgtagtagaagaattcatgcatgtattcccagaagaattgccaggaatgccgccagaaagagaagtagagtcctacattgatctaatcccctgc

SEQ ID NO: 153100 - DNA, 610 bp, Zea Mays
ccacatcttgtttccaagccaccaaaatcccaccactggcgccaacagcaggtagctcgataaaattaagaaactcagagcctaaggctgataggaggacccctctggtaacgacatccaatttagtttcttgtaagcatatgatatcaatttttgaggaagcaactaaagaacggactgagtcttgcctagccgaggaatttaatcctcttacattccatatcagaacacgttccggattcattgacacaagggcgaaaagaacaaccaatggaaaaaacaaagcagatcctcccaaaccctacaagtggtcaggaagctgccagccaaacaaggctgcaagggcttttacatgattattagacaaggatgtcttgaaaagatcaacatactcctcttgagccctctggtcaattcctacattatcagcaattatcccaactgccttcatgattttcttggtagcacgtctgtcaagatcagaggcattaaattcaacgcctactccaacaacactgcggctgcgtcgtggtaccgatctggagggcaaaatgttgtccttcttcttcaagatgactggaggagcaggaagcaatttagaaggttgccg

SEQ ID NO: 153101 - DNA, 341 bp, Zea Mays
ggggaatgtgtccgacttcaagcgcaaggaaaaagtccacaagtaatgtgagtaatcatccaaaataagtagataatatttattaccagaaatgatcaaaagaacacctagtacaagagatgacaaaactgctagacaacttcgacatcacatcacgcctaggatggccaagacggcggtgccaggtgatggacgaggtagcagcagttagggcatgcatggtggaggtcgaggaagaggaggcgggcaggcgaagggtgtacaacggcggcgagcaccagggcgggtaggcgcgtgctgaagccggacgggccccacgtgtcgcgtggtcgaggagggac

SEQ ID NO: 153102 - DNA, 573 bp, Zea Mays
gccgtcgcacacggctgtcgtatccccaagctctgcactctggcgccgcctcctctagccctgcccgcttgtgccgacggcccggcgccacctcccgcaactccacacggcggtaaccccaactctatccgctaacatctcagcacggtgaacccgccactcgcagccctcccgtctcagatccagtttgattagttggttatttgtgcagatcctacagtttgattagttagttatttgtgcagatcctaaccaactgtgatcgctgctgctgcggcttgatcagagcgcgttctctggtgacatacctctggagattgggcggctgcagcagctctaaggctgaccttaacagcagcaagtttgaggacaactacagttagccaatatgttttctgtctatgtcctcgcgaagtactagagcagtagctacataccgtggtttgtccatatcctgttgttagatgatcaagggtgattagatacatgttctggaaccaatgttcagatgacaaattgcaaactaaacacccttttgttctctatctttttttttttgcaattgcaatgcgt

SEQ ID NO: 153103 - DNA, 874 bp, Zea Mays
gtttgagggctcggattataagaccacatcacccaaccggtatgcgctatgcaccgttggatctgtgatccaaggataggatttaatgcatgagcgatctatccagaaccgtggattacataatcgacggttcacgctatacttgaccgaatcgttacctctggaatctatctcgaccgtcaatatttaaatctacggttcctggtaactctcttcggccgacggccaggatggtggcgcaacgcgcacccgcggtggcggacttcgccggagctggcccgaggctaatacggtgtatgattctctacgcggaacacgtctaaacaaagcggggctcaaagcgagactatagaagggattcgtaccagaaatcaagatgatgtgctcacagaaccaggcgtggagcggacaggagcgcaagccgatctccggcgagcaattcgcgcttcaacctccaccgccagagtccgccaccgccactgctgcgtttggaccgagctagcgatgcttctacggtatgcaccccaccgatgtaacggcgcaacaccactgcccgcggcgctccccttatccaacggcgatggtggagtagcgtggacatgccgacgtcacggggcccgtggaagaggagaggcttaggcacgcgcaggcggagcgcatcaataggaagagcggtctctagtagaggacgcgcatcacgcgccacggtcggccatggcggagcggcggtctgagtttttgctaatgcggcggaattggagctggcaatggacggctcagggtcggcgctagctagatggagagggaagggagtccaggagcacgactttatagctggatccgaaatctggggcacgccatggccaggaacgcg

SEQ ID NO: 153104 - DNA, 441 bp, Zea Mays
gggggctccaccgggaggtcagacagtgtcgcctgggtccgctggtcacatttgcggtctagcggcggtcggagaagcgcgcagtcaccagaaattcctcgccgaggttggaagatccgccgtgcgtcgtgggtggcttcattcggctcccatctctggtgagtaaacaccacaccacgttcgctcctcccttactaatgcgtagcacccaacagaatcgtgtttaaggcgctagaaccgagggctccggatggccggcgatggcgccgccgcgcccctatgtggcgccgccgtcgggacagcctgggattggggagctgatcgcggcccgtcgatcgaatgatcgatggctcagattagaagtaggaaacgtttcgggtcagcaaatctgcaccgtacgatctgaaccaggggctgtgattgaaacttacctccattaaa

SEQ ID NO: 153105 - DNA, 307 bp, Zea Mays
ataaagcatgagtgtgtgtaacatatctcggcttgcggtgtataggggtggagcctaaagacaatggtcgatagaaggtgaaggtaatgtgggtttgtgccgatggattaggagtggtaaagaacgaacaatgaaacttgattgtggtactgaagaagctgagtgattagctatggtggttcacaccttgtgaaaccaacagatgcgaggacatagcgaagtgaatcgtgttgctagcatgatcgagaactgatagggcgtgtacagaatgtggaggatgtgtgtggggtacgctaattgcggtggt

SEQ ID NO: 153106 - DNA, 429 bp, Zea Mays
tttgatctgctttgctctgaatgtaggtgttaggcagtgcaaatgggatcaggatatgtgatgatgatatataaagtggtggtttaaaagctttgatgaaattacctagtggccattgcaagtgaaatttgcttagggtgaccgtgctgggcatggaaatgagcctgaacctatgaatggattgctgatggaaggcaaggatgttctaccttttcctgaattgcatgccattgagcaagcgaggcagctgcgagtacctaactagagctgaccctctatcctcctgaagcatatttaatcagcgctttttgtttgtggttctgcctaggaagatcatttggacgtgacaatcagcacagttacagttagagcatctccaacagtaccttaaaagaaatactacgccagccccaaaagaaaatcacttct

SEQ ID NO: 153107 - DNA, 484 bp, Zea Mays
gcatgatctcccattctattgatgtctcctcaaatgctgttatcttcccagattagatcttttgtaaatataatgcaagttgcatttttaagatttgtagtttgtttgctactggtgaaacagtattgtcctgcggttttatcattgtatcatgtgaatagtagagatggaaagcaagtcatattttcatgtcaactgatggatgaatctaatatactaagtggttcaagttcttgatcagaaattatatgttcaagtatgaaactcttagctcattttggtgattgttgttctgcggtctgccgcatcacattctgtgtttgaaatgatattttgtcaacctttcatctgcacttctaatgaaaaactagctcagtagtgctaaatcatcaacacaagatacaattctaggcatctttctgttttgcatgtagagctatgcatgtttttcattatcatcgtgtttgtgcatcactcgtttctt

SEQ ID NO: 153108 - DNA, 416 bp, Zea Mays
ctatgatgagcaaggatcttaacaaacacgtttgagtagagacgcgtatgatattgagcatgcacttcaaccgttcattcgagcggttcaacttcaacgaacaatatcaaaccgctaaactcaaacaatgttcgagacaaacgaagatattctaagtgttgcaagcacctaaactaaaatgtatccaacaaacgatacactagataatcaagaacgggtgagatcgagtaaaaagaaataaaatagggtaatacctcaatccgaagtttgaatcacagaaatcccaacaagagagagggagatgatggaggaagccgagatgaacggatctccaacaaaacttccaaagattggatggcacaaatgggttttggagtggtgagagtgtgaaggagagagaggaaaatgtgtaggcg

SEQ ID NO: 153109 - DNA, 539 bp, Zea Mays
ttgctttggagtcggcaagccaccgaagagtcttaaagacgacgtagagccaaaaaaggtgaagattaaggttgggtgatctgattggagtccctaccagggaggtggcgtaggttgtagggatgagacgttgtagggcatggatgggtatggtttgaagatgtcgtggctgctagcaagagacagagcaagagatggcgctacagtaccgtcctacagtaccgtgtgtgctgatcacgggattaggctgccagcgagaggaggaagggatggcggctagggctcctagctccctgagggaagccgacaccaaataggttgcttctatttagtttctctaggtacaaactaggccattcatatagagatggtttccttctggttcataaccggatctcctatttttactccaatacttatccaatctatctctaactagatctcctatttattcttcccgatctgccttatctaattctatttttactccaatacttatccaatctatctctaactagatctcctatttcttctcccta

SEQ ID NO: 153110 - DNA, 620 bp, Zea Mays
cttgttaaatgtcctatgttcttgctgtgataatctggttgtaaagaagaaacaagaagaatactcactttgttacttccaagctctttgtgcatgtaaacctactagtagttgacgggcgtctagcgcacgccgggttatatgacctttaccaaaatttaaaaaggaacagtaagtatgaaatgtctttaataagtagttagtacgatctggaggtttgcattgtacttagttacaaactgatatcgtacatagttttcatgtcaaaatagatatgagctgcgccacataaactgatcctacattacataatctgatattggtgtttggtaccacataggaaaactgatcctacatcacataaactgatcctggtgtttagtaccacataggaaaactggtcctacatcacataaactgatcttggtgtttagtaccacataggaagggttgtttatacttgcgagcattatatttagttacaaaagggtaggatcaataacaaaaggttgtgcaatgtatacaatggttgaatctcagttagcttcgtgttgttgcataaatcattcttggtctttttggtctgtggaatctttgattatgaatgatccttgtttgaa

SEQ ID NO: 153111 - DNA, 355 bp, Zea Mays
cttatttcttgctttacttttgcaacttcaaaattttcattagcctcggcaagttttttctgaagggtctcgacttcggctttatgggctccagattgagcattgaattttgcttcatctttttcactctatccactaatgaaagcataattttatctttctctaaggcttcatttcttagtttgataacctctgaccgaaggttgccgagggctatctggcagctttcatcttcagcattcttctgcgccctcaaagcgttgctaagaattaagccctgcaaaaagaagggaaataaagaatcagcacaagaataaaagacaaaagataatttatttataagtccataactttt

SEQ ID NO: 153112 - DNA, 1454 bp, Zea Mays
cggcggcgctggggaggtggagcgggagcttgacaagagcttcggctacgaccgccacttcgccgccaagtacgagctggggaaggaggtgggccgcggccatttcggccacacctgcctcgcgcgcgcccgcaagggagacatgagaggccaggtcctggctgtcaaggtcatctccaaagccaaggtcttgctattcgtgatctcacactgctcttttactggacgcacggcacgatcttacctatttcaatcggctcggttcctccaccggatcatgaacaaactgtgtgggatgacataattgccatcctgttgtgatcttttttaactctcatttagtagatcagtatctctgaagtgccactaccataggtgttgcaatcataagttcatgatttgcttcttggctgacttgcagggtgatcagtttttttcgatggtattggcattggcatttccccgcagggttagaagtacattgcagagatcttgtttcagcaacgccgcatttaatgatgtgcccattttcatgatctgagtgttcaactgttcatccatctatcacctgtttcatgcttttttgttctttctgtaagctatcatggcatagtagtttatgcagcggtagatcactagcttggcagcgacagagttccttgtgagacctcatagaacctgttcccgagtatctccatcatattgttgttcctgccatgagtttaggagtcccttggtccattctgcaccattttattatatgatcataagtagaagaaacatagggaaaagtgtaggaactaaagaaatgtctcttagattcttggtgccaaagctgaggacatgttgatattggggactgctttccactgacattgttctgattgttgaattatttaattttgatctcagttttacttggcatctaaaatgtttgtgcagcaagttgtcgagaaaacctagtgtacgatatgcgacacagaagaattctacgtgcatggctgcattgatgttttcatgcatgtatattgtcgttttttgagcgatacgacattaattaattaatgactattttggcctgctataattttcgcttgtgctactgaaattatttgagcaggagatgtatttattgagtctattgtgtttcttccttctatatagttctttatttgaattgcgtgcaattttattccttgttacaacatacacacatacatggtatatactttttgaggctagaagctaacagatgctcaaggtatcctttcaattaagattaaggtttctcttagacaacccatcagttagcgctactttcctagcacctagctcactgcaccaggggaaaaatatatcttgatctagatttttatatttagtttgcaaaattcacctcattcctttgtttttctcttgcagatgacaacagcaatatctattgaggatgtgcg

SEQ ID NO: 153113 - DNA, 519 bp, Zea Mays
acgagagaggctaaggaaacaaagagactaccctaattcgacccaaggtatggcggagagtgacttcaagatctacgtctaccgccagtcttttgtgttgtcgttcatctgcgcctcctcaccgaatctcgttatacctcttctccaagtaggcatagggcactgcccttttggccctgcttaaggtaaatcatcagattcacatgttatagtggttagaggttaagaacaagatcgagtaggatctaacactacagtgctagtttttggcagacctctctttaattttccttttggaaaaaacgacaaaatgtagcttttcatgcatttaagtattctatatttaggttcaatgttggccaaagtacgttgcggattagttttctcaaggcttgtcgttcacaaaatttaagggagctgctggttcatatatgtaacttacacatgtaattaatttaagcggccgaacagagacatgcgcttggtgtaagtcggtacataaaatatcatcaatttgga

SEQ ID NO: 153114 - DNA, 504 bp, Zea Mays
gaacaaatgtccaaggagcttgaactaacctggagcaagctgaccacggtgaggtctctttcgcggtggcggaaacacagattggggaaactgagcaattcacgggcgttagtggacaattgaagacaagacttggcggcttagatgtgtgattaccctgcggagctcacgacgggctcaatttatagcaggcaagagcggtggccggtgaatttggattgagacgcgcgacggtcggaggaatgggaggtcactggcgcagtggattcgtggagaataccttggcgggctccccgggtgatgatcggatggcttaagcgagtcacggcgatgtggtaaatgtgcccaggcacgtggcacaaggtcgtgaagtggttgtctccggcgaacacatctgaagcatccgtgactagctcggtacggtggtcggagtaatttagtggccggagtatatccacggcgatgatatttactcaaccccaagctctatccaaccgatccgag

SEQ ID NO: 153115 - DNA, 497 bp, Zea Mays
atcacattttgattgaaagactagtgccggtaatgttccgtggatacttcagtcccgatgtgtggaagatatttgcagaactcagctattttataagcagatatgtgctaaggaaatctcaaagaaatcgatgctgaggtttgagaaggaaatcgttgtccttatatgtaagatggaaaaagtattcccacctggattttttaattgtatgcaacatttgcttgtgcatctaccttgggaagcgttggtaggaggacctgcacagttcaggtggatgtatagtcaagaaagagaattgaaaaaactcagaggaatggtgcggaataaggcaagggttcaggggtgtattgcagaggcattcgcagccagagagatcacattattctcaagcaagtatttttcagacacaaacaacgtgaatgcgcaaatgacacggtaccatgttgccgagcaaactccaatcactgatctatgtgtttttaagtgggacggtaaag

SEQ ID NO: 153116 - DNA, 1511 bp, Zea Mays
aaatagaagcccactagcccactagaaaaccctagtcgcctggacaatttctggtcgatttaccatctagtcggacgactaattgcccctaatcgacggctagtcggacgacctgatactctagtcgagtcgtccggctgatcaaccactaccaggcgacctgcctgactaatcgcgattaatcccgattagtgggacacttgaaaacagtggaaaatttatcaggggaagtggaagggttattttgaaaactgatgcacgatgggagggttgttttggaaaattatcatgactgcttgcacggtttggaccaagtggttggtttgcacctgatacattccctttacacaatatttactaatgatggattttgtagtgcagatgaagactggatgtgttgcacttgtattatgtttaaacataagtgttgatccacctgatgtaattaaaatttccccttgcgcaagattggagtgctggataggtaaacttttagttgactatatatttccaaatttcaaattagttgaaaaaatacagtaaatgaactgcttttcacggtgaaaccatgtctttcttttttatgaattgcgtttctgaatgccagatgagagcatattgttaatcagaagtacacaagtcttttaatcctaggcacattggggtaggctggagatgaaacccagcatgagcaccaaccagaagtaaaaagagaagggaaaaccttatacaaatatacacagcgcatcaacagtatagtaacattattaaagaatctaaatctagacttctagagtcttgttcatggttcattcttgtagatagctcatagctggttttcatgtgcttccatagttccatccaaggaaattctttgtgtgcattcggtccttccaagtaacttctcttttggcatattgctgatttaaagtaaatcacaagaaggaaactatctttcacctacttttttcaaaatacactgttaaaatctatattctgaaaatgagattgtttttctcaatagtttttagaggaatcttccatctgtttaaaatttgaagttgagaattgacatttaattgtaaaggaagtgaatttttctaatgtaagatactgcacctattggctgtggccatggatatataaacttatttattagtccttgggatggttataatgtcaagcaagtgttaccagactttaggcaatgatggtaatttatatttgttgataggtttgcacttcattactgttattaacttattacacttggtgcagttggtttgtgttatgttcatagacctattccttccttttcagaccctttctctatgacacctcttaaagctcttgaaagtattggaaaaacgttgcattcacagtatgagcgctggcaacctaaggtaaagaacatgcttgtctgtttaacttcaatgttattttggtgaggattatttgcatcttcatgtcctatttctagtggcacttgcaggctcgatacaagcttcagc

SEQ ID NO: 153117 - DNA, 409 bp, Zea Mays
cgcaggcagaggcgaaagtccgaggagtcttcttaccggtggttgtgtcgtgcagtccccaggccgcgacgaagtgcggttccatggcaattgttggcgtcggtgagaaattggggcagcaccaaaggcttcttccacccgcgagtgcctcaatgatcgctgtcgtgccccgaggaagcccactgacccgagcttgcgcctcaaacgatgacggaacacaatttccacggcggcggtgtctcttcctcacaattcgcgacggggaaggatgatggctcgactagggaatcagagaggcgaggcaagaggtcgcggcgggttttatgcctcccaaggcagagtccacctcccccaagcacacggcagaaaggatgaggatccgggtgaggtttcgccatttctgttgaaa

SEQ ID NO: 153118 - DNA, 734 bp, Zea Mays
aaggatagagttaaggcaagactcgcggagtggcgaagtggagaaaacaatcaagggtaagataggtaaggttccaatagaagggttgaagtcaaaattcattacccaaggaagttataagaaaacaacgagatcaccaaggatgtgcaaaataaaatgaccgctcatggatcatcgataaagaagggtggtcaagggcatgtaaaatgaaataacttaaacagaccttgggatgtaaaggtaagtataaaaaggatgagagtatgaaagatttcaaggagatgagcataccgataccaagagacaataaattgctgaaaggtagcgacttaacaacaaaagaggaaagggtctcaaaagacaggaaggtcatggacatataaatgaaatgtttaagtaggtagtagaaatttagaggcaagtatttgaaacaagagtatggaagggatacaagcatgtcaataccaaaggactagagttcgccagatggtagcaacttaatgacgaaaaaggaaagaatcccaaaaagacaagaatgttatggttagtgggcatctacaaggatgtcgcaagcacaagagtgagatcagatctaatagattaagagaagtatagaccaaactagaataaaatacttttggcaagggggcatataggagcacaacatagaattagtcgaggtgactattattttgaagcagaatcaaggatgaggtgaagtaatgatcaataaa

SEQ ID NO: 153119 - DNA, 403 bp, Zea Mays
atctgctgagatcggcttcgagctttgggaagccaacacttttcgataaagtgctgacaactttcgccccagtccggtctcgaaggcaacctaagctctcttcgtctataccaccgaagaacagcgcccctagctggtacccgcaagatatagcatagtccctcagctcttctttttcagccttagacaactcttgcccaattatgttttgaatgttgaaatttctttcttccgaagcatcttcggcaagctccttctcttttccaggcatcttctcccttttttcaggcactgcagccggggcttcctcagcagctgcagcagtttcttcctcagccatattcaaaatcatttcatcaatgtcagaaagtgtgttttccaaatttgtggcttcggctgctgc

SEQ ID NO: 153120 - DNA, 420 bp, Zea Mays
ccacatgatgcacgcagcgaaagccacgggctcgtcggtgtgatgttccttgacgaatacgtgcaggtgctttctctctctcttttctgcaggaggaagaagattgccaccccaacctgttagcagctggcgtggggaagaagcagagaggggcgaacggaagaggaagaacagagagatacgacaggtaaggtgtttgtttaatttcttcataggtttttcgggcaccgtatccaggtgtttatatacgttgactgcttcctctcgttcttacttgggctaccattcgattacaaggccggatcacttgacccactgtggcccaattactctagagtttggcttcctttggcgcttcagcatttccggcgtcccgccatgcttcttcttctcagcacttctctttttggcgtccacagc

SEQ ID NO: 153121 - DNA, 313 bp, Zea Mays
gcgagaaggaatcgtttgcggaggtggagaagcgaagcatcatggatggtgccctcctccaccccttcccccacaatggcgccagcagcaaccatcagcgcaacgggctcaaggaaggcagcctccacatctgctacaaacaaggcaggccccgtaccaatcccatcagaccagatttgagcagagaaggtcatatccaaggcaacagatggaatcgggatcaaggaaattacctgctggcgtagagagagccattcctctgtcctctggtgaccgtgttcatctgcaacagcaacaacaggttcagtcgcag

SEQ ID NO: 153122 - DNA, 792 bp, Zea Mays
cgaaactcatgtcaagaattataatacagcggcgcccacaagcgtacatatagttcagctattgtataaatatacttggctccgaggtaggccaggcagcacaacacacacaaccgataagccagctaggtggcatcgtcgtcttctttccctgagctactgatccaatctttggtttgaattgttaatcacaagctcggtcatggctccgtccagcaagctagtcaagacgaactcactcccgagccaccagcgtagccttgtccaaccgctcggatctcccaggcacaagcgcgtctcggccttgttccgagcacctgagtcgtccctgctccaagaagagtttgtcaccgccgcctccggtgaagctcatcatcaggcaagggcaaggcgcgcttccgacgagacgctcgccgtgcacgctggggagaagctcgccggaaagaaggacgcggacgtgggtggcactggaacagagacagactcgacggccaccccgatcgtgagcggcacaacgcactggttcaagagctccgaggacctcatagccttcaaggaaggccggcggcacagcttcgagtatgggcggtacagcaacccgacggtgaaggtgctggaggagaagatcagcgcgctggagagagccgaggcgaccctggtgacgtcctccggcatgaacgccatcacaacgacgctcctcgccctcgtcccgcccggcggccacatcgtgaccacgaccgactgctacagcgaggcgcgcgtgttcatccgtgacaggctctccatgatggg

SEQ ID NO: 153123 - DNA, 449 bp, Zea Mays
tagatctcttatttcatggtcttctaaaaaaacaaaattcggttgctctctctaccgccgaggcggaatatatatcagccgaaaattgttgtgatcaattattatggatgaaactaactctattggattatggaattattttcaagaatgtgcctctcatgtgtgataatgagagtgcggtaaaattggctacaaatccagtccaacactcaagaactaagcatattgatatacaacatcacttcttaaggcatatgttggaaagggagatatctctatttattacattggtacggatgatcaattagccgacatttttacaaagtcattggataaaacgagattttgtactctaagaagtgaaatgaatgtaatcgatctcttaaatgtggcttgaagttgatcgcacatgtgcagtattgcatttcggctctaaatatgctctctac

SEQ ID NO: 153124 - DNA, 496 bp, Zea Mays
gagaaaccgggctgagaacgccgcggcaacctctcaccgccactaccactcggggtcggtcaattgggttgggggagcatcgaccgatccctgggaaggttgggatagcgtcacggttgttgaagggtccgcggggtgccctgaattgctcaccagtgtgtgcagatcaccgccgaccgccgctcgccgtggccaggactgtttgtgttaccaacccccagtaagatatccatcccctgattcgcaatctgctctgctctgaattgcggctgccggtgcggtgtttcgtgcgagaatcgtgtgggggctggaccaattagcaatggcgtcgtctcgagggcgggcgcaccaccgtcttcgtcttgagggaggaagggatactgtggggcgttgaacgctcgggcaacggcttggattaccccagggcataccgcttcgttggattgatatgggccgtggatccctggatcaacgaataggatcagatcgcagtctt

SEQ ID NO: 153125 - DNA, 480 bp, Zea Mays
aatagaggttgcacaaaatcttttctgctaccatggtgttccttgggcacatacaatacaaccagcccagtcagcatgtcatgacagcttgtgctatgcacccagcggtagaagctgcttctgttgtttacgttcttgctgtgcatattcagtattagataatggtgcaaacaattattttaggatatggttttctatttggagcagcaattttcaaccacaatctccagtggtaaaagaagtcgaagatattacagtattggatttcgaaaatatcagtaactcccctacctgtatgcagttgcatcaatatttgaccaagtgaggaagataatgtagtgaatgatccacgcttagacgactccttgtactctgcaacttgtgtcaaaactaatgcttgccgttccagcatggtagcaatggttgatgctgcctcaacacgtacctgcgtgtatttaattcaggccatatagatagtgt

SEQ ID NO: 153126 - DNA, 305 bp, Zea Mays
tcaaggggtcgtccgtacgcctgagctcccgagggagagaccgcccataccgtagtggttgtaacagcggtggggtatgggccaaaggctgcttacggtgtgcatcatcgtcctggaacgtgatgacgtcgagattctctgcagcacttatctagatcaaagccctcgcttggttgatgcagaagtcttcctgaggtgccagccgagccatctctttgacgtgcgctacagtcgggcggagttgctgtctacgggattcatgacgtagtcggtggccgaggccgagctcgggcgaggcagagaat

SEQ ID NO: 153127 - DNA, 325 bp, Zea Mays
aaattattattggctatttgatttgttgcagtttcgctttagggatgtatgctttaattttggtagtcaaaaaggttgctagtccgttatggaaacctaatgagttcaactttgattgcgccactggatgaaatggtatggacttgtgttggataacaaacagttgtggtttggaatgtatcgctaactatgcagcgcaggctttaagcctcttccaggcttgtgatggaattatgccattgtgtgcatatcttgacatttgaacgtttcttttcacccacaggagttcacagattcaattaagctatttattacttggacctgg

SEQ ID NO: 153128 - DNA, 279 bp, Zea Mays
gttttgctgcaactgcaatctccttcaagtttcaagggcggcctgggtgcgcagggatcctccctccccgtatctccacgcatataaactgacacatcaaaaggcctctgagttgcatcggcacgtgcaagctcgtctccatatatacagcccaccaatcaccagttaaatatggtcaacgaaacgcggagggcctagacgcacgctaattgtgttgcctgactgagcatcgctttcccagaccagtgctaattgtgttgcttctgtcagtgctcggct

SEQ ID NO: 153129 - DNA, 566 bp, Zea Mays
tggggagaaaccaaaattcaagctctcggaggcacggttgctaacgattgttggtggctaggtgggtgatgatgttatgcagctaggggagggctcaatttataggtggagcgagcggtggccgcgaattttggacgagacacacggcggtcggaagtgaggaagaatgctggtgcagtgaacacgtgttcaccgtcgtggcagtaactccggtggtcgacggggagtttagagggagtcacggcgatgcgatggcgtggttaggacacgcggtggccaacagcgatggcacgacgacgttgagcaactttacccgcgggcggtgagccaggggaggagtaccgcggctgaccggggtggcttccagcttgacggcggcgacgatcttttaccccgagaggttatccacaagccgcgagcgcgaatccggacggcggcaacacgaatcgtggcgaagttcgtcggcggggagctgagctggtgttctgatccgatcggctactgtaccatggcgagtgctccatcagacaacctgacagagcaacttggagcatgatttattctca

SEQ ID NO: 153130 - DNA, 563 bp, Zea Mays
cattagtgatttttttgtcattgtaaaacaaatatccggcagagagcaaaagatacccatttatccgagtcgtcatctgcagacgttctcaccacttgattggagcctaaaccataagtacacataaccagtggctcatcttcatagtcatagatggcaatgccaaggactagcccgacaaatatttgcaaacccacatcaactccagaagtcaacaagggcaatttaacgtgaacgagaacctgccaggcatgccaaaccagttcttgctcggtgcaggcagacattttcgcaagctgccggtcgcgcacggattgacagcacgggggagttgcggtaactaacatttgccgacccgaagcaccgtttcctcggttagctttgaaggttccaacagcccaaaacggcctcctctccgccgcccgtccacccacccgtcaaccgcgtctccggcgcgcccctatacctcctccgtttccttcccctcccagcacctactccaatgcgaccacacttctcgattcttgcgcgagccgatcttggccatcggcctcgctgacgca

SEQ ID NO: 153131 - DNA, 513 bp, Zea Mays
cgacaagcccactgactcatgttcgagtcacaagaagagggacgggaagaagaagaggcgcatcaagaagatcatctactacgacagcgatgcctcctctccttcaggagcttgttgtttgcctcaagatcttggcggctaacacattcatcgaagtctgtagggatccttgcttcttcttcgttgcctgccatcgaaacacaaaaacaggaaacaaacggtgacggttatccctaataatttcactacacgctcctctcaggtggaacacaggaacacactctaatgtatcttaccaaggtcttacaagtgtctgacgaaatacaagcaaagaatgatacaatcggaggctggttcgtgatacttaccaagaggtagtgaaaccgcgattgcaaggtcaaatctgtattgatcagaagatatagtatgtggagctgtaggacaggcacaatatgtatgtgaatgtggaacaaaatcgagtgcagatgagcgaagttcaataaatatccaaag

SEQ ID NO: 153132 - DNA, 625 bp, Zea Mays
ccaaggcaccttgcagagttcttttcaacctcagaagggcatggcttgcacaagcttcaccagaaggagcacaagatatgatgaagacatccccagagcattggagcagggctttttttcaagataggggctaactgtgattcagtggataacaacatgtgtgagagttttaacaactccatcatggatgctaggtactatccagtcatttccatgtgtgaagccattagaaagaaggttatggtgaggatacaagagaatagggccaaggctgagaagtggacaggaacaatctgtcctaatatcttcaagaaattaaaaatcaacattctgaggtctggtagttgtgatgtgctgtggaatggtgaagatggctttgaggtgcaagagaaagaagacaggaggtacattgtgaacttggttggtagaacatgtacttgcagatattggcaactctcaggtctgccctgctgccatgctattagctgcatctacaaggcatcaaagctgctagatgatttcactgcaccatgcttcaccaaagcagattacttgaagacctatgcacatgtcctccagcctgttgagggccaagctaactggccaatttcagacatgcctagac

SEQ ID NO: 153133 - DNA, 5021 bp, Zea Mays
tgaatcccggatgatacgtgacaggcgttttacgcacgcataaaaatatgtagtaatgtgcataaatcatgtatagaaggaatcttttgtgccacgaatcacgggaacaaatattaccatgtgcacaccgtttacgactgcataacgctgtgtaacatgatagtataaaccatgcaacatttaaatctccaccgctttgagataaggaaagacgtgctccacgttcgcgtaaataaaggcacagttacgggaggaaacaaattctaatttacagccgctcgtccacgttcgtatctttgatattggcggcggttaacggcggcggaagggagagcaccgggtggcgattaacggcgagaaaatgtccagcatcggcgctggcgatgacatgcaacctgtagcgtctgtgcatagatcaacatgtacgtctatttcaatggacatgcatcctgtagcgtctgcgatcaccagttacacagagggtgtatctgttactccccccgcgacattgagggcaccttgacatattgatgagcacacaaaatcggtagacgtggtcggcgcagataagcacattcccatgagacatattggggcgcatgaacaggatacacctcatattcttcaaagccatgtaagttctcccaattatgatactattattttcttacatactttttttaatgttgtacctatattacgttagatttaatcgctattgaatcgtaaacgttaaatttttgtgcgcagccggacaatattgatataagattgatacctaaagtcggtatgacatttagtaacgtggacgaggcgtataatttttatagtcaatatgcatacgaggttggattttcgttgaagaaatatagggagcgtaagaattgtaaatggttgaattgttcaatggaaggaaagaatgctgaaagggtagctggaaatccaaggatacataacacatgttcaaaacatagcgttgaattgttcagattgtgaaacttataaagcatagaacattgtcgaatgtagcatacatatatgtgcaactatgcataacatggcgttgtttattgtataaactggtcagcctgtgaagcatgactgtacaaagagatgtttccagtataaaacggtgataattgtatcataaacttgagacaaaacaagcataaaacagtgataattgtattataaaagtatgggcaacaatgcataacacgacgttgtttactgcataaactggtcacacagtgaagtttatgactgtacagcggtgataattatatcataaacttgagagaaaacaagcataacacgagattgttgacaacataaaatttaaatgacactgcacatcatataaagtggagtttcatttgtaaatataaacgacactgcttctatccatataccatatataagacaaattaaattgataaaaaaaatatgataaacgcataaaaaaataccgaacaatgtacaaatggttcttgtccttggcgtatcttgcccttgtcagctcttgtcaatgcttgaataatattcctatcaaaatatttgatgcgtggtgttccacgtttattctgaggtgtagctgaatcatgaagatgatccaaataatacagctgcaaaagcataacatgaatcattgtgagacataacaaaatataatctaaatgtatatgaattttgcataaaaaaatatggctacatataaaagacaaaaagtgacatgcttacaagaatgatgatggaacatccgtaaattgttgtagaaacatttgtaacgctcctagtatgtcacttcttggcagtttggcataaatcattgaatattagctggtaccagtctatctcgtggaaacgatacatttcctcagttaaaagaacctcatggttagttattccccagctggcagtagggaacaacaacctattgcacagtatcaggaagaaggatctgctgcttagatcatcgtcaaaccctttccttaaacgatcttgaagagctgcaacactaaaatcttcttttgataaaccaagtttagcccttaaattgtttgcagcaacagcttcatcaatgcctaatgccgtttctccaccagcatttggtaaccccaaaataagttgcaccgtctcctttgtaattttgagctccttccctgggccggctcaaattgtcatgtcattatggtcaagcttttccatcagccaagctaaatgagatctactgccaagtgcgtcaactctcatatcaagaatactggagaaccccctccgtgcaatagcttggcgctgtctgtcatttaaaatctggatgcttactataacgtcttggggattgcatctcacattaagcctctgctgaaaaaatgtatacaatgaatagcgtaaacatttacatctgcataatcgcaacttaatgtttaaatcaaatctcaaaacaatataatttcacgcagaaaatgatatatcgccattgaccatcaattctaacctgtcgggggggggatccactactttcctccgctttgtaactatcttcttcaagacttatggaggactgtcatcaaagttacgcttcttcgataatggcataaagttatcgtcctcatcaccagcctgcattggtttgtgtctaacagttttcgccggaacacggggtatgtcgacactaaagcactcttgagtagactgaattataatccgctttggattagatggaggtcggtctacgttcttcatgtatgatgttcctgccaaatcaaacaacacatatacataaaaaacgtaatggagcaataaaaattctgctcatatgcaacatccaattaatgtataagctggctatttcgtgcgtactggccctaaatgtacggcgagatgtttatggcataacatgttgacgtatatatcataattttgtcaacaaaatagcataacacggtattgtttagtgcataaacgtgtgagacgttgaagagtataaatttgtgtatccatttaacaatgaatttatgctgaattgttttttgataaatgaaacaattgagttactaataatgtgaaaccgatttacgattcagattgtgtaaatatgcaaatgtaagagttggcgcttgaggacttacccgtgtgtggaggtgcctgaaggccggccgatttcgggaccctctgcagtggagaagcccaaggcgacgtgcggcttggtcaatgcgtaggggacgctgaagttgacggcgggtcggactcagcgttggagacggtgctcgcgacggcgggtggattgcctagggttcggcgccgcggtggatcaaatgcggctcgttctctgcggtggagaagaacaagggggcagcgccaccttctctgcgattctgggtccctcaccggtgaagaagaacaaggcgacatcgtctccctctatgcggtggagaaggtgaatgcgacgacgttcgggcgacggggggagaatctctagggttcggcaaccgcagtggagaagaagcagatggcggcgataaagctagggttcggccgccgcgagcgttacgggtgaggagagctggaaaaactgcgtgcttggttgctggattcgtgggcccgatacacgtaatctgctgggcgaaatcaacgcgaaggcccatggaccgacacgtggattactgtttcgtaaacggaaacataagacatcgtaagatcgtctaaggaaagggtttgacgatgatctaagcattagatccttcttcctgatactgtgcaataggttgttgttccctactgccagctggggaataactaaccatgaggttcttttaactgaggaaatgtatcgtttccacgagatagactggtaccaactaatattcaatgatttatgccaaactgccaagaagtgacatactaggagcgttacaaatgtttctacaacaatttacggatgttccatcatcattcttgtaagcatatcacttttttgtcttttatatgtagccatattttttatgcaaaattcatatacatttagattatgttttgttatgtctcacaacgattcatgttatgcttttgcaactgtattatttgaatcatcttcatgattcagctgcacctcagaataaacgtggaacaccacgcatcaaatattttgataagaatattattcaagcattgacaagagctgacaagggcaagatacgcaaagaataagaacaatttggacattgttcagtattttttatgcgtttatcatattttttatcaatttaatttgccttatatatggtacatagatagaagcactgtcgtttatatttacaaatgaaactccactttatatgatgtgcagtgtcgtttaaattttatgctgtcaacaacctcgtgttatgcttattttctctcaagtttatgatataattatcaccgctatacagtcataagcttcactgtgtgaccagtttatgcagtaaacaacatcgtgttatgcattgttgcccatacatttatgatacaattatcaccgttttatgcccatacattatgcttttttgtctcaagtttatgatacaattatcaccgttctatactggaaatatctctttgtacagtcatgcttcacagtctcaccagtttatgcaataaacaacgccatgttatgcatagttgcacatacatgtatgctacattcgacaacgttctatgctttataagtttcacaatctaaacagtttatggccagtgttatgtattttcgaacttacatttatgctacatacgacaaagttatatgctataaaacaagtcgatgtacattcagattgctacataactgttatgatgtattttcgatagaagcagtgtcgtttatatttacaaatgaaactccactttatatgtgtgtataagttttactccatctttcacatattttttagttccgaagcaccacagagacctgctacacagctgtaccacctgttgaagcacaatttaaggcaagattctatttatatattttttgt

SEQ ID NO: 153134 - DNA, 486 bp, Zea Mays
ttcattttaacttgggtatcacatgaacactactaatttttacctgcgaccgtaaccatgcgcatttaggccataacaagcaaatcatcgtggttacgagcttaaccaacccatctaacacttcggctaactagagcaatggcatagcccgctaaataacatacacgtcggcttgcctattattatcactatctaagacacaacatacaccacatcatttttataaacatacctattcacatgtatattcacacatcgaccaaatcatacgaaccgtaaaccactaatctctaactcgaaaccatcatgcgcttacttcccaattcatgaacacataacgcgtattgacccgactcaagatatagaggaagcgatgactactttggcatgtcatcacctctctatataagccaaaacaatttctactatcgactaagagttctaagtattaaacacattatttctttcctcgcgcaaataaacttc

SEQ ID NO: 153135 - DNA, 657 bp, Zea Mays
gtacatctaaatgcatggcaaaaattacatacatagaaaagtcaaatcgtcttataatttggaactgaaggagtacttaaagaaagcatcaagatacaatgacacttaaagaaagcatcaagatacaaatgggtttgacagccaaaggagaaggcaacaaagtctgcagaactgtaagttctgacaccttcaacattactaaggtacgagtcttacaaagaattgcaggaagtttctgagtactttcccatttgcacatgggcttgattaatgtcatgtgacccatgctcagagagataaagaaagatttgttacctttaggcccattccttttggattttttgagagcacagatatcaagtagcttcgcacttcttttgtattattatccacatttgcagcatgagaacttgcacggcgatttatacctttgttagacatcttacttgcagtcgatttctcatgtttactgttttcccctttgttcaaatcaaaaggtgttgtgacttcattatttgcatctgatccaacaggaaatgaaggattgcttgctccaggttgttcaggagaaggtgcaggtgaactcgagatattccctttgggaatattgttagataacttgaccttcgaaactgatttggttggggtgataacagc

SEQ ID NO: 153136 - DNA, 282 bp, Zea Mays
ggaaaagaaggtgtgaaactgttcaattagcatactgttacaacaagtattagcactgaatctggacaaaactcgaacatctgctcgaagcgagaactgaatggtagtactgtgaacagcgaaagatgcataacaacttcgtgcatggaaaatttgaacctaagctatacaaaggtatgcacaatccctcatgacctgaaaggatccaaagcgaccatttcagcgctttgtactacagtaagcgaagtcactgctattcaacttaatcacaacacgttaaca

SEQ ID NO: 153137 - DNA, 346 bp, Zea Mays
ataggatttgacaacaaatacttagcccccaggttatcgcttactggatgagccatctgtggatgttgtatgcccaactcagtaaacaatttctgtacccacatgatcttggcgatggcattggttagaactttgtattccacttccgtgctggacctgaacacagtagcttgcttcctagcacttgatcagattcaatgtctcatgcacctgcacctgcaatgtcacgatcctgatggctgcctgtggaatgacgcccagccctttcgacggtagcttcctttagccctgatttgtataaacctgcctaatacttcaaataaacacaggcttgagagtattttac

SEQ ID NO: 153138 - DNA, 329 bp, Zea Mays
ctgagtcaacacccatgcgaagaagtgagataaggtggggaaggtgtcagacttacgacggaggggaagagtccagaggtagtgagagaagtcatccatgatgaccagatagtattggttaccggaaaagctcggtatcaaaggggtgagcattgtgggacatggaagaggtgaagggtaagtgattgtggtgaccaagctgacaagcatggcaaggcgaggtaacgttgccgcggggtggggaatgatcaaggtggacgagagtcgagaaaggacgtcatggctggggtggccaagacggtggttccaagtggaggcagaggcagtgg

SEQ ID NO: 153139 - DNA, 419 bp, Zea Mays
caaggacacagttttgaccgtccaagacgatcgatgacaagtgcccatggcatctcctgtgcctgttctgttccagtgtgactgcaggcctgctcctttccctgtggtgctcgtggcccgtagtcaggtgtcaagaacagagggaaatattggattccacttcaaattttgaactccggccgaacgaacgctgctggtaccatcgcccacaagaacaagtagtgcggatgacgaggcagagggagagggaaacccaagagacgtgcatgcacgatgcttcaacccgccccgccccgtcccatcgggcatcccatacaagacaggacgtactagcggaaaggtgcgcgtgctgttcccccttttcccgtcaggtctccctccctccgttcccagcagccacatcaacctcactccactcc

SEQ ID NO: 153140 - DNA, 272 bp, Zea Mays
ctgcgtgcggccgaggatcgattcgacgacaaggtcgaacacctcgttgataaggcaggacggctccttctcaccgaggaggactggcttgagaagaacaaacaccgtctgcgttcaggctacaaggacggtggtggtgactctgacgctggctcctcgaaaggcaagtcgccggcacaccacgacgggaatgcctctggaccggtcaagctgacctcccagggcactctgcggcgtaaaggacggtgccgcaaccgtgggatctacggtca

SEQ ID NO: 153141 - DNA, 303 bp, Zea Mays
taaaaaaagaaacgatttctttccttcctgtaagttgcaacctcacgaggtttcttctctgtttctgacgcaagagcaattacctttctctctctcctatgctcgacacgaattggccatcgcaagggaggatgggatcacgtgggggaggaggggaagtggtgctggccagagcacgacagggcagcgcaggggctcgccggccggcttgcaggggagtggcgcggactggcctggccaggactgggcgctgggcttcagcgcaggtgccagggaaccacggccaaggctgggcaacggtgg

SEQ ID NO: 153142 - DNA, 680 bp, Zea Mays
tgcgtctctttttcttagtcaatcgacctatctatccgcgcgctacagagtcttctgcttttccaacttcatgcctgctgcttgcgatggacgaaaacgtaatcgttgttcatcatttaacggattttgctatgctacttcatcatgcttcaaacggagacctactaggtatacctgctactaataatatcatattgaatctagttctggcttcatttaactgttctaattctggcttcatgcatgataaaacttgattgtgtatttggcgctatctaaatctagatgacactgattgttcattatccatgtgtttggttggctgcatcaggagagccagactcctcacatgcattgactacggttgagcgcgtgtttggttcgctgcagctaggaagctgggcgcgcatgcacttgtgcagcctaggattatttcgctgcatccacaaatacataggaatcacactttatgagtttatgagatcttcagcagtaacaactaactagaatggcaaggtgtatccattgtacctgaaatcctcagttaagctctgcgcaatgcacgtacctgagatgtttttcagcttcggttctttgtttccatcacatctgcacattatgtataatatagtagtacagcttgacagtttccttccccttttcatgctcatggcatcact

SEQ ID NO: 153143 - DNA, 693 bp, Zea Mays
gcctacatgatgggcacaaagaaggcatactcaaatgtaattggcggatatgtcgatgtgcaagacgttgcccttgcccatattttggtgtatgaagatttacgcacgcatgggcggtacctctgcataggtgacatgctacatctatcaaagtatgttcaaatgatgagagaactcttcccacaatacccgatcaccaacaagtaattatctacaattcttgttatggtttcaaataatacatcctttatttgaaatacaattttcatctaatttatgatactcttttagaaatgttgttgatttcaaaactaattagttaacaaaaaagtgtggggttcctgcacccctccgcactacccaccaccaccaccaaaatgtatctaaaaataatgtctctaaaccctatttcttgcaaatatagatatatgcatcatcattttggtctttatggattttaagtttttattttgtttgtctaaccatttaattagatgcaaggatgaaaacaagccaatggttaagccttacaagttctccacaaaacgccttggtgctttgggtatgaagttcactactttgaaagagagtttatacaacacagtggtcagcctacaggagaatggtcatatcccaatattgctacataagtcatccctatgaggaacaaggatacaaaagatagatttcaac

SEQ ID NO: 153144 - DNA, 441 bp, Zea Mays
cgattcagcttcaacatgcgatggcaaaaagagagacgatgttctcaggtagacaattgctctgtactctgtaggattggaagccatcaggagggatctttacaatctgcagctgaccattcgcggtatctcatggtagatgtagactttgaagtacgtatgatcatcttagcacgaatggatgatttctaacaacttctttttggacaatgaaatcaaacattcgtccacacaaacgctaccaaatggaggtccagtatgtcttcagtgtataacctagctgttatgtcttcagtgtataacctagctgtgatcttgctcgatttgtatctcttctacctctgtcttgctctctagcatgtaattcgttgtaattccttcttcgccacgacagatgattaatgaattttcaggtggggaccctctcccccataaccagct

SEQ ID NO: 153145 - DNA, 748 bp, Zea Mays
aattacagccttaatgtcatgcctaagaccatcaacgaaacgcatagtgtaatacaatgggtcggtgcgagattcatatgctgctaactcatcaactaaggatgcaaattgttctacatactcggacacaggacctagctacctgatatgaaacaattgtctaatcaatgattcatgttgctccctacaaaatctttcatgaataagctcacaaaattcttcccgtgacataaaacgtaattgacgctctactgactgcaaccaacaatgagccttgccttcaaagtgcattgatgccactttgacccacatatgatattctgtttcgtacatctcaaagtagttctcagcttgcactcgccacaattgttggtgtgagccgtcaaagcgaggaaagctaatctgaggcaaacgaccaggcgccaagcgtcctgtatcgcgtcccgattcatacggataatactgctcaggcataaatccagagaggcgagtaggatggggaggatgcttactcttgaccgggccatgagacatgttaaattcatacccatactcacgctcccggtggtattgttcttggcggtgaccatacgaccctgcaacaggtggcggcacgaccgcagagcgttggggcattgccgccgtgcgtaggggcgcctccgtgccggagccgaagatgcctggtttgtcgatggattcggctcgacgttcgcgctcgaggaacttgttgacgcgcaggatctcgagg

SEQ ID NO: 153146 - DNA, 2107 bp, Zea Mays
catctatcagtttaccatataatccacaactcatcctacactaaagcatcaagttcagtaaatacacattagtagagttttaagcaaacagcaattttctaaaattcagataggatgatgtatccaggcattgttctccaatagctctggtagcaaaaaaaaagtcaatatcccaaaatcaaatactttaatagccacattttaactataaattcataataattatatgttcattttctttggtccttgggagcatttgcattttttataaaactaacatatagcatgtgctaatactatgatcccgcggaggggatgggtcgacagcgacggcggcggtgcagagggaggggttggcggcggcgcgagtgagggggaggaggcggcgagggagggagagggatgatacaaataataatgtccattggatttgagtaagggagagggagtcatccaacgatctgaaccgttggttttaatggtgtgttaagtctgtgtgcaatttgtttcatggaattagtggaggttatgggtgggggtgatttggttggctgggttttgtaaagtttaaactggtggattatacaaacagacttcatatatctataaacatgtacgactatatccgatgaaagtaaagtcaggttgcttcaaaaacagaacctgtatcagactccagctactctactcatcctatagctaatgcattactaacattattttcaaactcctactctgctgagtatacgcatacaggcatacaaaatcagcgcacagaaaattcaaaggtgtggaacccggcacaaccaccaccatcaccattaacccactcttttaaagaactaattgaaaatattcttgaattgtagtaacagatttttcatgtacaacttttaagtgcagtagaaacaagttgacaagttagttgcagatcaaacatatttgaatttgaaactacacaaaacaaagatgttggccataaaattgaagtgatggtgaccaaaaaggaagtgacaatcagatagcacatacaaatgagaccgtattatattgttatacagagataaggaaaacaaaatagatcacctgaaatttcatagacagtatcgggacctttttgaagacatcccgtaggctacgtcgcacctctatattgatgccgcgaccatcacgaatcatacactttcccagagttccatttaccccaaccgccatgttgattccatttatctatttgcgtgaatgaaaatgtcatgtaagcgaaatgcaatggatataatcagaagattgatatcgcatcccattgcttacttctgcatggagaacatcaagccttacagcagaagggtcagtctctttacctccatgccaactaaactcattccttactttcaattgaccaagatcaaactgtatataactgcaggaagatatcagcatcaatgtcattttttccacaacatcattctgtgacacttaatttcaaattattaacgacagcaagactagaaaactcaaactcagtacaaacacattagtctatctaacaaccaagatatttgatatatgtgggaaaccctaacccggatcatgttggtagtggtgcgaatgatgcgttcggcccagcctttctagatgtgtaagggcacgaaagacgcaactgaatgccgtgagagagaaaggagtgagaggcagagttgtgaactcgcggccattgtcacactgaagagcacgaaacgggcgacgtagctaggtggagatctaggcaaagaagtgggtgagggtggcgaacgtgtcgaacttcaaccgaagcggaaaagtccaaagaaaatgagagaaatcatccaaaatcaccaagtagtatttatatccagaaagacttggtgcgaagatgtctagagatcacaatgaacaagatcaaaaacatgttcagcctaagaagaggtagtaaaagggagacgagtatggtgacctagctaacaagcatgacacagaccctcaaaatgtcccctactacaacaaatgtttgaactactggtgagcttggtcatgacgtcgggtcctggatggccgagacgacgatgccaagtggtggaggaggtggtga

SEQ ID NO: 153147 - DNA, 1527 bp, Zea Mays
gtggtcgtgaatacggcggcggactccgtgctgcaggccgacggcgcggcgctgtcggcgtttcagtacttcgagaacgtgcgcaacttcctggtggcggcgcaggagatcggcctgccgtgctttgaggcctccgatttggagcaggttagtgtcgaaacgagtgggtggggcatcaccagtggctttgcttgcagcttcagcaacttgtcaccacacccttgctttctacacacactctcacgcgtagcctgtttgacgtgcctttttgcctttctgggcgcagggagggaagagcgccagggtggtgaactgcgtcctcgcactgaagtcgtacggtgactggaagcaatgcggtggcaccgggccgtggaagtacggcgggaatcttaagccatcggtatccggcaagtccggccacgggaggaagaactctgaaccgttccggaggagccaatcgatcaatgaaggtgaagtgccctatgaggaagctgggttcaacggcgacgctcattttgattccagtgacatggttagctccagctctaacttcctagttgcattcatttctctttctagttgcaatctggttgatttgctgatccctttatatgtgttccaagcagtcaacatcccgcccccttaaaatgttggtcagtgcagttttgtccgacaaaaggccagatgaagttccacaggtatactaatttgcttgaccactttttttgtaaactacctaccagttcaatgtacttatttaatcacttctattgatttttctcctatggtattaccagttccatgatgttcttactctgttgtttgtatgcagctcttggagtccatgctgagcaaacttgttgaagaatttgaaaatcgtctaaacagccaaaatgaattggtatgttcggtatcttttgtccatttctcctctgtcagttttttgattccttgtgcatactgacatatggcagtatgcttagattgcaattggtaatataataatcaaagtttcaacacattggagcaggtcaaagcggctctaaaaagtggtattgataacaccaaatcattttcaaaatcaaaggtcctggttgagacccctcctaatactagtgggagaaaggcaagttttagatcacttttatttattatgatcgaattgtgtttcttcttttactcatgaagtggcttctgctgctgtcagaaataaagttaggataaataaactgcaatttttttgcttacatccaaaacatttatttgataatctcctatatagatggatacaggagatatttactgtaaccacaaaaaaacaaaaaaagaagcatcaagagaagtggcactgaagcaacatttaattttacaacaacagtcaaagaatgttgaggtaacctctctgtttttcactttattccttaacatcccaataatgtttacttaaacgtttatgattcttgttgtctctaggaacttaagagtgatctgataactacaagggcgggtatggagtatatgcaaatg

SEQ ID NO: 153148 - DNA, 684 bp, Zea Mays
ccccacaacgctgcagttcgccgatatcttcaccaagggactgccgaccagtgtattcctagatttccggtccagtctcaacaaatgtataggatagagttgtgactgcgggggggtgttagagtacctattagggtttcagtcctcccctgtgtatttactctctcaccctcattgtaatgggcttggcccatctaactcaggctatatatcaatctcccaaccccttgagtgggttagggtttccattattctacatcggtcagccccatgcacacgatccttgctacgtcgacgcacctgacactgctccttagtgaaaagcaggcgcccaagctcatctgtcgtctccatgcagaagcggctctccgccacatggagccacccgacgagctcctccaacggcattgtcttgaggtcgcacaacatctcgatggatgccgcgacttgattgaacttcggtggaacgacgcgtacctcctccacctcctcgccgagctcgcgcatctccgagacgagggagcttagtctcatggcaaagtcgtccaccttctcaccatccttgaacttgatattctcaaagaccttgagcagcctttcggcgttggcctcccgaacacgtgcatctcccatgcgcatgcttctcacagccacccacgcctcctttgcgctcttcttcacagc

SEQ ID NO: 153149 - DNA, 630 bp, Zea Mays
tcaccggccaccgcttgcgagccctataaattgaaggcccgggcaactgcgctagatcatcctgaagccatagcacccgctcccaccctcgatcattcaccagcgcccgcgaatttcaaattctccccaaaacagttctccgccgccgtgaaagcacctcgtcgtggccagccctctccaggtctgatcacgccctctctaatctcattttagcatccttaagcttccctcaaactcaccgacccatgcaattgaattaggaatcctctggtcgccgggaacgcgactgcctagccgcaatgctcacggttgccgtggtcagggcaaaatatggcaccattcttcaaattaacctaggggaaacattcgctaggttgtgaatttggtttaggccgaagctgagcaccggtcatggccccgctcggccggtctacgcgctcgccggagctcctccgcgcgctgccgtcgtcggggacctcacctgtggagaaatagaacctcagggaccccggtgcaagttgtcagtgactgatacaaatagtaactgaactcttcacacttagccagaaacccgaggccctttctgcaaagccgccagggcgcgggcgcacgcgcgcgttttcctctctg

SEQ ID NO: 153150 - DNA, 555 bp, Zea Mays
tgtatcggccaaacagggccatgaccggcgctcccgagcgacggacaccaaattagacctaccccgagaatttcccccaacctaatttcatctatggcccaatggtttgctctggccacggtgaccgtgagcattacggctataccgtcgtgttcccggcgaccagaggctactccgtgcaattaagtgggtcgatgggcatcacaggcatacgagagcacttaaacaaggtttgaattgggcagagttttaccaacacaggctggccacggtgaacttggtttcacggtgttcttcgactgatttggggggaatatgaaattggagcttgctggtgatcagctgggagcaatactaggtgtgggggtgcgcaatgatgttgcaaagctagttacgggctcaatttataggcagcttcgtcggtggcactcaatttgatcgaacaacgcggcggccggagataagaaaggactctggcacggtgaatacgtgttcaatgtcgtggcagtaattccggtggtcgacgggaagctagagggagtcacggcgatgcgg

SEQ ID NO: 153151 - DNA, 537 bp, Zea Mays
catgaagtgaaaggacaccatctatgatatatcttcctttgataaatccatactggaggtcactaatcacagaggtgatgcagcgagccaacctattagtcagaactttggtaataattttgtaacatacgttaagcaaacaaataggtcgaaaggctttaatatcagtcgcatcagggacgtctgggataagagtgactatcccaaaattaagtctctcaatattaagtgaaccatcatgaaaggaattaaagagattaaacaaatcacttttaatgacttcccagaattcctgaaaaaattcagaagggaaaccatcaggacccggagcactgttgtgtttcagagcaaacaccacttctttgatctcctccaaagagaaaggactaataagaaggtttctgtctccctcctcaagctgcttcatgtccaaattagccaaagaaatacttgaatcttgagaagggccaaagagatctttatagaaagaagtcgccagttggttaatgccatgatcatcatgtgccaaaatatcac

SEQ ID NO: 153152 - DNA, 336 bp, Zea Mays
gttataatttttttaaaaaatcaacggtatcatatatttataaaatggagaaagtaacaatctatgcaatagcttgtacagactagaatgagaaggccacttccgcagaaaagaagtgtgggacaggagatcatatttgaatcagcttgccaggtctcatttggtggcaccccaaaactagctcagttcagcgctcgctcgtggtaaaaggttaactaatctgcatcacaatccacattaacacgacatggattcaagcgaatctggatgaagctaagggcctgtctttacttcaaaaacttcagatttgattttccagcttcaccataaaataac

SEQ ID NO: 153153 - DNA, 411 bp, Zea Mays
ctcaacttaaactagttaacacacaagtcacctaaaatagcacatctttggggtctaacatagagacatgaaaacatggcataaactccataagacttacactggctactgaaggacctaaagcacttatgtgcatatgttatcggattgttcttcaattttaacaaggactgactcatgaacactacttgcctccaataattattggactgcgataacactcgtataagacctctaaccgatcaacaagacatttatttatccaaaggggcatggaatgtgatgattgacaaagcgaagcatcacattgccatacaacaaaaatcatgacaacaccgatagatactatccactaatcgtttgaaaaattaaacttacttctcgcttgccactacatcactccttaatcac

SEQ ID NO: 153154 - DNA, 330 bp, Zea Mays
gatgagtacagctgcgggatgccaagtaaacctagtcatttggattttggaaagtccaccatctctgaagttgatcttcccaaaatggtgaaactgggctacttcagtgaagaaaaaaagaagctgattcgttttggcggagaggaaattactccgaagctggaaaagaatgaggttgtagtgttcaaaagcttctttaaagtaggattaagatttcctttgaatgggatgattgctgatgttttgaaaaagtttggggtttaccttcatcagctgacccctaatgctattgttagattaagcgtttatatttgggcccttcgtagccag

SEQ ID NO: 153155 - DNA, 448 bp, Zea Mays
gattataggaaacctggtatcacaaaatgtcatttgctagcccaatgacgtcttcatccactagttgtactctaataccctcacgtgcaattacaatgcccttgacatctaggaaacgtcttttgtggtataaaaggtgatctattgttttgaattctttatattccaactttttagcaattgtacggtggaaaaaaggtgccttacaaccttaacctatatttggacagttctctcacgcaatttggctaaatttcccatggtctttattttactttgagaaatagtgtggcataatgatgtatggtgttatatttgagtggacataaacaccatctaggtatgccttgaatagaggggattattggaaacctggtatcacaaaagtcattagctagcccaataacgtcttcatccactagttgcactctaataccctctcgtgcga

SEQ ID NO: 153156 - DNA, 910 bp, Zea Mays
atgatttaattttcttcgatcaatcgggatgaaccgcttgttaccttagagccattgggcaagatgtcacctttaccatagaagacctcatggctagaatttatgggcaatcttcaagctcctcaaaagattttaagattagctcaaccccataacttgctcagttattcgcatggtgggaaatgtgaagattaggctaacaagtgacaactacctttaaatttgctgtctaatatggtatggttgaacttctaaaagtgcttatctatcctcgctcctcggcttgatgatttaggcctagaaacggctggcttggcaattgtacctttcaaacctgcatgggctactcaacttctaaccctttaggcctctattttggtttcacctagatctgccccctcattctaacatggatgtctgtactcctgtacttattgagcaggagggacatcaggttgggggcttcgatgcctcctaggggcccctggtggcctctagggtggtgtatgatagcatggtgaacctgggtgcatggcttaaaattcctaggctaacatctatttctaaccctgcttccactagttgtttcttaggtttgtgggagtccaagactcaacttgattatgaagacccaacttgttccactggcagatagacccaagaagaagagtagaatgatttatgaacatgtcaacctagaggcttcgtgtcagggatatggtcctcggttcatggggcccatcagatggcaagcacactggggaaatggccctgacatctgcggcccatcggttagctagaggagataggtaatgtctaccctaaaagacccccctcggacgaaccccgtggcactgagcttggtgtcgggtgtagcggaccctaacagggggccgagcgtgtcgaaggg

SEQ ID NO: 153157 - DNA, 360 bp, Zea Mays
tagaacatgaactgattctgcaggttctgactcataaaggatttggtacaaagtggattaactgggttcgaaatatcctacattctggcacttcttcggtgttactcaatggagtcccagggaaaacctttcattgcaagcgaggagtcagacaaggagatcctctctcaccgctgttgtttgtcttggcggctgatcttcttcagagtattatgaataaggccagacatctgaattttcttcagcttcctctgccagctagttgtgaacaagattttcctattgtacaatatgctgacgatactctcttgataatggaggcctgcccgaagcagttattctttcttaaggcaattctca

SEQ ID NO: 153158 - DNA, 735 bp, Zea Mays
actgccattctgctggttatttaagtttttgtccaccattccttgttacctttaccttgttgtgcttcgataggacacgtcttagccagcaattgtgacttgtgatttggacacttattgaacttcgctaatctgcactcgatttttgctaatccttgatattagtttttggcctcccaagctccacatactttcttctaatcaatacagctgtgaccttgcaatcgcggtgtcactacctcttggtaagtatcacgaaccagcctccgattgtaccatcctttgcttgtatttcgtcagacacttgtaagagcttggtaagatacattagagtgtgttcctgtgttccacctgagaggatccctacagatttcgatgaatgtgttagccgccaagatcttgaggcaaacaacaagctcctgaaggagcaaatggaggagatggtccacaggtcagtgcatgatgccttcattgacatgaaccttggcatgactaacgagaggctggatcaacgattgtcccagatcgttgacagacttgctgtgttggagacgcaacaacaagcaccgccaccgccaccacctcctcgtccacgtcttccagatgatgccgtttttgatgaagaaggtaattatgatgaagcggtcaccagagatttgcgcctacatcgccgtcttcatcaaaacacagaaggtatgccacaccaacaccgccagcaaggtaataacaatcgtg

SEQ ID NO: 153159 - DNA, 453 bp, Zea Mays
ataaccaagaaatacacacaaggaagagcggggacatagtttgtgggtggtggtagcggtgagattaggatagcatttgcaaccgaaaacacgaaagtgctcgtaggagggtggttttcctaggagaacgaagtgaggtgtctgaaagtctagagtcttggttggtaaaatgttaaggagataggtggaagttcctaggacaacaacccaaaagatgggagaaatgctggcctggaagagtaaggagcaaacaactggtctgagcggaagtgtagggacatggcatgcaaagatgaactttgtgggagggaaaaaaaaatgtgcgggcgttgaggttattgaactcgcgaccattgtcgtactgatttccttggatggtgacgccgaactgtgtgtggacataagcaaaaaacgaggtaagtgtgggaagggtgtcaaatttaagacataaag

SEQ ID NO: 153160 - DNA, 331 bp, Zea Mays
aagctagatttcagcaccgcctgtcaccctgagacagacgggcagacagaaagagtcaacaaggtcctcgaagatctattaagagcctgtgtgctagcattcgatagaagttgggaatccagtttgccctatgcggagttctcgtataataacagccatcaggccagcatcaagatgtcaccgttcgaagcattgtatggacgaaaatgccagacccctctcatgtggtccaacgtaggggaaaaggcactggaaggacatgcctttgtcaaagagaaggaagagaaagttgccctgatccgcagaagattacttgaagctcagagtcggc

SEQ ID NO: 153161 - DNA, 496 bp, Zea Mays
cacaagattttcctgcattgtaaaccaatcgaccccttgtggctccataaatctcatgtaaccaacccttccaccagaataaccatctacactaccatcaaatttcactccaacatgcacttgaaactccatacaaaggatctgcgtagtcccaaaaatatgcaagaaacaatattcaatttcctgtttcgagatggtaccgaaattgaatgggcagtagcactgaagctccatacgaagggaatacctgtggtctaggtgatgaaagattgtcgtcatcctcagatccagcagccgccattgtgaacggttaggggagaacgagttaaagaggataaagtagaagaaaatgcatcgacacagggtcaaggtgaggaatatgactccagggagccagttcgagccgatgggtcgtggctccagggacctcgtgccctcgctgatgcatcgcggctccattgcagggagctcacgccctcgccctcgcagccatccg

SEQ ID NO: 153162 - DNA, 456 bp, Zea Mays
cttaagcgtttgtaggaatattacaatataatatatatatttgcacagaaaaacagttgtacctaggaattaggggtacttacctggattaatggacatgtttttgcagccttgctgcacgttcccagcttcttaccttcagcccttcaccaaacataacagaagaggtggaggagcagcagaaaaatagcaaaggagggagagggaagaacgcctggaatactggattattgggggaagagaagggctgtgctgacctggacgattggggaagagcctaagaggacaatccggcaggcggcaacaacagacttggataaagtggaaatgcagcagctcccgcttttttccctcctctgtcctctccacagcagctcccaccacttttccctactctcaaatgcagcagcagctcccgagcagataaagtggaaatcccgccactttatttcccgc

SEQ ID NO: 153163 - DNA, 453 bp, Zea Mays
gggtcggatatagaatgatatgccttcaactgatctaccaactcagaaaatcgttctacataatcagtcactgtagagctttgtctgatatggaacaactgcctaataagaactgcgagttgatccttcccaaacctttctttaatcatgttaccaaagtctgtccatgacacttgcgaaagctggtatcctactgactgcaaccatctagctgcaagacccgtaaaatgcatggtagaaaccctgatccacacactaggatcaacggagtacatgtggaaataatcctcatatcatttatgccacagcttaggattatccccatcaaacccaggaaactgcaccttgggcaattgacctaatgatcgagcagactgccaaccctgatgcccatccccaaaattgccgtgcggcattggacccatgtaatcatggaatataggaggagcagtg

SEQ ID NO: 153164 - DNA, 334 bp, Zea Mays
agtattgagtgtttcagtgtgggcgtgtgtgtgttcggcataaacatcatgttgcatcatataattgcaccattccgcataacattacatcatacatcatatcgcatcaacaacaaagattgggtacgaagcaggtcttcggcaataatttgttgaatgaaatgtgctgaggcacgaagcaaaccttcaacagatacaattttatcaggaaaatctgttaacagtatcacacaacagatttgccataaaaggggtttctttctttacgaatcataaaaagaagggaaggtgtattttcgccgaaggctaaaaacggtatgtgcgtaaatttcat

SEQ ID NO: 153165 - DNA, 458 bp, Zea Mays
aagaaccgcgcgttcccggcgattggtggcggtctaattcaattggaggggtcgaagagcttaaggaggacataaggatgctagaacaagcagcagagggacttgagctcacctaaattgagctggccacggtgaggtaccctttgcggtggcggagaaccgaattggggtgaattcaaaatttgtgctcgctagtgggggatttgggatgcaggtgggtgcggtagctgcttgggtacatggcggagctgggggcacagtcaatttatagaggccacgagcggtggccggggatttgggcgacgacgcgcggcggccagaggtagaagaaggtcctggcgcacgtgaattcgtggcatctaccgtggcagttactccgacgagccacgaagaggcacaagggttcacggcgatgcagtggaggggctgagccacgcggcgcaaggccgggaggcggc

SEQ ID NO: 153166 - DNA, 314 bp, Zea Mays
catgtgtcattgaatgcacggtcatatgttcttttctgtgaaaaactgcagttgttttgtacaaacagtgaaaatagtatgtccagtgatttatagagacaagatgcgtctattaaagaaaatatttgctgtcaaactgtattgtttgtgcgtttggtcatcaagaatacccagagtattaagttatgcgtgtcacaaatggatggttgaagtgaaattgatgacatatgtatccgtttttcaccattcatcaggatttaacttttctgactaaaggtggtttattctggctgaagggataattgtgttccaaa

SEQ ID NO: 153167 - DNA, 833 bp, Zea Mays
ctctcaccttccctatttctaaaagattcttacatctatatatttgtattgatttacatcgatatattggtttacacctagtatattcatttttatttaatagacaaaaataactaccttgctagtgtcatgtgccagtagagaatcttacatatgtcgacaccattgattgttccacctatcgacagatggatgtcatcttctcgtacacacacccattgatttttgtgagctatcaacattgttcttgtaactgtaaaccgctgttggatccaagataggaaattgatgataccctgtcattcaaccatttgatgatgtctgcaaacacaatatctatgttttcctcgggttctcctgaagtcaaagcatggcacatcccagggtacaactttagtgtcttgtccttgctcgtggctattgtatatagtgcctcacttactgtggggtcagttacagcatcatcaccaccgtggactatgatgaatggtagagtaacctattcgcatgaagacgtgaacatacaaacacaagcatgcattatcctttcaatgatagaatgcaacatacaacatccatgcaaaatctaattttattaagacacaagcatggtatgttatacaatgatgccaagtcagttgttgccacatgattttcacatttcgtccaaactagtgttcaatatctttttattcatctataattttacaatgcatttccacctacaaataaaatgtgcgcatgtgtagtccacatgaatctttacaacctttgcaaaagcaagtgttgttatttttttgcatgtttaaatcatcaagaacaaactattctct

SEQ ID NO: 153168 - DNA, 321 bp, Zea Mays
gtggaggtggaaggtggtgttatggaaatgagaacatcagatgtggatgtagaagatgatggttcaacgataggaatggaaggaagacacatgaagtagattatgtgggataatatgaggagtgagtagattggttgtgaaagaagggacaattttcattgaaactctcatctctagaaattcgaatatgacgagtagatggatcataacaactatatcctgtgttcaggactgtatccaaggaatagacactctacagattgagcaatcaatttagtccgctcacgaggtggtaacaagacataacatatacatccaaac

SEQ ID NO: 153169 - DNA, 378 bp, Zea Mays
ttgtgcaagattgaaacgcttcagaacaacataaaacaggataaatgcagaggctacctaatcagacaagatcaagccattaagtaatccatatgtataaaaacctagcaagctgtccttcggttagttgctgccttgaaaggatcatccggacattaatgacccacgaccgatgaattttattccacctgattacagatggaacaaggatattaaatcagcagatgattccagagccaagagatgcatggacggcagatgggactggccccttttttttatgaaacgacaagagacgcgtaaatccaatagtaggacaagtgttgctatgccagatattaacacaggattaactgattaagcaatgaggttcagaga

SEQ ID NO: 153170 - DNA, 274 bp, Zea Mays
catttagctcctgaagacattttctgtgacatcatggtgtgtttttcaacttccattattctacttgagcattaatgttttaagcagaaacacattataatcctcagtttactcccaaagttgtgccaatatttgacatgtttactcggtgtattttcacaggtacaatattaggtaactaattatgccttatgtgcctatgagttttgtttctgtctgcagtttatgctatatatctgaatccgatccatccagcactttctggttgtctaag

SEQ ID NO: 153171 - DNA, 336 bp, Zea Mays
gaatcattccctttttgcgtccggggcagtccggttacgaagtccatgcctatttcttcccacttccattcaggtatcggaaggggttgtaataggcctgcaagcttttggtgttcggccttcgtccgttggcagatgtcacatcgggccacatactgagctatctctttcttcatccctttccaccagtatctggttttgaggtccaggtacatcttggtagttcctgggtggatggagtaagccgagttgtgagcttccttgagtaggacctctcgagcctccccttttggtacacacagacggtatttgaaccaaaggactccttggtcatcc

SEQ ID NO: 153172 - DNA, 619 bp, Zea Mays
gcttcgatctagttctgggggttgagtggttgcggtctttaggacccgtcatatgtaattttgacaaccacactatggcattctggcgccaaggacgactgatccgcttgacaggcatgggggacccgattctctgcagcacagccgttgacaaaagccgagaatgcatggaggaacttctacaatcctttgttgctttgtttgaagaaccacacggtctgccgccttcgcgtcgccatgattatcatattcggttactgtctggaacagaaccggtggcagtgcgaccatacagatacccccaactcctgaaggatgaaatcgagaggcagtgtgaccaaatgttgcagcaggggatcatttgtgagtgcacatcagcattttcatcgcccgtcttgttggtgaagaaggcagacaatacatggcggttttgtatcgactatcgtgagttgaatgcaaaaacagtaaaagacaagtttccaatcccagtggttgatggacttctagatgagctacggggttcatgcttcttcaccaagcttgatcttcgcagtggatatcatcaagtccgaatgcatcccagcgacatccacaagacagctttccgaacacattgtgg

SEQ ID NO: 153173 - DNA, 639 bp, Zea Mays
gcatgagtcatctgggcaattcacttctaaatcttgttacaatgttttattttctggttccatcacctttgagccatggaagcggttatggaaattttgggccccccaaaatgcaaaaccttcctatgctggccataagaaataggtgttggacagctgacagattgcgaaagcgtggtatgccccaccaggttgtttgccccctttgagatcaagagtaggagacagttcaacatctcctaactacatgtgtttttgcacgtcagttctggcatggcattctagccccttttaacctaggacaccttattcctagtcctgtggaggcctcctttgtggagtggtggggaggagtgatcaatcagatccacaaagacaagaagagcttcaatagtgctatcatccttgtggcatggtgcctttggcttcataggaactgagtgatcttccatgaggagtccccttccattgtgaaggtgctgagatccttccttgatgagctcgctcgctgggttctagctagaaccaagcagatggggagcattggtttggctgaccgtgtttctgctttgtagacatcaggtcctgcgtggcaggtctccctgtcctggtgtgttctttagaagtgtgtgtgtgttt

SEQ ID NO: 153174 - DNA, 427 bp, Zea Mays
gtgggcaggacagctggtggctgatcgtttaggttgtgtggatgggtgcttaaaagagttgtgagatgtaggattagttgttgggcatatggtatattgggctgcacagtgattttactgcgtaaattttacccatacgtatctggtttggattatgcttttccatactcatacccaccatatccaatatgtgaataatttctcctaaatttatatccatggggattaaaatcttcacatactctaagcttaatagaggaattatacatggattaacgggtatcgggtctgcattggcacctctaagtatacctaactctctagtgatacacaccatcggcaaaatctaccctcttctttccaagattattgttaaagggtgtttggttctggggactaaagtttaggcccctttgaaatgtagaaa

SEQ ID NO: 153175 - DNA, 480 bp, Zea Mays
cacctttgattgatgatggcaagccttgctactaaatcaggtctattaaattaaaggtaatacttggagctccaatgcctcttcggttatcttagaacaattactgtaacatatatttgtcttgcagcaaggtttattaaattaaccaacttctaaataaacgaaggaacacaacttactttgcattctaaaacacatacatgttatcgagttcttcaattgacctatccaatacctttactttgcatccttcccttcatcatacgccttctgaatttctatctttgattgtcaagtctgcagagcttgtctatttgtgaataccaaaagttggtccaaacccatcacatgtgttgcaatgtaaaagtctggtgtcctttttaggtgcgctcttttaatttgccctttttactctttttatccaggtaaaattcttgggttgtttcatgtcattcaaatattgatgtattcggtatagaa

SEQ ID NO: 153176 - DNA, 497 bp, Zea Mays
tatatagccagtaactgccaggccattactgactccaattgtaccatgacactagattaatgcactaaacacggcccacggcccaactctagagcacttaaacccttacacacaacatcactcattcctgcccacatcctgagaagacaccgtaggcacaaccttcttaccagacatgacaccttcaccggtgattcatcgctgttctgattctgcagctgcttccctgttctaatcgaatccagagacttcatcgccttcaccggtgaggtattttttttctcccatcgtcagactagatgcgagctaagcgcgcacctcgcctacacaaacatctccttgtttatttagattttgccttgcctttccttgcttccgtctggctgcttcgaatgtgagctaagcacacatgtctctcgtacgcgatctgcacgtaggccagatgtttgtgtaaatgcctcttgggcactgccgcactaggagtggcgatgcatgta

SEQ ID NO: 153177 - DNA, 1432 bp, Zea Mays
tgaagatgagcacgagaggccagccagcagagggtcacctgtggctggtcttcaccatgctgttcgtcacttctgcggtgcgcagcgtgggggcgagcagctttgctcctccaccgtctgtctccgtatcatccccagcgtacgatcctgttatcaaggtggtagggaaggtgtactgctacagatgcttcgatgaggcgcacccagatgaatcgcatgggaagaagcacctgcaaggtgaaacttcgtgcctgcccctgctctttacgatcccaccgtgctaatgcagtcagctggaagatgtcgtctggccttctgattttcagcatattatccctgaatgtccttctgagtttcatgtttgtctgtgttcacaacacaacgatctggatgcaggagccatggtgaaggttacttgccaggcagatgaccaagcgctagtggcattcggctacaccagaagcaacggcaaatacagcgtggtcctcaagggactgccgattagtagcagcagcagcagcaactacggggctgctgactcgtgtaaggtcgagctacacggagcgccaggaggatcggactgcaacgtgccgatcgagctaaacctgtcagggctcagcgtctactcccgatcaagcgaggaggtggtcttcaaagcgaaccagataatggcgttcgcgtccaagaacgcgtttggctgttcatcgaaaccacagacgcagtcgtcatcaccggttcatccctactacagctccccaccactcatccctcaccagtacccctcgcctccggtgccggcggctacccacaggtctccaccaccgttgccgttgccgttgccgttgccttatcagtattcagcaccaccaccagcagcacctgctgctaaccagcttccatccccagcgtaccagtacatttcgccaccgccttaccagcagcagcagtccatgcttcccaatagctaccagactccaccacctccacagggcacggagtctccagtactacaaccccgcaagtatctaccacctccatactactactacaactctccaccagcaccacaacaccaccagcacagctacgtacctccaccaccgctagcttaccagtaccctccacctccactcatccacaagtcgccgcttcttccatcgtcgtcaccagcggctccataccactacaactctccacctacctaccagtatccaccacctccgtatagctaccaaccttcgccgccacctgccggcctgtactctccaccattattgcctccaaatgctccggaacacctgcatccaaatgtcccccatgcgaaatctccacagccgcctctccacaccccaccacctccgaacggtgccgtgccgtcgccgtcgccgacgacaccacctctgcgctactacacatccccgccgccgacgga

SEQ ID NO: 153178 - DNA, 1253 bp, Zea Mays
ggaaacaagtctgtccggtcatctacttgtacaggtacagtacagggccttttcgtcttcacggagctggaaagtggaaaccaagagtcggcggcgccgcggcgagcagagagatgctggttagctgacaagaaaaaactatccaatccaagggccaaggctccaagccagaagcgatcaagcgtccaagcctccaaggcacaacatagcttgttgatttgatcggtcttagagttcagactaaagcaagccaagtagcaactagcaacgtgctaacaagtagcaaggtaagtagataactagacattttttaatttatatatggagttcctatacattttacagttagtagtacatggggtttctccgtttctagacattttatactttatttaatcatagttgattctagtctgttccaattatttgtaggctagacatggaaagattttttagacgaaaatcagtgacatcagagcctgataatggcggaagttcaagtggaggtggagctgctgcacctacacctgttcttgcagcgaggccatataaacacaactcttcagtgccagaactaattgatttggatgagctacctagggatccagcaaaaaggaagagaatgtgtgactaccaccccaatcagcaaaatgaaataagaagaaagtatttactatgggggccttatcaacctcgcacttatgattttcctttcaggattattgcgggtaagaggcgtcgattcaatccagattggtttggccagtatgctaattggctggaatatagtgagaaggaggataaagcatactgcttgtgttgttacttgtttagggataaaaatattgacacccatcatggccatgaggcatttgtggtacaaggctggaattattggaagaacagtgatagattagcacttcatgtaggtgatcgcaccagttttcacaacaaggctctcaaggattgtgaggatcttttgaaagaagatcagtcaatcactgctgctatgaaaaaacaaagtcagcttgagaagaatgagcactctattcggttaaatgctgccattgatgtttgtagatttttgttacaccaggggcaagcttttcgaggccatgatgaatccaaggaatctgaaaacaaaggtaattatctagaattgatggaatatacttgcaagcaaaatagtgttattgctaaagcattcaaatttgctctacttaataatcaattagtgtctcccaaaattcaaa

SEQ ID NO: 153179 - DNA, 508 bp, Zea Mays
taccgttgatccgggatcggagcgttgtgggttgggcacaactattttaaatccgaaccataggcgctcgatcggatgaataggcttgcatcaaagggtggtctattgtgggctattgatacgggatccaaaggtgggggtgacataccgattcgttatgaaatccgacatatcggtggcgtgggcttctaatccaacggcacagatcagcccatacctcttcgtcgtggtgctttcgcataagagaccccgagtttctgaaaactaaacccgccatccccgtatgcataaaaatcactgcacctaggtcctatttttcacgagttagcccctgaactctcaagaattagtgtccgctgtccaacaaggataaaataaatggtgaattgaatatagaaattgattttgttgtaaaaataaacctagaaatcttagataaatcataacttgaccgttttaactcagatttaaaccgttcaggttgtgttagcttcataataaaatgtcc

SEQ ID NO: 153180 - DNA, 386 bp, Zea Mays
gtaagtgttatatattggaaggttgcggtagataataggttggtctatagttgatgtgaatgtcacgagaggattggaatcagcttaaaaaccaattcaagcgatttatatgcagcagtactcttgtgatcatgaatggtgaatcgcgccatgtgtttgggaaacctctaggcttccttcggttcttttggattgagtccagaaaatgattccaagttgaaatggtttactaatagtttactaatatgcataatcataatgaggtggaatagtttatggatcgaatcatgggtaaccgaacggaccgaacgaatagaaatagaatccgattttaattcgattcttaaattttatatatagtgtaaaatgtggaacccattaccatc

SEQ ID NO: 153181 - DNA, 564 bp, Zea Mays
ggaaaaaaaataagactgttgcatgatcttatagtacaaaatgttggactggtcattgccagcagcatcctgagtatgtgctgaatatttggggaagcctctcctcggatatacagaatatttgggtacacttttcccctaaagacatattaccatgatgaaagaaacatgaacatgttccgccacatattgattgttcatagaaggaattttgcctagtagaaggcaccctgtgcttgccaaactgtacatggtctacactgtgttcacagaacatcctgatcacttgcaagatcaataaaatatcataatttgatccagtcacattatcctctagcattcacattgggttgagtaagacaccatagtgtcaatctatcatctaaaagttaccttaaattctagtccaaattgcatgatgtccaagaaaaaaaaatgtttttcattgcagtattacagagtttcaagcaaaatatatcatttttttaatatattggcagcataattctggttttcagatttaaataattttgacaaaacccaatgccaaaacacttgcactac

SEQ ID NO: 153182 - DNA, 547 bp, Zea Mays
agccatgcaaacttgtcctctgcataatcgaagtatgagcattgtctgaacataatgtactggtgatgctaactgggtttattcatgtcggatctattgcaaagggaccaccattttgatgcactggtaaaaatatgcattttcaccatgtttttttattgtcacaatctcagaggtattatttcaaagagtagaatgctttcttagatattggagaaatataagttgttaaattgtatatcacacatttttagtatgacaacgaggagctacaaaatctgtatttatattttctaagcttaccaatactgagtatgcctgttgatatgagttcatttattattgcaaacttagtatgcctttatttagatatgtacaatttagtatgtctttatttagatactgagtgcgattaaggttcatcaagatcaaccaatcataacgtgtttattaatttgtagtagccacgattgtctttctccagatgagttatctagagttgatccttctcaattaagagtgattctaaaacaagtgaaatgtgatt

SEQ ID NO: 153183 - DNA, 321 bp, Zea Mays
ccgacagatttattgaccttcggcttggagaaaccaggaggacctgagctggaggacgcaaccttgtgcaccttgttagggtgttcttgggagactgacactcttgacctcgcagccatcctccttgcccttcgctttgcagctttagacacaactggaatgaaaccatcatgaggtttggagttgacctcctgctcaagcccaatcatggctggtgatgcagctgtggtacgcagggagccagcactatctctagcatggagaggtcccagtggcacatccatccaaagcgaaccgatgcggagcgtgatgaagtcttga

SEQ ID NO: 153184 - DNA, 603 bp, Zea Mays
cggcgatagacttaacagctacaatacatgtctctgttctgaaatagatcttttaactttgggcccttttattgtccggaaaacataggctataccataaacccatgtcgactgtgtgttctctaaacgcactggatggtaagcctttagtaagcggatccacaagctcttgcctactacatataggttcaatacttttaatatgattctggactttctcctttacaacgactttgtgtcaacgtgtttggcagcacacttgacccgttgtcataggagtgaactatttgaatggttaatgctgttgtcaaccattatcaactctaggtaccattttccttaaccattttgcctatcccttagcctcatatcatgctatatcatgtctttgcatcacattgatgataactgtttgtttggagcttttccacacaaaaactccaagtgtgaacattagcgataattgtggatttcgctacacatttcacaaggttctatctttgtacttttgagagtacttcttctttctttttagcatgagactgacattcataactaaaatccagtgatctatatctggactggacactgccaaaacaaccc

SEQ ID NO: 153185 - DNA, 529 bp, Zea Mays
gaaatatgccaaggccgaaggggtatggagctctgctggccgctggattagacaccgagcgcccagattaattcgagctggttatgtacactaatgcgccagcaaccgttggattccagatccgcggtccacaactcctagcgcgaaggggtattccacgttttaatcctacccgcccgcgcccgatccgacggtcgcgaaagcttcgtcttctacacctggcagaggacggagacgcaggcccctacggcggcgcccatggccggcgagtcccaaatcgaagtccccaagagctatttcttatgcggtttagggcatcacgaggagcagagggaggcaaagcttggggtgggattataccggggtagtaggtcgcgaaggcacccgcccacggcaggatgcagtccagagctgtccgccgagctccggtgagcaattggccacgccgtgcttgacgcccggccctggtaagcccctgtacatctttgttgaatcccatcgaacctcacagagcagtcatcgaaggttc

SEQ ID NO: 153186 - DNA, 504 bp, Zea Mays
ttcctggtcgccacagctagggtcttggtattgagccattttcagcccatctacagttttctttagacttgcctctcctctcctctgccaatacctagccgccaaaaccagtgtacgcctcccctcttgcccagctgctccagccttcagacctagtcactggcggctgcccctgcgccctagacctccagcactagcggctgcgccacagaacaccaatggttgcaccagcggttgcttgcctgcgccccctgctggcctgctccattcatcggcgtctgcgccctctgcctgctcaccacctgcagtctagaaaccagcggctgggtcagagcaccgtcggcgactgtgacagactaccggcgtctccactctccaacaccattgatgagatgagctcatcatctcaaggctcctcttgctccccccttctatgtagttctgctagtggatggttgctggcttgctaccctaatcctaagccagtactaggtagtgatttgc

SEQ ID NO: 153187 - DNA, 423 bp, Zea Mays
gtttgttgttgctcggttgctggctggctacttgtcctatttggcatttttcaatcgctaatgctccacctacattccaatactgcaagcagcaaatcaggggaggtaaggtcgggtggccacaggctaggtgggcttggacatcggctcgatgggaccttgccacctggctgtctgtcctagcacgcggtgacacgcctgactatggtggattgaagcctcggggacgacggacgacagacaatgcaaaaacgaggctagatgcaacacaatgacagttagccggtcaagtctaggtacgtagccgtgctgtggagccacaatggcgcaacggaggtgctggtgtctccatggcatgtggggttgtaagacgtgaccacgacttggtggttggcccatctaatgactctgccatggtacgac

SEQ ID NO: 153188 - DNA, 303 bp, Zea Mays
ccaccgttgcccagccttggccgtggttccctggcacctgcgctgaagcccagcgcccagtcctggccaggccagtccgcgccactcccctgcaagccggccggcgagcccctgcgctgccctgtcgtgctctggccagcaccacttcccctcctcccccacgtgatcccatcctcccttgcgatggccaattcgtgtcgagcataggagagagagaaaggtaattgctcttgcgtcagaaacagagaagaaacctcgtgaggttgcaacttacaggaaggaaagaaatcgtttcttttttta

SEQ ID NO: 153189 - DNA, 390 bp, Zea Mays
gttgaagtggtcattttagggtttggtcctgatctactaatttgtgtttctatgataacttcaagtgatgaattactctaggaaactcaataatttacttgatataatttccttcgggcagtttttgagttgtgatctcgagtagatctgtgcgtgcaacagtgccacgacacggcagtctttggccccaacaggcaatgctgcacctgttgctaacagaatttcgagtgtttttaacaggcgtactcagccccccataggcataacagatcattacaattagtgttggtatgttgtatagtttttttgcccaattttccttgtaaaccgggccaattatgttctcgaatctttttaaaaaagaaagtttctagccgtttcctatatcag

SEQ ID NO: 153190 - DNA, 648 bp, Zea Mays
ttcctatcaagtggtattcaaagactcgggtattactgtcaggcttaccctagtttagtttaggttttttcatcctataactccagataattgccatacaaaaagaattccgctgtcctataaccctgtttagccttgcaatttcatttcagattgctttgttgaatttgtgtccgtgttcgagtcttgttgctggtttaggtcgtgtcgtaatcgtagttcaaccgctccgtcgctgttatttgtttccgccgctatcccatccacctttcccggattacaagtcgagacaccacattactcgatttgccctcgctagccgccttgtgtgaactctcgccacgctagccctagattaggttgcaagccgcattgcattgtagcccctccttgtttcataatctagcgattacctattgcttatacctaggaggtttgtgcccctgtgctctatagccgcctctagccgccgctacggttcctaccaatttgtgcccttgaaaaccataacttgaggtaccttccataaaacgggcataacttttcgctcggtgctccgtttgagctcaattgtttatagcagattcctgactccattatggggtgaccccaacttgcctacgacctgtttggtttggtcaaaaaatt

SEQ ID NO: 153191 - DNA, 623 bp, Zea Mays
tagaaactgaaggcacgttcaaatctccaaaaaaaagaagagccaaattagcagactacacaagcaacatcgtctgtgggggagcagcgatactcaagcacgcgcggatctagttgtagatgtcgagggagaaggcgacgttgaacgctcatcttggggcagcagagcgaatccttgtgcacgacgacgaagggcatctcggtcgcggattcgggatggaatcaccacctcctcgctggatctttgccaacagtcttcaaatccaccccgagattcccaccgggcaaggaatcgccctctgctgaaggtcacttcccggcctcagtcccaacttcatccctcggacgacctaagtcttctggaatgcaaacctaagtctttctggaatgcgggagatgaagaggtcgggggatcaagatgccaggaacgcgggagatgaagagggaaatgggacgacctaagtctttttggaatgcaaaccttagtcccaactggtcacgtcgaccaatctttcctctgccctcgatgtccactaccaccctattgtctaaataggaggaactactggagagcaagctatttttactactaatagctatttggcaacttactaaacaaaagtt

SEQ ID NO: 153192 - DNA, 623 bp, Zea Mays
ttcttccttctgctcagtctgacatccttggtgtttggtcttcttgcggatttttcttgcaggggcgagcttcttcagtttcttgtcatagtccatcttcagggtgcggtaagcctcacgggtattggtttcctcgccttcagctattgcaaggctctcttgaagggacgccttttcccctgaaagttccctgaccttttgctccagactttccacccgggaggttaggtaggtgcagtggagggtgaggtcatcatattggttatcaagggtgtgaaggtatccagccatgtagacgatggtgggatcattctcaataggatctcctcctgacaggacctgaagtcttttcctccaggtgggggtattcttgttgctgggtggaaagtagcgaaggggggtttcaaagatcaccttgttgtagttctggcatagttgtcggagggctgatcgggcaacattctggcaagtatctggaaagcggtatccggtaaaagtgacttggaaggaaggatgatttggatagtttcggctttctcccaggtagactgccatagagcatttctccattccgccctcgagatactccttccagacgtatttaggcttcttgcggattccca

SEQ ID NO: 153193 - DNA, 384 bp, Zea Mays
ctgctttcttcttcccaagcaacgtactaaccgatgcgactggcggttctggtgctcccggcggcggcggcggcgcccatcgtgctctagactagccaaaggcaagcgcttgggtggggattaatgatgggcggtgtggctcagttggtggtggtggctgcgctcttggccactgcggccgccgcgccgacggcggcggcggcgggggcactgccaagcgaggtggccgtgggcgccctcttcacgtacgactccacgattggccgcgccgcgcagctcgccatcgagctcgccgtcgacgacgttaacgcggacgacaaggtgctcgcgtggaccaagctcaacttggtgtctatggacaccaactgcagcggcttcctcggc

SEQ ID NO: 153194 - DNA, 321 bp, Zea Mays
atagaatacaaatacttgttttgtgtgtttgaaatgtatacagaatctggtttgagttgtaggggtaaatgtaacttgctgaagatagatagattcttgtttgcacaacatatagttggtatttagcatgaagttgtcagtatgctatgaatttctaaataaaaaaatctaagtggtcaaagcatggtgggaatcgatcttgagctctatctgggtttaacgactcaatgtgctttttggaactggtagatctacagggagtggatgcgggcagatctgcatacccccacactctctcacctacacacaggggcggatcta

SEQ ID NO: 153195 - DNA, 447 bp, Zea Mays
tggcttgctctagaggatggacacttcggcaaattgatattcaaaatgcctttttgcatgggtttcttgaagaggacgtttatatgaagcaacccccgggctttgtggataaggcccaccctaattatatttgcaaattggataggtcactttatgggttgaaacaagctccgcgagcctggttttctcgtctcagcaagaagttggttgcccttggcttctccccgtctaaagccgatgtgtctctgtttatttttcacaagccaaatctctttatgtatatgctcatatatgttgacgacatcatcatcataagttcattttcatcggctattgaaaatttgcttcatcagttgcgaactgactttgcggtcaaagatttgggacctttggcatattttctaggcattgaagtgtctcgtatgtcctctgggattctactgtcac

SEQ ID NO: 153196 - DNA, 591 bp, Zea Mays
atcaagggctgttgaaggagtttgctgatattttcacagttcctactcaattgccacctgctagacagtttgatcatcacattccactggttccaggagcggtgcgccggtgccagttaattctaaaccctatagatactcaccttttcacaaggatgaaatagagcgtcaggtctgcattattgcaagctggattgatcattcctagttctagtccctttgcctctccagttcttttagtgaaaaagaaggatgggacatggcggttttgtgttgattacagacgactgaatgatctcactattaagaacatgtttcctatgccattggtggaagagattttggaggagttggtgggtacaatttttcacaagcttggacttgacaactggataccaccaaatcaggatggcagagtctgagcctctgaggaatataaaactgcttttaaaactcatcaagggcattatcaattccgtgttatgccttttggacttacaaatgccccggctacattccaatgtgcaatgaactcgattttggccccttttctcaggaaatttgccatggtttttattgatgatattctca

SEQ ID NO: 153197 - DNA, 493 bp, Zea Mays
cgggcggcggcgtgcgcccatgcggcgctcctcctcgtactcgtacgcctcctccaggagcacttccgttcccgcgccgcctcttccaggtgcacgcgctgctccttgacccacagtgctctctcccactccggccagcccatctctccctccgcggccagcagctttctcttccagtccggccagcgagcccctgcgcatccacttccaggcgtagcagcggcgtgtagggactccgctcgtggcggccggcggcggcggcattctgccattgccaactactcacataatcccaggcgctggcctctcgcatgcacgagcacaagctatgctcaggcacctaaccaacaacccattgctctcgcgccgatgccaccgcatgttccatcacaaccggctctgtaccaccgccacatcctcggcggccgccggtgagatcgcgccggatcccgccgcatacgagactaccgttggcgttgaatatgacctcgcg

SEQ ID NO: 153198 - DNA, 1053 bp, Zea Mays
tttcggcagcacctttctatacgatgaggtttctaaaacccgcagagaaatgaacatcacaatggctgtcatccacactttccaacacagaaaacagcatgatggctgacatacaaatgcgcagtaactaaatatagaaacaacaaaatagctacctacctgtatgtactaacaactatattcactaaatatattaagcaaaatgaaataaactaaagtaaactaagtaaatacttaactaaattacagctaaactaacaaatacacggccggtccacctcgtctcggtggtacaacacctggccgtacgcagaaaggtctatcgcgggctgtccaatctaaaaacctctcgtatgaccagagctgtactagtaaagggcagctagtgaagatggccaaaggatcggtctttatgcagccatcatagaggccccgatacgtcgcgcctagcacgacgttaccccagtactgggaaacctggctaagggaggcattcgcgatcgccctcgcgtagtggatcatgtccttcctcacggagttactgtgagtactagtgaacatgacccacccgaagagccacaacaggtacgcctccatatgtcgggccatcgtgtagctatcggtgtcgatcctcatgtactccgcctgagcacatgaagttagtaacaaaacatggtaatgtacagcgtgttaggttcacggaatggcaccgtgaggagtcatccaatcctgcgtccaaacctcgatagattgtttggtttgctaaagggaaccaacctgtctgccataagattacaccctcctccagtatattcacggcatccactcattcctctagaaataatcggacgaacacatgccggacgcactgatgctagacggggtgtgtactccccaaaccaaacagctcggtaaagattactgtaacggtagtcctaaatgggatgaatacttgatacctcgaactgtctttgtccgaacaaccatttttcatgactccgatcaagcacccacgtttttggcctcgggagccggtaaggtagtttttggtct

SEQ ID NO: 153199 - DNA, 414 bp, Zea Mays
gagaattagagtcaacagcataatccattgaatcaaatggatccactgcttagagataaaatcgataaaacgtcatgatcctcggagaagggggtacgagaatgatcagaaatgagagatttaggcgagatcaacatccggtacttgagaacgggttatagcagataaccagataacggggcagaatcattaaaggattagagattcggatgataaagccaacatgattcacaagaaaaaggattaccagatccagacaaaaggagaggtaggcaaactggatcagctaggatgattaacagaaatgctatgaagttttaggagcaaggatttatggaaagaaacgtggccttgatagggtttgcgcaactagacaccaacaacaatttttttttgacacaagtgcacaaggag

SEQ ID NO: 153200 - DNA, 575 bp, Zea Mays
gaattcacctgctcctcgctcgtggatccgaggggcctctacatccaaagttacacacagtggtctgatgtatcccgtatttaattttgatacagagaaaatcgaaattagttttgaaaattgaaaatctatacgccaaatttccccaagaaacatcgaaaaccgttttaaatttttgaaaaaaaataaaactgatcgagaaattcgaaatcaaccggtttttggacgctttctcgttaccattaatcaccgaaaaacgaaacaaaacaagattgtcaaccctgatcctcattgagaaaagataaaagagggatgtgtcggatttgatgagagagaggaggggtagtgccgcagcgacgagggagtgtcaggaagaaaagaggcgaagaacagggagaaaaagaggtgcactggatatggagtgaggaggggtgacagagatattatgttttgttgcccccaaagcgacgaggaagtgttgggaaccaaattgaggaccggacggtccgcggtctggaccgtccgcgcgtgcagaacagattagggttccgagttttttattgtgtttgttggcg

SEQ ID NO: 153201 - DNA, 418 bp, Zea Mays
gttataaagggccacatttaagtttaagttctgaactccaggaaggcttcccacatggcttcatctagaaattttctacataaagatgtacttttcagttatagataacaaagagcctttttgtggagagaatatctaaggaacaacagtcctagtaatcttatataagcttgaaaaagatgttgttgttccaatacttggtttggtttttcatacatttacagttgattacctttatagtgtaagttgaccttattgttcatttgctgattaatttaattgaatttcttagccattgtttctttttatgtacctttttaataactgtttcgagtcgaatatccctttgaattagaattgcatttacactctgatgttgatacggtcatatcaccttttttctggaattcagttcatt

SEQ ID NO: 153202 - DNA, 417 bp, Zea Mays
ggcaaagcagaatagaaacatcagcttgcatcaaccaaacaagggtatgttttatgatgaaaatatgaccataagagctacaagttggctgttaagatcagggactcgagatctttatttttaagtttgaatgcatcttaggtccaataaagagactatctaagcctttaaaggtatgagcttggtcatgtggtaataacggaagaattcaacttcatccatgcttggaaacttggaaggatttcgatggactgataacgatttgggttatggttcactaaatgaggacatggcctagctttgggtttatacaaacaaactacccacattataccagcacacaagcacaaaaacaaacacaagttgcacgagcggtcaaactaaaaagaacacaggcaacataaacatatgtttaaa

SEQ ID NO: 153203 - DNA, 688 bp, Zea Mays
tagcagattgcccatcagaccattactcatgagtaccttggcaacaacctacacacatttacaatttgtgcatccatgatggctccgttcattgtcatatctctaatctatgatttagccactcccttcatctgtttcttgatgcaccactgtgcccatgtgctccgtcgctccatctagacccaagctcctgaatccgccaatcaccacctacagcactcccccaccttctgcctcttgcctcccccttagcttctcttggagcacctgaagctccgcagccgcgccatgctacggcagatcgccaacacgagaaggccaacaacagatcgctaataacagattgtcgtgatacaacagatcgccctaacgccacaggagagggacgcctactacgcagcgatcgagtgttgtgtggtgagcgtcgtgcacgctaggctcaaccggatcgccgtgcatgggggtgcgcagggttggcgatctgcagcagcacagcgcgtccaaccagtggtgctttgatatgcatgaggtgggaagcgagccggtgggcgactgtgtggaggctatgccaaatcaaatggttaggatttgtttggttgcctggcccagtctgggtctgactcggtgggaggagcaggtccacaagagcctacatgtatagagcatacccaaaatgtttagttacctg

SEQ ID NO: 153204 - DNA, 601 bp, Zea Mays
ctcaacgtcggcaaccacaccctcggattcgcgccagactctacgattcgtgctttagggagtactgatagttgctcggggtagtaaatatcaccgtatggatgaacttgagccactgtttcactccggtcgccgtgtctacctgactcacggccgattcggatgaactcgctggaattagccacctatcgaccatgcgccatgtgccttggtgtcttaccacgtcgcagtagctcgtattacacatgttcggtgatcgccagtgagctcgccacggtgaaagccaccaatctcttgcgacagttctctcttctctctccgaccgccacctcgtcatctcaaattcacgggccaccactcggggatcctataaattgagcatgtcgttggttcctcaaggtagtcaagtaaccaatacaccaactcatgcctcaaatcatccactagagctcgccaatttgaaatgtcccccaaatcggtccagagcaccgcgcgaagtgacctcgccatggccaacgtgctacaggtacgttcatgtcctctagttcctcatttcagtatccttaggtgctcttgatactccctgacccatcgaattaag

SEQ ID NO: 153205 - DNA, 905 bp, Zea Mays
gttccgcaatcggctaatgagttggtctaggacaattatatttatgtattcatcgttggtgtaggttaaattaggtgaaaatgtaaattacatgacatttaattggtgttggaaagtgagataggttaatttagaaaggtgggttattaaacatgtgtgccgaagtgcgttgtagtagtgattgcgtaagttgaaccgaagtgtcccaagtacatgctaggatatggttgtatttgagatatttattcgaggtgcgcaggtatatgccgtaatatggttatactcgcggcgaggaaatatgtatgtattgtgtaacacgacgtttaggtcgctattatataatcgtgtgaaggatgctcgtgatggttatgtgattaaggagtgatgtagtggcaggcgagaagtaagtttaattttcaaacgattcgtgggtagtatctcgatgttgtcatgatttttgtggtatggcaatgtgatgcttcgctttgtcaatcatcacattccatgcccctttggataaataaatgtcttgttgatcgattagaggtcttatacgagtgttatcccagcccaataattattgggggcaagtagcgttcatgagtcaatccttgctaaaattgaagaacagtccgataacatatgcacataagtgctttaggtcttcagtagccagtgtaagtcttatggagttttatgccatgttttaatgtctctatgttagacctcctaaaatatggtgttttaagtgacttacgtgttaactaattcgagtggagaaatggttaagaaaaactaattaacttgctcccacctatgtttttgagttgcgaagtctaaaatacttgctaagttttatactggttaaccaacttgttagatgactttagttaagctcgtggtca

SEQ ID NO: 153206 - DNA, 1301 bp, Zea Mays
cacggacgtttggcttccttcgacgtcagcccatcttctgaaggcttgtttcagcagcctccgttcctgcatcctcctccaattgctgcgactgtgctgatgtcctgacattgtcctccccttgaaatgccgcttgcccccaagcggctgcagtcggaaaccgagcacgcaaagcttcctcatcttcccaagtagctaaagcatcatcgccttgagaccacttaatgaggacttgctgaatttgtttgcctccccgtagaatgacgcgtcgatcaagggcctgtaaaggaacctgaatgtgacttaaagtgtcaggtagagcagcactgactggtcgatttcccactgcacgtttcagttgagatacgtgaatcacagggtggatagtagcagaagaaggcaactgcaatttataggccactttgccaactctcgcaagaatcatatagggcccaaaaaacttgaagcttaacttgtgagctgccctgggcgccacagaggattgcacatatggttgcaacttgagataaaccatatcacacactgcgaactccctctctgtccgtcctttatcagcttgagatttaatccgttgttgggctcgcaacaggtgttgctgaatgagcttaagcatcaactccctttgctgaagccaagtaccaaggtctagttgagtagaagcatcagaaatattgagtcccagatggcgtggtgcccttccatacaacacttcaaaaggtgaacgccccaatgaagaatggtaggtcgtattgtaccagtactcagctactgacaaccaagaagaccacttagaagggcaggcatgaacaaaactcctgagatatgtttccaaacactggttaacatgctccgtttgtccatctgtctaggggtgataggacgtgctcatcttcaatgtagtacctgacagccggaaaagctcttgccacagtcggctagtaaatattcgatcccggtctgtcacaattgaaacaggaagcccgtgcagtttgtaaacacagtccatgaatagctgagccacctttagtgcagagaaaggatgcagtaatgggaggaaatgactgtattttgaaaaggtatcaacgaccaccagaatggtgttggcattggcagaccttggaagaccttccacgaagtccatactaatcacctcccacgcttgcttgggaattggcaagggctgaagcaatcctgggtatttgctgcgatcaggcttggcttgttggcaagtagaacaagaactcacatactgcttgaccatagtcttcatagatggccaa

SEQ ID NO: 153207 - DNA, 439 bp, Zea Mays
cgaggtcacaccgctcggtgttcttgagtgatttgggggaaatcccaaattggggagctctagtggttgattcgaggcactggttgcttcactggttgcacaactacttagcgaagcaggcggggtcggcaatttgtagcaggcttgagcggtggctagtgaatttgagagagacgcgcggcggccggagaagaagaaggttactggtgcgcgtgattggtggcaattaccgtggcaagctccccggcaaccaccggacgagctaacgtgagtcacggtggtaaagttaatgtgccaaggcacgtggtgcaaggctgcgaagtggctatctccggcgaacccatccaaatcgaccgtggtctgctcgggtacggtggccagagtaaaatagtggtcggagtgtatccacggcgtgatatttacttacccccggtgctat

SEQ ID NO: 153208 - DNA, 717 bp, Zea Mays
atttaacccttggccaaatgttcaacttcatttctctagtgtaggaatagtatttgtttttatatatttattctcacccacaaaatattttatttatcctccttactagtttctagaatttctttatatcttaaactccactttggccattagtatatctattttcacattatttttatgttgtcacaaaatgcacacaagaatgaaaaaccagcatgatgcatgttttagtggtgtcctttgttaacccttttatgtgtttaagtgaggtgtccacatgaactgataagtagggattgcacaaatgtatataaaggagtataatttctccttttagatcgttttttacaaagtgggtagtacaacattattgcgaggtcctgtgcattatgtttagatgtacccaattgaaaggcgattgtatactttgaagcgctatgtgaggaacagggcacgaccgaaaggctccatcgctgaggcatataatgcggacgagagcttgacattttgctctaaaaacatggatgatgtcgaaacaaaatttaatcgggaaccaagacataaatggttttctaatgaggaagcctatactgttgatgtttttgggcatgcagttaattttaccactgcgcctgactaaacattcatatcccgacaaacaaaaataaacatttatgcagtaaacagaaaaccaatttagcgtaagtagatcacctg

SEQ ID NO: 153209 - DNA, 549 bp, Zea Mays
cttctctgcctcgcttcgcttcctacccacgccacgcgtgtgttcttggcagccacccaatccccgcctcgcgaaatcagacgccaaatccccttatcttatcatcaaatcgatcgccaacgggcatgatctgatggctccctcatcatagcctctgctgctgcaccgcagcaaaatggccctggtttagtttagtcctcaagatcccgcctttctggtgctctgtttggctagtgtcgtgccgccgcgcgaggacccggagattcgattccggtccggtgtatctctaggctgcttggtttgggttaggatttagtgggcagggttgtgcagctggtgtctcgtggaggaagaatttcgtgggaggattttgaccgggtttgggcaaagagcgcgccgttcgggaggaggtgattctcgcgtggttgcgtgctttgctgggagtctgctgcggccaccgccggtatggcgacgcacttcacgccgtcgcaggcgcacgcggcgtcgcaccacgcggcgcaccaccactcggcggccgccgcggcggcg

SEQ ID NO: 153210 - DNA, 477 bp, Zea Mays
gaacaagtccccaacaaaaagaaaatagaaattctctggaaatagaaaaagccaatctagcccagttagcccaagtcggcccagcttgcgcccgcgcccgcgtccgcccgtgctgataggcggaccccgcctgtcagtttgtctcgcccgcgtgctcactccccctctcccactcgctgctctgtggggtggagctgtcggcaccgttcttttcatacgtgcccattatctctctctgtcccgctgtccccacctgtcagtcgtccctaacctctcgcccacgatctccccgccgtggacgcgcccacgtccgcgcgttctccggccacgtccctgcgcccgcgccccttttgagccccgcgccctgctcgcccacctcccctcgctcatttgcgccctctgccaaaccctctcgccctctctctcgctctgcccacgcgtgcagagagctccgccaccgcccgccgtcgaccgctg

SEQ ID NO: 153211 - DNA, 353 bp, Zea Mays
tgtgtccttaggcttgattacgtcagaagacatcctatatattgcattaaggacttcactaaatttgcggcttatagtttccaatgagtgaccaaacttattccttatctgtctaaatgattgcggaccgccacatgcccacaagaaaatggcagttgcttccgttgtagtaacaccacgacttggtaccagaccataattttgcaccaacgtatcatgcaaacgtcgaaacactgttcgatgcatgcgaaacatgtcgaagcaatcatcactactctccaatgttcgctcaacccattggatacctgattcaaccatggttcttctcgaaaccccacttggcgagctccccc

SEQ ID NO: 153212 - DNA, 1489 bp, Zea Mays
attatatgtttataagtaaagaaccataagaataagaaacacccaatcaatggatacacccatcttctaaaacgagatgcatgggaagataactaacctatggaatttcaagaactcattccatataaatgagagttggctgctgacaatttgaaatagttcaaacaattcttcctcagatagagtatacagcaagatatcatcagtgcttccaaccacaaccccagaactctgaaacaagtttgagatgcatcaaccaatacagatattcaaaaagatagaaaacgtttttcagaaaaaaaagtgaagtatacctcaagaaaatcacgtaagatgccagtcatctggggactacactttgtgggcgtaccctgcccataactgtaactgggcgaagctgactttgatggttgaactgtctcatatttaccaagggttaagtcagtgcgatccaaatcctcaagagtgctaccaacagcattactgatcttcttcacttcttcaagaagtatttccctagatattagtgatgctttcacaataccatatgactttgagccaaaactttgttccagcggctgcatgttatgcaccaacttttattcttaaaactaagaaggcaatttattcgtttctattactaagttcctactagatattggcatgccataaacatatatggtctgcagctgatgattgattaaaaatcttcaattaatatttgtgacatattgattacaagcatacatgcggtttatgttatagcaatatcacaaaagctttgtagtgggaaaggcatctaaagaaatctaaagaatcacaaacctgtgtaccttcagtgatgatttagtcacagcagctttcaggtagacaatgtgtattgtcagatccactagcgccgagtgtaatgcgtcaaaatggacagggcaatacgagtgtaagcctaggagtgctctatgtgggatcctaaattcatggacagggatcaaatctgtatcatcacttgaatcttgaacgtcagtcctatgatgcaaaagaaagcagcttatcagagttgatgaatgcgaactgtataattttgggtgcacatgtggtttaacacaataacacacacaccatgcattccccagtgttgggatatatatgagctcgaacttcaatataacagaagaagttgctggaccctagaacggagagagagtacagatcaggctaaaggaaacaaggttcactaacagaaacaaaatttatagtactcaacctcgtcttcgctgttgggtatgtagaaggacaccataactgatagataaatatcttgcctagaatatttaacaagaaacggctgtgtgtagaagctattgtcaacatcgtctattttccaaaagccaaatgagctcttcacaccaatatcaatagctgcataatccacctagcatgtcattatctattagccaaaggtttgagttcaaaagtcatataaatataggaa

SEQ ID NO: 153213 - DNA, 1079 bp, Zea Mays
caagctcgctggtgatcaactgagggtaatactgggtggctgggtgtgtgatgatcttgcggagcttacggagggctcaatttatactaagcgagagcggtggccgggaattgtagcgaagacgcgcgacgatcagaggagggggagttcacaggcgtagtggattcgtggcatcaactgtggcattcactccggtgatcaacggagggctaaagcagatcacggcgatgcggtggagatgcctagacacacggcacaaggccggaaggcagcagtcaccggtgatctcatcttaatccaccgcggcgagcgtagtacggtggccggaattatttactagccggagcttatccacgacggtgtgactccgagcgttatccgatcaacccgagcacgaatcgagacggcagcggcatgaatcgcgacggagagatcgtcggtggcgaaaaacttagctggcggtctgatctacttcagatactgtaccatggcgaactctatgtagtgcacctgacagccaagatttagggcagattttctctaaatttttcatggcaactcacccaaagctccgcagcaaagttgtagaccaatgattcagctacaatcttgccataacaactatagccaagttcctactagatcatgcttgaattcgtgcccaaagttcctgcagttgcactgtcagtctgaaattcagtcttcaaacagcctgacagcccatctttgggtgcatttttctccaatttcttcataacaaccatgcttactctcttaagcaaagttattctcctttgataggtctacaatgttgatgtggtgatctagggcaaaatccttcttgtttggaagttacaaggtcacaaaaatgagctcaaaacactaaatttcagacttagctttagaactcaaatagggtccttttgcaaataggtccaaaattcagggtttagcttgcaaatcttcatgattgtgaaccatatgacttaagataccttactttcatagtttttgcactttagtccaaaagtgcactgattttgcacttagccccctagggtttaggtttagggttttcc

SEQ ID NO: 153214 - DNA, 380 bp, Zea Mays
aaaagggagatgtgaaagttccttctgacagtcgtccatttaaacaaagggtttgaagaggaattggaaatgtcaaatcatccagctgtagcacttcatcttcattgcatcctcttatcgttaatcgtgacagctggcacatctttgacaaagagccacacaattgtgcatagaagttacaccttacatcacaaattacaaggctcctcatctgggataagtttccaagttttgcaactaatacttcacttgcagtaatggcatacagagtttgcagttcaatcaaactccacaagcccttaaatggctccacagcttcccaacttttgaaactgctataagttacatcttgcaaccgtgataccataagatgtcgcaat

SEQ ID NO: 153215 - DNA, 484 bp, Zea Mays
tgcttgtccgaagggctgcgtgctatttaggaaagaatacgcggaggcaaagtactgtcccaagtgtaaatcatctaggttcatggaggtagactctggtgatggacagaagaggcagctcgacatccccttgacaatcctacggcaccttccattcatatcgaggatccagcgtctgtacatgacagaggaatccgcgaaacatatgacatggcacaaaaatggaaaacgatacaattctgacaagatggtgcacgcatccgatggtgaagcatggaaacactttgatgtcattcaccgtgagaaagccgaagaggctcgtaatgtacgtgttgcgttgggcacagatgggttcaatccctatggaatgagcgctgcctcgtacacatgttggcctgtgtttgttatcccaatcaatctcccccttggtgtgtgctttcaaaggcagaatatattcatgtcattgataattcccggacacccg

SEQ ID NO: 153216 - DNA, 475 bp, Zea Mays
ccaggggctacacgcatgtgttggtcaccatcgacaagttcaccaagtggatcgaggcctgatcgatcgccaaaatcatgccagaacttgcaaaaaaataccatcattgtacattgcattgggataccaaattccattgtcactagacatgtctggtgcgttataaccctggtagattgcatttacatcctctctaagcaacctatcgggtgtagagtttggtgtatcaccagatatgtttaatgtgttataatcctccacatacatgttgcagacgtctatatatagttatcatatctggtgtgttgtttgatgattcattcaatacacacatgtgtgtctggcgtactctgaaatcttgtcctttctttagctcaacattgctcctatcaatgctttatctagtgcaccacagaacatgtttgatgttgctctgaagtctgatttcttcatttcatttttgtttggtcttctt

SEQ ID NO: 153217 - DNA, 397 bp, Zea Mays
cgcggccagtgccggcgccggcgcggggtgtgagtgctgcgcgacaggtggtgtttggcgaggaaatcgtgctgggcatctcgcggcgacaggggcacgggtctgggcggcgcggtgccggtcaaggtggaagtggaatgcgcggactgggaaggggacggcgataggcctcggccacggccagtcgggctagctgccagtgccaactgccaagtccaagaaaaacattaggatgcttatgctttgtctcgtgagtgagttactaccatgccagcataactttttttttgtatggataaataacataggcacctttcattaggccccatctcatcttgttttttgtggaatacatgttgtaaaacctctacgtacatgttgacggtagacaactgtg

SEQ ID NO: 153218 - DNA, 660 bp, Zea Mays
gggaagtccctggggttcgtcaaacataggtgtaaaggatagcagcagctggtccatcatctgtgattctgcgagttgagtagagcatgtggctggttgtgtgatgtcgttgcgtggtgatcccagccccttccaaagaatgtgcctccctcctcgccagaacgccatgtagaggtcgtctaaatcccacaagatagggaccagtgtgcgcagaaattggacccaagatggcatcaaaactgtccaatggaatggcgtagcagggaattgcaaagtgttcttcaccgatgaccactagaatgccgtctgcgaacccggtgcaatccaccttgtccccatttgctatggtcactcttcttcctagactagggcccattacaatgtccaaccgctgcaaggtggtgttgtcaaggaaattatgtgttgatcctaaatccaacaatgttgttaggagatgacccctgatggaaattagaagttgcatggtgtcttctttctgagttcccattagtgcatgaagtgagatgatgggctttgctgctgttgtgtcttcttcatcagtgaccgtgtcgtccgtataatctgagacttccaaatagaatagccactgacagcgatggccacggacatactgctcatcacagttgtaacagagcccct

SEQ ID NO: 153219 - DNA, 374 bp, Zea Mays
tgcgttcagtctggatgcaatttgttagatggatttattggaggttatgggtgtggagtgatttggttgagtgagttttgcaaagattaaaccggtagattatacagtggtataagtatagggttaaattataaaaaacaattccaacaatagtaccctactttaccatttttaataaaaaaatatagggcacaccatagtgtaatccaaatatactacgtcctagattaaggatttctacatcattttaaacctttttcatttataataatataatctaaatgatgtattgttttaatttttaggtattattttgaggaactttattggagtcgttcttagataaaaacgagaaatgcgatagtggcttgtgt

SEQ ID NO: 153220 - DNA, 743 bp, Zea Mays
gggagaggactgccgagtttggttgatgcagattggcgatgggctaccatacggcccatggatataaagcccactggctccttttcaagagagtgaccgatagaagctagaaaggctggttcaaaaaaaaaaggaaaatgagtgtactcagtactcaccacctcacgccgccttatctgctactgcgacgcgccagaagagggcatttgcgacaattcacctgcatacaggggcagcatatctagcagctactccgcccccaaatgctcgccggcatatcccgtttcctcactcgccgccgccgcccgccctttccgcttgccgctaccgccgctgcagcagccatgtcgtcgtcgtcgtccacggcagcgaacatctccgagcgtccgatctctccggacaccacccgcgtggcctgggtggggacgggcgtcatgggccagtcaatggccggccacctcctcgccgccggctacgctctcaccgtattcaaccggacggcatccaagacccagggcctcgtctcccgcggcgccagcctcgcggacagcccgcgcgcggccgccgcggctgccgatgtcatcttcctcatggtcggcttcccctccgacgtccgctccaccgccctcgatccatccacaggcgccctctctggcctcaccccaggcggtatcctagtcgacatgaccacctccgaccccaccctcgccgccgagatagccgcggccgcggccgccgccggc

SEQ ID NO: 153221 - DNA, 377 bp, Zea Mays
cgagatgcgagttgacctgcgcagggtgcgtacacgtgcgcgggcgctagatctccgcgcgttgacttgtactgcgctgaggagttagtgaggatcgcatggtgcgcattgcttgctacctgtccctaggctaggcggacggacagtacgactggtgagcaggatggcggtgaaacgcgtcttgtgatggccgcctcactgcaacgagttgacttgttgaacggcctggattgaactgaagccagtgtgtgtctaactaatttatgagtatattattacatgttactcatatttataatttattttagactaaataggattagatggcttctaactcaattgattgtactagtacaatagttgggagccatctagtc

SEQ ID NO: 153222 - DNA, 436 bp, Zea Mays
ccacctcaaatccatcactcgagtcccagcgactaaccattcggagtgagtccgcacaagcatccccgccgaacacaaatcttactgcccctggttttcgaaactacgacaatgtctgcaaactgtttgtgggtgtctacatggcaaaggtcgatgtcacttatttcaatgtggtctcttaggaaatggaagtatacatcaatgtgtttagttttggggtggagtgcatgattcttcgccacactaatcgcactagtgtatcccaaaggagtggaactctctcaaagctcaaaccaaagtccctcaaaggtgtctatcatccataggaactaggaccaacatcgagcagcaacaacatattcagattccattatagattgggctaaaatagagtgtttgcgagaggaccaagacacagtacatacatgtggcttcg

SEQ ID NO: 153223 - DNA, 642 bp, Zea Mays
catcaggggcatgtaagggtgctgaaacaagagatcagaggtcatgattggacctggagcgcacttgccacggtgagacccttcttacggtggcggaaaaccgatttgggggaagtgagcaattcgggggctctggtgagtaattggaggcacgagtgggtgtgttgggtgcataattacatagcggagccgagggtgtgctcaatttataggaccctagaacggtggcccgtgaacttgagatggcgcggtggcggccgaagagaagggggtgcactggcgcaagcaattggtggctttcaccgtggcgagctcaccgacgatgatcggttgggctaaggtgactcactgcgatgtggttaaagcaccaaaccatgtggcgcaaggtcgcgaggtggctaactccggtgagtctatccgaagcggccgtgactcaggcgggtacgacggccggagtgaacagtggccggagttcatccatggtgcgatatttcttacccttaagagttatctgcaacccacagagcatgaattgtaacgacgacgagaatcccagtgcgggatcaccggcggcgagatgaactgaatctgggatattttcagcacaatgtaccattgggaacttgttcagagcgcttgaca

SEQ ID NO: 153224 - DNA, 676 bp, Zea Mays
ctcaattcagaagaaagacacaaagcatcatacacggaaagcatagctggtattttcttcaagtgcgagattacatcatacttgaccgacacattatgagtatggtcagccacatcactcggagtgacatttaggggatctttttgtggaggagatggtctagctaattgacggcctgatctaagcttaacttcgtcaacttctagtgtctcttcttcagggaagtgaagagactcttcatcatcctcaaaaactccgatggggaaagcatcatatcttttatgggagttgtcctcgcacctctctacattttggtagatgcgcgggccttcaccctactctatcattcgttggagagcaagtcgtcttgagagttgctgttgacgctctcttgatctttgggaacttgatgatccaccttttggggtgtggatccatcgtaagaaagccttgccttcatgctggcgcttagcttgctgttgtggataccttgagaaagacatattaacatgctcaggttttgatgtcataaatttgtcataagttggccacatttttagagttgcacaactcaccggatcactttgaactgtggcgacatttgaggtagccgttttcttcccgctcttcatgcttttgagcaaatcagcatctatagtaccatcgtctatgagct

SEQ ID NO: 153225 - DNA, 943 bp, Zea Mays
gggagctctttcactttggtgtcatcgaggcacaaaagcctaaggttgaatagctccccaattgaatttggaatagtctcaataggcaagcctgataagtctaatactgcaaggtactttggtttggaggaaatagaagaataccacaaagataatgtcatgctggtgtcgaacgttatgaaggtgcgaagcctggatggatcaatggttgatagaatgtccttgctgcattggagcacagccactcgtcgggaatatgattccactagcattccttcattatttccatcataagttgtactaaaaccctctcgtttagattggaaaatggctagttcacgcacaagatcatgcattcggatacatctaaccctaccaaagctgttcctctctgcaacgtgaagcatgctccgtcgtatgagttctctaagataactttcagcagtgtcttctaagctgcatgcccctttttgttcaataaatccttcagctatccacaatctaatcaatctctttctgtgtattagatagtcttctggaaacatggcacaatacaggaaacagttcttcaaatagtctggtaggtatttatagcttagatttataattttctccacgcgattaaggttctcattgttgtgtagctcccagataagctgatcataaaatagcttccactcagcaacattctttggtctcaacgacaatatgcttcctattgccacaagggctaatggcagaccatcacatttctccacaatgctttcaccacactgacgtaactctgaagggcaaatatggttttcaactttaggaaatgccttcctacaaaatacaagccaggaatcatggtcaccaagaggttctactttgatcttacaactatcctcagctagtgaagctacctcctcagttcttgttgtgattattactctgcttccaa

SEQ ID NO: 153226 - DNA, 762 bp, Zea Mays
ctgagtgttaggcaggcattagattgattcattctgtatcccaccatggactgctttgctggggcgacatcatgctgccacagcttcgtcgtgccaacaaagtccagggccacatccagttaagtataatccacgccgcagttctctctattatctctctacttcccctacgcataacatctagcacaagaaaaatgattaaaaaaggattttgtggctcctaggttattcgccatcattcctaaaaggactgctaataagagaactgtcctcgaggccctaaccaacagaaagtggatatttgatatataaaaggtgctttgtctgtcggggccttagtggactacctgaacctttgggagctcctatcagaaatagtgctgcagcctgaagtggagaataaacatgtattcagtattgctgcagatggcaaatattcggctaagtcggcttatgaaggtctttttgctggttcaacatttttttggtcattaccatctggtttggaaaacctgggcacctcctaagtgttggttttccctttagctgactgcaaacaagagatcctggactgctgacaggcttgctaagagaggtttggatcacccagctagttgtctcttatgtgatcaggaagctaaaactcttgaccatatccttgtctcttgtgttttcacaagagtgttctggtttaacctcctgaaaccctttggatttgggctttcatccttcatgatttggtgggagcaaatctccgagcgg

SEQ ID NO: 153227 - DNA, 463 bp, Zea Mays
gggccctccgcccctggccgctgccgcaacgcggtgttgccgtcattcctgttggtcgtcgcgacaaggaagacgacacctggtgccgttgatctgcggggtaacggccggattagaacacaggaccgtggtcgttagattactagtcgacgatcatgattgaatctagcacatacttttgaccgggcgatcagtagccgtgggatctcagcggatggttcagattaagtccttgggataccctttcggtggtttgatcggcgtcgtagatcggtgatccaatggccgtgatgtcgtaccggttcacatatataactctctaatctagaccgtgtggtttagatctggcggtcacaattcaacgataccctttcgcgtggcttatttcctaaagagacccccagattattttagaaccaacccgcagtccactacgctgggtgatcttagtcataggaattct

SEQ ID NO: 153228 - DNA, 480 bp, Zea Mays
ggccggaggtggaagaaagtactggcgcaatggattcgtggcttctaccgtggcggtcattccggcgatcaacggagagtcactaagacttacgacgatgcggtggagataatcaggcacgtggcacaaggccggaaggcggctctcgtcggtgaacttatctgccacagccgcggagcacgaggggtacggcggtgagtcaccggagttatccccaggtgcatggcttttacttggcagccttatcgggtcatcgtcgacgtgaatcacaacggcggtggcgcgaatcacggcgaagactggtcgtcggcggtgaagacagccgcgctggcggtctgatccggtgcagacactgtaccatgggaaatggtattcagtcgaatgacatagcaagttgaagcttgattttctctcaattttccatggtaacacgagttaatccttgcagcaaacttgtagagtatgatacccactacaaac

SEQ ID NO: 153229 - DNA, 328 bp, Zea Mays
ggagaaaagaccaaatctgagctctataatccttgcttcatggtggtggattgttttggcaagatttccggagtcgatcttgtttaagttttcccccttctgggcttaagtcaggaggttatctgacatccgccaaatgtttttacatgttttattagttcatggtctgccttgataaagatcctcaagatcctcgtagttgcgcttaggctgttcacaatagactgtgtaaaataggggattaatattacactgaagtttgaaatagaggacgtaataggagcaggtttaccttcccgtttggaaaacaatggatttcaccattttt

SEQ ID NO: 153230 - DNA, 618 bp, Zea Mays
aaatcccctccaccttcccccagcctagctggtcctctacacccgcgctctcctcgctcgctgtcttgcaagacccgctaccagcctcgcgcgcctcaacctttctcatttctctagaggatcgacaggcgaggccacattgccatcctctcacgcccccattctcggatcgctgaccggtgagacccgcaggccaaggagtcaccgcgcgctcggggattcagtggctggtacgtggggccggtactccagatttgtcctcttctctacacaccatagcaatctcaacagacctcgtaacaaacgcagccaccacaacaacctcaacgaaatccaaaattcattgcaacaaactctgccgggttctagggctctgggatataagtactggtgctgcaccccatggccaaggcatcagatagatagaagtaaccatcgtcgcgcatttgctagagccgtcgcgactgggttctcctctgcgccgattctctgccttggcagacaactgtggtgcttcactagggcgcataggtgacaactgaagcttctggatgaatggagaatcatcggtgccgcttcaattgctcaccgaggattatttgtggaccgtagatcggc

SEQ ID NO: 153231 - DNA, 1254 bp, Zea Mays
gggttaccaacctttcaattcaaaatactatgaatgcttgctcacccttcatgttaattagaggtcggcctgagcctgcactcattcatttttagaaagctattcatttcatttgagttctcagcacttttttgttctcttcgtggaatgaatgacaacatagtatattgacgatccttgtgtaatatggtcatactattttagttccctaaacaaaggccacatatacctttatactaatgcatcattaataacatcatccaacttcttggtgtcacctaccttggtgtacccccctccccgccccacacttctctctccaatttagcactgattgtaacatcttctcagaagatgacatgatcgacttagggggttgtagtctagccttagattgttatcttccataatatgttatgtcagtgatccaatggacttcatggaaataccatttcattgtgttgtgtgctgacaccgtcatgttttttttgctattcttcaccaaggatgtgacatcatgcttattcgttattgattcaaagcccatatgcaattgttactcgttgtgcaattaatactgttagaatattaattgttgcctatatgtgtattagagctttatatatattgggaccaatccattttctgcatgagattgggttgaacctattggcgcctagggtttccctagtcacttacctctaggactatatatgtactcccgtacacataaatagatgtatctaattctacagcaataccttctctaacatggtatcacgaatctaatctcgcttctgctcctcccatggctgctgcctctctagggcagccaccctttggggccaccgccacccttgtttcgcgtcaccatagcaacacacaaacatctcctcccacctcctgcactcatggtagggatctcatcgactgtcgaggtgtacgcccgcgctgaggtcacgaccttcgcaagaggatcgacgacatgcttgccgctattcagactgtggaaaaggaggctgccaacacacgtgctcgcatctaggcagccacccttctcaaacgagaaggctgtcgtcgccgccctcgagtaggaggtcaccatcgttcaatagggtttgggcctacaacaccacatggccgttgacccccaccttagggcacccccataggatgaccttgttgtagcctatgaggctgctatcgtcaacctccttgtccaggccccatcgaccacatattgtctagccctct

SEQ ID NO: 153232 - DNA, 384 bp, Zea Mays
tctaattaccagggggttctttaacaaaagcgcccgcgaaggggggtattggccgcgatcagccgttggattcaccaccgaggccacggattagatcgaaaccatcatgaaaccctggccgcacgatacagatggacgccccagatttaaaatcttcagatcgatttctgcccgctcgatttctgttcaacggcatagatctaatctacaccaaccggtacgctaaatctaatcccggccgccacgttaggatcggacggcacagaggatctctcctacccttagcgctggctcacggcgagcaggccaccgcacggcgaccggttcatcggagcccgcgaaatccggtcctcccaagcgccataccccaaattcgcacgaccc

SEQ ID NO: 153233 - DNA, 366 bp, Zea Mays
ggagtctttacgcctggccttgacgatgtcgattattttggacgaatcgaagaaatatatgaactcaattttcatggttccaaacctcttactccaatgatattcaaatgtcattggtttgaccctcaagtgacgagacagacacattctaatcttgggatagtcaaaattcgacaagattccaccttaccaggagacgatgtctgtatcgtggcgtggcccaacaggccacacaagtgtattatctcccatatgtgtgccaaacaaaagaacatcttaagggttgggatgttgtgtataaggtatcgccgcacggtagattacctgttcctaacaatgaagattataacttagacccagacacat

SEQ ID NO: 153234 - DNA, 1164 bp, Zea Mays
gacgagtagtttagaaaatgctagtttgtgtagaggatgtattgttaagacatgagtgtcggagtttatatattagtggtcgcgccacattgatcgaagtatctcgagtgcacgccacaatatggttgtatgcaagacatggttatgcgcacgatgagtttagtaaaaatccatcggtgtcactggtgtttagttgaggtttatttgtgcgtggaaaataataatgtgcttaatacttagaactcttagtcgatagcagaaattgttttggcttatatagttaggtgatgacatgccgtaagtagtcatcgcttcctctatatctagagtccggtcgatacacgttatgtgttcatggtttgggaagtaaatgcatggtgatttcgatttggatattggtggtttacgattcgtatgctttggtcggtgtgcaaaaatacttgtgaatatatatgtttataaaaatgttgtagtatatgttgtgtcttggattgtggtaacaatggactagccgacgtgtatgttatttagcgggttatgtcgttactctagttagccgaatcattggacgactttagttaagcacgtaatcgcgataaattgcttgttgtagtctaaatgcgcatggttacagtcgcgggtaaaaattagtagtgttcatgtgatgcccaagttaaactgcaaattactatgtgaagagcgcatcgataaacacatatatgccgggtaagattattgtggtagatgcgttgctaattgtgtatggcaattctagtgcaaaaaatgaattgtataaaattagtaagtctacttgttggttctaatttgattgtttcaactttaacaaatggtaaggtgttaaaataatttaagtctctagaacgtggcaatttttaagtgaataggagctggattttattagttgttgttttgggctgcacacagtgatttccctgtgctgtatgtttgatgaactaaattatattttctgtagatatgtgctatagaaaagtggtagataaccttattatcttacttgtgtaaaaatttaacagccataagtctgatcgtttagaagttgtgcttttcgcaaattcagtaactgagtctgtccaaattctgtacagatttcagaaactgcattgtttgcctaatttaatgtta

SEQ ID NO: 153235 - DNA, 1134 bp, Zea Mays
ttttgaaagatctgaagcccctggtcgccgttttgcggatcctggcttcggttttctgaagagatgcgatatcatacctctggacctctggacatgcgggttcgttctatacatcctcgcattttctcgaaggtccaacaatctgcttcaaatacaccagtgaatcataagaattgttcttggcagtttgcattttttttgttttttctattttttgctatgtgaatctatttgaatgaatcatatgcatcttgaatccgtgacgacgaatcgatggctcgatgatgattattcttgctttaaccacaccgaactaaaggctattggaagggtgctttcttccttcctccatttgcgccaggctcctctttcttggtgtttcctcatgaaaccttgctttcttgttgaagaatgcagttcctgttttcttccgcgagagtgcgaggtagaaggattcggtaagatttggtagcgtagcaaggggggaaagctggaggcctcgtccgctggttcttggcttgtagaaaaacctggcctttctctgagagcctttgccctgtatttgcaattgatacccctctttgaataagtatttcccccttttcaagccaatatgttccgctgatcaattatttatatgggtgttggacgataatctggaataaaatttgtcgctaacaaaacatattatgaaagtgattcggattattaaaatgattcttaatctgagatatatataaccatctagttacaaaacagttaactattcgcggacaggccggtctgccggtgcacaacctgcgagcgtcattgcatatctggtactttgaactaaattcccagagtgcaggagcccactaatcccttccaaatccgagcttcggtccctgctgctccccagctacccgcaggccgcagcaatggtgccgctttgttacgtagtccttatgtttcagacattctgcacaagaccacaacacaaatttacgaaaattttagtctatctgaacggccaaatttttgtgtcaaatcaattttggatatgtacttggctgtttcagatatccaaatcgtatctgttttctcagattaagataagcttgtacaattttaatgccgatgataatatatgtt

SEQ ID NO: 153236 - DNA, 381 bp, Zea Mays
ctaattcttgtttctgttatcacgcgccattaaaaatattcaggtggctccgatcagaaccgccaattaaaaacatgttttcactggtggttcgtttaataaaatcgctagtgaaaataaattttcacattcggttgataaaatgagccgtcagtgatgtttttggtataagtatcccttctcccctatactccactgtttctcgtagccacctgccattgccgtgatttcagagttctagatttcgctaaccttttttgaagtaaacacaaagcttttgatgtcctcactatctaaaccatatacctacaaaagaagggttaatggttggtatgtaaattacagtaagagtaaatgagtaaatccaaaaatatatttggt

SEQ ID NO: 153237 - DNA, 930 bp, Zea Mays
tgagcatggcatcatagcattggcattgcatatgtttgatacacctagaatgcattcactaggcaaaaatttcaagcaagttgtattgttttaatgttttgcaaataggaccctggataggaagctttaccctaaatagggattaaaggggtaaaacctaacccaaattgagaaaacctaaatactttagggaaatagttataaaatacctccaaaaataaagttgaatcacatttatacccctgggataccagaaaccctaattggaaccctggaaaacccaaaaactaaaccctaggggcctatgtgcaaaattagtccacttttgggactaaagtgcaaaaaccaagttaaataagtatcttaaatcatttggttcacaaatatgtggacttgaaagccaaaccctaagttttggacttaaatgcaaaatggacctcatttgagttctatactaagtctgaaattcagtgttgaaggctcaactttggggctttgaaactttcagaatatagggatttttaccctaggtcaccacatcaaagttgtagcccaatcatagaaggacaattttgcttaagagtgcaagccatgttcttgtaagaaaatgggagataatcatgcccaaactttggctgtcaggcggattaagtctgaaaatcagactgacagtgacattggatcatctttggagacagtttatgactaatctagtaagaatttgcccatggctgctgtaacaaagatgaagatggtataatggacaacaactttgctgcagaacctcggataggttgccatggaaatttgagagaaaatcaagctccaacttgctctgtcagtcgactgaataccctttcccatggtacagtgtctgcaccggatcagaccgccagcgcggctgtcctcaccgcccacgaccgatcttcg

SEQ ID NO: 153238 - DNA, 1548 bp, Zea Mays
ataaggaaaggtagtggtaggaggatagatggagaggaaacggaaggagatggagaagggcaagtctgagctgagactggccatggaggagctccgtttgtgcggttcaagagatggggcggaggaggaggaggaggtgcaggttcagcaggtgaaagtgcaggagcagcacaagtcatccacaatggacctcctctatgtctccaagcagctcatccatgtccttggttcgtaactcattatgctctgtcatacatatgcaagttctgtactgaaaaacagctccattttcagtccagttattatttttttgaaagatccggttgcccggctttgatttgtaataaggaggtctagcgaccattttcagtctgggttatttcgatcgattgtcaggtagtttcagactttcagcaggtctagtgttctgatcaataaccatcaattgttttaccttgttttgttcatatacagtatgttcttctgaggggacttttcagtagatgtgatgttattattctgaatcttgctttgcattgagcaaaggggaaaaaaatggttgtttctgtatgcaggttctgtgtgcaggtgttgtgggtcaggtttagcattcctcaacgtgttgtcatatatgggatgtgacaatttgcacacacactttgtgccctgttggattcttggagggaatggatacctcaactaaataagtggccaagaggcatttaacctttttctgtcatggatcatgatgccaccaaattggacatgtgctgatatatttcttttagcctgacaggcagtgatcagtgatgtagtgccatagcgcttcccaaatgatttctttttcagacatcatagggcttgttattaaaccttttttttctgtagtggaagtctttagtaaaatttcctagaacagtacattgagaagatacaaagttttgtaaaaagcaacatattccattggctgttgctttttcgtgtgctactctctccactatatatctctctctttctgaaaaatcagagtaaactgacaaactctaccctctgttggatgaagatgagattggaccaactctgctagtcctgaggcaggacattcagcaaaatgtccaggtaacccacccttctgcacttagcatgcctgtcatcacttttttttgtacagacttactcccaagctgctatacagttgtcagttgccaccaattcatttgcatctgttcgaatcactaacctagaattgcctctatgatctccttcccgcagaggttacaagacctgcatgaaaaggactgttccaaatacgcgtgcttgacggcgatagtcaccgaggaaatggagcaagggacagcgaagaagaccaagagctgcaccagagctatcatctggctgtctaggtcgataaaattctcaaagtacttactggagaggctgctggagactcctgagtcgagcctggaagagatcgtggaagaagcctacgcaaatactctgaagccatggcatggctggatctcgtcagctgcttacaaggtatatcac

SEQ ID NO: 153239 - DNA, 1208 bp, Zea Mays
attagttattagctggtttaaccagctaaaattagctaatagttagccaactaattccactaatattttttagccagctaaccattagtctagtgtgttcaaataggatcttagtttacgagtggtaagtgagaggtgtgcttgtctcaggtttcagtactaaaattatggatgaaccactgaagttcctgtttaggaagactaggaataatatttggttgttcaatgtcatctcccatgtttcagatgaacttggcttggagagggttttttccctaatagtggaatttgttggtgtgaagaatatacttgaattgttctttgagaagaatatagttggtgtagctctaaatttgtggcaccttgttaggtgttatttttattttggaaagttcacttttgtcttagttgaagttgatgctccggtgcttgagaattaggttcagtgtgtcattaagctaatattatttgttgattgacatatttaagctgtggtcctttgacatagtggctgtcttgtgttaagcttattagtcaatttttttgtatgatcagatgagtgcattcgacattttcttttgcatgttttaacctgaatcatattatagtataccaatccggtggcaagaaacaccaatgcattacgctggagttctacgcctaatggaacagtatgtaatctagcactgcaacacagttacaaacttcgtgttcttagaatatgaagaactattgacttgtctgatttgaagtagttgcagttgtatgcgttgctgaagttatgcttgtttgctgcggtttactgtggctttaatctagctatagtttgtacagtattttgtctctatagattgtagctacagtaatctgaacagctgtaccgtggccagccagtcgaacaagcagcttgaaatcatgtttatgaacactgcctagtttggggcgaaggcttgaaatcatgtttatgcacttgtttaggcgtactgtatgttcagtgttccaaatgaagctgagcctcgtcggggctcaattggtagaactggcgtgtgcgcacaaactcatccaccgccggccattcctctcgtttcagtgccaataaacgttaagaacatgaacataccatattgacaagcggaaatgggcggccacgacttgcctactcccattgatatcattatgcgacaggttctcggtgaaattggggtgcg

SEQ ID NO: 153240 - DNA, 476 bp, Zea Mays
ataatgtgctaacatttgtggacaagggagtttaggtgcaactgagaggggatggaggtcagcagcaggatgttccacatatttctattctgtaggtgaataaatggttgaaaggcaatgaggtgtgggctttggttatgttagaacaagtggtcgaaaagaaagaatcagtggttcctgagcagttataaaacttactagcagaatttgaggatctttttgttgttcctactggtttgcctccctctagaatttatgatcatcatatctctttggtaccaggacatgtacctatgaattcaaggccctacaggtactcacccttacacaaaatagagatagagaagcgggtctctgacttattgacctctggtttaattgtgcctagtatgagtccatttgcatctccaattttgttggtccaaaagaaggatgggagttggagattttttgtggactatagaaaactcaatgac

SEQ ID NO: 153241 - DNA, 564 bp, Zea Mays
tctttctattgtaccttttaaagttgaacaaagaaattagctcgttgatgactttctcttactaagattgtttagctctgttcttcctagccatgtgcccctgttatcccggattttctcttgtttatcatagagttgattctaagttttagaaagtatgtatcccatctagatagtgtttcctgtagaaaatttcccatgcaccgattttacttttcacttttcagtcttctggtttataacatgtgaaaatatgctcatgttttatccctcaaatctgtatcagtttgttttggttactttgctctgttctcatgcttatgctttttagggagacatcagttacattgccttgttttgttgaacaagtatttcctcagtaagaattaagtccgaggaaaatagtaagaatgttggtttttgttgaccacatgctttatagtctaaacattgcagctacatgttaaaattgtagttcctactttctacccactcaatatgctcaaaggttactgtcatcaattattattgattagtttctttgtgtgaaagtaccaaatgcaa

SEQ ID NO: 153242 - DNA, 812 bp, Zea Mays
accctgagttagctaagcgtgagcatgtcgcaccgccttaagtcattgccgacttaagccaattgctccgtttgtagggcatagtggtcaccccgagttgagtaagtatgcccattgacagcgaacagtttgagtgccttcgaagcctttttattgatgatatatttctcaatttacagaatacatcgtcatcccaatagcttctaggatgtagctaggggtaaaacttcctgaggtgttctatgttccatgagttcccaatttccgtgccgtccatctgagcgagacgatatgatcccggctgagtgacttctgatactatgaatggtccttcccatagaggtgacaatttatgccgtccctcccccgttagaattcgacggaggacgagatatcccactgcgaaggatcgacgccgtatggccttatcatgatagcgcctcagagtttgctgataccgtgctgattgaatcaccgtattcagtcgctcttcttcaagtacatcaacatcctccagccaagtagcttcagcttctgctatgttttcaagattaacatcggtgccccgaacttgaggtcagcaggtagcactgcctccgaaccatagaccataaagaagggagtatttccatgcagagctcggctagtttgagttctcaggctccaaaccacatacagcagctctctgatccactttcctgcgaacttttcattcttgtcgaagactttctttctgagcgcctccaatatcatcccgttagctctttcgacttgcccgttggctcttgggtgcgccaccgaggcatatttga

SEQ ID NO: 153243 - DNA, 396 bp, Zea Mays
gccgccacaacttcccttcaacaggtggcctcgtcctctgtcccttcctccccttccctggattcgtccaccttcgctacccagggacggtccaagttctagaggtggagcgagagtgcgtcaggatcccctgaagacggtcttcctccacagtcctaggttggtcggcctctgtttcgcgacatcctgcttcaccagcgtgcacctcctgttccagcaccgagagtttcgactccgagggagccctccccacttgagaccgggacgtcgaaccctcatcacgaggaacggcaccgccggtttcgtgggctggagagtgcgccggagacaacactcggtgggtggaccagagtagaatcaaggaaagcgaagaagtgtcgcctgcgtgcactgcgg

SEQ ID NO: 153244 - DNA, 289 bp, Zea Mays
ggagactgcagaagtatggcggatgtattttgatggctcactgaagctgcagggagcaggcgtagggatcctcttcattgcccctggaggtgaacaactcaaatatgctctttagttgttattctcagcatccaataatgcagcagaatatgaagctctgatccacggattgaacattgtcatatcactgggcattaagaggttgatggtatacggagattcactagtggtcataagtcagataaataaagaatgtgattgctcgaatgactctatgggcaagtactgc

SEQ ID NO: 153245 - DNA, 445 bp, Zea Mays
ccagcctattaacaattggtgtctccaactgtatgggcactgttatcaggggatttgtaataaccacatgagcttttccatgagaagcctcaacaatgcccacaccagcccctttctcattcgacttaacatcaactggctgcacattagtatcaattttggtagctttctcatctgacttaatatccatatctttcgccagaaggttgttggaattcaaaaacttctgatgcttaatagtcattgcttcagccaaaatttttagagaatcgacgatagcttcagtacaccttgacttgcaaattgaacaacaacccctgaccttgtcatacagaacttggcaagtactatcaatgcattcgacatccactatttggccaaaatcagctaataacttttccttgaaaaaagtgaaatcatgcggaaattgtttctctgcttcaat

SEQ ID NO: 153246 - DNA, 4752 bp, Zea Mays
tcggcggtgctcaccctccgaccaacttggaacacaagtttgtggagcaggtatttctatttttcttttctgttcgtctctctccacgaggttcaccttatacaagtcttaacagaaagccctacggcctgacagtggaccaacattattacaaatacgtaaacgacaatgaaacacgtattacacttatgccgtaactccggtgatggttggcgccggtgttacatcaccccctcctggaatggaagcttggccccaagcgcttgaatcagggaaacgagcttgcatcaccgtccagtcttcccatgtagccgaatcagctggaagtccttgccattgcaccagcacttgtacaatagccgcgccacctttcttgaccagtcggcgttggagaatgcattgaggctgcaggtccctttgagtaagatcaggtatcttgggaaagtcagcatatactggagagtagtcagcagtatagggcttcaattgggaaacatgaaaaacagggtgcaccaagctcccagccggtaactccagtttataagctgccacgccaatcttctgaagtattttataaggaccaaagtatttgaaggccaatttaggaaagggtcgactggccacagaggattgggtgtaaggttgcagtttcagaagtaccatctccccttctgcaaactgccgatcaatacgcttcttatcagcttgaagtttgatacgagtttgtgcagccagcaagttgtgtttcaataattccagatgaagatccctttccttgatcagtgagggaagatcagtagtggaaacatcagccagcacaggaaaagaaggtaatttcggttcatatccatacaatgccttgaatggggagcattgcaaggatgagtgatacgaagagttgtaccacagctcggccagaggcagccatgccttccacttggctggagagttgtagatagtgcaacgcaaatacatctccagacattgattaacgcgttcggtttggccatccgtctgtgggtgatatgctgtactgactaacagctttgtgtccaacagtttgaacagccctttccaaaaggcactagtgaaaatccggtcacgatccgagacaatagaagcaggcacaccatggagtttaaccacatgagtgagcacggctgaagcaacttgattggcagtgaaagggtgacgtagaggaataaaatgggcgtacttagtgagacgatccaccaccaccaaaatgcaattgaagccatcagagcgaggaagaccttcaataaaatcgagagagatgtcttgccacacaccttcaggaataggaagcggctgcaataatccagctggatgagacttttcatgtttggcatgttggcaagtaggacactgcttaacaaaagaatcaacatcctgtttgagccctttccagacaaacattcgtttgattcggtggtaagtcgcatcaataccagagtgacccccaagagcactagtgtgacaagcagcaatgagtttggtcttcaaagcagagttatgaccgatccaaatcagtgtaccaagccggatcacaccatcaaccaaggaataaccatcagcatttggactgtgcacagcaagctgctgcaataaatgttgggctgcagaatccgtagcataggagttaataacctcttgaagccacaagggttgtacagaagaaatggcatgcaccgacatgtggtgattgacgcgggatagagcatctgcagcaatattttcagaacccttcttaaacacaatcttgaaatggagacccaacagtttactcatggctttcttttggagctcggaatgtaagtgttgagcatccagataacacaaactctgatggtctgttcgaatgatgaactcttggcgttgtaaatattgcctccagcgatccactgccataatgagggccaagaattctttgtcatagatagacaaatacttatgtctgtcgcccaaagccttgctcataaaggctactggctggcccttttgcataagaacagcaccaataccgacagcacaagcatcagtctctaacacaaaaacctcattgaaatcaggtaatgccaacactggggtacaagacatagcctgtttaagagccataaaagcctgttgtgccgcagtatcccactgaaattgctgttttctcagaagattagtcaatggtttagccaacaatccgtaattcttgacaaatttgcgatagtagccagtaagacccaaaaacccacgtaactcagtcacattagaaggtggcggccaatcctgcatggctgagattttagctgggtcagtagcaaccccattttctgaaatgatgtgacccaaataatgaagctggtgttgagcgaaggtacacttggagggcttgacaaaaaatttgtggtgtcgaagcacatcgaatacctgctgcagatggtgcacatgcaagtcaagagcggggctatataccaaaatatcgtccaagaaaaccataacaaatttgcggagaaagggttccagaatatgattcatcacacactgaaaggtggctggtgcattcgtgagaccgaagggcattacacggaactgatagtgtccgtgatgtgtcttgaatgctgtcttatgttcatctgctggtaacatacgaatctgatggaacccagcccggaaatcaatactagaaaagtaacgagtaccagcaagttcatccaaaatttcatcaatgatgggcataggaaatgtgttcttaaccgtcaggctgttcaatttcctgtagtcgacacaaaagcgccaactaccatctttcttttgcactaagagcaccggggaggcaaacggacttgtactgggtacaattaagccagctgccaacaattccttgacctgtcgttcaatctcgtctttatgtaacggtgaataccgataaggtcttgagttgacaggtcgagaatctggaaacaaggaaatagcatgatcgtactctcgctgaggtggtaactcaagtgattccccaaaaatgtcctgataatcttgaagcaaccgagccactggctgtggaacatccgtaagtggaaagctagacatagtattaagtatggccactgaccaaatatcattgcccttgctccatttcagaaattgttcagcaggcaactcttgaagatgaagctggggttgagaaacacccttaagagtaaccactacccccatatcctggaaggttagagacttagcattccaatcacaaagcatgggactatgagatttcaaccaatcaaaacccaaaatagcatcataagcactgaggtccaaaactctcatatcatgcgtgaatgtgtgacctgctgtccaccactgcatatgtttcaccacagcatcagaaattagtgtatctccattagcaaccttgactgtcagcggagataaagcagtaataggtaaatgaaggcggttcacaaacgaagaattgacaaaactgtgggagctacccgagtcaatcagaataaggaatacttgattgcccaccaatgcacgaacgcgcatggaatcagcagattcagtaccggctagagcgtgtaaagacaactggcaaagatcttggactaagacatcttccatctccaactgattgagagtttcttcagtcagggtctgatccaagtcattcaccgccagtgcatgcacctgagccttaggccgcttcagacaatgatctgcatgagtagcatcatatttctccccacagaaataacaaagtccattagcccggcgataatccctcaactgtctttccctccacaagccagaggatgaggcagtagacgatttgtcagatttaggagtggaagaatgatatctgggtgtaaaaggtctagctgaatgcactgaggacctctgtaaagactgctgctggagtttggccaagaaactagcccgagcaacagttgcgggagcttgggaatgaaccacccttttaatatcctccttgagacctttcacataatgagaagtaaagaacagatcatccaaatgtgggttatgcatggccacctgatactgtaaagaggcaaaactttgagtataatcctcaacagtaccctcctgtcgaaactcaagtaactcatccaaagctgtgtgatagtcataggtaccaaactgatcaagtactgcactcttaagtctaggccaggctacaaacccatgctgtaatttgaaaacctggtaccacttggcagcatttccctccagatgtaaagagacagatgaagttttcagatcatcactcacattatatatgcgaaagtattcctcacacttgtcaatccagatcttaggatgtagaccatcgaaacgtggaaacgacattttgggaatggaggattgctgttggtatacctgatcatcatggtggtgacgaccctcagggcgcagccggtgatgaggatgacgcggacgcccggtaggcgcagaagcgaaccagttctcttcctctgcatcggatctgttggagactggagaagaaactgcatccatcttcatttgccacatggtgaggcgcgccacagcgtcacccgtagccttgagttgctgggacaagagaatttgatcctgggtactctggttcatcgccttcgctgtgagatcaatctgagccgccatctgctgttgcgaggtgtccatggaacggatctgcgcaaacagcagatcgagactctcctgcatcttgttcaaccggac

SEQ ID NO: 153247 - DNA, 533 bp, Zea Mays
ggtgcgtccaggggtggtcttaaagacgtgggcaagcacgaccgaggagcggagctctgacatgcgctcggggtgtgcgagggcgagcgctagtgcgcactctggcgcctgggcacgacgtcgagcacgaggcagcgcagagagaggtcaagttcaagcgcggattagctccaaatcttcacgattgtggccatgatcccattgagagatctcttcccctgacattcctttgtcatttgtgtgtggaggcttatgggttttgctgattggatcaaaagatatggagggatgaagtttggtttgtctcactactgaactccgagaggaaatcccagatttgacgtgtctagggcacgaatctcgatgccaccttcacacacactgcagaggggttagtttagaacaattttgtcaatggggacttaaggatttgggctagggattaaggtgaacgtgctcaagttctaggtgaaggctgaaattcagcaatatgaatttcagatttttcctagggagcttccacttggatggcc

SEQ ID NO: 153248 - DNA, 566 bp, Zea Mays
gcgaagaccaatccgttgcttttgcggatgaaagacaccattttacgcatttatacatggctcaagaattaactgtactccagcaatttatcgtaaatttctccatcgttttcaagtgttgtcgtggtcctgtgctcccctgtatttggtggtttggctcctcgggatgttcttcctgtcccctccggaccaagagtccaaaacccaaacccaagcacccaaatccgaccccaaaatgcctgcttctcagtgatgggatgacggatgctcccctcctgctgtagccccagctcgcgccgcctcgctttctcccttcgcgacgccggcatttcgtggccggcggcgccgccttatcctctgccattcttgtgggcaagataagcagcgggttgtttttctttaccgttgtttctgaaggtttcggggccagttcagccggatcccggctcttcggacgccgccgctccctcggcctggtggagctggtggagcggaggggaggggcgatccatacggaggtggcggttccatttcttgttttcctggtgagtaatcctaggttgctt

SEQ ID NO: 153249 - DNA, 274 bp, Zea Mays
gagccataccttccccaatttccagacactgctgaacaaggcaattggccttgaaagcaaaagaaaggaattatctgaccacaaaagaaaatttcaaggtcagtccagcaggaacactcgcccgaacaatgctcaaggttcgcagttccgctctggaaatcagggtggaaataattatcaagtgcaacgctctggacagcaaagccagagaagtaatcaaaaccagaaccagcaaaggagcaactcccagaccaaccagaggtctggtggaaat

SEQ ID NO: 153250 - DNA, 935 bp, Zea Mays
ctacatgtttgcatttggctggaaacctggaaccaaatttttttttttgctaggccattaggctaactctaaccatttttctcttccaaatttattcctttaaaaatctatcacacaaagattcttccaatatatttcacctaccgtgcgatcgttcctcttacacagctctcctctaatcttagcttattcgttgcgactttaatctaaccgtggctgcaacttatacagtattttgtctatatgaaatatagctattgcggctgaatcatagggtttagggttttagacaattaaacttaaaaatgtttaatttgcaattaaaaaagaactagggttatatatatattcgggattcaagtggttagggttatatcatgcagtcttcaaactgttccttaggcgactcctattttcatcacctaacaaacgacgaagggcttatttctcttgttgcctcgcttgccagttgtcatagttttgcacatctaaagttatataggattaattgagttagacgcgtgtttggtttatggtcatagttgtggcacggtttttcttctgttgtgtaggtcacacttgtcagcaacttgtagaatatatagcaaaatcctctctgacacgtggaagttaagcgtctaaccatagataaaagtttttttagcacattgggaatgcaaaacaaagcatggccgaaaatcccccgtcggagatcgggctcgtcgccatacatttacattggatggttggagtatttatttatattacattatcctaagcgatcggcgggtcgcttcgttccgcttgcttatttccgtcgcgtggtgtcgtgtactcctatttaaacaaacgcgctaatccgaatctggatcgtatggttacctggggcaggtcgcaaggacgagtatagattcagcgacgctggatttcgtgcg

SEQ ID NO: 153251 - DNA, 674 bp, Zea Mays
gtggaatggcaggcaggcgacgtgcaggacagggcggtggaaacagcgagtgccgatgccaaagcttccttgttctcgatgccgaagcgaagttccttgacacggagcatgttggtggcggacttgaagtcgggcagcggtgacgtgttggcgatgatgtcggcggtgttggcgaagcgagggttgaggccgcgcataagattaagaacgagctgcgcaggggagacagtgtggccgacctctcagagcgcatcagcggtgcgcttcagctgctgggcatagtcgtcgatggagaggtcgccctgggacaggttgtggaactcctgctcgaggacgacggcgcgagactccttgttcgcctggaacagggcctcgatggagacgtacagggcgcgggcgtcctgatcaggctccatggcgagatcgaggacgacgtcatcggtggagttgtacatccacccgcgaacacacgcgtcgggctgagaccacaggggatcagccgggcgcgcaggcactgtgtcgttgatgtggccgagcaggccgtacttgccgcagagggcggtaaagaaggcattccatttggagtagttggggcgctcaagactgagatcgatcggcacgtgctgcttcacgttgacggcggcgtaggcgagaaagaaaaccggggcaaggcc

SEQ ID NO: 153252 - DNA, 650 bp, Zea Mays
cttggagaattcaaagctagaaactccctagcccggtgcaaggcacctgccacccatcccatctctttgccatggctgcttccttgcctacaaaagggccttgaacggttggcttccctctcctcccgaaggaaagcaaaaggggatgaatcggtcggatagtagagcagagcgatgcactagctagatcagtactactgcactgcactgcgcagggctgctgctctagagtgacacacttcacccacacgccatatatatctcaaaagacaaagccctcctttccacaacgaacgaacatattcctcccgtcgatcgctccagacactatcaccttccacctctcagcttcactctcaagcctctactccatcttcttgtgaagcttctcaagattctcgcgatcgcatgcctttacccttcctctctctctttctctctctggtcatcttactaaactacctccaatgccggtgccaatggcggcagctcagttcctctagctagtctcccaccgtaattagcaaacccggagaaaaaaagggaacattcgacgccaccccgtgatgaggccttcgccacctttgctcctgttcgtgctcctgcacttcgcgctcctgtccaccattgccgccgccgatgggaatggg

SEQ ID NO: 153253 - DNA, 628 bp, Zea Mays
gaaggagagggggtcggctagggttggggaggagagggggggctcccatccatcggatcaagatcaatggcccaaactcgctctcccatttgagctcccgaccccagcggaaaaaatgccaaaagatctactgtttcctaaggaatgcctcctgaaactccaaaccccaatgccacataacttgaaagaaaagagaaaaataaatttaacttcttttcagaaaatttgggtatcacactctacccccttaaaaagaattcgtcctcgaattcgaccactccaagcaaagcatccgaggtaccccatatagcaccaccattcaaaacatgggtccattaatggtcttaattaacacaagaacttctacctcggactaattgtctaaggaaactacacaacctgatatccatcatgaaacaacatgcaatgaagctcaaagcaagtcatagatgcaatcaacactacaatttcacaccatcgaatttggatgcagctatacatcaatgtcttaaaacaacactcttttttgaaggggtaatatgcactaagcacaacccttaccaacttcaacaattcattttaattcaatggtgaaacatccacaccagatgaatgtataagaagatca

SEQ ID NO: 153254 - DNA, 478 bp, Zea Mays
gtgaatggctgtcaaagcattataaagaaatttcacagtaaacttgttcttttccagtttccaacagattagatcatctccatcctagaaatagaaatcggtaacatcatgacaaatttggtcccagcaatgtgccacagttatatcttgctgttcacagagctgaaacatcgtatgaaatttactagccaaaggttcattatagagacaggcgtctttccagaaactggttttatttccattccttgatttcccaccttgtaagtatattggtttgactttgagaaggtcatcctagattggggaagcatcatacctgtgattcacagaatataatgattgattgtgtaaatatttggctttcacaatttcatgccatgtaccctcctgttcaaatttccaccaccatttgcacagaagactaatgttcagtttccgttgttctttaatgcctagaccccctttacttttatttttg

SEQ ID NO: 153255 - DNA, 916 bp, Zea Mays
cttcgttaaagcggaagaacttttggaggcgaatgagtggatccacgtgatggaagaaaaatttggactgatccgttgcacagagacttagaaacccatgtttgttgctcaacaaatgtgaggccccgctagtacatggtgggaaaacttcgtagccattcatcctgaaggtcatctcatcacgtgggcaaagtttaagcaagtgttcagggagcattacattctagatgtcattcttcagatgtagcttgaagagtttgttcgtctgaagcaaggcagtgactctgtaatgcagtaccttgccaagttcaaccacctatctcaatctgccatagaacaagtcaacatgaacttaaataagaaaattgcttcatgaggtgtttgagcgataggctgtagcgaaagctggctacctgtttggatcttaccttcgatagggtcgtaagcatggcgatatcggtggaggcaaataattcaggacaagggaagacaaaaaggtttggacgtgaaggaggtgagggatcctcttagggattcgagaagcgatcaaggctagtgatctgttccttcaacccgaatcgtgcttttcctcgcccaccctcctacccttttcagtagtcggtttttattcgtccaactgctgccccctactcaaaccactcagccacatagcaacgcctctagaacagcttcttcaaggcagtactccacaacggatattgctagaatctggactctcaccattttcgctggggcggtaagactcgaagtatcacttcgagccttgagtcgctgctcatgatgaaccagcaggagttcctcttcctcttcctcgtcctcatcctcctctgcctccataatataccgaggaaatcttgccataccaccaccacccacctcatcaactagatcgtca

SEQ ID NO: 153256 - DNA, 682 bp, Zea Mays
actcaacttttccgcctcggcgaagttctaggctagcaccgccaacaagttgatgctgccctccagccatcccgggccgacaaaggtaatggtacttccaaagcccaaaatgtggaagaattccaaggaaggcctcgcaaagatgaacaaacacgacaatttgaagcacaaaattgggatttagatgcgtgaggttcagagaataaaaatcgagaacaccgcgaaagaagggagaaactggcagggctagtccctggataagaaatggcacgaagataacctcctcatgagtatcctctatagagacagtaactccgcgctagatccgccaagagcacaattctttcggtgatagaacaccaatctcaacaaggtgcagaaggtcagcttcaaaaacaacatacatgtggttaccagcgaaggggagttgactgttgggatcgattggcaggatgactggaacatcagcgctctgttttctcttcttgggcgccattgtgatctctcaaacggtgcacgcagatttggggactcagaaagatcgagagcggtggagaaaaaaagcaagaactagggttcagaactcaagaggacgtcaacagaagtaggggttggcatgttaagtcgggcgcaaagtggtaggccgatagctcgggaaaagttcgaatcgcagaaaaacaag

SEQ ID NO: 153257 - DNA, 514 bp, Zea Mays
gaggtcttctagcattggtttgacttctagactgtcgctgtttcccagacatgtatttagttgagctgattctttcttccaatcctctaaaaagttggtcccttttattccaaatggttttcgactgagggcgtctgctaccacgttggccttcccggggtgataatgaatttccaggtcataatccttgatcagctctaaccatcttcgctgatagaggttgagatctggttgagtgaatatatacctcagactcttgtgatcggtgaaaatgtggatgttgttcccgattaggtaatgcctccatatcttcaaagcatgcactatggctgccaattccagatcatgggtggggtaattctgttcgtgcggcttgagcaggcgtgatgcataagcaatgactttctcattttgcattagcacacatcctaagccttgcctcgaggcatcacagaagacgacaaaatcttgatgaatatctggtagtgacaaaacgggtgctgttgtgagtttc

SEQ ID NO: 153258 - DNA, 394 bp, Zea Mays
gaaagggccaatggaatgatactagaagcactcaggaagaaggtgttcgacaaaaatgaaaagtttgcaggaaagtggattagagagttgccctatgtggtttggagcttgagaactcaacctagtcgagctttacatggaaataccccattcttcatggtctacggttcggaggcagtgttacccgccgacctcaagttcaaggcaccaaggctggtcttcaaaagcatagctgaagcagaagcaaccaggctagaggatatgatgtgctggaggaagagtgattgaatacagtaattcagtcagccagataccaacagaccttgaggcactatcatgataaagtcatatgacactgatcctttgtagtgggagacttggtccttcgccgaat

SEQ ID NO: 153259 - DNA, 1232 bp, Zea Mays
gctcaaactgcctttgtcagaagggaaaagcagatggtgactgtaggccataattcagaaaattgaaatggcaccagtgtgatgtagctgatatttgggcgccataactttggatctatgtagtttaggtccaagaaccctatagtagctttgaagatccttgtttggtgaacaagttttgttaatagatattagtctgtctttagcaaaagcagagagaaaaggggggctgaacaaggagggttcagtcgagcaatgtagatcataatgatctgaaatatctacaacagatcttttctccttgccgtgtctcacttttggctaaggttgagataaatatggggtaaataacaggagtgttcagaactttagccatcactgaaatatccaaagttggactgaacaatatctacctaggggagccttatctaactgtcccctaccgtggtgagctccatcatttgtactgccttgctgcgttcatgagtcgagcgtggatccctggatcgagccacgcactcatgctcatgcagttgccaacccctcaagagtatgcttcgttctacatcccttgaatccagccactgcttgagtttttatctatccatataaagagcaaccgaggggggtggaaaggatcattgtcatctccaagcccaaccaagatcaccgtggatcattgtggttcacatctgtgcagtgctaccaccttcactttccccaaattacacccaaggtttacccaagcttcttgcttagtgagattatactgtgtcaacagtgagcaaaatcagatctatgtgaaatgtatgtgaaccttggtgtgcctgagaacctcgaaaactgtgtagatctgatgggctgcctgaactatttaaactgtgtcaacagtgaactctatgtaaatctgatggagactaaacttaactaaagctaacaggtacctctatcccatgagaggcatgatcctgaggactgtgtgggtgatgcaacaaaatgtttcctatttgcgtttttctttaaaattgagtatatgcacactaatcatcatcagttccttttttgtttgtacgaaccatgaaggcctgtaataaaactgtgttggagtgcgattaagcggaatttacctcttcctaggcgtggatgtcagttcctttgttatagcgggagtagcacctgggaccacagtgctgttgccaacacaaaaagtctgcatataaggggttagtaac

SEQ ID NO: 153260 - DNA, 429 bp, Zea Mays
caagaatagaagagcgggtcgacagagagggtgtcgcggcggcgttctacgggacgattgggtgttccggagtgtgggcttcggtaaagtttaattggtcggctccgagagcaatagaaggccagagtcaagctagaacaggaagtaatttggcatgtactgacccgaggagtgctggccacggaggggttcttcacggcggcggaagaaatcgattcaagggaactccgatgatcactgagggtggtggacagaatagagtgactagtgattcgttggcttcgcaacgaagggacgaagagctgtgctcgattgatttggatgaagggggaagagagcgtggtgaatttataggcccagtgagccaccacgatggccatggtgataaccatcaccggaccttgctggcgaccaatgatgacatcggcg

SEQ ID NO: 153261 - DNA, 970 bp, Zea Mays
gtggggagtggacgtcacgcgccattgcggtgtgggtgtcaccaataatcccacggcaaagaaactgatctgacagctcaaggccatggaaccccctgcttgtccgggaaccgatctctgtcactgtcacaaccttcatccagttcctgaatatattatattcccggttcaaagatggagtggatggccgaattccatgtccgccgtggaaacggaaccgggtacctgaatctgaccggctagatgcaatgtgatatgatcttctccggatttttatgtctgcgcatatatacatataactatgcgttgttaacgatatactattacagttgcagccatatcgtcgtcgtaataatcttgacaagatgacaggcaataatcaagtccggcgcgcgttcagaataatggagtatacgtaaaatgatcaggtctgcaagaacaagggcctattttgtacatatttttttttctaaagagcatttctaagaatccagattcctagataatctagttgtcacgagaatctggacatcatgaggcttacatgtagaggcagataaggaggtccgtatggtttagagtttaggaggtggtggactcctctcgtcgcgaagactcgttggattctatatttacgtcgatttaggtgttattcacgttctcacatgggcgtactgagaatcgaaacgttttgctaccagaagtcgattctcacggccagaatctcagaatctggctagaagccgaaacaaataggcccaatatcatgcgaaccaaaaactagtgccaatgaatcacatttaacaacatatatatattaacgatcatcctatcaacatgtatacaaaggctaaatcgagcatccttcctctttgcaatggaacttaaaatcaacaaggtacctgtaaaatcatcatgagaagaaacacaacaattttaggaaattgaagttaaggggggacgcagatgt

SEQ ID NO: 153262 - DNA, 390 bp, Zea Mays
attatgatgtcaattttaagtaagcttagcaatgtgatccctacatggagaatcattcctaatgaagatatcatagatagagcaattaaatgtgaggagcgacgtgaagaggtatgataaaagaaaggatgacctaatcctaaaagctaatatgtttcatggaaaaccatttttgtgctacttttaataccattatttgttattaggtaagaaataatcattattgctataaaggaaagcctagggtaaagactggccatgaaatttttatggcaagcttggatattgaaagtaatcttgacaaggtacgaggaatgttatcattgtgtttgttcttacaatacccttgtggttaaaaatagcattcgaggttttgtgtgcatccaacct

SEQ ID NO: 153263 - DNA, 314 bp, Zea Mays
gcgcccttaggcggcttctgcgtggatagtcttcgcggtagacttcggttttttcgcacttgttgtgctagtccggctgcacccttaagcgacttctgcgcggatagtcttcgcgcgagactttgggttttttcgcacttgttgtgctagtccggctgcacccttaggcgacttctgcgcggatagtcttcgcgagagacttcgggttttttcgcacttgttgtgctggtccggctgcacccttaggcgacttctgcgcggatagtcttcgcgagagacttcgggttttttcgcacttgttgtgctggtccggc

SEQ ID NO: 153264 - DNA, 1047 bp, Zea Mays
ggatgcattaatccttgggcagttccctacagcataaggtgccttgggtacttggccatttattttcctccttgggcattagaggcagttgataagattagaaagggttttctttggcaagatcgcaaggaggtcaagggaggacactgtctggttgcctgggggaggctgtgcagacccctccatctgggaggtttgggaatttctagtttgaaggaattatgctgggttctccgtatgagatggttgtggctacataaaattgatccaggcaggccttgggcaaacctccctatacaagttcctaaaaaggcaggatctttcatctccactgttttggtctcagaagtgggaaatggagcacacactctgttctggacagataaatggctcttgggtcagaatgtgtgcaatctagcgcttaggttattcaccatcattcccaaaaggattgctaataggagaactgtcctcgaggctctttccaacagaaactagatatctgatataaagggtgccttgtctgttggagttatagtggaatacttgaaccttcgggagattctatcagaaatagtgttgcagcctgaagtggaagataagcatgtattcaatattgcagcaaatgacaattattcggctaagtcggcttatgatggtctttttgttggatcaacgtcctttggtcactaccatctggtatggaaaacctgggcacctccaaagtgtcggtttttcctttttgctggcggcaaataagagatgctggactgctgacaggcttgctaagagaggtttggatcacccagctaggtctcttatgtgatcagtaagctgaaactattgaccatatccacttgtctcttgtgtgttcacaagagtgttctggtttaactaccttaaaccttttggttttcaaaggctggctcctcagctagggctttcatctttcatgatttggtgggagcaaatatcaggaatggtcactagtcttcctggaaaaggtctcaactcacttgctgccttgggggcatggacaattccgga

SEQ ID NO: 153265 - DNA, 738 bp, Zea Mays
tggaggtaggtgccgatggaatcttggggccattcaccgagttggagtaagttggtccgggtgccttcaactgagggcaattgttcttgaagtgactggggtctccgcagtgccaacaggcgtttgctggcggctggttgctcgcaacagagggtgcctgaagggagctctgactctgctgactatagcgtgatggagtgggtccagattgtttattgaagcttggacccctgggtggaagcccaaagggtcgagctctctggtgacgctcttgttgttgtgctcggaggacttggaatttcctcttgatgtgccctttttcttcctcttttgccctttccacttggatagctttgttggagaggtgagagaagctgtggaagtcttggctggcgaggatggtcttaagctcggatcttaaccctttcagaaaatgggccatttttctggcctcggtgctgacatcctcgggcgcgtagcgggccagttctgtgaacttgtgcacatactcactgactgaccttccgccttgagttaactcccggaattcatcctccttgagttgaactatcccttggggtacgtggtgttcacggaaagttgcttcgaattctgcccatgtagcatctctgacggcttcactgaaagtgtcccaccaagctaaggccattcctgaaagctgatgagctgctagctgaacacgctgattctcgggacaagcgatggcttccaacttcc

SEQ ID NO: 153266 - DNA, 465 bp, Zea Mays
ggatgtgttaagttcgatcaagtgttttgaatgcatgctatgatatggttgtatttgaaactgagaagtataggtattgctcgataataaggtttggtcagtgtggttagaaattgatttggcttgtatagagaagtgtcgacatgtcgaagtagtcatcgcttcctctatgctcgtaagtcggatcaatgcatgttatatgttcgttgaattacgcttcgcatatagtgtatggttgtattcgtagaagtaaagtagacacatcgaccttgattggtggagcccaggtgagatgcaaggttacatgggaaatggatttagaattctttcgactagttaacaagttggttagagttgttgtgttaccttggattgtgtggcgaagtgatggcatgactacgtagccaccatgtcatctattgtgtgaccatgcttaagtgtaactcgatataaattgcaagtcga

SEQ ID NO: 153267 - DNA, 271 bp, Zea Mays
aaactttagtccttggactaacatcgtgtttggttagcggaatgatgacgtgcagaattatccgatccagaaaccgaacctcctcaagatgtttggtttgtgtcattggattcactttgtttgtcaccatgtagtactaggtagtgataccgcagcgagacgaatttattccgcaaaaaatgccagaccgacccattctgattgaacctagaccgacccattctgattgaacctatgccgcatgaaccaaatcgcactgtaaaggaaccac

SEQ ID NO: 153268 - DNA, 340 bp, Zea Mays
ttgataaactgaggacaaggcaagaaaagggcatcaaaggacctagctaggtgaaggtgaaaagcaagagggcttttgggactgaaggatcgtgagtaaggtgaagaagtaaagttcctgcaggaagtcaaaggtttgatcaagactgtgaagagtcatgttgtgttggagatcacaacattagaagatgtgatttaaagccatcagatttactcatatgtattgtgatggttcaaaatataaggctcaagggattatagatcaagagatcatgcatggtcacaagtccaagtagaagatatcaaaaacaacctagaagggctcacttgttgtgcagacg

SEQ ID NO: 153269 - DNA, 1001 bp, Zea Mays
gtgatggggagccatatttctgtctcttcttaatataatatcaatatcgggagaacggttttttcttccacggtcgagtttttttttttttatgataagagcgagtatacctcataattctgatttctccaggttggaagttggcctcttctgatgaacactcggtattgtggcagtcattggattctcgtctatagaagggcaccatgcaagcatgtgccgcttatttctttaatttggttccctggctcttgtggagtaattctagcactcagaagatgtttctcttgatgatatatatatacactgtcaccagcaaaacagctgaacttctcatcctagatcatgtccaaaggcagtctaggttcagtgcagatttgtattcatgcaagcatacaatgatatgataatactaacatagtatacgctgctgccagagacaattaagactgaacagttttttttttttgggaacagatagatttgaccacattgttttttgttttataacagcatccagaagttcatatgaaaaaaaaatgctttctgcagaacgaaataaccttaagctaccagagataggtttggaatttgaaaagatgtccagatgtcctccagttttctacctggcgtttttgtgtgtgcgcgcgcgagagagagagcaaatctgataatctattcgatccagatttggatctcggaggaagagtatctgactggaccccgtcttgctgctgtcacagctctcctgggactagaatttgaacaacttgcgcctgctagcctgcaaggagttgtactgcacattgttttccggaatcattcagattcttgcaccaactaacagcatcgaaaccaactgcacgttccatcatatcttcttttacgggaagaaagcacgttccttaatctgaagcagaaaccaatggagctctgaatccgctggaggaaaacagactgtactgtaacctaccggcgcagttcgggacttgttagcctgc

SEQ ID NO: 153270 - DNA, 320 bp, Zea Mays
ggctgatctggcatcacctatcgtggggagctgttgcagcacgactgacatgtactcggcgtttatctccctctcttggacggtcttctggtggcaatctaccctgaagtgcgagagaaaccacttatccgccaccttgaacacctgctctgtttgtcgctaggcctcctcgtctattttcttcatgtcatcttttaatctttcatgctcagcgaccgataaattagtcagccaagtgttgctgtttggagaagcactgttgagatctttagaatcggccatgtaagcctgattttgtagatctgcaacctcgtccccag

SEQ ID NO: 153271 - DNA, 1352 bp, Zea Mays
ggtcggttggcgtcatcctgttcgagctgctggtggggattcctcccttcaacgctgagcacccgcaggtacgcgcgtcgctcgcctgtcagaaggaagagacttgatttgatggtcaactttctgtgggtagataatattcgacaacataatgaaccgagagataccctggccacatgtgccagaggagctgagctctgaagcctacgatttgatcgacaggtgagagtcagagaacaaaacacatctgaaaaacttgtgctgcaaactgtacttgccattgatccgatcgtgtgctagctaggttgctgatggagaacccggtgcagagattgggcgcgacaggtgccggagaggtactcctttctctcgccgtctctccgtccaatacccccaccccctgcgacattaactgaaaaatgggatattagagcaggtgaaggctcatccgttcttcaaggacatcaactgggacatgcttgccaggcagaaggtacgttgttggctatactgacaaatcactgtttctttttctgtaggctaaacagtgacagtttcttccttgtcttgtaggtcgcgttcatcccttccacagacgacgagtacgacacgagctacttcgcctgccgccacgcctggagcggcgccggcgagcatggcggcgcggccggcagcgactacgacgaccggagcgaggccagcagcatgagctgcggcagcagtccgcgcagtgactacgaggaagatgtgggtggcgtgacctgcatcatccatccccgatagatatgattctcaccgcatctcatctcacgagtctgaaatttaactgggagcagggcgatgagtgtggcagcatggaagaattcggagcgcccttatcggtgaaatactctttcagcaacttctcgttcaaggtgaagtatatttctcataatattgtcagaagaatccgttccttgttgcattgcatacgagttctctctctctatatatattttttgtgtgtgtggctgtgatgtgcagaacatctctcagctggcatccatgaactacgacctgatgacgaagcataacaacctggatccgttgcagtcctccagatgattgcgtcatcgtgtggcaatgaagggtagccaaagcaaaatgctagtaaatgtagcttgcgctgagaccatgcatcatcgatcagaagataggaggaggatggtattggtatcccctgatgtaatctctgacaactagctagctgcagatacatagtgcattataaaccttcgattcttcatagaaagaaaagatggtgaatctctttctttctttcttgtttaagagaaatggttcacaaattggta

SEQ ID NO: 153272 - DNA, 393 bp, Zea Mays
ctctaatttcctatttactcctgcctgactttcatcaactggcactacatatgtcccttgtgactttatctatcaccaggcaagaaggtaagggatcaaagttgatccttgatgtatggtgttaaataaaggtacaaataaaaggccaattcattacatctctatctctactatattaaagcaccagtttcgtgcatcgtgtgtcacgtatgacgcgcataggtctattcctcttccccacctaacaatgggtcgttaccgcggattggccttgagaaaccacccaatcctaactcgacaggaagccacacacagctcaacgctcccacatagcaccacctcgttagctgaaggaggacgagagactgaacaacctataaaaaaagttcgggc

SEQ ID NO: 153273 - DNA, 328 bp, Zea Mays
ctctgcactcacccccatggctacgcttggacgcttggtgaccacgacgtggatcgggatggcaagggcggtttctgggctccatctatttatggctgggcaagcatcaaggtggagtggtggcggagtcagatccgagattcccggcggatttagctgcaacaaccgagcagggagatggttcaggcgagattcttgcgcgggatttgctcctggtttgttgagctttgccatcgaacgaccgagctccagcggatgtggggaaagttgttgacgccgctaggggatacgctgcgcaatctccgattgagaagggagagaagaggaa

SEQ ID NO: 153274 - DNA, 682 bp, Zea Mays
cttcacccaaatggctagatgtggatgcccacacatatatatagcctccattttgtttcttcaacctctctccacatgttcaattcacatcaaacttgagacaaaagttgaaaaagagcatttactctctcccttgtcacttgcaccccaaatcttctccccaaatcatggtgggaaaacttggtgtgaggttaagatcttcaatttttgagttccattattccatctcacttgctttgagctttgggcaaacattaaaaccttgagcggatttgttactcttggagcttctagatgtctagtcgtcacttgagagtctcaaagtttgtggaaggcctcaagaagtttgtatcgcttgctcctcgagcatctagtgagtgacctcatcttgatctgtatggtcggtgaggggatgattagtgttgaaaaatactcagctctttgtgggatcctcaatgtggaagtagggcacctaagtggtgtgaccgaaccttagagtaaatcttgtgttcttgtgttttttgcaattatggttgttcttattccatcttactctaatcatagtgcgcaaggattgacacataactttttgtgtataggttttaaggaccactccctcttagatctactacacacatacctttggaaaatcaaggacttcagaaatcaaaggcttacttgt

SEQ ID NO: 153275 - DNA, 1277 bp, Zea Mays
tgggttcacagacagtgatgcaaatgactactacgactgcggtatttctagaggaagcaatggtacttgaaagcacgtaaatgattgcagcagctgttgtagaacaacttgaacggtgttggctccgatttggacgacaaacactagagatgaaccacatggcagtgccctctacgggagcgcggccagtccatagcacgggtctagacggtcagggacctcgacgtaggaggtgctccctctttgcacgcttccggacggtccgcgactgacgcggaggtcttcttatttgtaggaaacccagacctcgcctcctaggagggaccctgtcgggatgagagatcctaggcgtctcttgggatcggcaggtcatccaggacgtcaggtgaaagtttgagggagaggatggctaaactagtgctaggctaaggctacattacttctactcctagggaatggaaagaacaatgcaaataaggtatattttataaatagatttgattggatcgattatggggacgtcaatcaacagtaccccttctgtcggctacctagaaacggggtacccaaaataaggcatataacctcctaatcgccaaacgtcccctgcgaagcaagtccacgaggcggggcaaccgactaggtccctatcgagcaagtccgcgaggtgggacgacaaattaggttcccaccgagcaagtccacgagatagggcgactgaccaggtcccttccgagcaagtctgcgaggcggggcaaccgaccaggtccttgtcgagcaagtccgcgaggtggggcgaccgatctggtccctaccgagcaagtccacgaggcaggacgaccgactaggtacctaccaagcaagtctgcgaggtggaaacctaagtccagcatcgcgagtctgcgtcaactatgataagatgcgtcaacctaggccgcagccaggcatgtgaacggtaggtcgagggcacaccgaggggtcactatcgacatgactgcaccttctcaagtacgacccgtggtgcaccccactgccctgaggggtcagtcgaccctgttcattgagacctcagcaccagagcttctacagtgactcaaatacccaatagtgcgcagccgatactccataccgggtgtatgcctatgcatgatggtgagtgacataatgagtcccggtggttcaccattcagagtgagtccatgctagcttcccctacgaacacaaatattattgtcccctgcttccaaaatcacgacatttggtgcgtcaggtagggg

SEQ ID NO: 153276 - DNA, 449 bp, Zea Mays
cccatcaccaattatgcctcgtcctcgtgtagtcgtgtgaagtccgtccaagttcgtctctgtcagacgaaagagagaggtcgtccatcattggcccctccctccccctttcgctgcgcagaatggcagcaatgatcggctcactctttttcgtatcggtgtgtagtgctctgctcaccaaaccgaagtatcagaagcaccgtctgcctgtgttcgtcgaacccgcccagaaacccaagagctaggaaggagaaggatggaggtaggaagcttctactgctagcctctcgctttgcttctcgttatcgtcgtcctacatggccagcacgcaacaagtccagtagtcagtcgctgtcgagcactccgctacgcattgacccgacgttgcctttgcctctcaggcagtgagtcaggttatgttatgccaggccaagtggctctgatgcgag

SEQ ID NO: 153277 - DNA, 440 bp, Zea Mays
ctggactatacatctctgcatataaaaatctctgcttggcagcattggcatgatgtcgtgcactttaccactattatatatgcgcaaattctcctatgtgatttaaagcacaatgcaaccaatgaatgttcttgtgagcgctagacctgatggtcattgtccttgttgatctgaagtcaactacttgctccaaacgacaaatggtgtgcatgagccctaaagtattttgtttttatggctaacatattgttgcgcgtatcagtctaaatcctgatgattgactatatatttggtgataataacagtaagtttacagaattgtaaccacaaagcgacttgttgttgcgtgtcttgctggaagttgagactaatccttcacgttgaaggacaaatatgtagtattcatgccactacatcaatctaagtccaaagctcactgc

SEQ ID NO: 153278 - DNA, 485 bp, Zea Mays
cttgcatgtttcttctttttcttttcaaatgaaaagaatacttatgttactctcttttgggttgatcaggaagttattcaataaaaccagttggtggtggtaacatcaagagaacaatctttcacacctttccatgaaacaagcgcttcactccccataaattatttagatgtaccagtaaagaacttctcaaccagtctggtccatgctgattttttggtatggagaatttcaactgaggtttcttcacctcatgaacaaatatcctacagattagatccagacactgaagggctgatagcaatgcttcacttgactgaacatcaagagctgactttgcacagagctctgaagctgaaacctctacagaattagtgaggatttggacaaggttctgaagcttcgttaataaattggacattgaaaatgcccctgcagtacagaagaggtataagatagcaataacaaagctgactgaacaggac

SEQ ID NO: 153279 - DNA, 539 bp, Zea Mays
aggctcctagggcatggaatgcaaaacttgacagtgaactgatgaagcttggttttgtgagaaatccactagagcatgctgtttacaggaggtcagatagagatggttttctgctagtaggtgtttatgttgatgaccttataattacaggctcaaacaaagcaagcatagaattgttcaagcaggagatgaaagggaagttcagtatgagtgacttgggattactcagttattacttggggatacaagttaatcagcaggcaggaatgacaaagctgtgtcagagctcgtacactctgaaaattctggagcaagccggcatgaaggggtgtaatccttgtgctgtgcccatggagaatagattgaagttgagcaagaatgacaagacacccgctgttgacaaaaccaagtataggagcatcattggaagtcttcggtatttggttaatacaaggccagatatagcatatgcagtgggcattgttagcaggtatatggaagagcctagagcaagtcattgggctgctgtcaaacaaata

SEQ ID NO: 153280 - DNA, 356 bp, Zea Mays
gcacaatcccagcaagcctgttcaacatctcatcagttgccaccttcgaattgtccggcaacaaggctctttcaggcgttctcccgtctgatatcggtgccaccctcccaaacctccagaacctgatcctcaacgactgccagctgcgcggccgaatcccccgatccatagggaacgcgtcgctgctcaggtacatacagctcggcgacaaccagcttgaaggggccctgccgctggaagtaggcagcctgaaggatctcgaggtgctaacagtggagagcaaccggctggaggacgagtggtggggaagtgatgactgggacttgatcgcctccttgtccaactgcagcaagctg

SEQ ID NO: 153281 - DNA, 279 bp, Zea Mays
tgtcaactggattgggataattatgttaattcggctatgaagacccatttgcaactcatggaggttgtggtgcgtccggttgtcgtagaccgtccccctgaagactttgatcgggctatcgatgacgtgccaactgttcctgatgctcaatctggccctaatttgatcccattaagtcagccaggagatggtctgcagacagatttagctgcgtgtatccctttggcacaaaccaattgcagtaagtcttattggcattacatcttcattttggaccat

SEQ ID NO: 153282 - DNA, 466 bp, Zea Mays
tctatggtgatgatgacccaaaagagtacacattctaagtggtaagatgcaaatctaaagcaaatactgattgtattcacatggccgctgtttttaacaacatttttcatgatcctccaagtttcctattccttatccctcttaaatgtctatcttgtcccccttctctagaataccttgatcagttcgaagccagtcctgctcctaaatgttcggcagtggtgtgcatgaaggatttgagctccccgtgctctgctcgcccggccagtcgacatcccagtcttgcactgcagatcggtgtgcccgtgcctgacagtggctagcgcctctattcttaattactttgttttttccttttctgatcgaacgtttagatttagatgaatatggttttcacgtcttcaaaatacacattatgagatttggtgtgggcggtctatagagtacagaaagatgtgaaacatgg

SEQ ID NO: 153283 - DNA, 1202 bp, Zea Mays
atggctgtgggtagcagctgcagcagcaccatggctgtgggtagcagctgcagcagacttgctgttggactagtagttctcatcaaatctccaccagcaatcaagagcagtatgtccagtcttctcacaaacctgacatatgatgtcagactttctggcatctgatgacaccattctctgggcactacgaccaggacctcctctgccacggccaggaccattacgaccacgaccacgaggttcatatctaggtccagatctaccacggccaagacgagcagcattgactgaggcttgtattcctccgtgaagcagttccatcctgttctcaaagctgagaagctgagaatggacatccccgactgagacaggttccacacgagcaacaatggctgagacaactggattgaattctgaatctaatcccgctagaatatacgagactagttcttcatcatcaataacctgcttggcagatctcatctcatctgcaagagatttcatcttggtgatatactcagaaacagtcatgttacctttccgagtagtagctagagcaattcgcgtgttgacagttcgtgcgcgagactgtgacacgtaggtttgctctaggagagaccacacatccttgggtgtggtacaggaggcaacctgacacatgacttctggagtcatggtcgtcatgaggaagcctaggacctgctgctcaagcgcggtccaccggataaattccagattgatctcttccgtggtcttgtcatcagacttgttgggaatcttctcctcaggcgcggcaagggaaccatcaaagtatccctgcagttgagcgcctctgatgatgggcagaacctgcgttctccatagcgcatagttcgtcttgctgagttttgcggcaacgatttgccctagaaggggtgttggcacaacggtttgggagctggacgccattgtcggaattggtgatagatggcggctagggttagggtagaggagatgctccgattaccatgtgagaatagcaaccaggattggttaagcctttctacctgcagagcaggccgcattgatctatttatataggcagagaactgccgaggataacatcctaggggggtaactctgcctaacataatctgctctattttaggctaatctataacagagttatcccctgaatatctacgtagcttatcttatcagat

SEQ ID NO: 153284 - DNA, 500 bp, Zea Mays
acacaaggaataggaaacctcattaacgtgaatgaactttacatggcaaataatcttctcataggttctattccagcatctcttggcaaactaaagaagttaaatgaactgatgttttcaaataattctttctccggatccattcctgcaacattgggcaatctaactaaacttactatcctcacactcagtagtaatgtgattagtggagctataccttctactctcagcaactgtcctttagaagttttggatctttctcacaacaatctttctggtccgatacctaaagaactatttttcatatcaacactgtcaagtttcatggatcttgcgcacaattccctatctgggacattgccattagaagtgggtaatctaaaaaatttaggtgaacttgatttctccagcaatatgatttctggtgaaattccgatatctatcggcgagtgccaaagcttggaatatctcaacatatctggaaacctgctccaagggac

SEQ ID NO: 153285 - DNA, 375 bp, Zea Mays
tcggaatgatgcccacctccctataattgaacaacattattttcaattcctcaccctcaaaaagattccgtagatccccctcactaatgctcgtcccaatcggcaaagacaatagctctcgtctaccaaatcggtctactcgaagactgtcccgctccatacccatgcgacggcgcctaccactccgcgaaaactcgcccacactatgcttcgacaccacccttcgtcgccgacacttggtcctcgcactaggaagaccagccacctcgccaacctccacctgcggcaaggactccgccgcagctacatctaacgcagcaaaataatccaagtcttcttccgaagactcttcggtcctagaaaacgtgctcccag

SEQ ID NO: 153286 - DNA, 632 bp, Zea Mays
caaaggccaggggttcttttacaattaggctacaacgaaggggtatcgttgatctctgaccgcacgattttaaatcgacggtcccgattaaaagaaccattcaccgaaccggtacactacaggggcccttagatgccgatccaacgtttcctattttaaataccaatgctccagccacagccgttggatagcagatcgatggtcaagcccgagctagtatgggatgatcacatcacacacgttgatgggttgatcaacggcttggatcgacacgaggcgaaacggtatcgttggacctaatcgggactgtccgtcaacgatccgacggccaggggccatcacctacctccgaccacgcctgcgttcagccccggcggcgcccctcgccggagttcgcgcaatccagccaaccggtacccgatttcccctaataatagttgtatgcaaagagtagggagctacaaactaactggtcgtgatcataccggcgattgggacgtgtagatctcggcccgcggaaggttgcggcccacgacggtggagggattccggcgaccaattcacggcgacagggagctccttcccggtccaggcggccagggctagatcgacagcgacggcgtctattcttc

SEQ ID NO: 153287 - DNA, 916 bp, Zea Mays
caaagggtaggcaggagggggaaaaagcaagcccgaccagcgcttaaatccccggcggagctcggttccgaaactactgcctaccgaaccgcgattcgcgcgggcagttgagctccgaccggtacggcgttccgtgaacacgacaccgcgcggggttgaacggattgagcacacagtccatttaccagtgacagtaccggaggcaagactcaggccagcgtggatttcggatcgaggggcgttcccttgaccagatcgcggcggctttcggaatgggggactgactaagcggagcgaaggcggatgacggggggggaacgatagagctgccccagcagccaaagcttaaccaacccccgaagacgcggatccggccggtagtctgggcaccatcacacgcggagtcagcgcgacccagcagtccacgccagcgcgagggagacgaaagccggcctgaccgatggggtccacacgcgggtgagaaggagtgggcggggcgcgcaggagataactgaccggcgggtcccacactgcatagggacgagcggatattgtgaagtgggccgaaaaggttcctccaggcccaaaccgaattctctcttctttatttttcttttctattttgttctctatttattttgaattccaaattcaaaacctcaatttaaatccaactttgtggcacgtttgtactcagtctaattgttccacttggttataccaaaatgtaatgaagttatatgtttataaatttattttgtgttatatgatatttctttctctccttctccattttcatggttttgttttcaaattagggtttgggtgttgtgggcacattaatacattgctattgatacttttatttttattatccacaaatgcacaatcaaataaactccagcatgatgcataa

SEQ ID NO: 153288 - DNA, 743 bp, Zea Mays
gtgcccaaattattaaagctgaacaaaaccagcgacacaacctgttccaaactaaatgtgtagttttggaacgatcttgtcgtattataattgatggaggaagtggtaacaacttagcaagcaccaccatggtagagaggcttgggctgaaaacgcttccacatccacacccctactacatccaatggttcaacgacagtggtaagcttaagttaacacgtatggtccgtgtggaatttacaattggttcataccatgattatattgattgtgatgtggtacccatgcaagcttgctctatgttatttggtagaccatggcaatttgataaggacactgtgcatcatggtaaaacaaatcaatactcttttatgcataatgagaagaagcttgttttgcaccctatgtcccccgatgctatcttgaaagatgaagttgctagagcatgcaaagagaaaaacaaatctgttcataataaaaatctagatgttacaaaggaattggtacaacctaagagtgataattctaaatctgctcatgtaaggaaaaatgaaatacaactgaaaagtgcttgtttccttgcttccaaatctgatttacttgaattaaacgatgttgatgcaatctgctatgtgtttatatgcaaggatgctttgttctcacttcacaacataccatctactttgccttctactatcactaatcttttgcaggactatgctgatgtatttccaaaagaagtg

SEQ ID NO: 153289 - DNA, 462 bp, Zea Mays
acgaaatgaatgagatcttctctgggaaatatctctaggacaagacctagccctgtgtccggtctgcagacattgccagcagcgaaccggcgctgagcaaagaaaggcgtagtggtcagacgccagacagttgaagcattttccacttaatttcttcttaaaaaaactggtgttcttcatctctctatgctgtttcagaggcaattctccatgagaatcaagactcttcctccaccagaattttggcttgaccagtgaccagccttcatcaaagatcgacgaagcacctgccttcaccttccagctgcacgacctatggaaagggcgacacgaagtgaccgtcggtactgttccgccgaactccccacgccgatgggacaagacaccaccagcaccaccagcattcaagccccgcgaagcattgaagacgtgctcatccagaccccacttcaacttctcaga

SEQ ID NO: 153290 - DNA, 723 bp, Zea Mays
ccgaaccgaagtttcaaaaaaaaaaccaaatgcccagccctagccaacctctcttctcttgctcgtgacctgcccatcactagcagccacggcgcccctgcgccggactcaacagtgcccctctacgcctcatacctacaaccttcatagcatctctgataggaaccctaatcctatcaacccaccagatcctaatcctaccaacctggtatcgaagatgtccagcgatcctccatccaccacccacccaccaccatcggactccatcgtacctgggacgattgccgccgcgacgatgacacctccaccatcctccgcaccgcctctcacgctggaatatgtggccgctgccgtccacgagctatcctgatccatggcggccatgcaagccttcctaacggtgcccagaatcgcacagccaccaccggccaggcgcaagtgctgtgatcttgacttcgtttgcttattccgaggctccgagccccacgtgttgtgttgctgggttcgactctgaaattttgtagccacgcgcatttgttctgtgtgccagagacttcgagcaaattatgcaatgctactgtgaactgtgatcctgtgtctgtctacttggtgtggacgctatgtgtttttttataggtgcagcactggtaattttacagctgcgctattttagacgtgcagttaaattaggacaatagatgcgacaagcgaggagagaaggga

SEQ ID NO: 153291 - DNA, 1094 bp, Zea Mays
tctgcatgctagggggcttgagcaggagaagggatagccatccttaatttctcctatcatgacgaggaccatcgacctatataggatggagcaagtcctattcaatcacttcatcattgttggagtcactgatattctttggctcatcgtcgtcgttgtcatcatccaccgacccccatcggtgggtcttgagaatgaattgcttccatagcttcttgtccctcttccttcttcttctcgtccttattattcttctttgccttagcgacatcacgatttgttgtgtgcatggccatgtcttttagtagcggtgtgtgggagaggtgaaaatgggagcatgactgcaaatcatagtccatgagaaattgatacatcaaaacatgaaaagaagagagggaaataactcactagatatgaacgaagctaggctcaggctacattttggggtgtcccacaatcgggaaatcctagctaccctatcacgtcacctctcaaatcctctgagcaatctcattgtcccaatgacacatgtcactgatcgagatcctcaccaatgagagactagggaacatctggtatatggggaacagacgcaccatcagcaatgcaaccattcgatcatggtacaccgtacacatcgatgacaccagcgctcgatagaccttagccgatgatgtggaggatgtcgtgcacacttgagatctccaaactacttattctctaggtctgcagcacccatcctcacgacatggcctctttgttgataccgcgccaggtgtaggttgggagaagcatgtcgaggacattcttgaggtagaaccacctcgagtgccaccccatgtttgatttggttgtcggtaggtgcatgtactccaaggcccaaatcccttagagatgaatgctagcgcatcccactgatagtgccacgacaatgcctgagtggcccctcttcttctagagcatgacagcgaaaagatgttgccacaacgagaaatagggttcggtctcgaggaagccttctcgagaacaacctaggctgggctggttttttaagtaagggtgagcacacatcaacatactcagcagatgtcccg

SEQ ID NO: 153292 - DNA, 1016 bp, Zea Mays
cctgaatttaatgctagttgatttcaatgctagttgatttcctcctaaataaactaagtctagattggttttatcgtctagctttagtcactttcagaggggggccacagtgcaccattttcctagtgatttctgttggtaatcagtcagttcctagtgatttttgtgtcgttgtgcttttaatctgttgactggtgcctagtgatcgcggtggcgtgtagcgccccggattgtcccgctcacgcttcacagcctgcttgatgtccttgacacaagttgaataagcactacagtcaggcacacatgaactagtttgatgtccacattcaggttgagcacggctcccatcagtccactgatcccagttcagtgccgaacatgtcggacagctcgacttcgagcaaagtttttcctagatcaaaataagaacatggaaatccttattaaccgaaattgtttctcaacaacagatcttcaggtttgatataatgattacccaccaaaagtccaaaaatttagaaactaaagaggtcccaaattgagaagaacctgctgctttctaaactctttagtgaactgaatcatactttagattctaaactgaattcgacaccagtttactgaaggaaaacacttaatttcagatccagtttactgaaccaattgctgaaatcgcagtctgacagagcgacttggagcagcattttctcccttttctaagcaaggtcagggagatccaccttaacggaaatttctcaccacactaccctctaacattttactatggagagtgcaagccataacattaggggtttatcacaatagaagtctgaagtttggtaaaaatgctgaaactgcatttcaatttctgaatcaagttcagaaaatcacaagtctgacagcccctattttaagcaactataactccacattttatgcagtaccaagccaaccttccctaaaggaacttgttcactgatatacactctccaactttgacacaaggagtatggctc

SEQ ID NO: 153293 - DNA, 1053 bp, Zea Mays
ctcgtacttgtcacattcaagaccttgaagtcaggcgggcattgaattgcctggagccgggggaaatggctgagactctgcacgtctcttggttctcatggcgatcttctcgggcgtggtcgcggtggcggtccctaggaggcgactgacgctgggcatcatgccgcctctcctaagccgatcggcctggtgctgggctgttcgtagaagctaccaccgactctgtcctggtcacgcggatgcgtgctagtgcaccatggtcttgatcgtactcttcccgctgcctcatctcactttcatgtcggcaatcgcgtgaaagcattgatgttgctctacgcgtctcgccgactgttgatgacgtagcgcatgtctagtgccggatgggcggggggaagaagatggttcatcgcctaggtgtgcatcagtcgataggcttctgcgcctaggtgtgcatcagtcggtatccttggcgatttgagcctgaactccgttgacttcactcaacgtgttcagggctcgagcgaagtcgggcagcagaaattggggaaggagtgggttttcgcgtcggagcttggcatcatgctccgcttgttcccactcgctcttctaggtgtggcaacgatcgcgatgtcatgaattgcggcgttcgtggagcgccctgtcgtcaggagtctctcctgcttcagacgcctcgttcagggaaacaggctaagcaggatcccattccccttcctcatggttacgccgcatgttacggcgcctgttccaacgttagtgtgcctcagtctgcggggatcctccccttgtatagtgggctagtcgtcggagatgggagcatcctcaactcttccttggataaagaggacatccaggaagaaagagcttagggttgtgtcctgcgctccggctgtctcccatgtgagcggatcgatcgagacagttgttggtcttgctcccacagccacgctggggccagggctatccactccttttcgccgagtcatccggatccacacccgggtgggtggcgtggatagagaggttcgccgtgac

SEQ ID NO: 153294 - DNA, 630 bp, Zea Mays
ctccatttcgtcggtgagctgcttacagtagcactttgtatgcgtatgacgtatgatacagtatgggcaataacattattgtctcaagtcctaaacaagatgactcctaagagaaggctatacaattgatgaatgatatgttaattctttattttgtgttgagatattgtctcaagtcctatttttctgagatgtaaaacttttttaatgtaaactcatgaccttttcgtgatgacatgtgaactcaccacatttttatggttatttacggctactgttcatgctactgttcgtgacctgttcatgctactgttcatgctacgtgacgaatccatcctgctgtctgtgacctgttcatgctactgtttgtcctactcttcatgtcatgttcgtgtcctgctcctatccgtgaccatccctgttggtgagctgatcggcgagcagcagtgcagcacctgtttggcgatgttcggcgagcagcaccgcgacctgttcagcgagtagcagcagctggcgagccgttcgtgtgacctagggcgtataattacataggggtaaaagtgtcttgtcaggaacaaaatacatgggatttgattagaaaaggaaaagaataggctaaatggcaactta

SEQ ID NO: 153295 - DNA, 411 bp, Zea Mays
gatccattaagtcgagctccacaaggtcccaaagttgatccaatctactgccttctttgaatatcagggagccttagtctgacagccagtcttcagggccatttagctcctaattttgtacaacaccaaggcttaagtacttaatcaaagttgttctcctatagtagctctagacttttgatatattgaccctaggcaaactcttggtatttttagatctacagagctccaaagttagccttgctcactgattttcagacttagtcatatgagaggaattgcgtgtctttttgcaaacaagcccaattcacatcttctgacttgcaaatattcaaatatgtgaaccatatgacttgaggtaccctaacaccttggtttttgcacttggatccaaaagtggtcaaaatttac

SEQ ID NO: 153296 - DNA, 456 bp, Zea Mays
cttgtgatatcctgacctcaggtctgtcttggagaaatacttggccccttgaagctagtcgaagaggtcatcgatccgcggtagtgggtacttgtttttgattgtaacttcattcaaggatcggtaatcaatacacatcctcatacttccatcctttttggtgacaaatagaactggtgctccccaaggagatgagctgggacgaatatataccctttctgttgaagttctgcgatctggagttttagttctaccaattcggtgggagccatgcggtatggtctttttgcgattggtgcggtgccgggaattagatcaatgtagaaccccacttctctttctggcggcattcctggcaattcttctaggaatacatccatgaattcttctactacagatatgttttatgctgctaggttaaacaccattggatcttgggcgggtggctgagcccga

SEQ ID NO: 153297 - DNA, 327 bp, Zea Mays
ttcaaaatgtccagcttcatccagacagggaggataagcatattttcaggttcgctaatgatggaatttattcagcgaaagcagcgtataatggcctcttcatcgggtcgaacatggctaagtattgggatctaatttggaaaacctggtcccctcccaaatgtaaattctttttatggcttgctgatcttggaagatgctggacagcagatcgtctgcagaagagaggacttagccatcctgacaattgtgtcctgtgtgaccaagagcaagaaaccatagatcacattttggtggggtgtgtttttgctaggagtttttggtttc

SEQ ID NO: 153298 - DNA, 541 bp, Zea Mays
agttagggcgtgctgccaagcaatggaatatttaggaactaagtttaagctggcttaaaagtactcaaggggtgggcaatcggttttaaccgacagttcggttcggttcttcggtgcagtagaacttcggtttgggaagaaataggaaccgatcggtggaaacaaatatgaacaaccgacgatttcggcttcggtttgatcggggtgttcggtttgtaccgaagttttgagtcttcgtacctctgctgcttgttgtcttcgttgttgttggttctgcgtcttgctcgggttctcaatacagggacaaacatggaagggataaggttggcttcgtgccatgagcttgtcgtgagggcataaggcctgagaatttgtgacttggaattgtttaatgggcctgtaagctatatgggctgctcagaagttaaacgcgcacaacagacaatagtcctaatcggttcctcggtatatcggttttcagcacatataaaccgaagtcaagctgaacccttcggttcgtaaaatttgagaaccgacaccg

SEQ ID NO: 153299 - DNA, 372 bp, Zea Mays
cgcggttgaagagatttatttggtaagattttggatggaagaagaccgcgcccctgcgtgcgcccatggatctagggggaaatgaacactagccagaggagaggagttaagttaccagctgcttggccaccaccaccattctcatggatgatggccaaaggcatggcggctagcttctcaaacttgcaaggtcgatactacttttggtttagtgcaatggcggatgaaggaggtggaggaagaagatgcgatggcgtgcgtgatggacacgttgcatggaaacgcaccattgggagatccatgctaggatctttggcataattcaattgttcaacttggtaagccttccttcaaccactagttagctcctac

SEQ ID NO: 153300 - DNA, 668 bp, Zea Mays
attctataaaaatacctaggcacagagggcacccacgcaggatggcgggttgattccaagaaaaatcagggtctctttagacaatatgccacgcgaaggggtatggacggtttctggccgtcagatttcgcgctggcggtatggattagatctgcgcggatcaaaccaagagcgccgcagaaccatccgattggggatcgacggcgaggattttaaatgctaggatcaatacgcgcccgtccgtttatgaactaacggcagggatccgtcttaacgaaggggtacacattgatctaatctacaccgttccttttgcatcctacggcccatgtgctccttctacctccagacggccaagcagcggcggcgcggcaacaaccgcgaggagcgcccctcggcgaactccggacgggtccctcagatccccaaaatcgtcgcagaaagaccctacgcaaagctgaggcaagtgcgaaatcagtgggggaatctttaccggcgtcgaagtgaaggtgatgcgcgcccacgaactgacacggatttgcggcggcgtggaactccgacgtgcaattgcactggcgccgcaacacccccagcaaaattgatggccgccgaggttgccatgaatcccgacgcagctttggaacgccacacgagtgtccgagcgcccc

SEQ ID NO: 153301 - DNA, 406 bp, Zea Mays
tgcattttaaataaatttgaagaattcaaattcgaaatggtaatttcaaatgaatttggaaaatagaaagcagaaaaaaagaaagaaaacaaatctgtgttgggcccaatcctcgcgccggcccatttacttctcatctgcgcaagcccactccctccccttttcttttctttcgcgctagctgacaggtgggaccccagcttagtctcttcaacgcgacgcgaactcatctctggtcgcctgaaccgtggggtcagctggtcagggtgttcttcctcctctgtgacgaattccgccccgctccaccattgccatcgccgtgtggacccatgccgcatgcacctctgctcaatccaccgcaccctcaccaaccactgttgggtgggaccagagcgtcagctctttc

SEQ ID NO: 153302 - DNA, 848 bp, Zea Mays
cggctggggaaggggagagggtggccggcggctgggagagggagccggtacaactaattagtgtaaatgtgctacctggcatgtctagttcagaaatgcgtgataagttttgtatgtagtctaagtttagctcttcttagttccttgtagaactttctctactcaaaaggttcttttgaagcttgcatcaattaaaggctcttttgatgaattgtatttttctgtgaactcattcattgcctcttattattttaaggtttgatttgcgcattttcttttaaacaaactcaaaattttagaactgttttcttttgcaatttgtatgaaaattttattgtaagtgtcagtgacaaaagacaaaaggaaatatatgtatcaaggcatcaagcattctaggtagtaaagaatgtcaattgaaaaaaatcacttgccttcttagttttattctatctttaatttctttggtgtagatttttcctttgaaaataggtaaggtggtataattatctcttgactgtctgatatttgctgtagattttatatactgtatgtattgactatctttctgtctgtataatagcatttttgcatgcttgttcatttcacatgctacaggctttcctctttgcttttgacctctaccacctttaacacgtgtaggagcagcatttgaggtgctgtttttttcaacagggagtacggtaatgcaactagctaacggtgctaactgttgcagaggaactaaaacactatctgtttggtttggctctgggtgctcggccccaaatatttgttgctgagattctgtgaagggaactagtaacgcttgtagggaaggggcaaaagag

SEQ ID NO: 153303 - DNA, 2012 bp, Zea Mays
gatggagcaatgcagggggagacggtgcgtaggattgaatcgttgtttcttgctgcatgaactcggcaggggctcttcgcgggtggattttatttgttgctttcatggaacatggaaagcgagataacgaaattccatgggtgtccaatcgagtgtgtgatcagggaaagaaaaggtagaggacctcttatgttggttcctgtcttcctgctactttagagaataggtcttccaggtaaatgattgttaatgggatactatcacaaatcattgcgttttaggattatgaacacattatgatcacttatcttgcacctaggaggtacgagcgaaaagcctctagctgagttttgattaggtggtctgggttgcactcctcaaattctgagtttgattccatgtggaagcgaattttcaggctgagttaggtctaaggtctgacccagtcacggtcatgggctatggtgcccgcatgcaacaatggtagggtgattcagaaacagatttcagcaggctccaggatactagtatgaatgattatgcaaagctaccccaacctatttcttgcaccttataaaaaatcatagctcttgcagattgcaaacccaaagttggcatgtatactgcctgcaccatgtacttttcttatatttttcgtattatatctgaaatagaatgatgacacaagctaatcccatcgaaaacagatctcttacttcagtcaaactgcgtggtctgaacattttagcagaatctaaaaacatggtatatatatgtcagcatgcattcagtttctgttttttgaagcaaatggcatgagctctgcctctcaattaagacgaaaaagaagttacatgtacaagaaagggaagccaaagccaagtgcctaaccatgtgatgcctgccacaggacacccgaaaggctggctaacccacctatgcgacacatcaaagcacaaaactaccatgaatcattgttaccgagcatggttgcatagcattcaacagctcttacttcccattgcagactctagacgacacatcctaaccatgccagacaaatgggccagaagcaagagtctgttacaatacaagtcatcattgccaagcagccaagctcaaacgcgtcgtgaagagtatctctgacttcctatatcaaaccaacacccagcctcgacagatgccaaacctcaaatgcaaaaccctagtcatcgaaggagggtgtgtccgcgtcatcgttgtcaaagccatatcccctagtagctccaactttacgctgcaagacccacctccacgcgtcaattgggcaccgagaagtgaagagcaaccacagaagatgacatccatcaaagttaaggtgaatttccaacaatgatgccttaaggaagggaaggatgctgatagtgccaccattgcttgtccaaaaaatggatcgggttttcatgcttggaagacaatgctagaggggaaataagcatgacgcttccaaaaggtaaggcgacaccccgtatcaccaatgtcgggccatgatgccaatcacccggtcaccccttgcctagcaccaccattgttgtcgctgccctaccgccccatagacgcctctagagaagcatcgacgcgccaactgcacagagtagtcgtacaactgtgttggacgccactccctttgaccgggcatctcacagaactggacttgaccctaccgcacatgcaacaccaccacacaccatagtagtcaccatcgctagctctgcctctccacctaggcgccacctggcgctatccataaccgcagtgccaccaccatggacgtggcccctgcctcgggagccttggatctggccaccagagcactagctttggtgccctgggccggtgccgccgccatcttcaccgcccaatgctcgctacccaccctagggtgtggcacgtcggtgcactgcgcaaatccagccgagaccactgaatctagtcattgtggcaaggaagccacctcaagacatcgttgtcgt

SEQ ID NO: 153304 - DNA, 523 bp, Zea Mays
tctccactcctcctgctctgacctctccgcgtctggaaacagggactagaacatgccaccgactgggggtgctgctgctgatggctctgctgttggctcgtcgtcatcggcatccaaggccaagagcttcatcctggatccaccattgccggtggtggtgcatagcaccacacttcctacaccaaatccaacatcaggtaaagcactgctctgctacactggtagttgtgtgtgttcagtatataatggtagttgtatgtacatgtatataatggtagaaacatctattgaattgttgttaggatctaagcgagcaaggtcagaaaatatgtgccaaaaccttagtggtttgtgtctacatcaaaatgatggcagtggtagtggttctggtgcagcagcaacaaatgatggctgtggtagtggttgtggtgcagctgatgtaggtagggatactttgccaagtggaggtggcagcggtagtgttgctgctgcagcggatggaggcggcaatagtgaacaagcc

SEQ ID NO: 153305 - DNA, 661 bp, Zea Mays
gcaacaagggcaaaggtctcaaaatcaataccctctttctagcaaaaccattgggcaaccaacctcgcctttttctcactaccaacacatcttcactctcattatttttgaaaacccatttagtacctatgagatgacaatttaaaggaggtggcactaaaaccaaaacttgatttctctcaaaaagtttgagctcctcaggcatatcattgacctagttaggatcagacaaagcatgtccaacatcctgaggcttaaaagaatcaacaaaagctaactaagcaaaatgagacatatgatgatacctagagcgagtgactcgcatatcaatctcaccaatcatttgttgaggaggatgatctcgctgaacatgcggcagagctgtcctcgaaaaggtggcctccccctcaacatcagcctcaactcctccagtctcagtaggagctggctcgagcggaacccaagtagttgaaggactaggatcgggttcattagccaaaatagttgaagcaggcatgattgggctcaggatcaccccaattggcggcgtcatgcttgtccttcacaaagatggtttgtcccatctgatctggacctgtaggcccaaagataggggatggacagagtgcggtctcattgaatgtttcctcacaagtctcca

SEQ ID NO: 153306 - DNA, 334 bp, Zea Mays
gtgcaggatagcaggaagtatgctggaggattgtggtacaaaaatctgattgccatgcattatgagtccctctctgatctgccatggtgcaccttgctgccctatactgatctgattgtgcagcagctgaaactcttggttgcttgcacagtcttgttggaggtctttgtagagttgaaaggttagtgttgagatcgtatacaccgatccactggtggtttccctgcgcgaaagagcgtctgctactatatttagccgaccagccctatattccaccttgaagttgaaaccaaatagcttactaatccactgatgctgaggtacaattgagagc

SEQ ID NO: 153307 - DNA, 665 bp, Zea Mays
cgccgcgcgggcgccgcctctgcgactgcgacacagcgtaagccgcctgtccccaccaggccctgtggccgcgcgtcgccgcggcgtgggcagcaggcgcctcccgagccggcgcagccacgcgagcctgaggatagtgcatctccgccgccggtgcaaccagaggagaatgccgggtccacgaccaccgcggttgccggcgacggtgaggggaaggagtcgctggacaaccctttggtggccatggagtgcttcatcttcctgtagcactaaccttctcctgacccgttctccgctgtcagcaaattactccacatagttttagcaggagtaaaggtggtggtgttggtagcagcagcaggcagtaggccagtagcagcgtaatttggtgagtaataatctcgtcgtgtaaaacgtttcccccctgggctggctttttaacccccgcgggagaaaaattactggctattcccgtagagccttcagcccgtcagaattcagatcgcagggctgggctctgacgcgctgtgctgatgtattgtctgcactctgtagagtacctctccgattgtgcatgtctacttgtaatcttctgttcctttttgcaatggcgagtcattcagagctggaaaggcattccatctgttatagtagtattgttttgc

SEQ ID NO: 153308 - DNA, 290 bp, Zea Mays
tttggcagctacagtttagttcatcctgtttgcagcatttacggttgttcatttgatcttgcactggctgtactgctcaattaattagcttgtaaatgagaaactgccatggttggttgcggtttcgttgaaaaattattcaggtttttggatgctattccgttctagagcttccagaatccaaggagatattgttttccctgcatccctgttttggactataagacgtactttgtggttgtcgtttagttaatcgcttttctattcggtattcatttcatcgcgttcca

SEQ ID NO: 153309 - DNA, 416 bp, Zea Mays
ggatgttgtctgaccatctgcttctgtttgcaacaactttgtggatttcccttttgttttgtaccgtacaaaaactgccaaatgggagatcttgtaatggcaaaatgtctgatgttgtgtttgatagctcttttgcaaatttacattccgttggaaaagtgtatcaatcatgtcatcaaccaggcagctaaactgtcgagtaccagtaggacctgtcaaacaagtgtgacactacaaagaatgtttggcaaaattttgctgtgtatgtatgttagcgtgatgctactcgtcacttgtgcaccaactgctccacatcgccgagctccagctcccgaagttcgtccccatcgccgccgcctccgaacagagactcgatctgctccagcgtcttgccgctggtctccggcacaaacctg

SEQ ID NO: 153310 - DNA, 337 bp, Zea Mays
ttctcctcatcataccttgcttagccaggaaatggaaagaggtagctgtttgatttgggaggcttgtttttcttggggcttgtgctgcaaagaaaatatcatgctaccattggagagccaattcggctgtttccaaccacgaggtagggcagacccttgctagctaggcaaggcaatccctgcctcagaactgaacatccctggtttccattaatttcaccccaagtagccactgttgatgattctgcaagagcagtagtgcagtaaggtggtttcgccatgcgcatagtgtgattagcaagatgagtgttagatttaagccagttataactagggt

SEQ ID NO: 153311 - DNA, 965 bp, Zea Mays
tacatgatatttgtaagcagagcactccctatattaactccatttcttgttgggagtcaatagaacttgactgcatacacagaatattccaatgttgtacattagtcattaatataaggagaaacgacaggtactctctacatgtcctttagcttggacgtaataccattattcaaaaaacaagagaggttcatctgttgcattgagtgataggaagcagaacatcccagcttggtcatggcccttaggatgggtagggaagaggcggtgctctggtccatgactggtgccaagaccttgtccttcctccaagtcgatgagttgctggcttaaaacagcggagtgggtcgtgtttcttccatgttttagtcggtgatccgtagttagtctctagtggtgtgtgtgctgtattggggttctcccccctttcttttcttctattaatacaaagatgcgcagctctcctgcgtattccagaaaaataggaagcagaacactatttacaggtcagagaataagattcaagaaagagagtgattttactgttggagagtttaattagttattcacatgacacaatagaactgcgaagaatataaataagcacaaatctgattttacccatttgtagcagtgttaatcatttagctcggaaataacaaccggaaagtaatcaacaaagtttgcttgtgaattggcacattctaattaacaatttgcatcataccttcatggattaaaagcaatggttgtatgtatgggtattaactcgatctgggggtagggattgggatggcggttcgtaccttgcaccgagttagcagaaacagaagctgtagaggaggctgcgcttgcaggtgttggtgtcgcccttatcgtgcctcggttgcggcgttcagaaacaccacacacgcattgttggtgatgaaggtctgcacaccggcgatgtttagctagctcgaaaa

SEQ ID NO: 153312 - DNA, 476 bp, Zea Mays
tatctagtgttttaggaaatttatgtccactaggttgagttggacctttttccataaaagctctcctaacttcatctctaatattaggacgaaactaatcaattggaatgcgaagacccgaatcggagataatatgatccaggctgaactcagttattataccttgatcatttatatcttcctctctttgaccttcgacattttcaaccggcatggatacaacatcctccactgattgagtattccttaaatgagtttgcaccacccctcctcctctaatgtgtcatgaccaactccacttccacgagtactagcatgtgtgctgctagcacgactaaaatagctcttcaaatctgcatattaaactaaattagtcctactcccactacgaaatacgaataactaaaatgtatagataatattgttacacataatacaactactgaactacctcttcctggagcctttgtttttgc

SEQ ID NO: 153313 - DNA, 638 bp, Zea Mays
attttattccatgtctggactgcgccacaaattccagagaaatcaggggcaacggcgcaaaagtatctaagactcaaaactacctgccgatggactgcgggttggtttcaactatttacagggactcatacgcaaaaccaacagccgaaagggtatcggcccatcaaagccgaccgatgaagaaaggatggcccagattagatccatcccgcggataactgatgcgagaccagtacggtcagattctgatccaacggtccaaatggatccagcgcctatacgagtctcaaccgatcgatccaagatcaacggctaacccagccccggccgaaacgttacggccaaccaatctccaccgcatagactctatccaatggctaaaacgcgtcccaccaaggatctaatctcagcccttcacagagatctaacggtccagtgatcgtcatctacattgctcatcacccgacagaacacctagccgcggcgttcactagacacggccaagccattgtcggccgcacctaaagctcgagtcccgcctgaaaacttcattccagcaaccgaaaaacgaagagctgaggattgcgagactggtataggaggtctcaccacggtttgtagcgcggacagccctggcc

SEQ ID NO: 153314 - DNA, 542 bp, Zea Mays
ctgcgcaccaaacagccagtgctcctctacccagcgtacgtcacgggcgcgtctgtgcctggcttaggtgcgtctgcacatgacaatacttgtttgccttatcccaatttattctctcgtgctctccaaaattttgacttagtacattgtgatttgtggacctctccaatcgccacgtattcggttacatgtattatcttcttgttttggatgattgctcacatttcagcagacttttactttgcgatttaagttcgacaccttctccaccttggctaacttttttttttcttttcgtttgtacctagttcgggtgcaccatcaaaagcgtctagtgtgacaatggttgtgggtttgacgatgcctccacgttgtccttgctcatcacccatggtgcccttctacttgtgtcgtgtccctacacatcccccacaaaacggcaaggctgggtgtatgattcgttccatcaataacatcatccgctctcttttgttttaggcatccctgtctccttgccgttgggttgaaaaactccacaccac

SEQ ID NO: 153315 - DNA, 739 bp, Zea Mays
gttcagacttggaagagctacttgagccattgttcatcttcatcctcttagcaattacttctttaagcttgcccccgggacctccctttggagtcagatcacttgcttcaattggttgttcatttggagcatacaatttcctatattcctcaaaaagctcatggacacaagtgttaatggcttcccaaactagctctcccctttcttgaccaaatatttcttcgatggttatctttgtgtacaaagatagcttgtatcttggatcaagaacagcagccacaaaaatcaacaagttaatgttctctttctccttctcttttccctttcccttccccttacgcctgcccctcccattcccatcctcatcctcgtcctcatcgtcattctcaaacgaattgttgtttgtgtgccacactccccaatacttgtcatatttgtctttcattctcacgcccattgacacttgcaagtcgtcttcactactcaaccaagattgaattagtaagtggacttccccaatctcatggaagaaagtattggcagtaggcctgggcaaaaacccattacccattacccaaatccgaactacccgaacccgtacccgaattacccgtacctgaattacccgattgctaattcggatagtgagtcccaaaacccgatttgtgtttgggtaattcgggttacccgtcccggtacccgaattccctaatttacccgaaattcctttcagcccaat

SEQ ID NO: 153316 - DNA, 287 bp, Zea Mays
tgaagacataatttatctcctgctatatgttgatgatattgtcctcactgcatcctccatgtcacttcttcggcgcaccatcagtgctcttcagcaggaattctccttgaaggaccttggacaattacatcacttcctcggaatgcatgttcagcacaccagctctgggctctacttgtcccaacaacaatacatgcttgacattcttgatcgagctggcatgcgcgactgcaaaccgtgcactacccctgttgacataaaccccaagctttcagccgatggtgatc

SEQ ID NO: 153317 - DNA, 341 bp, Zea Mays
gccatcgcgaccagcgcccctcccctgaagccggccggacccgactgcgccaagatgccgaccgcaccactgcaccgaagcccgcgcgactcgaccacccaggcgccgagtaccgcgcgccaggaactgccagaagccgacccgaccctcatccgttcgtcacacatgtaatgaagcttcaagacaacagtttcttccctccattactctccctccattcaagctccttgaatgtcatcaatggcatgacgccgccctctcatctcccctcgccctcgcctataaattggacagtggtgcccatgagctctccctccccgaactcgccatctctccctcgc

SEQ ID NO: 153318 - DNA, 318 bp, Zea Mays
gtggtctactgtgcaaccatttccaaaatggtcatatcagtcaaaacgaccatacaaactacctaaaaacacatatgacagcatggcatgaagagaaatagaaaacaattccacgtgcaccatcaaacttgtggtagtctgattttgaaccttgaactattaaaacagggtgacacacatactccaactgtcgaaaccagactgatttggtcgaagtggatttctatttcttaataataatgaaaatctggcttggtctctagaagttccatatgtaatttattttaaatcttaaacgaaaatatgatactagttcta

SEQ ID NO: 153319 - DNA, 696 bp, Zea Mays
tgaaaaaacaaccaaccctaaaccctaaaccccatatctcaccaaataaccaggtctgttacgagatgggctatgagaaaacactaaaatccagcatgacacgaagccacatgtggcgtatcggtcactgctagcacctcgctagctgaaggaggacaaacgagctataaaaaggacaagtcttcttttcaactcatacttttctcgaccatttggctaagacaaactacagtatctacactttaatatctggtatgtgggtcatatgtgattttaattttttgtgagaagtgtccactttaattttaaatttattttttatggggaaggttcatcacactggcttatcattggaccctcgggtgtcgtacaattgttacactataccatcaaatatggttggtgtaccgtcacatcacacgagtattgtactagtttattccacggtttctaaaaatactatatcagttttgtctataaaattgtgtatcctaagttttatctacataaaactctctctatctttcttcttattaaattcttgttatgtcatcaaatttgattatatggtaagctatttaatgaaggtggaactcaaataaaatcttcacttgaaaaagcataataccaaaccaacctgcccgatcttcccctgaaggtatattcgtatatgcattcctaattgcataatctata

SEQ ID NO: 153320 - DNA, 728 bp, Zea Mays
ctttttgatgcacattgtatctggttgattctataattttgctggtggttgcttctccaatttatgtttgcgtttcttggactcttaacatagtgcctgcgccaacactgtgctgctctgttatgccagtatatagcgctggttgagtacattctgcaaacactgtcacatcattcttggttatgatcatcagagttgctgtagacaactggacatgtatatgccagtatatagctctctgcatggtcttgctagtatgatggtgttgccaatttgccctttcctacggattttggtttaccatatcttttctatctttcaggctaatgccatttttactatctgaaatgatttctcctgtgatactgataccttattgttttagatgtcttatatgtatattaatattaagggatttactgtgacaagcattggatatatcctgtttgttgagctagtattacccatataccagacaatcagatttgcacctgagcttccctggacataataatgttacaagttgggtgatctgtgatcttggtgatgccattatcacttgaaactaccaacttgataaaattgtgtaggcagtggaactgggttactagccccctggccttgaagccatattttaattttcgcggaatccatttgaagtacaggggaatcgacttgattagggctagtttggaaacttaaatctcctccgggattccggggattga

SEQ ID NO: 153321 - DNA, 701 bp, Zea Mays
tgcttcaaacttttgtacaaccatccatatcagttagttgcacttttgtgtgtgtgtgttttttttcaaaaaaaatgtcctcagataaaagtgttccatctttcatttacaccttggatttgcactcaccggcagaatctatccgacagcacaacgcaaactagcgtaaagcagtcacaactcacaagtgtctatccacgcctcttttcaccgaaaaataaaaggagcgtacgtatatatatcggactaaacagcaggtggaagttgctatgccttaacgagaacaactttgtatttcgttgctttcttagccctacacatgcaagcccggttgtttagccctaaacaggagtatgtaaaatgcattatatatattgtaggtacaccctacagtaaccttttactaaaaaacatagaaatactgtaggccactgcatgccattccacacaccatgcataatatatatattttttcctgcattaacaaatgctgagagcgttgctggtacgtccagtcagagcatgcgcgatgacgatagaagtgtggcggtcgtacatcttataatgttgctgccagctgcgtcacctaatcacacagtagctttatatatatatgccttgatcatgtgtagtggccgcgtcgcatgaacaaaaacagaattgctaagccaagtctgtgtgcgacagcggatcggaggagg

SEQ ID NO: 153322 - DNA, 337 bp, Zea Mays
tgcagatttttcaaatgaatgctttcgtcgcggagtccagtccacacgcatgcgtgcaaagacgtggggcttattataatttgatgccagctgcatgcattacttgcccgggatgccgcgtgatctaagtttagtttgcttgacttgctaaagaaaccaatgaacacgccaagatatcataccaagaaaggagcagccgatggacctcgtacagtcagatcatttcttcagagattttgccgactccattaccagatttttgcagccaattcttcaaagtatccagcatcttctccaacttctggtcttttggcttgagcatcatgtcccacctctg

SEQ ID NO: 153323 - DNA, 579 bp, Zea Mays
agtccaacaagtggtaccagagccaaagagcgatccaccatgtcggctccaacaggagagcgttccctgactctgcctcgtcgtcgacaatggcgatcgccaccgcgtcgacgcaggaacggtggcgacgacgagcaagtggtggaaaggatcgtggagaggatctcgtcggctggacccgccacgtaccccatgctgaccaagacaaactacaacgactgggcgcttctcatgaagatcaagctgcaggcgtggtgcctctggcgtgccattgatccgggcgacgacgtcagcgagccagaggacaggcaggcgctggacgcgctgtgtagcgccgtcccgccggagatggtgcccacactcgccagcaagccaccagcgaggctggcgtgggaggccattcgcgtcatgcggatcggtgatgatcgcgtgcgaaagacgagcgcacaacgcgttcgccgccagtacgaggaactggcgctgcgcgaaggtgaaggtgtcgaggatttcgccctccgcctcacgaacatcgtcagccaacttgcaacacttggcgacccagaagacccgacgaaggtg

SEQ ID NO: 153324 - DNA, 830 bp, Zea Mays
gtctttgcccatgtggttcctggggaagttggcatcattcccgagtagatatcttgggctccccctgcatttgagaaacctccgaaaaattgatgtgtagccactgttagacaaggtgcgagccagactttcgggatgaaaaaggaaactattatctaaggccggacgattgactttggttaaaactgtgctatcagctcagccgatttaccacttgactgtgttcccagaacagaggtggattttcaagcaaattgacaaaattcgtcgtagtttcttgtggaagggagaggaaccagaaaatatttctgggggcactgccttgtcaggtggccgttagtgaagcgccctttgaacctaggtggtttgggaatcgtcgatctggagcgttttgcaagagctttacggcttcgttggctttggtttgaatggaaaaatcaagaaagagcttgggtcggtttggacattccctgtagcaaggttgatcgggatctctttcatgcgtctacagtggtgacagtgggcaatggggttaaagcatctttttggcattcgtgttgaatcgatggcacgtcggcacgattgatagctcccacgctctttgccaagtcctcacggaagaatatttcagttctaaaagccacaacaaataatagatggatctcccacatttctccagttgttggggccaaggaaattagagagttcgtggctctttgggatgctctgtgcgaggtgcaactaaatccagggattgaggacgccatttactggcgctggaccaatgatggtgcctactcaaccaagagtgcctatttggcccagttcat

SEQ ID NO: 153325 - DNA, 494 bp, Zea Mays
ttattatcaaaacgttcaggggcttctacgtaaaccgttctaagaccagagcactctacgctggactgcgggttcatatgccagaaatggaggcgctcttgtgctaatgtcactacaagaaatttgtccttttatgacaaaatacctaatgacaaggtcagttattgtcatataatgtcacataatatgatggaattttttgagtcgtcataatttcatgaggccatgaagattttatggcgatagtgtttttttgtcacataagggtacgaagattcgtcatatattgtcaggcgccagaagctggtagacggttttacttttatgacgcttagatgtgcctttatttgatgatttggcagcgtcactttatgttttttccaaaaaaggaccgtacccctttctattgaccgcattcactttcccatctcccacccaagatgaccaaaattttcctcctaccttatcctctcggctgctcacctccgcgtccg

SEQ ID NO: 153326 - DNA, 375 bp, Zea Mays
tgcgggcacggtcgctgccgatgcgggtcgcagcgatggcgtcccaggcctccttggcagtccgcttctgggaaagcgaaaactgcatctcggacgggactgcagcaatgagggcatccagcgcccaccgatcctcgtggtagtcgacgttgccgtaccgaactgctttccacatttggcgaacctggagccgtatcctcatcaccgcggcccactcgacgtagttggtcttggtgagggtaggccacccaccgccgggaccgatgtccctgacaatggcctgggccatgcggcgaccatggtaccgatccggggagggagagtcgcgccgcctgtagaggccgcgatctccgtcgacccagtcgccgccgccgg

SEQ ID NO: 153327 - DNA, 525 bp, Zea Mays
tcgatgcggttggtcggtgtctgttcccagggacctgtccttcaacaacctcactggccccgtcccgctcttcccgacacggaccttcaagtaagtgcgcttaatactgctgctgccccgccacacgaccgtcttatcctaatgcacactgtaacttttgcttcttcttcttcttttttttttaaaaaaagagagctcgagctgtatgatggtggtggtagtagcatcgaatctaatgcgaagggtgtttgttttgtttaataatgttcgcgtggcgtgcagcgtcgtgggcaacccgatgatatgtgggagcaacgccggcgcaggggagtgcgccgccgcgctgccgccggtcaccgtacccttcccgctggaatccactccgggcggcagcagtgagcactcttccttcctgcctctatgtctatcattcatatctacggccagtcaggcaggccagctcgcgcgcctagcagctagtcgcgctcaatgcttttcggccctttctcggagtgcgtggcgtgg

SEQ ID NO: 153328 - DNA, 526 bp, Zea Mays
attttatggttcgttgatgggtttcctgatggttgatgcacgcctgcttggtggaggcgggaatggtgatcgatgattcgttgggtgggtggggggactggctgacagctgacagctgactgtgtattgtggtttggatggcaggtttagcgtcagtaatagctaggattagggttcaggcgatgctaagattttggggcgccaattgcagaatcactggattgattcatcttttaggggtttcctcgtactcggagtacgagggcaccgttttagttgaatgttgctctggtgtctaagcgccaggtagtcaattttgcagtttcagttggggattgtacgctggcatcagtttttaccttctactcgtttcatctcttaacaactttgtggtttgcagtgggcacaacaatttgttgctgcaaactcttgtgctccgtggggcgtgggctgtgcagcagttgtgcagtttaattgttctgtttatcataatacacaaggagttagtgtttgagcagatgtcaag

SEQ ID NO: 153329 - DNA, 303 bp, Zea Mays
gctatccaaacgcttgtacatccaaacaatggtatttacgactatattatgtatgagccctgaaaattggctcctagctactacgtactacaacgtatctgttcagtttttagcatgattcaaatgcatgagctacgtatacaccacccactgctggtctgcatatgtcaccatatcataagctagacagctacgtatacaccacccattcactatcaagagcattcctctcaacgttccctgtaagaaagcagcaggatgatgagactagccacctgctgctggttgccactgccctcctcc

SEQ ID NO: 153330 - DNA, 624 bp, Zea Mays
ccgggtgccgggcgggccccgcatcggccacatccacggtgtgcgccagcttgccttcggttgattgacgcgggcaatggcctagctcccatgcgcggtcgtcatcgcctcgacgtcggatacgatgcttatgtggtccgtgacgccgtgcgggtccacgtgcagcctgtaagggaagagcgggtggccgcgtagccgtcgtcgccataccaatagtcatctctctcgctcccatgcctcaccagtgacaggcatggctgaaacaacaccacgctctatgctgcacgacggtgagtactttcctccctttttaatattttattccctctctcctcaattcatgttcgccttattaggtcctggaaccgatagcttctctaacccgtctttgtcgttgttcgccactttggtttgggcacccaccgtcgtcatgggagcgtgtggtctgctcctgctgcccgccgccccgtagacattgtctgtgactccgtaagtccatgtttgctctactagaccccctcatgtcgtctgcatctgcattagggtcggctccattggtgcttgctgcattagggtgtttgctctttgcaagaactgtgttaccgtcggtcatccggtgcacaa

SEQ ID NO: 153331 - DNA, 699 bp, Zea Mays
ccccctcccgcgacggccgaccacggaggagcagaggcctgcggcggcgtgccattgccgaccaacgccccaagcggcacccgatgcaagaacttcaaacgaactggtgctacccaagcagataggtaaggcgaactacatggatgagttctcacctgctgccgatttgtgaaggagctcggccacgccgtgatgtggccctatggtcaaacccaaagattgcgagcaattccgggctcccccgcacggataacgcacacccacgcgcggcgatcgatggtgacaagtccgaccacaccaatatcgcactggctcatgggtagccctcgcctccctcgttttctctctctaaatactttcttttctgtgttatccggtcgatgctctcagcccaagcttctttgactacacgatagatgggatcaaggtgggggggctcggcttatataggtgggtttgttaagattctcaaccaatgcctagatccatggaggggttcttgcgtgaccggcacgcgagattccccaattcggactcaaggttagtggcaatactgactattgggtcccaccaagaaggctcattgcagtggaggagggaggctagttgagcggtccgcatgtcagtgaccgcgccaggaggaaagatgggccagcttgagaggtccacgagcgcccgacaacatgagtgagatgggcc

SEQ ID NO: 153332 - DNA, 326 bp, Zea Mays
attggagcttctgtgacggtgctggttcgctttagtcacgaatctcatcgttcacctatgttttctcttcttcccttcgtggagcagaagttggggttccctgatccacgcttggaggagactctagacccttctctcaggttgttcaggctcctccgcagcccagcttgaatttggtgttccgaacaaagcagtgatttaacattgcatattacagcaaatattatatgccatcctttctcttgttagtgcaacattgtttgtttaatgaccacttgtgtagtgacattatgcccaaatgcttgcctcttgaaaaagtgtcttcc

SEQ ID NO: 153333 - DNA, 326 bp, Zea Mays
gtttgctcgaatatgttttaatggatagtttagcatgtttgtttcatggaggaagattcaaagaggatgaagagttcgagaatatacaatgtgaagtgaaaatgtttgagatgacacgtagctttagtgatcttatttgccatataagtagaagacacgagcaatagtatttgatgcctcaattcaaacatgtgggtggcttaccatagtcacatttagacactggtagtttaggatggacatatgcatccttacaagtctggtagtttaggatggagatggagtgtccatatgtttgagtttgtgtgtgtgtgagagagaaagag

SEQ ID NO: 153334 - DNA, 2677 bp, Zea Mays
tttcttttgccagtctgactgtaactgttgttcacccaagaaagtcaaagattgatgatttgtccttataacaaactgggacctctgcaagtaaggcctccatctgtctactgccataataagagccaaaaactctttctcatatatagacaattgtttgttcttcacccccaaagctttactaagaaatgctattggtctgtgttgttgcatcaaaacaacccctataccttccacacaagcatcagtctctacctcaaatggaatctcaaaatttggtaaagccaagactggggtttgtgtcattgccactttcaatttgtcagaagcctgttgagcatcttcagtccaattccacaattgctttccctgcagcaacctagtcagaggcttggcaattgttccataatgcctgacaagctttcggcagtacccagttaatcccagaaaaccccttaactcagtcactgaactaggaacaggccaatccaacattgccttagtcttactgggatcagtggccactccatccttggatatgatatgacccaggtactgcaactcaggtcgaccaaagacacacttctttctcttcaaataaaacttatgagtcctcaaaacagaaaacaccttccttaaatgttctaagtgctgaacaaagtttggactataaatcagtacatcatcgatgaaaaccatagcaaacttccttagaaaaggctctaaaattgagttcatggcacattgaaaacttgctggggcattggtaagcccaaatggcattaccctgaacttgtagtgaccatgatgggtcttaaaggttgtcttatgctcatcctctattcccattcttatttggtgataacctgcagtcatgtccaaacttgtgaaatagctagtgcctgccaactcatcaagaatctcatccacaagaggcattggaaacctatttttgattgtcatatcattgagttttctataatccacacaaaacctccatgagccatccttcttctgcacaagtagcacatgagaggcaaaagggctaacacttggcactatatggcctgcctttaacaattctgcaacttgcctctcaatttcagacttgtgcaatggtgaatacctatatggccttgcattcacaggcactgatcctgggagtaaaggaatatggtgatcataaagtctggtgggtggtagagcctttggtgtttcaaagatgtcctgaaattcctttagtaactcattcagaggttcagactccacaatttccactggttctggaacaggttccaatagaacaaacacctaaacctcatttccttttaaccatttctgcaccttcagtgctgccacttgtgggacttcagttaccaacatagaatcccccttcaactaaatttgttctccctgatgaacaaaggacagggtccttttctcccaatcacattgcattggactataggattttagctagtcaaatcctaggatggcatcatacacaccaatatccaaaaccctcatagatgacacaaaagtatgtccctagtccaccaagtcacttctctaacctttttatcactcctcaagacttccccattggctaccttgaccgtgactgcagcacatagttcagaatttaaactcaacttgtccaccatagtttgactcatgaaactagtggaacttccagagtctaccagcttaagcatcaactgatcctggatcaaggctctgaatctgatgcactctgaagtgtcagctccactcacagcatgtaaggacagtttatgcaacgcttcctcccgcccttcctcttgctataccctttccaacatttccttagaaagcaccatctccaaatcttcttcggtagtcacattcagctgttgaggcaccctcttagggcatttagcttgatgacctggctcaaatttctctccacaagtgtagcacaatccatttacccttctatactccttcacctgtctctccttactccagtgtccctgctccactactccattcacctcagtcttccctcatgttccccctttattcatctgacctaacttcactaatctaccacctccttttgcccaaacctcctgctgcaccacagcaagtctgattgttctatcaatggtagtaggtatttgagacatcactggcccttgaatctcatgcttcaaacctttcatgaattgagccacaaaaaaaacttcactcaggcttggattatgcactgaaactgcatatctgagttcctcaaactcctgaacatattcctccacacttcccttctgctgtaaatacagtattctgttcatgactcggggaaacacatctatcccaaacttgtcaatcacagtcttcgagaagtgcctccaatttcccaaatcccctttcagtctttgaatttgcatccatctagcagcatttccttccatgtgcatggaacctgaaagcaccgtcatgcactcagacacctggtacatacgaaaatagtcctcacacctgatcacccatagcgcgggatcctccccaccaaactttggaaatagaaacttgggcaggtgcgattgcaactcccttccaccagctcctgattcatagtttccattttctcctcctaatgactcccctctttctctgtgttgcctgtgagtttggc

SEQ ID NO: 153335 - DNA, 474 bp, Zea Mays
tggtaacccatcggtcctcgggacatggggctcatgtggtcggttatcctgatgcgggccttctgcactaggacgatcaaaggtgacgttcggtataggcccctgaggcatacctgtttcataccccattgtcgtttggtatgaggtgaacctttctggctccctagggatcgaaaaatattcaacctcatgcatgggtgatggcatgctatgactacgatgtgctgtaggtggggtgtagtgtcgctgaggtgagtaggaaaattgttcctgacgtgcaacactctgtcctgtgtagatgtactcggaccgtccgacctgggtggccagacgatccgcgaagggactagacgacccagtactgtacccggactgtccagttgtgctggcatctcatgcgagccatgtggcgggctcggtgtggctctgaactgcccgacgtaaggtgctgaaaggtctgctatgaaatcggac

SEQ ID NO: 153336 - DNA, 1430 bp, Zea Mays
agaagcagtacaaaatttcatcttctgcaacatactgacacatgatattactgttacactaagagctagtttgggagccaccaaaccggaggggattggaggggctaaaatccccttggaggagattttagcctctctaatcccctcctgtttttggactcccaaactagccctaacaggcaagtccttcaaacactagcagcaatgcaccttcttctgggggagaacctgtgataataacaatgcagtcattgatttactgcaaggtagcaacccataccagtggaatatatagcatgtaaaggttgaacactagtgcaggttgcccctttttctttttgtgccggtttccacttttgtttaagttgtaggcctcgtttgggaaatacggtaacaggctaccctggtcatttagcaccgctgggacaaacctgcaaaaaaaaaaaaatccccgtctgatgctgcccggtggggtttgggcaccctgtggctatttggaaactgccgaacagactgtccacttcaattctctaaacaaacaggtaacacaagcagaacaagttaacacatatgccaaacgtttggtttatgcaccaaaggcaaacaaactgtccaatttaatgtataaatagaagaacactacaagcagattgtccaaatgtttcagtagaaccagttttctaaaaacagagaatgctgacaagaagcagatacaagagactggggttcagacacaggagaatgcagttcatgagacatggctagcggcttcttctagatggcttccttccctgtagatatgcacagaaaattggcatcaaattaatgaaaaatgaagatcaatcaataaaataagataacatgccacaactctgactctgcgaaattaactcaccctacaaggtgaaggcgacagctggatctagaggaggatgaagtgagacacggagacagggagcggacgagacgaggcgagacggggtgctgcgtcggcggtgggtgaagcggctgctggatctgaagggggacgagctgagaccctgcgtcggcggtgggtgaaggcggcggcgggatccggaggaggacgaggcgagacagggaggcggagagcggacgagacgaggcaagacggtggttgcgtgcccgaccttctgacgcgtgtttttcctgcccgtgaaaaccattccgaaccggggtcacgcttcccttccaatggacttccaatttccaaacgtcgacgcagccacaggagtgttgtgttacacggggcatggagaagctgggttttggctgggaaacccgcgggtttcgagagtcccaaacgagttcgtaatgtaagacgtcaaatatactccctccacaaaagagtgcaattctagctttgaatctggacaactgcactctttttgcgacgggggagtatattattt

SEQ ID NO: 153337 - DNA, 278 bp, Zea Mays
ggcgagttcgcaagatcgcgggcgcgggaccgacagcgggatggcgcgaagtgaaaggtcgcgggagcgggaggacgcgagaacacgcgggcgggagatggcgagctagcacacctcggcaaagatggctagcgacgaggacaactcgcgacattgagcaggtcgccatcgcgatgcaaacgggacagctcgcggcattgagcaggccgccctcgcgatgcagcgtacaaggagtggaagggggaagaggggaagagtgtggatatggcggccaccgg

SEQ ID NO: 153338 - DNA, 823 bp, Zea Mays
atcccaatcacatgtcgtggcaactccactctgtccactcccacttccacctttcgccttactgatgtcttgattgcaccaacccttgtccgcaaccttctttcagttcgtcaattcactcatgacaataattgttttattgaatttgacgcctttggtttttctatcaaggaccaccagacggggcgcgtgattcttcgctgcaatagtgacagcgacctatacaccttcccttcaccatcggtgcaccactgcagcctcgccgttaccgccacgctttggcaccaccgcctcggtcaccccggatcctccagcctcgccaccctacaaagcatgtcggtcatttcatgtaataagagccccccaccctttgccatgcatgtcagcttggcaagcacgtgcggctaccatttagtcattctacatctgtgaccactgctccttttgatttagttcactgtgatgtgtggacgtcacctgtactgagcacttcaggatttaaatattatcttgtcctacttgatgatttttcacattactgttggtccttcccgctgcgacacaaatctgaagtacaccgccacatagtcgatttcatcgcttatgctcagacacagtttgccaccacacccaaatcatttcaagccgataatgggactgagtttgttaacactgccaccacctcatacctcgctagctgtggcatctcgctgcgcctctcgtgtccctacacctcaccacaaaatggcaaagctgaacgcatgcttcgcacaacaaacaacaccatccgcaccatgctcctccatgcgttcatgccaccatc

SEQ ID NO: 153339 - DNA, 441 bp, Zea Mays
ctataacctggtaaattttgctaacgagaatagaacgttacgtcgtgtggctagctgacatataaaaaaaagtaattagccgacacatgctagaaaattttcgttaaatcattcatttttagcgtacgagcgagagagagtatgttttgtgtacgccaagaggggagatgtacactgtcccttgggtgtcaatcaggacgaagataaaaacataatatgaggcaacaccaagaagaagagagcgaccaacgagccgagcagtcttggagacatttcctaaaaacttcgctcgcacatcaaccaagtgtagtgtcatagatgtgacggttttggaggtctctctcaacatttcgtatagatgggaagactctaatgcaactcaaccgagaaatgaaaagtgacagtgtgttattgtgttctctattctatatgtgtcataag

SEQ ID NO: 153340 - DNA, 562 bp, Zea Mays
gtttctattatcaagtctcacaccattcttgagaacatgtctgccatcaggcctacgcctatagatagtaaagccaaatccatataagatggtctcatcttggaaggtctttgggaaatttttgctgcacttgtcgtttttcatacatgggcatcttctattgtcggcaccacagggaccatgcatcatgaattcgtcgaccaaagcaaaccctaaagggtcagcgacgatatcaggaatctcagcacaaatgaatttgtcaacaatagaagcactaaactctttgttcccatcggctagccacataaggcagtgtatatgcggcaagccacgcttttggaattcaatagtgtataggactacaagtatcgaaccaaatgtctttccctctctaatatccgctacgaatttgtttactttcatatggaacacacacaccaccaggtccgaacggtcgcatggttgttggctaggttcaaagcataaggcatctgctatttccctccacttggtattacaagtaaaagtcacaaaaagatccggtggtccgtataccctacat

SEQ ID NO: 153341 - DNA, 392 bp, Zea Mays
ggaagcctagagtacaacttcgtataaaattacagtcatgtcctcgctcctatacacatgaactacaaaaacaattaaggatattgttgtcttttccttcatagtcgcgttgagcaagccttgaagattttaccctttgcctttgttgattctttgtcatgcgttcatactgcagagccaaagcttgtagcttcgtcttcgtgtgtatgtcagttgcatgtcattccagaacgaaggtaaccttcgtcaatcattatgttacgcatgaaacaaacttggaaaacaactgtcaaatcaatgttctgaggaccttcggccaaagaggacccccaatagtagcccctcttggtattagtttgttttttataacaagctcagatcgtggaataaac

SEQ ID NO: 153342 - DNA, 331 bp, Zea Mays
attagagccaaaaactctttttcataaatggagagcatcttattcttagcacccaatgctttacttagatatgccactggtctatcacattgcatcaaaacagcacgtatcctatcatcacaagcattagtctccacaacaaatagctcatcaaacctgggtagggccaacacaggagtagtaagcatagccttcttcagcgcttgaaaagcctgatcaaccttaggactccactgaaaagccttatgcttcaatagattagtaaggggttttgcaataatccaataatgtctcacaaatctcctatagtatctagtgagataagaattcc

SEQ ID NO: 153343 - DNA, 643 bp, Zea Mays
attttggcactagaaattcatttcttaaaaccttttccccattttctcggattccaggactgtgcgcaggatttcagagaagtgcaaggtctaattcgaaagactctcaaggcttaggctacagctggggtggactgtgggttgaatagtttaaagtggtgggtcactttaagaaaatacccagtcgaaggggtacgattgaatgtcgaccgtctgatcacccgctgagggctcggatcaaacactccagaacggtacgctccctctaatcctgcccatccactccttatccaatggctcaaatcccttcaccaaaggagtatattcgcttttaatcacagacgcccatcgcgagatggacggtagccgtaccctcttcaacctcacgcgctcctgcgtctctttctctcacccatctctctcttcattctctcgtctaccctcacaccggccatggccctcggtcgccagcagcagcccgccggtgatacgccagcgccgtgtacccaaccttcgatctggattaccctattcgtggaatagaagaacagagcaaaaatctaaaagaaaaatttgaagtgcggcgctccccaaccatggctggacgcagcccacggtggcgtttggtacgtgacgaggaaca

SEQ ID NO: 153344 - DNA, 523 bp, Zea Mays
cgacgtcatgcaaatgattttcttgaagcattgctgtcattccagttctataagatttgaagtgtttctgtacaattacaatgcttttcatgaccccatttggttttgctttctgttttcaaacaactctgagatttggctcatgagaattgtatatgttcaattatcagtgcatcttggtgtgagtgacattaggcaacggaattttgttatgaaagactgaactgtacaagaaattgctatcataaggaaagcgaattaaggaattttggttgatgctcgaaatatgtcaattattcgcactgtgctagtgattatgtacagaatcagggaatgtctcgcatccaattagggagtgggttggttgggttggactgtgttatactgtctttggtggatcatgtaaaatatgtgatgcgatattgtagatgataatgtttgatattgtttaaaagtttgacattgtttgtagagtgaagtttaaaataaaagatgagatagatgataatgtttgatattgttt

SEQ ID NO: 153345 - DNA, 420 bp, Zea Mays
cgcatcgccttcgtctacacctcggcttgatccgggttccttcgaaaccgtacctagggttaccgctagggtttacttgtactttaccttgattctgcgctacgatttatgtgttcatcgcctactctgactagttagggttgcggtaatgtccgacatccgatgcgacgattgtttaagtacaagaaccaagtttcatattgtgctacacatagatctgaacctgtcctcaatcacgtattggtaactgatccgtggttttgaattcacaaaattgatgcttccttactatggtccaaccgacttgagtgtgatttgcatagtcctcttcctcgtttactcatgtttgtgcctccaccattttgtctattgcgaaatgatttgcattcatgtggattgaatgttatttgttgaatgttc

SEQ ID NO: 153346 - DNA, 1250 bp, Zea Mays
cccacatctagcataaagcttaacaagggctgtgtccaaggcacaactctcagattctgcagcatagttgtttcttatgatgtatccatgagttgctttaccacaccttaaagcatctatttcagtgtaactgactaggagacctcgtagaatgtcagcatttggaaagtaaaaggagcccatcattctctcaaatagatggattgcatccaagaacattccatgatagataaaagcccatatcatggctgaccataagtacttgcttcccccattgaattcctcaaacaactgaatcgatgacactaactcaccgcatttcgcatagaggtcaacaaatgatgctaccaagattgtgtccatgagcccactcctaatagcaaaggagtgcagcttcttgccatggggaagaaatttgtgcctggcgaatacagaaacaacagcagttaaggtttcgctgcttggacacacttcctcttctatcattgccacatacaaactaataaccttggaaacattcccttctgaagagtattccgagattataatgttccacgaaaccatgtctctacttggagactgcttgaacagcatctctgcatcacccaagctagaagtcctgctcatgtgagtcaacatcgagttgagaactaggaaatcacctgcccaccccctcttcacagcgtagcattgcagctgcttaccactggcagtgtccctcaaggccgtgcacagccggaacaccactgacagcgtcactgcacttggctcgcaccggccgtgggtcctcatggccgtcagcagacgggatacctcccaaatatcctccgcgttgacgtacgcggaaaccagcgtggtccaagaaaccacgtcccgcgcgcgcatttcgtcaaacacaaggcgcgcggccgcgaccatcccgtgttgcgcataagccttcagcaacgtgttgccgaagtagacgtttccaccaaagccgacccgaatgccgaagcagtgggcggcgccgacaaggctggtgaggggcgccgaagcgcgattgaggagcgggagcgtgaaggcatccgggcgggcgccgcaccggagcatggtgatgaatgcagacacagcctccacggggttgcctccgtcgaggcggcgccagatggtggcgttccatcgggcagtggccgtggttgccgaggaaagcggagagttgcggaggagagtgcccagggtggcccagatgtgctcgacgaaatgcggaactg

SEQ ID NO: 153347 - DNA, 895 bp, Zea Mays
ccctgagtactattgatgtgtctctctgaccattgcataaaagccctcctatttctatttcttcacgactccggtccccgactgctcgccggttgaacacatggccgaaatcgcgtgtactcgccgacggtgacctgttccgatggtgtcgagtacaggggctccatcactgatgttatccaaacacatccatgtgcttaactcgaccagttcgccactaaatcgtatctgtctgtgacaatagcagagcaaactctccggcgagcccgttccggtttacacaagttggtcacgttcaatccaaggactcggaacgaatcagtgacctactaggactatgatgcttgcacaaacttggacggaggcaacccgaaatggccggtcgacatggcaatgtccacggcggcgttccctaagctacgggagcttcactagcagtaaagaatgctaaaacatgaacctggaaggcatgaactgacctgagaatggttggccgcagcgcgatgcctcacggcggcgacagcgaccgatttgggggaaattccaaattcttgggctacggtggatggatcgaggtgaggagtggtgcactgagcgtgtaacaagagggtggaacagggagggcactcaatttatagagactggctataggtgctacgaattttggaccgaggtgagctcacagcggtgaagagatgagtcatcggagctcgtctactatggcgctcaaaggggtaagggctcgggacagtaattggccatcccccatgacttactgcgatgtggtacggtggcgtatagcgaggcatgatcgggtaaacggcggtcatgacggtggcggtcgcgtggccacgtcgccgggcaaatgggtacgacgagatcagctcgatccact

SEQ ID NO: 153348 - DNA, 502 bp, Zea Mays
actaatgagtgagcggaagagttgaagtttgatctagtactctgcaaatgtggtattgaagctaagtatgaattcgttccttccgacttttgagcttggcgttggctatttttatggacatatggtagaatacgatgaggttggtatttattttttgtttgcattagctgtaatgttgcacccgtacttactatcttttttgtaggagacgaggaaatgcggttgggagagatacgacgataaagaagaggtgatgcgtacaataaagtccaagagactaatggaacagaagatgtgttgtggatctcagctcgtcgattagtacattaacaatcgcatacaggacatgcgtaggttcatgaaatcaatgagttttgatagtccgatgcgtgtagagcagaggagattgaaggcggcaaatgagaagagaacacatgatgcaagggaatgggaggcggctagagccgagaaacagatgttggggaatcttgctgatcgtcta

SEQ ID NO: 153349 - DNA, 794 bp, Zea Mays
gtcaggtgataaataggttgtgcggataacacagatttaactaatgtctctctacctgcctttgataggagctttcctttccatcctgcgagtctgttattgattttttcaactaaaggttgcagctcaattcttttaacggttctaaagtgaagggggagacccaggtatttcccgggtaatgcagcgaatttaccggggaaggcttctacaagatttggccaaagggcctccgggtaacggatcgggaaaatttcagttttatcgaagtttatcttcagccctgaacacccttcgaaagtctctagaatcgattttagcactttgagatctgctttatccgctctaatgaacacccctgcatcgtctgcgtatagggaacagcgaagttttgcccctcttggcaggacccgccccagtaacccagcctcggccgcccgctcgatcatcatctggagcggatccattgctaatatgaagagaaaaggtgaaaggggatccccctgtcgcacaccacgcctgtgaatgattttgtctgattgttgaccattgatgataactctggaggtagatgaaccaagaattgctgcgatccaattacgccaccgcaggggaaatccccgagcttttagcacatcaagaagataagcccaatttagggaatcgaaagctttggatatatcaagcttaataaacagagcaggctgtccgtttttatgaagtttcttgatcaccctttgaacgtataggaaattatcatgaattgaccgtttctggatgaaggcattctgggc

SEQ ID NO: 153350 - DNA, 356 bp, Zea Mays
taagggtgcagccggatcctccgtgcaaaaatcgactacgggtgcagccggaccaacacaataaatgtgcaagatcaagtgcacaagtcgcctacgggcgcggccggatcagcgaaggcacgcaggcttatcatacaaattatagttacatacatgcagcgagggcatcacacattacatcggctcaaccttcgggatgatacccatctccctatagttgaacagcagtatcctcaattcatcgccctcaaacagacttagcagctctccctcacctacactcgccccagccggcgaggccagcaattcccgcttgccagtcccgtccacacgaagacgaccaccctccacctcac

SEQ ID NO: 153351 - DNA, 473 bp, Zea Mays
gcatgatttatttaggcgttatcaattatttaatccccttttatactgtttattctcatgcaatagtaactagagatggtacacacatatatatatagagggaatattctattctcatatgagttacaaatctgggtattacaggggccgagtcagaagattctccagccaacatatcgagcacaacattcatctctgcatcatctggactcgctggcatctcaaaatgaactcgcctctcatcattgggaagatcacaaagagaagcaaccaaggcctcaatatcttcgagagagggtcgtactctaagacccagaccactatcaccagcaggaggattagacacgaaattgaaaatggacttaggaggtggcagattccaagcagagtaggcaacaggagcaccaacatttgatactttgcctctcaagatcatgtctagccggctcaccaaatccttaacaggaattctc

SEQ ID NO: 153352 - DNA, 1668 bp, Zea Mays
gatgtgttgaggtgaggaacgcttggtcccaaaacttgagcggtatagacgcattagcgagtaaagagaggcccatctcaacaatgtgcatgtgcttacgctcgacgaccccattctgctgatgagcataggggcaggacacaagatgagtgatgccaacgatacgaaaaaaggaattaagccgctcatattcgccaccccaatcggtttgcatagcaatgatttttctattgagcaagcgctcaacaaggctttgaaattctttgaagaactgaaacacctcagacttatggcgaagaagatagatccaagtaaatttactataatcatcaatgaagctgacataataccttttattacaaaaagaatcaatggcgggtccccagacatcgaaaaacaccagatctaaaggagcagcagactgactggtcgacttaggataaggcaactgatgggccttagcacgaaggcaggcatcacaaacatactccgaggaatctaagcctgaacacactaaattattatttctaatgacacgagcgacaatatcacgcgatggatgacctaatctgcaatgccaacgctcataggatggctttattgcggcaaggtcgtgcttctgggtaggtgtgcaagagatgtcaatgggtagaggccacccctacatggtccgcgcaccagcacttgcctcgtggcctgatccttaatcaagaaaaagaacggatggaactcaataaaggtgttattatcaagattgaaacgatgaatggaaacaagatttttatgggtatgagggacacgaaggacatgatttaggtgcagagggcggaaggaagtgggcaaaacagaataaccaatgtgagtaatctccatacctgcaccattagccgcccgaatctgatcattgccattgtaacgatcatgctgttagcttttccagctcgtcggtgatgtgatcagtcacaccgaagtcaaggtaccagtttggatcagcagcagtggaggatgatgccatggccgcaacccgatcatcaggagtgaattcttcataaaagcggtaccaacagatattagctctgtgaccgactttaaggtagacctagcagcgtggacaagactggccaccggattgatctgtcggtggaccggaactgcgcctgaagtagttgttgttgctgtagttgccgcgcgaagacgacgaaggatagccatggccatttccgcgcgagcgtccgcgaccgtgattttggagaaccatcatgccaggagccaccacggccacgagtagccgtattggctgatccatgagcagcgtacctgccgccggactgcttcgcaagccgaagctcatagctgagcatctgcgagtataacttggcagaggagattggctcgacgcaagtgacgatggacgacacaagcgggttgtagatttcttcatcaaggtcggtgaggacataggcgacgaactcctcatcgcccagaggttggccggacgccgacatctcatcggcataactcttcatcttggattagaatccggccattgtggtcgtgcctttcttcgtggtggcgagcgcaatgcgcgtgttgacagaacgcgcacgtgtgcaagatccgtacatagccgcgagggagctccagacgtcggccgaggtcgtggctgtc

SEQ ID NO: 153353 - DNA, 341 bp, Zea Mays
aacttatagttgagctggtagatcagtataccagtggttctttgcggtgggatgagtttgcttcattgatcaaggctgtccattcaaaccgtatgggatcagcagccaccagggcagcgatccctgacaggcctaaggaggaggactacttctatgccaaccctcaagaatgcttgcaaggtcccaatatgttgcaaacattgtgagcttgtcacttgtcagcgctcttgccattctttttgcaacttggcatggctgaacataggattatccatcatatcttctgaacctgccaaatggaataacatgcttttgttagcagttcagagcccaatgagaag

SEQ ID NO: 153354 - DNA, 457 bp, Zea Mays
agcgactacaccgaggaagagaagcaagacaaaggtactagagacgtcggccaagaggtgggccaggaagatggcgctcgtgggctgagaggagaacaactcaggagaagccatagagtgtcgcggcccaacaagcgcttcactggtgaggaatggcgactatgatggaaggcccatggggcagtgcgagacgtagcctgtaaataaccctggcaattgtgcggggaggggcagacgatatatgaactgggaaccggctgtgtccggaggctggcggctggcggtgcgccgtgtaaagaacctatagctaccttcaatactgagaacttcgagagaggcgacgggtgccgggagcggcgcccaactcatccccatatcagttgtcttacacgagcacccaatcgtacccagcatggcccggcgatgctcccgcgcagtggatttggttccttggtga

SEQ ID NO: 153355 - DNA, 523 bp, Zea Mays
cgacacctcctcctgcaaaagtgccagcgaacaagcagtatccaaatccataggcctttgaagcataataacagcgcgaatatcgtcgcggagaccatctacgaaacgtgtaacaaagtataatggatcgaccccagactcatacaccgagagctgatctactagagatgaaaactgttcaatatagtcagcaacacttcccaactgtttgatgtgaaataagtgccgtaacagcaactgatactgatccttgccgaaacgctcattaagcaattgacagaggagaggccaagacaaacggggatgacggaataaaaccgactgaaaccaacatgctactgtgggtgataaatgcatcgatacgattttgacccatgaattcggatcaacctggtgcatatcaaagtaattctcacactgagtaatccacaaccgtgggtgccgaccctcgaagactggaaatggaattttaggcagatggccgttaccctgccccgacatgttacccgatctaactcgagaa

SEQ ID NO: 153356 - DNA, 934 bp, Zea Mays
caagttttaggaattcttttatattaaaaatcaatttctgtatttatttacctattttatatgttctctggactgggcctcaattactgaaaagtgtaggggttcaagcgtaacatttccacagactcagggcactgttatggtggacggcgggttgattgtggcaaagggcaagggctctttaacaatttgcgcacggcgaaggggtatcttgtgttttcagccgtccgatctagagtctagggtttagattttatgaagcctaacgcattctgaaccgtccgattaaacctacggcccggattgactcatccaggaggtattcccgattagatctgcaccgcatatcaacgatcccacgggtacctttcgcccaacccatcttcaaatcccgaccggtcatctcagtatctacggcgacgacatcgtcttcttccctcggacggcagagcggtgccagcaagcgccaggaagcaagcggcgagcagggggatgagttacccgcggtgcggcgtgcagcgcaactaaaacctacgcaccgaggaaatactgttgaatcgcagggatgttctcttaccgttttcgaagcaccggtgtggttgtccccggaggctggcggcgcgccagatctcttgacgccgacaacgaggctcccggtctctggcttagcgaccccgtggacgagtccttgcgcagtacaaggatgcgccaccatatggcaccgcgtgaatattgcgaacgcgctcgacttcacccgcgatcaaacccactcccttctcccttggtttctctctcttaatggctgcaatccaggcggcgcacacctaccattttttttgctccaggtcaaccacgacggccaacaactaggaccatccgacttatgggcgagcagagcggtagcaccggagaacccgttctccgtttgaccaac

SEQ ID NO: 153357 - DNA, 553 bp, Zea Mays
aaattggaaccttccacagaccctcatcgccagaaccagagccttgccacgactcgcagacccgccgccgtgcaagcttactaatcgcgagagagaagagaggagcggccgccgctcaccatcttcgccctgcggccggttcaatcctcggggaaggcgctctaggcgtggacaatagactgtggtagcgcacccgggactcgcctgcgccggggcgattcgcacatcaccggaatttctcatcggagtggacctccgctccgtcatccgccttctccgtgggcgggtgtttctcgcgacctaatcctcgggtaaggagccctcatccagttcccctatgtcttacctacgtatatcacacctcagatttgtgtttcgggcccgagatcggcgaacggtgtggcctggccatggcctccgccgtgggggaacgcgtgcgccgccgttttggccgccagggtgggtgataacctggaagccgttgatttctagtgaacggtgtagattaaaacatgtggcggatcgttatgggccgttgatcactgcgtagacg

SEQ ID NO: 153358 - DNA, 668 bp, Zea Mays
gtcctaaactgcaaccctggctgttcaatccagatgtcattatgcctggtgggatgggagctgggcaggtgggttagataaaacatgatcagaaactgtagggtgagactatggagcagtaggaaattgctatcatagaggcatatcttgagagggtagttttcctttatagctaatcatgcatgggtgcgggccaacaggccgggtttatggggtcagaccctaccaggttggcatacccgtgtgcactacctagttacaaaagggaaaaacttcgacccctcagacttgctctatagataaaacttacagagatatttcgacagttggggaggcattccttcggtcgtagctagacagttgcccttgggtcggggtactcccattaccatgaagggtccttcccagctaggggagtgttacggagccctaatttggtctggtacctttgtaggattaggtcccgaccctaggttcccatctgcatttgacgaaggaggccccgcctttggctgtggtcattcctggatgaacctgtcagaaagctggacccgtggggaatccagatgggttcccggaggaaggcaggcttcagctacgtaggccgggggacatgggatcccaccggtggtccacctagtcgtcgccgtcggagtgggagtcttttg

SEQ ID NO: 153359 - DNA, 552 bp, Zea Mays
gccaggcaagcggccagactaaagaaagcaacaaatcatgcctttgtagatccgagcggccaggttggaaagaaagccaccaatcacgactgtgtagacgagattccctccacacgttattgcctgccttatgtctgtagtgcgaatgtcatatttaccttcgtaattttagccgaggtggatctctttctatattttcgtctgctatgtttccttgaatgtgtggatctctttccttcccaactttctccattgatggaaggtggaaatcggcagtgtcctcacgggctataaatgtagccacacccccagtttctatctgctctccctcttttcgcgcctccagaatttatcacctatcacaacagtttcttaggtaattgtgttgaatttgtgatctattttatgtttcttgtgatttttattcccttgaatatgcgagacaccatttttattctcttgactattcgctggatgataggcgatgtgtgccgccttccgttccgcctgtccaccacgctgtggtcgcgtggtagtggacgtgccggttct

SEQ ID NO: 153360 - DNA, 536 bp, Zea Mays
cggcctcaagcttcggaaagccaacactcttcgatagagtgctgacaaccttcgctccactacggtctcggaggcatcctaagctctcttcgtcaacgccaccgaagagcaatgctcctggctggtagccgcaagatataacataatctcttagttcttctttttcagccttcgataactcctgaccaatcatgtttcgaaaattgaagtccccttcctccgaaattttttcggtaatcttcttctctttgttaaataccttcttcccttttccaggcactgtggccacggttgcctcggcagttgcaacagtttcttcagtggccatatccaaaatcatcttatcaatatcagaaaatacgccttcaagatttatggcttcggccgccgcagcttcggcagttgtagtttcggtgggagcaacttcggcagctggtgtttttgacgccgaagccaatgatggcgtttcttcaatagcatcaataacagtaataatcctttaccttttttcagcaggcttcttgattgccacaggc

SEQ ID NO: 153361 - DNA, 344 bp, Zea Mays
ttgggccaaaaccactgcttccggcccactctcgctgcaccccgcgccagcccatctccccttgcgcgtgcactccctagccggtggggccccgtgtcatccacccagtccgcgcgcgcatgttcttattcgctcttggctctctgatcagtaggaccaaccggtgggacccctgctccagcctccctcctatctgatctgttttgcgtaatgcgcatgtgtgtgaagtcgctgctagtgggccccgcaccgaatactcttctcctacctcgtaagtgcgtaacgaccccccaaacagactgcggagctctcggcagggtcccttgatccgaattccgtgcttc

SEQ ID NO: 153362 - DNA, 447 bp, Zea Mays
cgggcccatatggagagatgtgattagtgggctgcttatgacctcttctacccaaattatgcttaatggagtacctggggaatacatccaacacaagaggggtctgtggcagagggactcgctatcccctccttttcatcatcattatggatgttctcaatggcctaattgttaaagctgctgatgagggcatgctccaacccctttcaacacgctccattcagcaccgaatatcgctctatgctgatgatgtggtgatattcttgagaccgactgctagtgatctgtacttggtaaccaggatattggagttgtttggggacgcctcggggctaaaaaccaatgttcagaaaagcagtatggcccccattcacggctctccggttgacatggaaatggtaacccagatttttccttgcaaagttgaaacgttccctcttaaatatc

SEQ ID NO: 153363 - DNA, 299 bp, Zea Mays
gcccgccaaggtccaatggcctacaaacctttgcccaactaaccatacaatggcctcctttgacatctttacggcctttccaaagaaatcctctccgaattttatcaatggccttgatgacccacttgggacattgaagagcaattaagtgatagatagggatagcagttaacactgcttttaccagagttgttctcccagccaggttgatcattgaggccttccaccccggaagtctatcagccattttatcgatgagttcaaggaaatcatgcttggaaagtttacgtactgatagt

SEQ ID NO: 153364 - DNA, 2497 bp, Zea Mays
gtaaaaataaatggtggaatctcccctgtgagtaaaataaaaaaatgtgagttagaaagtccctcctcttctaaacatgaatttagaaaatatgctatgcctcctttgttcacaacatgcatacatagaaccaccacacaccattttttaaaacaaaggtgtggacacatggttgaatgtgcccacattgttcaagtatgatgagtgattattaagagatgatcatatttactttgttgttgactaaacttagcatgaaggatgaacaccaagcacatatcgagggaccacataagctagatgaccgattatgtgtggtggacacctaaggacatcgacacgtgcaagagtacatggaggagtagaccatgttgaccaaataaggataatagtttaccacaccaagtagtagcactggaggacttgatcattgggtgattgaggactagtagtgacatatgtcgatattatggaagtggcatctcagatatgctactcataaggcttttggttgtttgagcctcaaaaccgcatagcagatagttttcatgttttggcctcaaaactcgagtggagtttggctcgaactgtaggtggtagcatcaaggatttagcattgagaagaagccgtctcaagaagaatacatggtcgttagatctatagatcttaattatactataacgccctgaggttgagtggttcggttctaattatctaggagcaagttgggaatgtttaatagccctataaataaaggggaggctaatctgtccaaattatctcttgagttgtcattatttcatatctcaagtatgttccccatgctctagtatgctcttgagaaccacaaatgatttaaacactgaactatttgttcatctatgtaatttagtcttgtagcctatggattttgtgggattggataccctaacctactagttcatggtggctctagatcttgtcttgtttgatgagttttgattgatcttttccttcgaatgcctagttttcacttgttttctgtgttggtgctccagttgatgtgtgtggtttggattcatttcttggccttcactagtatctatgatcacttgaggtcatatatgcatgtttccttaagcagatatcatatgagcaccatgttttacctttttgttagctgtggagaaaactttgatctagattaccatcatctacatccatgacatacaacccactattggaaatatccaacatggtgagctcacacattccaaaattgtgtaaggttcaaggaactagtgaagttgtttgagctaacgtctaaagctgctaaacttattaggttaaagaatgccttgggaataaatcatgacaatgcattgttgctcaagcacaaacttttcaactatgaagttgtcgtgtcaaaatattttacatggctagaatgttggttgttagaaagatcaaggtaacgtaatgcaaaaaggctaaaaataaatgatggaatctcccctatgaagtaaaagaaaaaagtgagttagaaagtccctcctcttctaaacatgaatttataaaatatctaatgcctcctttgttcaccacacaccattttttaaaaggagggtgtggacacatggttaaatgtgcccatagtgttcaggcatgatgtgtgattcttaagagatgaccagatttattttagtgttgactaaacttagcatgaaggatgaatgtcgggcacaaactaagggaccagagaagccaatggactaattgtgtgtggtaggcacctagggacattgacacatgcaagagtacatggaggagtagactatgttgaccaagtcaagaaataattggccacaccaagtagtgtacctggaggacttgatgattgggtgattgaggaatggttgtgacatatgtagatatcatggaggtggcgtatcagatatgctactcataaggcttttggtggtttggacctcaaaaccacaaaatagatagtttttaggtttgggactcaaaatttgagtggagtttggctcgaattgtaggtggtagcatcaaggatttaactatttgttcctctatatattttaatattatagcttatggattttgtgggaatggagtccctaacctactagttcatggtggctccagatcttgtcttgtttgatgagtttggttgctcttttccctcgaatgcctagctttcaattgttttcgacgttttcgtgctccagttgatgtgagtgttttcgattcatttcctggccttcactaggtgctatgaccccttgagatcatatttgcatattagcttgagcagatctttcatgagcaccatgttttatctttttgtcagatgtgaagaaaaccctcatttggagaataattttgccttctcctcacaaattcaatgaaggtgatgggttgaaactatccggatatcttccttacctcctttaggagccttgtgtcaatttttgtaaccactggctcataaga

SEQ ID NO: 153365 - DNA, 382 bp, Zea Mays
aactccaagacatcgttcatgtgtcagacgacacggctctcggatctggggtgcccttgaggctcagttcctcgacaaccgccagactcggattctgtacctcgagaccgccttctggcagcttgctcaaggcgatctctctgtggatgagtactgccattagatgaagaccatggcggacactctttgcaccctcgatgcccccatcactgatgagagcctcgtcctcaacctcctacgcggtttgagccctcgcttcgatcgcgtgactcccatcctcacccgcatgaagccgtttcccacttttgcagaggtcaagaacgacctgcttctcaaggagcttctcctctctaccacttcgacctccactcctgccacagcg

SEQ ID NO: 153366 - DNA, 536 bp, Zea Mays
gtttactgtatcgtgcaactcatcgcgcgatcgtcgctttggctcggccaggacgcaacctgcgacaaattttacaaccgccttccacattctctcttttctataaataccgctctagtcgtcgcaaaacctcctgtcttttcccagatccagatcgtttccccagatcgcaggcgagaagggcagcgcttaccaggtacgtagacatccctcctcttgtttccaatcgccaaaccgcctccgatttcccgagacccagatcacacgagcatgccccttcggttaccagcgacgcaggtaagccttctcttctcccttttccttctggcggcgtgtagcagccctttcccccaacgaagccctcccacggacgcttgtctcgaagcccattgtcggcggatctgtccagccatggcggcccctggtgcctagctctggcgcccagagcccccgctcgtccctcgtccgagcccctgcaaagctgcgcacgctccatgccggcccgacatcgctgtatgtcgtcgccgctccgcaac

SEQ ID NO: 153367 - DNA, 324 bp, Zea Mays
caccaaagcaccagggtcagaatttccatgcagaaactacgcccaaaggcacccttagcgtcatgaatcatcgggaagaagtcaagatcatgattccaagttccaacggagacccacataactcagccttctgtaatgaaggggcagcgaaacagcaggtgataagccgtctcttcgcagtgcatgtcgcacagagtgcattcaaggttgctttctagcggcaaaaaaacctttcttcttaggatgttcttggagttgattatgtccctgaagactaaccatacaaaaatattgaatttcttcccaatcttggaatgccaaatc

SEQ ID NO: 153368 - DNA, 684 bp, Zea Mays
cggggagcacgggggtggcgcggtgccggaggtggtgcggtgggttcgccgtggcttcgaggaggacgttcgccccctggcggagatggtggacccggcgctgctacgaggccccgcgctgcccaagaaggaggtggtggcggcgttccacgtcgcgctccagtgcacggagagcgacccggagctccggccacggatgaaggccgttgccgacagcctcgaaaagatcggctaatgagtcacaaggtcatgctagcgtacacaacgccatgcatgctcatccaaggtcattgttatttttattaccttttccgtctcctccccgattttctctctcttgtaattcagtcttttttttaatttccttgctgtgctctcttgcaattggtcgtttgtaattgttggctattcttttgggtgcaattcatgttttccgtaattgatggctattacaaatggtacatagagaggtatgtaggagaaagggtatttccagcttaaattttcaggcctgttttagtacactggttttcaaaaccacaatttgtaatatcgcataactatagtatattttatattagttaaatctaacatctgtttatagacataaaattttggttgcagtgcaagggagagagaggagaaaaaggtaagattgtgatcgtcgcttcccacgtgccactg

SEQ ID NO: 153369 - DNA, 592 bp, Zea Mays
cgcatgcttagcttttcactctatcgtgcagccgccaggtcaggatggtgcggatgaagaatgtctcatcgtcagggggaggagacgatgaggaccctcctcgccccttcaggtaggtcaaggggaagacagtttaccttgagcagtaggagggcaggaagaagtgatgtttggacagagccgctcgggtagcacttgcagtggtagcagcattagagcaggctgaacagggaggatatatgcagatctcctcagatcagatagcctatcgggttcgtcgcctcgcatctcggcctcgctccactactccctccacaccttccaccactgtctctactccacctcccacttcactagctcctgtcgctctagagccatccaccacttccgctgtacccaccacctccaccactccaacttccactgctcccctcccgctcccatttcctctccgcccattccaccacctcgcttcagggagcgtgacgatactgaggtgcgaccactggctattgatccgcgtctgctcgaccttcagtgtgctactacagcccaggtacgtcagttccgacatgtacccgtggagtcttgg

SEQ ID NO: 153370 - DNA, 654 bp, Zea Mays
cttccgaaatgtgggaactgggtagatcgcctcagagcgaggcacgaagctgtaacaaccgaagttgttgtgatattgctctttccggtagccctcatctcataagatagctcatggatgttgtagaaacattttgcatttggctccagtccctggctcctcatggcccatataaagatccccacctcgatgatagcttcaggagtaagttgatgaaggtaaatttcgaaggttctcaggacttcgaccaacaatttatctagagggaaccgaagccctgccttcatgaagctcctataactaccacttcgtcagcttcgggtagagggacattattctcccctccagctctcacaattgagatatcacgaaagtacttccccctcatcgcatcaatctgcccttgcttaatagttgatttcccgaagacaacatggcttggtctcttgggccgatcttcggcatcttcattcccactttctacatcgaaactttcactatcgctggagttctcagatatcccagccagcatctcgtttgcaatcttctctacgttggttttttccatggcttcataaatcctggacagcgctggatcaacaatcttcttttcatcagccattaagtcgatggttgttgaaattccaaagcttg

SEQ ID NO: 153371 - DNA, 633 bp, Zea Mays
cgtcggtccacctccgattttgatgtgttccttagcgacagtcttgtctcctggtcctcgcacatgggtggattggctttcatgggcagagtattgctataatacttccttccacaccgctcttcggacgacaccttttgaggtggtgtatggcaggccgcccccgcccttgtagtcgtactcgcctggcacatcacgcacggaggctatggatactctcctacagaaccgcgacgacatattgactgaggttcgccagcgccttcttcaagctcaggagctgtccaagaaacactatgacaccgaccatcatcccttggagttcgctgttggggactgggtgtggctacgtcttctccaccacaccactcagtctatagaggccggcgcacggaagaagctcacgcctaagtacgcgggatcatttcgggtactaaagcgcatcagctccatggcttataaactgcagctatcggccgactcacgccttcacgacgtcttccatgtgggctcgctgaagccccaccgtggtgatcccccggaggcggcaggtgctttgccactagtgcaggacgggcgtatactgtcgacgctcgaacgagctctcagcgcatgcaaacaacgcgatgtctg

SEQ ID NO: 153372 - DNA, 656 bp, Zea Mays
gtggaataccatggagtctgaccatttctttaagatatatacgggcaagggtggctcctccgaaggtagtttttactggaatgaagtgagctaccttggtaagacggtagaatataacctagatagaatcgttccctttttgggtctgaagcagtctgattacgaaatccatgtctatttcttcccacttccatttgggcacggggaagggttgcagtagacccgcaggcctctgatgctctgccttagttcgctggcaagtgtcacaccgggccacatactgagctatctcctttttcatccctctccaccagtacctggtcttgaggtctaggtacatcttggtggtccctgggtggatagagtaggctgagttgtcagcttcatcgaggaggattcctcgtgcctctccctttgggatacacaaacggtccctgaaccaaagggtcccttcttcatctatcttgaggtctgggagttgttccctgcaagctctttctgcaagacttgctgtctcggtgtccaggcactgagccttgcgtatgaggtcttctagcgttggcctaatttctaggctaccactatctcccaaacaagcattcagttgagttgattctctcttccagtcttccaagaaatcggttgctttctcccca

SEQ ID NO: 153373 - DNA, 327 bp, Zea Mays
gaaatttagaggcaagtatttgaaacaagagtattgaagggatacgagcatgtcaatatcaaaggactagagtttgccagatggtagcaatttaatgacgaaagaggaaagaatcccaaaaaggcaagaaggttatggtcaggggcatctacgaagatgtcgcaagcacaagagtgagatcagatctaatggattgaggaaagtatagaccatactagaataaaatacttttgacaaggggatatataggagcacaacatagaattagtcgatgtggctaatattttgaagcagcatcaaggatgaggtgaagtaatagccaataag

SEQ ID NO: 153374 - DNA, 427 bp, Zea Mays
cctctatctccctgctctcagttgaaatggctctgtggcatccaaagcaccaccccttgtaccaatttcaaatttctgtgaaatcccatgcatccagttggtggattgtgttcccctgtccctatttcatatccctgcaggtccttggctccttcgggagggtattcctacctcaaatggccatattcttaaaaccctagctccccgcacaccacgtgttcgatgaaatgcccaaaccagccaaacttgctccaattgaacccaaatttttcaggcactttcaccacacttccagtaacctacttgccaaatttcacgccaatccgagatcccaggcttaaatttcatcaaaattcccgttttgagcgatcgtttccgagccgagtgccctaattcctttttcttcgcctaaattcaaaccaagcac

SEQ ID NO: 153375 - DNA, 384 bp, Zea Mays
acgagcttgaagttcggacatttatgggcactattgaaataatgtgtggtgaatgcgatggttcaaggtcttgtgagagacccaccccacatatgtgttgaataaatattgttccgctatgtaatatatctggcaaatggcatgaattataatatgcagttaataggattctgaagatccatcatgagatcctaggaggatcatatctttgaattataaatatgcaacatataaatctcgtaccgaataatacattcctgacgaatgagcactctcctatgtagggagaatatctcctagttgagattatagttctcagatggaacctttccagaagaaataaagtctgtgttaaacaccaaagtttgataatccctataaagg

SEQ ID NO: 153376 - DNA, 373 bp, Zea Mays
tgtcgaatgttggatatggtggaagtaatcaatgtgtgtggttgtagcaaggacaagggcgatgatggagcgaaaacggtaggtggagaagtaaatgaaggcagacgtaggatgtacatgggcctagagctatcacaacgggcgaacaggaggatgttcatgttgtccacaatgtcagaggtgaacgtgaggatggtcatgttgtccataacgacagacgaaggatgagacatgagatggattggatgaggatagtataccagcatccgaagtgatatggtagaaggcaccaaaattagcaacctagtcaatgacgataagagtcaggtcatcattctaaacgagctagcaagtgactgttggtcccactcac

SEQ ID NO: 153377 - DNA, 466 bp, Zea Mays
gctagatagaactatcttaaataattctagcaagcaaggtcttctaaacaattagtactaaacagagatcttatacatactagtgagcaacccgcataaagcttaagcgcattagcactacttagacagcaaagctatacaaactaaattatgtacccaaaataaagagtacgaaacaaataacaattaaatctagaaaatagctgatatggtactaatattgctatgggttaagactacagtttgcagtgcgaaatagaacgagaactaatacaacactaacataaatagagccataaatctcttttattgaaacctgacaccaattaaatgtcctatgtgcttcatgggtagcttttttaccaacacgtagcaccactgtgatatgaggtgaaaagtcattcgacaacaggccactacaatattggtttggcggcgttcaccaggtacataccatgtatacaat

SEQ ID NO: 153378 - DNA, 887 bp, Zea Mays
ttaaagcaaagatgaagcttcaccttatagagacaggtgatgactctttcagttcttatgagctaggatggtgcctttctttctcgactaaaggctactggtttaagtgtagcatgtctctactgaacatgtgattatgtagtgcagagaaatgttggaaagagactgcaaataactcaatgcactcgctatgttagcttcataagtggaaattgattatacttaaatcttggcactgtagtgctcatgtgttgtttagcaacttttgtttactgtttacatgctattcaaatggcaattttatcctaactgatagatctactaaggcacagtcccctttaatgttctaagctctgtgagtccatctaattacatgtgtgtacatgcacctgccaccttcgatccctttcaaagattattatgtgtacatgagcacacccatgttttttactggatatgtgcctgcagtcaggtgtactttgcattgaatctttgtagctcttctattcttcatcctccccacaatggtgacatttggataggcagtgcaagtgggatcaggatatgtgatgctgagacagttaaagttatgatgaagaatcaacagaattgcagtatgattgggaaactggtttcagaagttggactatgggttagcctctcaataacttagttttaaatggtctacgttgacatgtctttgtctaaaattttattggtacttgcattatcaacctaccaagaaataaagtttgttctgttttttctgctcctttgatctctttgctaaaattcatgcggtgatttgtgttccaggccaatcaagaggctgaacagagctatgcaggcgagcatgcattcattatattcccacagttgatattttt

SEQ ID NO: 153379 - DNA, 716 bp, Zea Mays
gagctaccctcaaattctttcgaattatacggacttgttcttctgcctcttgaataagttcaggtccaaagaattgtctttctctagtctgatcccagtatagaggagtcctgcacttcctgccatataaagcttccaaaggtgacatcttcagactggcctgatagctattattatatgaaaactcagcatagggtagactcttatcccaacttcctccatgatgaagggcacaagctctcaacatatcttccaatacttgattcgtcctttcagtttgtccatcagcctgaggatggtagggcgaactaaaattcaacttcgtaaacatattctcatgaaaacttttccaaattttggaggtaagctgtgatcctctatccaaaatgatcttctttggtacaccatgtagagacacaatccaagccatatataactcagccaattgagatcacttataagtagtcttgacaggaatgaagtgagtcactttggtttgtctatccacaatcacccatatcgaatcatatcctttcggggtgcgaggcaatccagtaatgaaatccatatcaatctcttcccacttccactcgggtatcttaagtgggtgcagtagtccagctggtctttggtgttcagccttaactctttgacacaaatcgcacatagccacatgtgcagccacatctctcttcaatccatagcaccaatacttc

SEQ ID NO: 153380 - DNA, 334 bp, Zea Mays
cgacaaggttcatcgtgctgaagcttggtgtaccatgttcgggcaatccctatcatgtgcgctgaccttcaaagaattgttcacatcgattgagccattggagggagtcttccttgtcatcaaataaggcaaatttgaggcgatggaagtgaggaactcctgcagttgaaggatgggggtgacactgatatatggttggggaggtggtggataatatggaatgggtgaaggtgaatgtggcatgggtagatgatggattgggaactgggtgctgatggctggtggcatgatggaggtgtaggcagcgacaaatgatgaggagatgggtggtggg

SEQ ID NO: 153381 - DNA, 309 bp, Zea Mays
agaagctagagctagagctggagagacgttgatgcgagaaccctacaaaagagcgtctaaatattatcattcacaaatatatctttaacatcactaagaaaatggtttgtttatcttgtgcactagccactagaggctagcaaacactcagaaatatattttgcctcgcgccaaaggtagaatttcacacacacgcgcgaagcatccattttgcatgtgcaactgaagctagtcgaactatacttcgatcatatgcaacaaaacatgtactgtgcatgtcaaaatatatgtcttttatcctaattaaag

SEQ ID NO: 153382 - DNA, 394 bp, Zea Mays
gttgatgagttgatagtgcctgggtctgctgtaccagtggatgctctcccaagtgtttcggttgatgagttggcagtgccggggtctgttgtaccagtggatgctgtttttctcccaagtgcttcggttgatgagttgacagcgcctgggtctgctgaaccagttgatgctgcaactctcccaaatgtcttggatgcttcggtggtagagttgctggcgcctgggtctgctgtaccagttgatgtcgtaactctcccgagtgccccggctgctgctgttgattccaatttttgccctacagtcttggggggtgctgttgtcaacattgcggatccctatggtccttccctaaatctgcatgggagggctgggcctttgctgaattgctggttga

SEQ ID NO: 153383 - DNA, 483 bp, Zea Mays
caggggtagcactagaactcccagcctcatgatcatgtgagcgtggaggcataggaggcggaggtggaatcccaaaatcatcatcatcatcatcaactgctgcgtcctgagcttcgaactgatgaagagcagtatcctcgtcctgagtgtcaaatactggagcaggtgctggcacaggatcctcaggtgctggacggtaggacccaaagaggaggcatgaggcctcaagtgtgccctggaactgtggaggccgaatcagctgagcaaaaatgtgacacagatagtgagcataaggtagctgtcgatgagcacgcagaccatccagaacggtgtcctcgatctcacaaataaggaaatccaaaacatcaaactctgagtgagagactaggacaccaaggagccagagctggatatgagtggcagcctccctgtaccccatccgcggcagaagtgtccgtctcataagctgatataaaaactttg

SEQ ID NO: 153384 - DNA, 1193 bp, Zea Mays
gctaggttgataggatagttctttagtattaagattttcgactagatcggtaatggcgagattatattataagtggttttctaattcctaatattgttatataacccttgatttcttctactcttgttttcttgccattgtattgtcatccttggacaatatctaccttgatatattgaaccctttgtctctctacttctctccttgataatgctttctccctattgaattcttatacttttgctttcgtgccattgtattgccacccttgcgcaatatctaccttgatgtatgaaacctttggctctctactccttgataatgctttctccctaactcactttatatccttggttgtatcatttatcctaactttaatagttcatgattatcttatttcactattggccaccaacaaatatatattgtctagctccttgctatttcttacctgattccttgatttttataatccctctttcttattcctatccttgtatcgtatttcaaaaaaaatgtgataaactattttccttaagaaagattcctttttagttaaatgagtaacattgagttgtgttgtgctggtttgcttgagttcctattagttgtctttgtgcccgtgcttgatttgcttctgtgtaatgattgttggtgtattgtgtgactttagtccacaatggcatcagtttgctaggtaaaaccttagtcgggttttctttgctctatgtactctatctttgctcaatcatttcccctctttccttcccatacccaaacaggagaatcaaactaagctcaactgtttaagatacatacacccaatcagtcatcacatgttgatagtcaaacaaaatttactcgcaaagaactcaaagcaagaggtgcttgctactactacaaggatgaaggacattattcgttaatgccccaagaagcgtctagaccaactaaagaagaagacggtgaagcaagacccaaacaataatccagaagaccaaccagttataagtacgatgatgaagatcgtttgattagtattcatcgcggagcaaagaagtaaggaagttccctaattttagaagagttcaaggtgaactaagaacctacaaataaccatgtatctcctttgctttcgtgctagcctttcttaatctcgaggacgagattcttttaagaggggtagattttgt

SEQ ID NO: 153385 - DNA, 326 bp, Zea Mays
ctggacaggttgttttagtcactgcagctgctggtggaacaggacaatttgctgttcaggtgagctgatgacacttatgaactaggattatgcctgttttatgtaatgctccattgcttgtctacttctgcagttattttttattgcttttactgttattgttagaaatgtattagggttcaccctctcgtccctctgtaatgggcctaggcccaactattcctatcataaatatatctcccaacccctgctagggttagggtttccattattccaatatggtatagagccagtttcctttctttcctccctccccccacagccgc

SEQ ID NO: 153386 - DNA, 383 bp, Zea Mays
gacgctagtcacaatcttgtcatacatgtccttgatgagcgtaacatactttgttgggactttattcttgtccaatgcctatcacatgagattcctaggtattttatcatcggccttttccaagtcgataaaaaccatgtataagtccttctggtccttataccgtcccatgacttgtcttattaagaaaattgcttccatggttgaccttttgggcatgaatccaacttggttcatggagatatgcgtcattcctcttgggtgatgctcaatatctctctcctatagcttcatagtgtggctcatgagcttaatccctcgatagttggtacaactttgaatatctcccttgttcttgaagattggtactaatgtactcctcc

SEQ ID NO: 153387 - DNA, 1308 bp, Zea Mays
caccagagctgatgggagccgtggctgggaaggcaatcgcgcaggatgcgtggaagatgcttcgactgcacaacgtcggagtcgaccgcgtcaggagggcaaaggcgagtacactgaagagggatttcgacgccttcaagttcaacgacggcgaaagcgtggatgatttcggtgtacggatcacaagcatcacgggtgaactggcggtgcttggtgatgaatacaccgaggaggaagttgttaggaagtttctgcaggccctgccatctcggtttgatcagatagcggcttcaattgagacgctacttgacttgagcgagatgtccgttgatgagctaatcgggcgtctgaaggcagctgaggaacgactcgcccaggagcgcgcagtggccctgccccgactaaatctcacagaggatgaattaattgccaagataacttcacgtctgaagattacaggtgataaaccatcaggttttggtgggggctcgtcggtgtcaggaaatttccgtggccgaggacgcgggcgcggaagaaacagtgggagacgcggtggccgcaacagcggccgtggaggaaagacggccgcgaacgacgaatgtcgttattgcggaaatactggacactgggcgcgggactgcaggaagaagaagcgcgatgagcaatcccacgccgtgcatactgaagaagtggacgaagccttgttactagcgagaaccagcgtcatcgacatacaagagaacctcgacgacgccccggcttcgctggggccgcaccatgtcgttcatctcagggaggacaagctgtacgttcagcttggtgacaaagtgaaggaagaggcgcggtggatcctagatacgggagccacaaatcacatgacgggtgagcgctctgcgttctcctcactgaatgagaaggtgcaaggtacaatgcgattcggcgatggttcagtcacgaccatttgtggtcgcggatccattcttctccactgccggaatggtgaccacaagactctgacgggagtttactacattccgaggctcaccacgaatatcgtgagacttggacaattggaagaaggtggacacaagatcctaatgctgaacgggcgtctgaagatctgggatactcagcgtcggctactggcaagtgtgccacgatcggtgaaccgactgtacgagctggatctcgacgttgcaaagccagtctgcctcgctgcgcaaggaggcagcgcagcgtggaggtggcacgcacgccttggacaccttaattttcgaagcttgagacgtctagccgaagaagaaatgg

SEQ ID NO: 153388 - DNA, 797 bp, Zea Mays
gtcatcatccaccctgcccataacgcaaatgacgacgacacaacgtaattacgtggcggagcactgccagagtattgcgcgacaacgcgctcccgggccccatactcgaatcccccggtgctatgcctaaggaatcgcaaggtgaacgagacgaataggtccttgccacgggtcagacgaccgacgtcacggtctacgatggtcagcggatgcgcggcggagtgtgacgatgacgagcaattgctcagccctggcctggtctcttggcttcgttggtatgcggacgcactccctgggcccctttgagtcacccatacggtcggtcgggcaacggcaaagccaatgtcgaattggccccgcagtgtcctaccctagattccgcttcctctcaccctcccgcgagctctctctctctctcgctttgttgttggtgggtcatggcgatggaacgaagaggtggaagccccggcacccggtattatagccccagggtaggtcggttggagggtccgtcgtagcgcccccagcttcgcgtggccattgctttgaggtggggaagagcagcagtgcatacggccccatgtgtcaatggaaacgtgacgccattggtcactggtccaaagggacccatgcgctagagaaagagcttggtgcgcgtacgaggtggagctagacaaacgggcccgagctgcaaacgaggggaaagggaagaaggcacgacgctatggctgacaaggggacttggtgtcggcgccagatatccgggctgagcgcaatggcgaactaggctggtcaga

SEQ ID NO: 153389 - DNA, 307 bp, Zea Mays
gcgcacccaaagacacgaagatgatcataggaggggtggatgccaaaaagagcgaagtaaggagtggggtgggcaaccgccttggttggctaacggttgagaaggtaggtggcagtggtgagggcctcagcccagtagtgaggaggaagggaagcctgaaagagcagggagcgcgtgacatcgttcactgtgcgaatcatgcgctcgaccctaccattctaaggggacgtgtagggacacgacatacggaggtggacgccgcgagagaggaaaaaatcacgggacgcattgttatagaactcacagc

SEQ ID NO: 153390 - DNA, 576 bp, Zea Mays
ccgtgaggacgttcattcgctccctggccgagtttttttataagaggatgattcaacaatttctgtagcagaacgtgtaaaaccatagtgatctggaggttcaatgttgccacagtcacgaagacaatatccctgattaaaaacaacaggagactcatgattgtcagtacaagtatctgcaacaggttctacatcaggactagcgtggggatagagcaggaacgatgactgtaggtttgggtgacaggtggtttagaggattaagatggagatgatgtggaagtggaaggaggcgtaatgggaataagagcatctggtttggttataggagaagattgtcacacagatgaaggatcttggatgggaggaagacataggaagcatgaggagtgggtggacgagttgtggaagaagggtcgtttttcattaaaactcacatcttgtgaattatgaatgcgacaagatgggttataacacttttttctcgaacgcgcaggaggactacacgtcattatattaagagaggaaaaaggtccaagaggaccaaaatacaatgcccatagggcaatccgaaac

SEQ ID NO: 153391 - DNA, 547 bp, Zea Mays
atctaaagcacatcggatggccaggccgagccatcaatcccatcattccacatgggagcagggatggtagggtcctaggcacgtggaaccgcaagcggtggcggatggggcctagcatggatggtttccccgtcgtggagccgcacaagcgcaacatgaaaccacgcatgccgataatgtggagacggtcctccatatgcgattatgtgaggaggtaaagaagccggtgcagtcgccaggtgcttgcctctcttgcggggccgcaacgacgattggcgcgcacccagtcgacgcttccggactgctctatgtccactggcaccggatcaagactcctccgtgtccagcaactacttggttggctccctcgcgacacttgcaccgccgtgtcctcctccagaagctgaaacgaaacagtaaaagtgcgagaaggagaggtcggattgggcgtggaaagcgggggattgggcgcagatggcgcgtgtggaccgttgggcgtggcagagattgcggcgagcgcggaatcgtcacggcataccggtgcgag

SEQ ID NO: 153392 - DNA, 375 bp, Zea Mays
tgaagacgctcgcgagccgttggatcggtgcggacgactgagattaggttagagcatatcccttcgtgggattcggtctagtccatcggatcgtgatcgtgcggatctcgtacaatctggggcgtttaaaatccgaaccgtcgatctttgatctaacagctagcacgccgcatttgtttattataaggctgatctaatctgagccgttagtttggaatcgaacgaccgtaagttcacgatacccctcggccctggaaacttgcttaagagtccctgtgcttttctagaatcaacccgcagtactacaaatagtattctgagtcttgaaacaacttgcgcagaggcccctgtagttccctggtttattgcgcccag

SEQ ID NO: 153393 - DNA, 395 bp, Zea Mays
cgatgcgcggcaagctgaggccgcgctacttcgggccatacaaagtggcagccatgatcaatgaggtggcttatcgcctcgaactgccatccacggctcagattcacaacgtgttccacgttgggttactaaagaaatttctgggcactcctccagattctccaccaccactcccgccaattcatcacggtgttgcacggctgcaaccagcacaggctctgaaggttcgtcaagccagaggacttcgccagatccttattcagtgggattcactgcctagctcagcagcaacttgggaagacctggacgacttcaggaggcaatatcctcattttcagctcgaggacgagctgatactcgatggggggagagatgttatgtggggcgccacttac

SEQ ID NO: 153394 - DNA, 349 bp, Zea Mays
aacaaatcacacatgagatgcattttatctatatctaaaaggcagatttgaagatggaagctttgggagtacaatgcgcgaggccatttctgttctgttctgtccatgatcaaacagacaaagacatcagcgaattaactgcaccgagatccaatgaaccgaagaacacaaggtcaaatcagtcctcaaaaccatctgcggagcactcgcgcgccagatccatcgtctagccggcccaagatttccctccccaccgcgccgctccaacgccactaagaagccagccagccatgtcgtcggtctccggcgccggcggccggcgcatgtccatcaagtccatctcctgccg

SEQ ID NO: 153395 - DNA, 428 bp, Zea Mays
cggggccaaggctaccgccgacgccaaggtgctcttccagcgccgccgccgccactccatctcatgatctcggttcctcgaatcggagaggcgaccggcgggcacgctgccgatcgagcgtgctcgcgaggatgagtggccacgctactgtacgtgcgtacagcaaagtttcgcgtgtgcaattgtgcatagcatacaagaaaggaagacatggtttgagtgagtgcacactgcaggtttatttcttcccggatttcgtgcggtgcgggcatcgcgtggtcttctgctcatgaaagtcatggcgttcgacacagcatgcgatgcgattcatgtatatggatggatggactatggaaaggtttcgaggggtgtatgtatctttgggaccagtggacacatggttcctcctgttttctctgtagtttccg

SEQ ID NO: 153396 - DNA, 486 bp, Zea Mays
cacacaatccacatggattgagagcaaacgaacaagccctcaaggttaattcatagtgttacacattggaatgatcatgtgcttttgctaaggccattttttcttgtattgatctaggtcccaatgttttctagtcctccttatgtgagcaacttggaataagcaagatcggaaaactacctagaagaaaggattattcaggctctcatacatgccaggttacactaggaacatgatgtgatatgaaggcaaactcatgctgttgataggcatattcttataatatacactcgccggattgatgacaaaacaacttgttcttagttttcttgaaaagaaacttgatgtatttcttgttttctacagtgatttccccctgtcgattgtgcttgttggagtaggcgatggaccatgggataatttgattcatttcaacgataatcgacggtggtttgataagtttcaggtgtgtgccaatcaggatat

SEQ ID NO: 153397 - DNA, 624 bp, Zea Mays
cttataccagatagtggtgtatctatatagctaatatatacctacactgctacacacagcacagctaccggagtagagatgccatacccaatgatgaaaggccatctaacttttcaggtggctaatgcgcctgctgttcaatattgtacgtacctgatcttagaaaacgcatgagtgtgtcgctggtgtagtcgtataagcaacaattagacatgaaagatgcgtatggatattatacaaacatatactattactagagtacaggcctacagggcgtgtatatgtgtgtggtgtggggatattaatctatatctgtcgaggaattgacgggctaaccacaggtctgaaacttaatagcacgtagtatcttatacttttgagtgccaaatatatataattaatatacctgttcgcatgtttactggccataaaagtatacaatgactgaagcctaattaagaagcttggttcacaagatcattaattgaaagtgtttaatcgatctatgcaaattaattaaggtagaaacaacaatcagtaaaagacgctgtaagtagctagctagtgcgtagtgctactagttcattcaatccatgtgattactggttccacttttttttccct

SEQ ID NO: 153398 - DNA, 676 bp, Zea Mays
ttcttctagttaagtaggatttcccccttttctggtaggcaagctggcagataatgcacaccattattgatgttagggtagtaaggtaacttctagttataggatgtggtatatcaaggaagggtgtgttatggccacatcttctaggtagatattctgaagatttttttggggggtctccatgaaatatgtggtggtaatggttcatgaacatgcttcctgctggactgctatacaggctgtgtcatttgctgtctgcccagcataggattcttttgacacgcatctactatcatactattattactgactcgagttcttcagaagatataagaaatgtccttgtcagctggggactgggaacttcagaaggacagaccctgtcccatatctacctctttcgcttagtcatttttttttacttcaatgcagcataattcaatgttcatccctgaaaaatcgcagtctgaaatcaatagctctgttatagcatgtggtaagcaaggatctggcagaagatggggttgtggtcatcgctgctgtcccgtatcgaatacatctgtcaatcggagctatctgcaacgctaagctgaaaactggattttgtctgtatcaatagcttctggattttagaaattacctgcatgattgcgtgaagatcttatcatcatcatca

SEQ ID NO: 153399 - DNA, 1751 bp, Zea Mays
cacttcagatatggtatggccatccagccatctgtctgtccagaagagtgtttgctcaacgttcccaacaatgacgtccactgcaatgttgaagagggcctgagcattgcgagggacttgagttgggaggcctgcccaaaggctactaggaacagttttctcagccacaaccagcaaatccgcaacgctcagccaagcagatacagattatgaattccaagaccaccatattccagaggccgctgcaccctttcccaagagaccaaacagtgacctcctttagcttgttcctgaccctttcagagaaaactcctccttttgtcgatggcttttagaacccactttggtagatccatggcaatcaaaaggtaaataggagcagcagttaacactactcgaaccattaccaatctgcctgcacggttcattaaggaagctttccaccccggcaaaaattctgccaccttatcaattaatggcagcaagacctcctttgtgggtttgccaattagcccaagataagtacaaggaaaatccttgactgtacaggacttccgtgagacatatacaattattgcattcagaatattcatgaccaaaatgaatagcattggagacaaaggatctccctgtcttaaacccccgtctatgataaattgtctcccctggctcaccattcactagaacttgtgtagaggaagtagataacagcaaacataagagattaatccatcgctgtccaaacccaatatgcctaagaatttccaataaaaaggaccaggagaccgaatcaaaagctttagatatgtcaagtttaaggaggatgtgagcttctttcttcttattcttgtgcagagccttgaccgtttgttggacaaacataaaattatcatgaattctttgacctttcacaaaagcagtctggttggggctgatcaaaatcggtagaacaggggccaacctattggccattatttttgttactaatttagcaaagctatgcaccaagctgatatggcgaaaatctgtaacctgagaagcatcctgtttcttaggtaacaaggtaatgaaggccgaattcaggagacaaaatttgaagacatgacctcagataaatagcgtctaaagccatcaaaatatctcccttgatgatactctagcaagatttatagaagtggtcagtaaagccatctggccctggcgccttgtccattggcatgtcttttatagttgcccatagctccgcttccatgaaaggagcatctagttgagagagctcaatctgctgtatacccaattctgcaaggtcaacggtataaattggttcttcagctttccccagcaggttttcataaaagtctagcacaactgcttgcttgtcctcttgggaaactgctatctgatcaccaacattaagcttgggtatgaaattcttcttcctgaaccttgcttgctgatggaagaaggctgtattagcatcgccgtcttggagatagaggatacaggaccgcaagcgggcaatggttctttcaagggaggccaggccaaggcagtgtagtttaagcttcctccgcagccactcctgttcagagagatcccttgaatcacgctcaatttccagtcgatgtaagatttctttggccatttccatctgaactttgatgttgcccaccttcctctgaccccatttctgcagccctttactgagcctttgcaatttcagaaataggcgctcaactgcacaatttgaa

SEQ ID NO: 153400 - DNA, 754 bp, Zea Mays
ggaaattgatcaagtgtcgacccctcctatctgtccaaccatcagacataagtgtgcaaccaaattcagtccaagccaactcatgagtctttttttatctcatctacactcttctttgccttctcaagcaatggcaccttaacatcatgatatgagggtttcacgtacccaggaccatattgcccaaccgcctcaagcatgatctcaaaggcccttgagttgatgacattaagtggtaagccgctctcataaataaaatcagcaacatacatatatgttatttccttctcctccttgctctttcgctgcaatgtagtttgagtgttgcccttacaatgcctctcgcgaaccacatcttcaggtgctttgcgaaacatggatgcaattgacttagaagacttcgacgcgtgttgattgttttggcttgcttcagctaagagccttctcttttgggttgttccggaactgagctgaacaactaaatgggatgctctactttccccttgtccaagtacttcaacttcatcatctttatcaccatctttatcatcatccaagtcaataggcttctgtctagcattcttcttcaaataatcactcatctctttgctaattgtcgatgttgtctttgggcacttagcaacatcaccatgaccaccaacaaggtgctgcctcaaccttctaacacctgcatgaacgattttgccacaaagtatgcacttcaccacatcttttttgttcaaatcaggccagt

SEQ ID NO: 153401 - DNA, 1045 bp, Zea Mays
ataactccaccagcgccgcactttccagtcctctgttcctcgcctctttgtaccgtcggtcgcctgtgcgtcgccgactcgcgaagcagacagcaacaggctccgccgccaaagaaatcgggtcgctgctctgttccgtactccgtctccttggaaaccgttgtttcgaggtcgatctgtgtccgtaattcttcgattttttttgctgttgctcttcgttgctttgttgatggcgtggttggtgattcgctggtttggcggcgcggagcggaccttgttagcctggccgagcgcctcctgagcccagctacatggatccgccggagtcgatcaactgaccgagcgtctccttgcccccacggagtcgctcttgtcaagatctgacacattcgctccccattttctgccaacctcggaagcccagcacacaataaaattttgtttggtttggagagaaatttcggccgttcttgctttgtttttttttgtagctttgagatcgatcgcaggtgtaagtcaggtggcagcgtgagacccttacccttctggggtggatgagctgacacagttacacgcctgcgagatcacccacaacgggagcgctctttcgttacgcgcgccgcgtcaaatttccagtagcggctcgcgtacatcagggcgccacatttctttagcaaaccccacatttctttttctaccatttccttgttagtccagactccagatgggccattcgcctattatctcgagattttggtctgatcttgctcaacttgccggctggatttgtaagccgaaattagttggacctcaaccgaaggaccattcacccattgtctgaaaattgaagatgtatatatgcctttttgttttgtttttgagatgcatcaaattgtgctttagtggaacgtggtccgggataatttgtgtataaaatgaaatgcaagcaaccagcgtgcacaaccaatttggcaacggaggataataggcgaatgaccttaaattaatttggctgtataaaatgaatgtattaaattatcttgat

SEQ ID NO: 153402 - DNA, 311 bp, Zea Mays
gtttcttggaaggcttgattaggcctttgaactatcagctgcagagccacagctttcccaacttccataccttgcttaacaaggcaattggccttgaaagcaaaagaaaatagttgtctaatcacaagagagttccaagggtagaccagcaggaatacccgtcagaacaactaccaaggttcttagttccgctctggaaactagagtggggatagcaactaccaagcacaacgctctagacaacaaggtcagaggagcaaccaatataaaaaccagcagaggaactgcactcagaccggtcaaaggtctag

SEQ ID NO: 153403 - DNA, 452 bp, Zea Mays
tagaacttgggctaggtccaagggtaggggtggaggtgcggggaggtgggtttcactttcttctcttactacttccccttcagctcttcgggggaaacctgctccaatccctgaggcggtaggcgtggttttatccgaagccatctgccagggaagagagtcactatcatgcacatgcaaattgttctcaaccaagttattttattcatcacaccatcacattacaagcataagactactacaggggaagactacacgagggcgttcttcgaggtgctagcgagttccttgtctaaggtgtccccaaatgccttgagaagatcatcgaggctggctagggatacatcttcttcgtcggaccagtcatcgattctggggggaggtagggctagaggggccttcttcttcttcttctctgtctggcatccttggttagtggtcttcttctggat

SEQ ID NO: 153404 - DNA, 449 bp, Zea Mays
attatttcgtgcggcaccgtactttggttttctgattttggaccgtgctcgtgctggtccgaaaagctgcccggcccatattcctagcactaacttgaggcttgagcttatgattcagctgactgcaaatcctccctctctctttattccgactcaacgtaaataacaatccttatagcccgcttacttttacgtaggtttagaatacttgctctaagggtgccgaaagaggattaaacagtttggttttgcttggcagatgagcaaagccaacgccggctagctacacaggattgttacaaaacagtgaaaggggaagcagggtatcatcgtacacgagcagtgcctctctcttttgtgacagagaaggaagcacaagcattggacttggtccaaagtacacaagtcctaggatatgatggtccaaaggtagacaagtcgtaggtaac

SEQ ID NO: 153405 - DNA, 392 bp, Zea Mays
tcttgtgcagccccttgcacttcaaccatgttgttttctgaagaagagacttctgatgcagcaagctaaaattctctgcaatccaaaacatagcctccatctgattttactacatcctgtatgtttcttttgacatcatctcttttgcattcctctagagactcttctgatacaacaagctgatgttctccaatagcctgaacactgtccccatatgatgttaattcaccctcaaaagaagttagggagccttgacttgaagctgaagcttcatgctgcatgacattttgcatttcaactgtattgcaagacggagacgcttctagaataggaggctgaagctgtctgtcatcaagaacatgattctcatctgcttttggtggcttttcttc

SEQ ID NO: 153406 - DNA, 432 bp, Zea Mays
ggtcgatctccattgtgcttcgtgcgctaatgttgcacggggttgatggggaggtagatcgcgctggcgttgtcgcagggtgtaagagggctatgaagctcctggagcagccgacggaaccaggaatccccatccatgccataggccacaacacgatactcagcctcaacgctggagtgggagacaacaggttgctgcttcgaggaccaggagacaaggttgacatccaagaaggctacacaaccacatgatggactgacgtgtgtcggagcagccaacccaatcagcgtcggtgtagacaaccagctcagaagttggagaaggccgaagaagaagaccatagtcgagggagccgcggagatagcgaagaatccgcttcgcagcagtgaggtggggctcccgcgaggtgtgtatgtggaggcacacttgctg

SEQ ID NO: 153407 - DNA, 400 bp, Zea Mays
ctaaccttgtcttcctccctccctctattctttagttgtatgcagtgaagcctatctctcccacctctttgtattcacatcaaaattcactccaaatttgtgaatcatttctaatgtgtgtgtgcctagccccctattgagttcctttgcaggtcttgagctccctagggagggtttcatcttctcaaacagctatttcaccgctattcgcaattcccgcacaccaagtgctcggtgaaatgcaccaaccactcaaacttgatcaaatcgaccctagttttttccatcaccctcatgccacctccagtaacactcacaccaaatttcacgcctattccatatcccaaacatcgaatacaccattgttctccatttatagcgatcgtttatgagatgagtg

SEQ ID NO: 153408 - DNA, 1858 bp, Zea Mays
ggagtattttttcttctctcaccgacatctcaggccccacatcacatgttggctcctctctttgccgaagatgttgctgaaggtaaatttggtgtggtaaatttggtgtgctacgatccatagtcacaagaaacgggtagtgactcttgatccggaaacgtcatccctgactctgactcagatacacgagcttattttcgttatcaccatataaaaactccaacatgtaaaaaaactctaacggatagcgtaccatgtttctcgatccggttcctcaaccctctatcgattaactttacgacaatgctacggtcgagggcaaagacgatcgactagtacgtagttcactactgtactacacccaatacaggcagatcgatcaagtagctaggcacctgacctacgtaccgcggcgggaggcggttgagcaagcttgagcagacgagcagcgagagcgcgtgctcataaatgccatgcttactggtggccgccatcgtcgaccagcgagcaccgtcgtcgtccaaggtgatcccaatggcccatgtgcggctgcttctcccctccactagctccgatcacctagctagcctctcgctgtactacagatcggacaggggccgcgcaggcacaggcgcagcgtcccaaccaatcgtatttactccgatccgccccgccactgcacagccgccttctgccctccttccatcgcgctcgctcgctcgctctcctatataaacgccctgcagtcctgcagcacctaccagtccagtctcgcagagcagatagcatcagtgcctactgcggtactgcatagctagcttagcttggtcttcgatctcgaccagagccagagagtgtggtgtgaccgtgtgagcgacgatggggaagcacgtctgggcggcagcgctcatggcgctggccgtgattgtcgggctcggtgtgccccccggccgcatcgccgaggcgcgcaccttagagaaggacgacctgctgggcggcggcggtgactttggtgctggagagggaggaggcttcggtgcgggtcttggccatggcggtggcctcggggctggattcgggggaggtaaaggcggcggccttggaggaggaggcggttttggtggaggtggtggtgctggtggaggtcttggaggtgggtttggtggaggaggaggccttgggggaggcggcggtgctggtggtggttttggtggcggggctggtcatggtggtggccttggaggtggcttcggaggtggaaaaggtggtggtgcaggtggaggtggtggtcttggagggggtgtaggcgggggcggcggccttggtacaggtggaggaggtggctttggaggtgggaaaggtggtggacttggcggaggtggtggccttggcagtggaggtggtgcaggcgtaggcggtggtcttggagggggtgccggtggaggcggcgaccttggaggtgggaaaggtggtggccttggtggagggggtggcctcggcggtggaggtggacttggcggtggtgcaggtgggggcggcggccttggtgccggtggaggaggtggctttggaggtgggaaaggtggtggtcttggtggaggtggtggcctcggtggtggaggtggtgcaggcgaaggcggtggtcttggagtaggtgccggtggaggaggtggactaggcggtggtgccggtggcgggtttggtggtggcgcaggaggaggtgttggtggaggtggtggccttggtgacggtgctggcggtggtgctggagctggcagtggtcttggaggaggtgctggtggaggaggtggactaggcggtggtgccggtggcgggtttggtggtggcgcaggaggag

SEQ ID NO: 153409 - DNA, 350 bp, Zea Mays
gtccagacatgttgccattttccgctgaagcctgtcattgagccccctcataaaacaattctttttcttcaagtcagtatccacctggtcaatggtatgctaagagaggtggttgaatttgttgagatactgcatcaccgtatctcctccttgcttcaatcggataaactcttctagtttcatctgaagcactccctccggaacataatgctcccggaatgctagcttgaactcctccctggtaatctgatgtccaacaggctgaattgctgaaaaatttgcgaatcaggtactggcaggccctcttagctggtgagctgtgaacatgggcttttgcatctccgtgcatc

SEQ ID NO: 153410 - DNA, 498 bp, Zea Mays
cctaaagctaaaaagcaacattatcagtcttggtcagctagaggaggtgggctgtgacattagactgttcaatggtcgtctgaaggtgtttgaccctgaatacaatctactagtatatgctcccagggctggcaatagattgtacacagtcaagttgggcataactgatcctgtttgccttctgacaaaaatggatgatttggcctggaagtggcatgcaagatttgggcatttaaatttcagagcacgtcgagatctagggaagaaaaagatggttgaaggtttgcctactgtagatcgtgtggaacaagtatgtgatggatgtaccctgggaaagcagcacaggtcaccattcccaaaggtctcatcttatagagccaaaaagggtttggaactgtttcatgctgatctgtgtggacaagtgagaccacaaacagtgggtggaaaatcctatttcctacttgtggtggatgatttcagtcgatacatgtggataga

SEQ ID NO: 153411 - DNA, 2035 bp, Zea Mays
ggaaaaatgttagatgtgtcctcagacccaaccaagtgatcgagtcaagatcaacgcaccctaggcgtaaaccctctccatagttgtgccccgagtcacagtcatacaaacgaggcatagaccctaagcatcataatcatcctatcagtcttgagttcgatctctttacatgtaaacaagaggcatcctcacaagcgtgtcaaaactgtttgtcaggtatgagttccacttttctccagactagttgatcaatctgatgcccctcctgaaaagctatcaccatgcctaggctaatgaaatatgttaggctgtacacaatggtttgaagaaacaacagctcctactttcagttatcatccagtataatcagtgaaggtaactaaaacaaggagtttgcatcatcatcaccaataatccctgcacgagcaaactccattcctgaagtggtgaaatctgttcacgtccctcacaacaatctcccgatctgtgaatttggagatgaacttggtgactgaatgacagtcctcacaaagcctgagattctttgtgatcctgatagcctctccactgccagtcttgataagcccgaaagcaacagccaacttctcactgtggccaagcaaaatcctctccttctcctcttcttcaatatcatacagaactgatctcgtgtcaggaacatagccctcatttttcatctgtgtcacaaattcaccaatcaatgcttgcagctcctccacctgtgggttcttgttgtcaactgaaacaaatgagtacagcttcttcttcacctctatccagctacagccaggcaccttctccagtgcatgctcctcaagtaactcctttagtacatcaacttggttctgcaatttagctcgggcataaatatctgccaagaggacatagtttccagcatttcggggctcaagatcaaagagatgagagcatgccatctcagcatactcaacatggccatgaattctgcaagcgccaagaagcgagccccaaacttgagggcttggttgaatacgcatgctctgtatcagctccacagcttcatccaggcgcccagcacgaccaagaaggtcaaccatgcaagcatagtgctcagcacgaggtgtgacattgtactccaccattgattcaaatagcttctttccctgctccacaagtccaacatgactacaagccccaaggacgctgacaaatgtgatgatatttggtgaaatgccttcctcaatcatctcctcaaacacctggagtgactcacgaccaaagccatgcattccatatccagatataagtgaattccacgacacgacattccttctgcgtcctatccagttgaagatgtagcgcccggtctcaaggcacccacatttcatgtacattgccatcaacgcattcagcactgaaacaagtaagtcaaaacccctccgaaggatatatgcatgcagtactttgccctgaccaagtgcatttaccccagcacaggcatgcaagacgctgacaattgtgatcgagtttggtaccaggtctgcatcagaggccatcatctcctgaaagatctgaattgcatcaccaggacgctcgttcttggcatagcacccaatcatagcactccatgacacaagattcctatcaggcattgaagtgaacacacgctcagcatagctgacaatcccaagcttcgcgtagcagtcaataagagttgtggcaacatgcgtgtgtaatccatagccgcggcggatggcatgagcatgcatctcccgtacacgggcagaggccggcaggtgcgacgctgacgctgcaatgcaggccttaagaccgtgcgcgtagctgtagctgtcgacggggacaccgagccggcccatgtcagcaaggcacgtgagagcctcctctccatggtcggcgagcgcgagcgccttgagcatcgcgttccacacgaagatgttcttcacaggcgcctcgtcgaacacctggcgcgcggcggggagcgcgctgagcgcagcataggcttcgatgaggcggg

SEQ ID NO: 153412 - DNA, 310 bp, Zea Mays
ttggtcgtgtgctgccgtccttgattgatgtggagcttcgtggcatccctgcccatgtgtgggagacgtctactgctgatcgtcttttgtgcccttatgcctggatacagcaagtgcatcctgatacgctggggctgttggacctgtcaagtttcagatgtctggcttggtgttctgatctgtccaagcttccttcttccagggaactctgggtagttgaaccgccgtcgggcatcgttgaagtccctcctgtgaaacgggtgttatcctatccagttgagtttcggttctcggaggttcgcgctcctgc

SEQ ID NO: 153413 - DNA, 657 bp, Zea Mays
ttgaaaactggtggagaaactaaacaaatatggtctggaccatatgcggatggtccgggctttgaggtcggacggtctggaccttatgcagatagtccgacacctaccgtggacaatctgttgatgaccagagacaccagcgaccccggacctttagaccatgatgtctagagataggtacatggaagcaaaatacatccaaagcatatggtcggttcattagtgttgactctacttttgatcaacttctttctaaatacgtcaacaagaaggtcgctccgagagatcggccaacaaagtgacctcattcaccaacattagaaagacaagcaaaagaaacacgaccaactcaaacatcccaaaaggtagtccaacaggttccaccaccgacgccatggatagcaccacctatttatcaaccacacccatatccaccacatgtgtatacaccactcatatttccacctacatatccatccacctgcatacccatccatgtggggagactacaccatactcacagtatccttatgatacttataaactaccatatcactcgaatttgggggcaccacaaacttcagtatttgataggctagctccatcaatgcaggaccaattgaaaatccataattcggtcctcaaacacatcaagat

SEQ ID NO: 153414 - DNA, 372 bp, Zea Mays
ctacgcattagtaagggaggagcgaacgtggtgtggtgtttactcaccagagatgggagccgaatgaagccacccacgacgcacggcggatcttccaacctcggcgaggaatttctggtgactgcgcgcttctccgaccgccgctagaccgcaaatgtgaccagcggacccaggcgacactgtctgacctcccggtggagccccccagaccttcctcgaacacaggcggcaatgagctcaaaagaaagccccggcggcttggttcccgttggtgagggcgaacggcggcgctaactggtgtcgtggccgcaatggctgacgagggtggtgccagatttataccccgaagccgcccaaccgtatggcgagcgc

SEQ ID NO: 153415 - DNA, 323 bp, Zea Mays
cattatgcaacatgcaactcggctctccatgtcaactagccgaagtagagttcagggttgtggccgagcacatcagtacttgggacttaatgcaagaatacatggcctacaaaacttttcccacatcaggtggttggggaatgccgaagaagaaagatgaaggaaaaaagtttgaacttgtgaggcttccgtaccgctttaagtttcagaaaaccttcagcggcccctgtgccgaatggttggaggtcattgaaacaatgtgcaatgaaatccttggaaattacactaagaaagaggaccagctgatgaccgctgccttcggc

SEQ ID NO: 153416 - DNA, 335 bp, Zea Mays
cagctgtgtgtgtctgctccggtcttcgtcgccaagaaatcgacggaaatggcaatcgccgtctcctgtgccagatcgtcgtcctccattgctattgctattcgagaacagaagagcactgacttgtgagttcctaggctaacgtgcactcctcggaatcacagaaaggactggtgaggttaccacatttatttcatccaagaaaaagaaaataggcttatttctttgtagaacaaggaaagaggtctttgagatatatcaccacaaaagaatagcagtgaaaagaaaattgttacctgcatttgttttaacattttttttttgcgaaagaaagg

SEQ ID NO: 153417 - DNA, 300 bp, Zea Mays
ctcaacatggtggcacactgacgctctaattcatctttgtgggctgctggatagcgatatagccgcacagccaccggtgccgaacctggcagaaggttgatgcaatgatcgcgatggcgcggtggtggcatacctgaaggctcagcgaacaccggcgtgaattcctccaataaggctggaaaaaggtcatcagagctgcacacccgaactgatggtgcccgcgatccggctacgccggtccagcaaacacgatggtcgtgatgccagaacgacatggtgagtgcactgaaatcccagagg

SEQ ID NO: 153418 - DNA, 621 bp, Zea Mays
cgattttataattttgtagagattaaactgcagcatttcctttcttgtactgattagactacctgagactatggcttactgctgtaaacataatgatgtttgtttcattctgataggcatcctgctttagtcctcaacaagctaggacttttgttttagaacgtcgcagaagatctgtgagtcaattcattaagaaatgagacaaacagaaatggagcgactgaagagttagcaccgggtacaaagaaggccagaaatgtgcatgcccatcaacagcccccaaaacagccactttacagaaacacacacctacacaggccacacagctatcagcgacccaaattataccctaagagcgggttggagagtgaggagctcctgaagagcagaggcacccgcagcacaccaaagggtacattcattggccacaacctgcaaaacagtatgaacaccaggtcattgcccttcgaacacacaatcattctgatgcttccagatttcccaggcagccaacaaaaagctagaacttttgtgaacacatcagttgttttttggtacctgtgtttatcttatgacagatattcaggtgtgtatgagggcttcagcaacattactttcttg

SEQ ID NO: 153419 - DNA, 470 bp, Zea Mays
ggaaaactggatgaacagtggatgaagaaggcagctgcaatttgtatgcaaccttgccgatgcgttcaataattgcaaagggcccaaagtacttgaagctgagtttgtgattagctctagtggccactgaagattggacatatggttgtagtttaaggtaaaccatgtctccaacttggaactctcagtctgtcctcttcttatctgcttggaatttcattttctgatgtgctcgttgaaggtggtgttgaaccagcttaaccatgagtttacactggtcaagccaagtctgaaggtctaaggaaggagctgcatcggtcagcgttaaccccaaatggatcgccccaatgatgaatgaaaactggtattattccaatattctgccagagacaaccaatgagaccattttgtaggacaagcgtgcacaaaactgcgcagaaaggtttccaagcattgattgacacgctcgg

SEQ ID NO: 153420 - DNA, 296 bp, Zea Mays
cagataatattcctgtttgccatgcttgtcagctaggttgacacactcggcttcccttcacgttgtcaaattctcgagctactcaatgttctgatcttatacattgtgatttgtggacttcttcagtagctagtttttgggatataagtattatcttctcattcttgatgatttctcccactactcttagacttctctgcagggtctgacactttcactactattacccaattttttattatgtcaatactcagttcaggtgcatggtcaagggtgtccagtgtgacaatggacag

SEQ ID NO: 153421 - DNA, 347 bp, Zea Mays
gtttgtagaagcatggcatggtttgtgcacttttcatattatgcagaatgctgccaaacatttatctgaatccaacaatgaagaatcaagcacttttcccaatcatattgaggaaaacaaccagaaagaaccaagtattctagctgattttagtgcatgcatgtatgagtacgaagatgaggccacatttgaacatgcatttaacgttatgaggacaaaggtgagcaagcaaacatggttggatagtatatacaatgtgaaagaaaaatgggctgaatgctatatgaaggatgtgttcacattagggatgagaagtacacaattgagtgagagtctaaatagtgact

SEQ ID NO: 153422 - DNA, 417 bp, Zea Mays
gttctgagcagcacttcggttttagacaagcttaccatatgaagttcatctatgacaattacaccaagttcagagaggcggccatcctccaacaacttgtttaccaaagagtttgccttctctatggtacatacagcaactgctgtatctttaggaagtgagcctcccccctggtttccgtagaagctacggacatgcctacccagtggctcaagaagttgttcaagatgttcagcctgtaaaagataaataaataatcaaacacaagtatgtttcagaccaatccaaagctgtataaatcatcaaaaaccttttcagcgcatattgacacatagggaaggacaagaattgccatattcccagttgacagtatctgcctcaacatcagaacttcagcaacaaaacttttaccagcac

SEQ ID NO: 153423 - DNA, 525 bp, Zea Mays
gtcgtgccggtcatccaaaaatggcgaaaggtggtgtgtgatggtaattgggaaatagtcacgtcattagccaactcatgtcaggtaggagttgattgtgttaagtgattgttatatatgttgtgtcacgaattgtgataataataggcaagccaacgtgtatgctgtctagcgggctgtgtcgttgctctagctagccgacttgttagatgactttagttaagctcgtagtcctgatgaattgcttgttgtagtctagatgcgcatggtgatgatcgcgggtaaaaatctgtagtgctcatgtggtgtctaaactaaaatgcggactagtgggtgaaaagcgcttcgatataaatatatgacggatttgatgattgtggtgaatgcgtttgttaaatgaatgtagtaattttagtgcactaaatgatttggataaaatttgtaagtatacttgttagtcctcatttaattaatttaactctaagaaatggtaaagtgctagaatgattcaagtctctagaatgc

SEQ ID NO: 153424 - DNA, 283 bp, Zea Mays
ttgggagattgactggcttcaccttctttctgccgcgcttgtcaatcttatcggttttgcttttgctgcttagtccatcacatcatttgctcagtggcaatcatcgactatgtcatctttgtggtccctgtctgtccactttgatttgtcgtggtcttttaggttcggttttaggtcatgagtctttagaatactgtcaaggttgtcgtttgggaaggcatattcagcttccttatcattctagtgagtcagtgtccatgcatcctttgatcttgtgcactca

SEQ ID NO: 153425 - DNA, 914 bp, Zea Mays
tgaagaaagggggggtgatacaccattggcttggcgtgagagtcgggtggtgtacccacccatgcacatcactgatagacatgcacatgttgggcatagcgatgaactggcataggcgagggcactagagagagccccatgggtgggagcgatgtcaaaggagatgccactagggctgaaggcggagccacgaaggtccctagggacccaacatgggttgacaggggtggcacacgggttaataagggccaacagggtggctcggagggaggctgggggagcaggagccatgagggccatcgggtcaccgactgaagctgtgtttggggacctgtagttggaaaaacaaatagtggctgacaattggttgccacgaaatcaaggtcatggagaaaatccaactcaggaagggaggcggtgggtggttcggaagtaggcgagaaagggaaatccatcttgtcgaagatgacatgacgggagatcaagagacgatgagtggtgaggttaggacaccagtaccctttgtgatcaggggagtacccgagggagacacaacgagcagagcgaggagcaagcttatggggagtagtatcagaaaggttgggtagcatgtgatggaatacgtcttggaggcgttgtggaggactgcagattagtattgcagtttttggatagcagccttgttgcgttgtggaggactgcagtttgtggagctttttactgtgttttagcatctagaggacaacatctttgtgctgcagcttttaactgcactttagcatctagaggacaacacctgtgtgctgtagttgcatctagtggacaacacctttgtgctgcagcttttgactgtactttagcatctagtggacaacacttttgtgctgcagtagcatctagaggacaacaccttt

SEQ ID NO: 153426 - DNA, 2354 bp, Zea Mays
tcttatgtttggttcatgtacaccacagctttccttgtgatcctgaccatcgggtgaccaatggttgttattgtacctagggtctgttttttaaggatatatcaatattgcggtgctcggtgatggtactttgtgtgaggaagatggctatggttgggacttgtcgagatgggagtactagcttgattgggaagcccgtttgagaccttgtagttgcattttgcatacacaagcacatgttggttagtgttgtggagatacaataccaatgtgcttgtcagcaactcagcatatgttgatcggttcttttcactgaaagatctggcagttcattgcttctgtgctgacccttgtggttattatccccgtgtgcttcattttccgtttctgcccacatgcttgactccgcaattacacattctgttctgcggttccagttcatgcctatcccatcgctggactcctcatcgattcataatccttcgcaagttgggcttactgattggctttccagctctgcacgatgaggaggcttgccagctctgcaagaagacgactcatgagtcatgatgtatccagttttgcatcaaatgcttccagatctacaagagtaagtactgtatgtatgtgttagtttgtcatcatacatgacaattgattgggtcttggcaactagaggaagatggcagatgttgaccgtatacggctgggcttggaacgaggcccgttccacatggatcggcgggactcggattcaatcctggtccaactgggaatggttgttcggttaatttggggatgaattgcagctggttcattccggccgtttttcctgtctcatcatcccattggatcgacgcccggcctcctaccgtctggcctctgggagggaccaagcctacgacgacgacgtgaacactagaccagaggtgaggcaaccatgactccatgagcattgagcaccccccgcgcgtgaggcgatggcggcgacgacacgatcgggttttaggatcttggatcgggtttttggatcttggacggttagcaactgagcacgatggtctagttctagttgacatccgtgatgcggatagtcgagatgtggaatgattttgcactcgtgagttcttctcttccttcccccttttttctgcccggtgctgcctagggttcatagttcttaaaatcaagatccttgttcttgtcccttcttgttcgttcatgttcaaggtgatacttgcatattgttttagtttagttcagtttcgtttgaaaggtaggcttacagagaggttagaaaataggacaaacagataaaagacacctgacgtgtcccgttctgcaatggatgacacatcggatatgacacttagagagcatgtcaaagtgtataagtttagcgaaggcaccagacctgtttggtgcaacaccagactgagcatcgaatacatagtgcacaacggtcgacaacaggaagattccaatagctagatgatgtggcatgtgtccggtgagttctaacagattgacgaagttgacattttttccaacagtaacctctaagacgataccagacatgtccagtgcgccaatagatatgtttggtgagtacagaaaatcaagagtggggtcccaacgacttttttgagatgggcaacctatatatactccttcaactaggcacaactttatcaatgagctaagaaacatcacacatgagttagaggatcatctccaaaccatccaaactatccaagtgctccaaaatagttgtgtgcttagtatatacatcttctgagaactaaaatatcaatagagtttctagagcacttgagttgagttgtgactctgagaaaagagagaagaaaagtgatctttcttgtgttgagttgttgctctaagcgatcaagagccttcgactttgtgtgggccttgtaagagagtttgctctcaccaattgagaaagaaaggactcaagctcaaccttagtggtcgtttgagtgaggaaagggttaaaagagacacgctttttttgactccttaatggagacacagagttctttgtgaaaccaaacttaggtaaacaaatcttgagtctcttgtgcattttccttcccatttgcatttgcctttcctctcctagttaatacttgattttctcatcatttaagagtcatcacttatatcttgttgctagctttcattttcacacttaagttttactagcaacataagaaagtatttatctttttgatatcttagctatatcattctcacactgaccattaaagttagaatattcagattgctccttgtgtttggtttagaattcttagatattgcatattcacccc

SEQ ID NO: 153427 - DNA, 608 bp, Zea Mays
gcagaaggctcaggctgattggttcggcaagggcgcctcgggcgagcactgacaggccttcgaacatccaaagtcgtatcaacctctggaaggggcaccactgccaacgccccagcaggagcagcgtcggaagaatcctcagctagcaaatcgagcatagtgtttatatctacatcactagggttcaggggcacctcgaaatggacctgccgttcgtcatcaggaatctccccaagcgaagcaaccaaagcactgacttcttcagcagagggtcgcactctaaggcccaaactgccatcagtaacaggtggattcgatacaaatagggtgaaggctttgggaggaggcaaattccaggccgagtatgccactggagcactaacatttgacaccttgcccctaaggatcatttcaagtcggctcaccaagtctgcagaagggattctcctgttggtaacccgagttgagtcggctagccctcggtacagataagctggataggccctgtctttcagtggctggatattcttgaaaacaaagtcagcaaccacagcttcagcagttagacctctctctttcagcagtccaacttcagctagcaacacacc

SEQ ID NO: 153428 - DNA, 1072 bp, Zea Mays
tgcatggccaacatctgccacatttgacaattcatagaatcgccaatcttttaaaatgatctacacagttactgttgcacaatgcgagacagacaagcgatccatctatctagtacattccttcggatatcacttcactgttcagccttatgaacagattactgcgaagctcaagccgctggttaaaaaaagaggctccggatagtcattcatcaatggattctaacactatctgaatgacaacgtcatcaagaaggtcctccaccatcagatcctccatgtccaacgcggtgcactccgcgtcatataccaggttcatccagccgtcctttctcataaggtcatgtgccacaatgtcctccaccgtctggccttccttccaatgcaggctcaggtagcagctcaccttcgcccacacctcctcaaggacatggtaccccatgggaatgggtctggttcgcaggtcgaagcgtgagtgccatgggccgatgacgagtgaggagtcatagatgtccagcaggacctcgttgatgagatcaaacaggagcatgcgcctgacgatgctgtgaggttcatcgcttgccatgctgacctcctgacacgagcattctgcctcgtcaaagaccacagggctcactggctgattggacgcgtaccagtcgacatcgccgcagctgaaccctgatttcttgaggatgtccttgacatactggaaatcagcctcgttcttgtcactgacatagatgtgcaagggttctgcagcaccttgttcagaaaattcgtgtatgaagcggaagtccgaatccaaagcatcgttaggctgccctgacttgactaaccactcttcagcttcaagatcagcatccttggcaccagacagtttcgtcgccttaactaaccactcttcatcctcatggtcaataccattcatgacacgggagcgcttcagtggtgtgaccagccattcttcatcattgaaattggcagcatatgctcctgcggacagtggtggcttgactaaccagtcctcgtcctcaagctgcaagttttcgaactgtggctctgaatctaa

SEQ ID NO: 153429 - DNA, 289 bp, Zea Mays
gtgcatgagttttgcgatattaacattgacttgatatatcaatttgcaacatatttagagagagaacaatcaacgccatacacaaaaacaatgaggtatgaaacataattagatagaaagagtaaaaattgcacattcaagctcattattgcatagcatatgatataaaaaattctactgctattacaataatgataactcatctcatcacatcataaaaatgtttatggctttagagccatgcatgcatcatacgatagaccaaatagttattacaaaccgattgttc

SEQ ID NO: 153430 - DNA, 546 bp, Zea Mays
tcgacatatttgtctcccacatttaataatgatcttcgtcatttcccaaaacaaaagattcattgttccgtattcccagcacaatgatattgcgcgcattgctaggaatttcatcatcaagatgaaccacttcgtgaggcaaatcaccatcagggtgaattaatcagaggagagttatcacagaccacgtgaatctgcaatcagaacatatgctttgactaaggccaatggaccatatccgcaggcgtccccgcagaatagatcaaatgccaataagtcaaatgtggatatgatattaatcccgggtatatccacatctacatcaggtagaagcattcaaaccaatatggttaatcctcaacgatttctggcaaactccatatacacaggagtacacactgaacgacaggttcagtttagcttatgtgcgtttaatagaatattgaggcattacactatatggacattcctccccctaatgctgagatgttctaaaaagcatatagataaaatccccaaccacaatcatccggttgtggccaatgt

SEQ ID NO: 153431 - DNA, 361 bp, Zea Mays
agctagtaagcactacacaaacctactcatacccacaacggggttccgagtctgcgacgcccattcccaagacaacaacctcgtagagctcaaacgaagggaacgaggagcaccaatatgtcatgtagtacatgatgcttgcgtgaaccggcttaagaccgacgggaattggttggtcgacataggggcagttcacggagtttgtccgcgacgccgagctcggttccgatctagctataacagtaatgcccaaatggtcacttcgatgagcttcaccaacaaacatggacagtagaacgctagaccagagacaatgaaccataccgtgctcgcttgaccgtgtgaggttgctatgtcggcg

SEQ ID NO: 153432 - DNA, 283 bp, Zea Mays
gcaaaggaactggagttcttgcatggatgcagcagcccactggcagcaggtaaatttgtctcgcaaatcaaagatcaattctgcaccgcaattaaacacatgcatctgtgagaatctggcctttgttcttctcgatccctgttggcgttcatcttcgtctctgcgccttgttcttggtgcgtgctgcgctttatttgatgagacctgcaggccatgatctctcatgcttacttccgactcttggtcttgggttctgttctttctttctatccttcgtgtagat

SEQ ID NO: 153433 - DNA, 521 bp, Zea Mays
tggcgcgtctgcctgcacggggcccttctgcggctgcagcaacagtggttccgtacgccggagcatgaccggcgggccacggccaatatgaaggtctgggttcccgtcgtcgttcgtacgtactacgtgctgcaggcagagagggcagtagaggaggccgatggatcgagccagcttccgcttcgctgctgaggtggtgctcatgagcagcgctagctaagctagtagctacttgatggcaatcactgaatcacaggcgccaatccgcggacgtcgcttttgacgctagctctcattaatcccatgcatgcagcgatgtgcatgtgcgaggtgatgtgatgtgaatgtgatgccccgcacacatgagatgccattcaataataggaacccccgggcgtcttccctcctcgccaggaaaccctcctcaccgttgcaatatttgcttggcatacttccaatccttccttatatacgtgaacgcacccacctaatcacctgatacctagctgcctgctcgtggc

SEQ ID NO: 153434 - DNA, 360 bp, Zea Mays
ccaattcgcgcgttgttctcatgtccctgtatgctggtgatgctctccaaaccgtccaattaaactagaagcccaccaatcactgggaacacgaactaatgtccatagctttcgctgtccccatggacagagtacgatagagctccaattcagaaattgagtgaggggaaatactccttaggggtagaatcaggtgtgaaccaaagtttagcgtcggtcttcgccctctccggccggtatagctcgccggatttcggcttcccgtgtggagcttcgtcgaggacctgacgcggtgaagaaatagaaacctgagggcatttctgcaatgtgtcagcgactgtgttaaacagtggaaggacc

SEQ ID NO: 153435 - DNA, 432 bp, Zea Mays
aaacagggcaccgctccgagctcaccgatgtgatgtgcataggtgctagtggtgcactaaatcatggacggataggtgcaatagacaatacgaagtaggacaaatgaataaatgtagcaattaccggtaaatccacaacattgaaccccagccacgacaacacgcgggactgcgacggagccagtactccagcgagcaattcactgatcaccgatggtctccgcggccaagctcttgcttgatcacaaaccacgcacaccggcggttctccttgacccctccacagacaccgagaggaggcagagatgacggaccatggtggcggtttcacctctcccattccaagcggtgcgatggtgccacgggttcccttcgtctatggtgaaggagattgcgtggcctagcttttacacaccggaagggaccaagtcc

SEQ ID NO: 153436 - DNA, 586 bp, Zea Mays
ctggactgtgtaggtcaagcctgaataagtttacttccaaattggtcctaccatttgttcttttaagttgacttatgacttcttgagttcagatcaggggcagattcaaggggtgggcaatgtgggccatggccccaccttaattttttttaatcccttatacctaggtttaggtacacaccaaaataaacaattttttgtatagttagcgtggacaaatctaatgaaaactaggttttgatctatttttctctcgacgcttcactgctcagtccactcttcacctgagccatttgattatcttccctagcgcaagctcactcgtggctcactcgcttcttcgatcatcgacagaccagtaagtcggtaacctaacccgccgttgtagcgcaccttgccttctcatcactcatcagctcgtcgactcatcgggatcctgcacacaacgttgatattttgcctcctagtctgcaccagcatatgggcaagctattagtgggaccatggcgtcacctgtccctcgctaactcattagagtcccaccgcatcgttgcaacacgacaataggtgtcgcttgccgtcaccg

SEQ ID NO: 153437 - DNA, 603 bp, Zea Mays
catctggaaacctagcccgaatcatattatagtcctcccaagtagttgctcctactggcaaacctgaccatttaatcaacacttgtgtaatggccgcccctcccttcatgactagacgtttgtccagaatatccattggttgaacatcttcctgtcccaaatccaacacctttggtaattctgagaacactgacacataactgggagtaaatggtttgagttgtgacacatggaaaacagggtgtatctgtgcatcctaaggcaactgaatcttgtaggccacttcaccaatcttctctaagacagtatagggaccaaagaacttaaaagccaatttaggacaggacctatttaccactgaatgttgcacataaggttggagattaagcaacacttgctcacctacctgaaattcccttggcctcctcttaagatcagcaaaatgcttatatcgttgctgagccttcaacaattgttcctgaagcatcactctgtgattatccctctgattcacccattgcatcacatcaatgtcttctgtgccctgaatatgaggctcagccaacacagaagcttcatatccatacagtgccttaaaaggtg

SEQ ID NO: 153438 - DNA, 329 bp, Zea Mays
ccacggcagaatgttctgcacgatcgaacgactatggacgaatgcatggggtggggtgaacatgaaaagaatgtgctcctagctagaagtgcactagagtactggaaatgccatggaatggagaggagggaaaacgattcctggactccacactcctccactgccggccgggcaaagtgtgcagcaggggggtcacacacaagtgctttacctcccaataattcgaccaaagcaatgcaacaggagctatacctctactactacaaagcaccaataatttccacttttttcactgtcatcgtgagttacgcgtgaaacgtgtatgtcta

SEQ ID NO: 153439 - DNA, 803 bp, Zea Mays
atcttgatctcttacttgcaagtttcttaggtgacatggtagatgtggctagcccgttcccttacacatataggataattgtcaggaggagctggtagcatctaaaaatttcataggtgtagtggcacccatgcacaaagtatgtagtatcccatccctaagatttcctaatataatcctgcatcaatcgcaaggaccactgtatctagaccgttcatggtagagctataataatacaacaacaatggacttttccaagacactacgcctataggccatgtggatccacattgctagtcagttagtacaagttaccgaagattaccttccctcaccacctgttggagtcgatgatgatgtgttgcttgctggggatcccatggtcgctgatgctgtccatcgtgcatgcttcgaccttgattgcctaccactcgcacttgtcgtctgtcatcccttccgttgcactgccttggtatccagatctacttgtgtcatcgccacggggatgggatgtcatgaggggcgcatgagtgggtatgattgcggaggggagggattatgacgattagcatgtgtggatgcaaagaggagagagagagagactatagatatgtgactcaccagactactctgtgctttctctgcatacgcatccacacgttgttgaagggctaaacagtgtggccgtcatggggaggtgctatctagggggtgcataagaggaaacggttgtggaggggagggattgcgatggttggcttgtgtggacgtggagaggatagtgttggaacttgctctcccaa

SEQ ID NO: 153440 - DNA, 865 bp, Zea Mays
atgtcggctgccgtttgctggagcaatggctttgaggagtggtgttttgttgaggaggcagttgtgattgtgtttctgttgtgcgtgggccagtaagctgggcaagcatagcggagaggcataggagctgagcagttgaaaatgcagaggacgtctgggaggtggtggtgttggcttgttgttgggcgttacgcaccgggctagcattttgctgttgtggaacatgaggtagagcagcaggcacctcagatagcataggaggcgcaggtggaggagacatatgctggaaaaaacgtcttaggcgaccatccggcccaagctggtcggcacggggccaaacccgcagcggcaagacctgggcgatgcatccgcccctggaaaccccatccatggtcgtgacccaaatttccgacggtagatcaaggtagtggttcagttctagcagcacccggattgggccaaagttatcacctgtgaggcatcgcgggtccacttctgccacttcacaacaggcaccgaaacagcgacgaattgaagcctcggaccaatgctcggttgggaagtccacaatcatagcaaaagcgagccactgcggctgcctgaaaaatctgttgtctgtctcttccggacattccaactttagctgcagaccatcagcaagcagcggactcatgagtcggacctcatctctatcagctctggagtaaaaatgaagaagcttgattccccgcgaagatggcagcatctggaactgaattcctggggcagccgtacgcaggatattttggatgaactcctcagctgcagagagaggcaggtgttgatccagatatgcatagatgagcttgtcgtttgtttcacggca

SEQ ID NO: 153441 - DNA, 293 bp, Zea Mays
tatcttccgatgtgcatgagctggctaggcgtcagcgggagactgacgacaacctccgtcgtcaagcttcttccatgggtatgccatttgctccccgctcgcctgatgtgcctcttcatcctcctcctccagaaatcaatgaatggcaccagcaggcctatggggtgccctttatgtcagctgaagatgaagatgaagatgaatatgaagaatactttgatgatcgtgagcagtttgccccgcctccccaccagggggatctgggtcaatcctcttcgtatcctcctccccag

SEQ ID NO: 153442 - DNA, 2908 bp, Zea Mays
agctatggatgaagtgcccacaaaccgcagacggctgaagtaccgccaactaaatggatctgtattccaaagcttcagaccacttatgctgaatctgtatgaaaagccttcgtcagaggagaaactcgtcacaggtggccactcaaaagtgcgtatatctgtgaatggttcacctgaatcggatactgaagagagagataccatggtagacacgtccgtcaacatgggcaaaggcaaggtcgctgttcgcaagaacagaccagtttctgaagaagcactgtcacgttcttcagatgctcggtcagctggaagcagcaagggctacaactccgaattggatgtctacgtggacgcattaaccacggtggactctgaagcggagacagactcggaacacaggggccatggacaatgtacctttgatcggatggattcagacaatagattctccaatgctcaaaacgccatgacatcgaggaacagcaacttcgacaagaaagataggccagatgttccctcagcaaatagagatatgagtaaccagcatgaagaagccacggtctccacacaaaacaccaaaccagtggttgttggcgaacatgagaggaccagctcgttagaggaactgcttggccaagaaaaacctgcttcttgggatcatgagaggactagctccttggaggaattgctcaccgaagatttcaatgctccagaatctggagcaagagagcaggctactgaagagcagagctgcaatggcagtgccaccggtgctgtatcaaatggcacacaagatattactaagaagaccaaggaagtcaaggagaactctaacattgcaactatttccttcaagaaaatagcaagcaagaggtccagatatgtcggcagcatggctgcaaaagttggcattctgccaaggaaactctccaagaagcatgaccctttctctgattccctccggtgcatggcgaagcaactccttgaactgaagtacgatggcactaaagatagcgacttatatgactttgaagcaaacagtgtgggatgtgatgtcaagtatcagggaatttctgaccctcctgttgaaattaaggagagtgacgtgcacaaatttctgccagattcatcctatgatgatgtgggttcaagaaaatgcccgcaggaagaaatgaaccatgggcaggagcatgatgctccacctactgacagtccacatgattcagtccctgatgaaggaaacggatttcaggaccccaacatgatctacttggcaagcatcatcacatcttccagttcccaagaggaagaaggatgtgcaagtacttcactgcatgagaattcatctatggcagtgctcaaccatattttggagcatgctcaagagaagtttgaggaacatcttgacaaggatgtgaatgaggacattcatacagaagtcatttctgaaaattcatctggcaagtgtgaagacttgaaagaagtcagcatttactcagagcaggtgaatgtggaagatatggaggaaagcaataaatctgatgtatatgtgttggatgatgaaacagccgagtacatagaagagcaagtagtttcagatggtatgaactcttcaccggtttcatccaagcaatcagatgatccctgccggataactccactcgccctcgcagatgaagatgatacagtggcatgtaaggtcatcgatagccctgaagtggatcatattacattatcagaaacattcacggacattgatctacctaatgtggtaaatgagtcagtaatcagcagcgaacatgccatgccagaaaatgaacagtactatttccatccagaaactacttttggacaagatctgtgtctcgacaacaatgaaattgtaggggaaaatggggaagttccactatgcagctcaaccactgtggctataactcctgaaccaactgtaaacagagagatagaacatgagtttcatcaagctgtgtatcaggaaccatcgaattcattcaatagcagtaaagtttttggagatccactagcttctgactccagagatgttgcaccgtcagtcatctcgagctttgattggatgcttaatggtgcaatgcagcagtcattcaatgtctttccttctcatccaactaatggaaatgaacaagaaaatggttcttctgaagatgcgccaccacttcctcctcttccaccgatgcagtggagaacaaacaagatacagacatgctcatcaccgttatctgcaaagatcgggagaccaccaaggccaaaacctccagcaaaacaacaagaaagtgaagctgctcatattcttcaggagaacaatctccacaaaggcttgagtttgcagaatgaagtagcgcaggcaactatttctagtgatcatgagacaaatcaactccttaacatggattttcatgaaaaccatcaccaggaaggagatgaatatcatgcccaggattccaatccatttccctcgtcagaagctgaatgtttggcagaaattgattcagtaaaaagtgaaaatctgcacccattgcagctacctgagcttatagttgttccggaagaggcatggtcagagtttggtaatataaaattcatgccagaacaagaaggaaaactccaactaaacaacggactttctggtttggcagcacaaaagaccagcgggaagcctgatttgtttgcatattataaggaaaaggaattatcatttgcaggtagtgacaaagttgcaaattcagaagaaaacaaaccaaatggtgctgttaaacatatgcaaaatctggacttgccagcacaacagaaaaacgacaaaaatgattgtgatcgcaaggcagaggagttttcctctgcattagaggatgaatcatcaaaatcaccaactcat

SEQ ID NO: 153443 - DNA, 610 bp, Zea Mays
tgagatgtggtgtgtctgtgaggatagccacaatttcggtggctgccttttctaatccctccaagactttcctcagcctcttgagtgtgcccacggtgagtaaaattctttcacagtcttacccacgacaccagcatgtttaacggatttgacaaacttatgcttcagtttagcagaagaggagccccagtcactgaccttatgatcctttgccttctctctaagctcatcgtagtgaagctcatctataacatcctctgcctcctcaactgcatccctgaactgccacagccaaagatcaagggcagagctttgttccttgatgtattcagggtcaacgatatcaaatacaacctggaccttcttcactgactgcagcaccctacccttgacatcttccaagccatcagccttccagtagtcagtcaggcaggtgaaagctttgttgatccaaaaggagatggttgcatttgccaccgagctcccggccaacttcccagcgaacatgattgtggcggcggcggccatgactttgtgcttttgtgagggaagatatctgaggagagatcaaagcatctgaaagttttgcatgtccagaagaagcactgca

SEQ ID NO: 153444 - DNA, 4016 bp, Zea Mays
ctctgatccacacaaactgttcagtgagtctcgctcgttctttaacctaagttaatctggtgcctgctaatgttttttatcccaccaatcagtggtgccttcgcttacaagttgcatgtatgcaggatttttattgagaacttataccatgttgctgctcttttgttgctgatccgagacattaggtgggttcctcctcataaggtgcgtgttcggttcatcaatctccttctatcctacaacaaagtagacattaacctagccaacattgtctattggtgacagaaagaactccagcatcccttgaatttgagaaagacaatttaagttgttgaaatagaaatattgatgacaagtcttgtatggtttagttgtgtcttttaactcgatactaaactttcatatttgtccattgaagtatgctcatcatgtttccagacttttttataattataatggttatactctcatgattatttagataattatctcatactatttattttcattataaaaaaggggaatcatttcttagtccaatgtttgcttgtatgttcatgttctgtagcatgatttcttttttgtgccataaaaattccccattatataatgtttagtattcgctaaataatgacttgaaaacaatatgttgcagttcagtagaatatgtatgtccacaattattcaactaatgtgtgttgaacatttaaatgatcctaaacaccattcttcatcttttggaatgtgttctctatcgagacacatgtcctgagaaatacaaaacccattttctatatatagttcaccttcatattttcttctaatgtttattttttgttcttaggaaggacccctttggttggcagttttccctaaaggcactgattttacgtaagatatcttcccattctttcttgccacatgtttgggtttgagttatgctcctctagaagaatatattaaatcattcatcttcatagttacgacttcttgtggggaataacaaacaacttatatttcagagtccaaacttttggtttcttgtagttctgctctgtcgacagaccctaataaagttagccttgttttgatgttgttatgtttacatgattaatgtcatatttagctaccgctggctttgttcttttagaagctataggattgaagaattcagaaccttggggcaatctttttttggtatttctatagtctacccaagctgttcataatcaacatgcagaaagatgcatcaacatgtcaagtttggttatacactttaacttgcaagggaatccaacactcctaaatttggttcttttttagagcaccattccaatgtcaacccatgataggcacaatcttctgcaaccagttatccaagtaaacaaaagcacaggttccagaagatagcaaacattatcgaggaatccaatagtttaaatcattgttctatattttatgttataattgatatttaaatatttgatgtgacaccagctaaactttattgaggagaaccaaacacccttgacttaatctggtagtttaaatatccaagtaaacccataaaaagcacaatcttcaccaccaatagtttcactgttctatttcccaaactgaattgaatacaaccgagctctgtttgtttgtttgttcatttgttttttcacaacgacgaatcagaatttcaattcgttaacacgggtaatgttgatgaaatcaaagaatcagaagttgtaacgatttagtgcccaacctcaaatgtcattgttcatgtcattgtgtttcaccttcttgtgcatgtcatcgtcatcatcttcgtcatcatgcatgtacttcattcatccaaacactgataaccaattggattctttacgttgtccatgaataatatagtatgtttgatagagtcaattgatattatctgcttacaattttgttttctcagagttaattccaagcagtgtagactcccaagcattagggttgccttttcttcttctgcccataggtatggagcatctatttttacaaccttgtgttgcttctagtttattgtctttccatgaattatgtctagctttgaacttgggaaaattgcgggtatttgttgtatataaatgtagcactcatacaacttaatgagcacctaatggtaatagggtgtccacttaaatgaaaactatccacttaacaaggtatatattgtcggattcccttgcaagttaaagtgtataaccaaacttgacatgctgatgcatctttctgcatgttgattatgaacagcttgggtagactacagaaataccaaaaaagattgtcccctagcttctgaattcttcaatcatatagcctctaaaacaacaaagccaggggtagctaaataggatactaatcatgtaaacctgacagcatcaaaacaaggctaactttattagggtctgtcgacagagcagaactacaagaaaccaaaagtttggactctgaaatataagttgtttgttattccccataagaagtcgtaactatggaggtgaatgatttaaggtgaatgatttaatatattcttctaaagcagcagaacccagacccaaacatgtggcaagaaagaatggaaagatatcttacgtaaaatcactgcctttaggaaaaactgccaaccaaaggggtccttcctaaaaaataaacattagaataaaagttgaaggtaaactatacatagaaaatggttttttatttctcattacatgtatctaggtaaagaacatattccaaaatataaagaatggtgtctggggatcatttaaatgttgaacacacattagttgaataattgttgacatacatcatattctatagaactacgacatattgtttccaagtcattatttaacaaatactaaatattatataatggggaattttatggcacaaaaaataagaaataatgctacataacttgaacatacaagcagatatatagtggactaagaaattattccctttttctaaataaaataaatagtatgagataattaactaattaagcaagtgagtataaccattataattacaaaaaagaagtctggaaacatgatgagtatacttcaatggacaaatttgaaagtttagtattgggttaaaagacaacgaaaccacacaagacttgtcatcagtattttcattttgacaaattaaactgtctttctcaaattcaagggttgcagagttctttctatcaccaatagacaatgttggccaagattaatgtctactatgatgtagggtagaaagagattgatgacccgaatatgcaccttatgaggaggaacccacctaatgtctcggatcagcaacaaaacagcaacaacaaggtacatgttctcaacaaaagtcctgtatataggcaacttataagtgaaggcaccactaattggtgggagaaaacattagctgacacccagattaactcagggtaaagcacgagcgagactcatctgatggtctatgtgaatcggagggtctcaacaaataggatgttggaagcggtaaccttcttacaccaagagcggtggtagcggtgcgtggagcgtaggtgggcacggatgcgagtgtgtcatgcggagcgtggttggcgggcgtgtcttgcgggcacaacatgcgtggatcgcagacgagcgaggatggcagacgcgtcatgaggatagcgcaggaaatcgcgacatgcggagagcacgggcgtccacagatgaagcgcggcgaggatggaagggggcgtagatggtggcatgggaggaggatggaagggggacacgaatgacgagggcaccgaggatgggagcaaggggcgacaccgaggacaggaaggatgcgaggaggacgagggcggggtcatgggctcgcctgtgcatgactcccttggcctctaaataatagtagagatagagactaggtatgtgccccatgtgttgccacatgaattaaaaaatagtataaaatatagatatataacgaca

SEQ ID NO: 153445 - DNA, 721 bp, Zea Mays
gcaatgtaactttgaaataaatgctactccgatgtcaaacagaactagcaatctgtttagtgagtgaagaaaccaagactagaaaccatggatgaaaaaagcacaaaaaagtgcttgcttatgcagctaagccactcaggagaggcacagtgatgcaaggacacctaaaatgtgtactaggcacagatgcacagtaactttggcaaggtgcccatctttcatgcttaggcacatgggaacaagcactcactttgtgctgctcttcttttgatctgctgtgtgcttgtgttatgtcatatgtgcagtgatggagtgataggaaatgtgtggctgcacaaactgtggttaagatgaggatgtttaagtgaagctttccttcaatttttgctcacttttgtcattgcaaggcggcgttcatttatgagcagagagcaggtgctgtttcatggtcggactctcttacatctagcatgtgtttctcccttcttattttcccatgcagcgcaacacatatcaagcaaagcaatgcaaattaactacaaagctgcagaaattataaaaaaaaaacagagggttgaggtgaccgccatggcaggggttgtcatgttacaatattcctggtaccaaggggttgaggaacggatacagggatgcacggatcgacacttcacaagtttcgggaacgatggggcgggacgatggtttgaaacatggaacgtga

SEQ ID NO: 153446 - DNA, 604 bp, Zea Mays
tgatcacaggcccacaaggaaaagagaagaagaagatgaaaagatcagcaacttgtagtgttaccgctccgctcccacagaaccaccacccactcatgctatgaagatgcaggaaaatggagaaaaaagaagaacgtttcaatggggaagaagtgaagggatagactctaaaatttagaattagtacgaacaccaaaaggctgaatttgttttatatattcagttaaggcatgtaactcgtttgggtaaaaaaactgttgacaaaaagatcctgctgggacaataaaaagtaaaacaaaaactttttgaacggatagaaaaagtgcatgcatacatttatattacatatgtcatataagtatcaacgtagaaatgaacgtcacttagaacaagtgattttatttggaaaaatggtatggactaaaacttgacattgtttgattcaggagtcattgcaaattggtggtacactttttgagaacgagaaaaaaataaagatgcttggtctctgccattgctcctccgaacatccaacgataacgcgatcagctaaattggaatatttgggttttgctactggacaatccgtggatcaatattctgg

SEQ ID NO: 153447 - DNA, 459 bp, Zea Mays
tatatgtcggttttagtgaggacgtacagaaaaatgtcaacgccgcgttagaaccaaaatcaaagaaggtcactgcagacctgaagcctagcaactaagttgtgcctaaaaggtctcttcagccaaaaccccgcaagctcagttttccattgagaagatgcctggagattgcagggtggacagctgttgatgaggttccgaggtatctgctgctttttagacaagattaccctcttcctttatgtggtttttgctcaggtcatgctcgtctgttctttctctggcatcaaccatttccttcaacaagtagattttacattcgttcttctctaggaggactatatggcatactgaagatccaatcagtaaagaaacatatatttttatccttcagcctttggtatgttagtttcaccctctttaaaaagttcattttcaagtaattgtcacagatttcct

SEQ ID NO: 153448 - DNA, 641 bp, Zea Mays
ccttcggagaagcaagagacttcgtgatgctcgggctgggttcaggcagggctcctgccagaaaaagaactgtttgatgtgtcagcacaagtttgagggcccccctccctttctgccaagaacatcagacgcctaggggaaagattttgtaacctgtcagaagaggacctatccgatattgctctgaagaagaagaagaatccctctggttgtgtgggctcagataagcccgaaaaaggagatagcggggatcagaatcaagattccacagatgaagacaactaacttgatggtgctgctccggttatggggattttgcaggacttcccttcgccaggctttttggctgtttcggccctggcgcttttggctggttgttgtggcaacaaactttgtgatttctggctgcgctatgttcagttctaacaaacactatttcgcccaccctgctgatgggtttgggtttcttttcgttgacaaaccagatcattcccatgatgaatagttacaactctgctactttttctgattggtctattttaagttttaatgttcgagggatcaactcggtcgttaaagggaatggtactcattgcgcgattagggattccggatgtgatattgtttgcttgcaggagact

SEQ ID NO: 153449 - DNA, 436 bp, Zea Mays
ggcccagagcctttcgcgaggtcttctaaccttgtagtggacccgggggatatctgtcccccacaacacccacatgccacattggcgggtgggcccttggcgatggcctccggtgcagtgtgggagaacagggttgacatgtagcctccacctcgagggacttcacgtcaacgctccccttggtcgtgactggctggcgtttccttcagtcaatgtgaggcaaaggcctcggctatcaacgacttgtggttccccatcgaattgaaggcccctccacttgcgatcatgtgtatggttagtggaagatagaaagtatgtccttcactctatgatcgatgacgtgttcggccttcggctgcttggccatcccaaggcattcgtatgatgtggtccttccgtggcactgtcagcgtaaggatgccttcgctaatggccc

SEQ ID NO: 153450 - DNA, 926 bp, Zea Mays
gcgccgctatatatccacacggcatggtcgcccggatcatctcccctatcttcgcgcgcgcgccttcttccaccatccgaagaacccaactgcatcctaacagctcgcgcgtgattccggtcgattcctccgtactagtccgttcaaccaaatccatggtggctacaccttccaccgtgttttcctctcgcctctgctagccgcaacagattcttcccctttaaatagctgggatcggacctctcgctttgcctcgaccgtctcttgggcgctgggcgtcaccgccaccattggggtagtcacaccgaactccatcaaagagagagaaaggaccaagctcgccggtgaccttcgggttcgccgctggtgcaatcgacgttggtgcgcacggctccctcggctggcgcgattgggagctagggtgcacgcgatttctcgccggtgctcctactccgccgcaaacccgctgtccgccgtggaacaactttgtggccgcctaaaccttcggtacgttacctggtcgacatgctccaagtctcctgctccatgtaatacggattgatgtgcaatttcgtcgaactagaatcgtcgattatggtgccaccgtggtcggggcatgccgccgctgcaaatcggggatgtgctgccgttgctgggggcggtaggagcgtgggccgaacatgttcattggatacgcaatcgacggatgagattagagataggcataatggttcgcgtgatcggggtgtagccatcggatggagatctaaggatgcggggggagagagagttgttatccgtagatcgtaatgaacggagcggattagatcgtagtcacattaaatcctaggcgcagaaatttgatccgagggctcgtattgcttatcggttcaagtggggcggatttaatctatgcccttgtttcc

SEQ ID NO: 153451 - DNA, 285 bp, Zea Mays
tcaacgcgctcacggtaaaggatgccttccccattcctgtggttgatgagttgctagacgagctccatggtgcgcggtacttctctaagctagatctgcgctccgggtaccaccaagtactcatgcggccggaagacgtccacaagacggcattccgtactcatgacgggctgtacgagttcctgcaagacatgggcggatcaccttcatcacctccgcgccgtgctcgacgagctgcgtcgccaccacctcttcgtcaagcgcacaaagtgtgcgttcgccgcc

SEQ ID NO: 153452 - DNA, 2806 bp, Zea Mays
aaaggctctaaagaagactttcaagaaactagaccacgatgtaaatattcaagactttctaggctcgcggtaattctgtcattttaaaaaaatagaatgctcgtagcaacatatagatgactagttcgaaagaaatcgctaacatattgtttctaaatccactgcagggttcagacagtcgaggtagaatatgatgagtcgacaactgaaagcgagttatgtgatttcatttttccccccccttcatgtttctaatgctatttggatttcaataatttgacaggagctatcagcagagcttgtctcgttgcagggtcaggtggcggagcttcaaaagcgtgtcaggtgaataacatcagctcataacatattcagcataaggaactatattgataaatgctgtaggaatgcatatctcttttgaaatctttccacttagtgtcgctgtgattttcctttcatgacacatgatcctgttaaatgttctccacgttgtgaatctatggcattgattagcctgtcacagaaataatgggcaaaccaaaaaaaatttgagagaagtgtaacggcaaggcgatttgttttgttcttcagtgattggagcgatcctgagaaagttgacaatatcgacaatataagagcaatggagcaatctctcaaagaaactattaatcatatccaaatccataaggtacacatctgtaaccttatggttaactactttataatctcaatatctagttaacattattatctgaattttcaatatcaaatcagattagttctgacctttgcatctgtttgggtctctgcctctccaggggaacttcggaaagcaacatctaatcgggctacagtatgctgctacccaggtaactaactaactaacctaccacagcttcaggtgcatgtgacatgagacgttaattttgttcagattaagatgttgctttcctgtcatgccatgtttcagttccagaccgacatgcagttgcctctaggactgcccggcgagtcaggcccttcgtcgtggttccaaaacggcggcgctgatgggcaacaagccatgatgctaacggacgagtccggcctgctccatcagaggtgaattcaagctccgagttgtgcattgctctgacgaacaaactgcccttcgtcgttaactgacgacgagcaaactgatcttggcgcagagacattgcgcagggctatccaagctacttcagcacggtcaagcaggatcccgacaccggtggtagcagcagtgatcacgggcaggtggtgcttcaccatccgcagccgcccgacttcagccagaccgagtgcctgacgtcgctgcacctgccgtcgcagcagttcccgtacccacccttcgaccaccacggcctttacagcgaccgaattttcaggccagacgcagttgagctgcacgccggcggcgtcgccagtatggactttctcagcggtcagtacgacttgccgaggcctggcgatgatgccagcttccataactgggcgtcagctgcagcatgtagtgcaaccatgttcgaccagcaacagcaacagcagcatcagcatcaccagcaaccacaatcttcacctgcacaagtgagtgcataattacaaaaccaatctttcgactgttcgttctgccgcatgtgaacttgcttatctatctatttgctgtcacaagtttatagctccgctgaaacattttccgatacatatttttttttctcatctcacattagttgacccatttttatccatgtttattaagacttaattcaatccacagtccatatcaaactgatttaagttctgagcaattctatgggcgatgagagctttccaatcattgtttaaattcatttattaaaatttaaaatcatgcagaaagaatgtgcagttatgatttttttttttttttttgcctttggcattatatgttttactgatttcggtatctcttgtggaccatgactgaatctctaaccatcagcttcctgcagcaacaactctagcaactgcctcgttcgatcacgccgtttatcacagttcatctcagcaccaacaagtcatgatcggttgatcctatatatggtaaaaaaatcggagataatattgccctccaaaaggtgctaccctaaactaatcatcaatgcaaaatgtgtataggcaacactgtcgatgtaaaatatatatttattgtagctaattctttcttgtaagtatctatctgtctcctgtatactactggtatagctttcataaaaggattgggcacttaactattagttcataggcattcatctttgcatgaatgaatatatttgaaattttggccaccatgcatggcctttcctttattgtactggttcacttgaatctctctttttaatataatgatgatatgcagttctcctgcatgttcgagaaacaattaccatggttaaaaatgatattgtggttttctaactcatttctatacgtatggaaactaatcattgtattcatttgtcagaacagtcagttgcatcttggaaaaaaaggagaccaactagaatataatgctactatagtatactatgaggttctacggcatagaccaatgcaactcgaatcaaatatcaccaggagtgtgcggtcaacgagttagctagtgtacactgtacactcgtaaacaacaagttccttggatttactacacccgtaggaagctcaaatattcagggacaagagttttttttattattttggttttttattctttttggttgggttgttttcaccattttttgtaaac

SEQ ID NO: 153453 - DNA, 1169 bp, Zea Mays
aatagtatactgaaaaatgcaaccaaacagctgcagcactgtctattaggaaatacagtgcaaatgttatgacaaagaccagcaacaaacaaataatcaacaattaggtaaatgtatttgttgacagaggctctacatgatggtagatagaagtatgcattagcaccaaaggagtggaggatataacctatgaagcaaacatgaacctcatgtaaaataaaagggaacttgtcactaacaaaataagaaggttcaggttagctggttacagattcaccaaacatttcttcttgaaaaaacaaaatatatatacatatatatattcatacactgcaaagacaactttactgaagattaactgcgatcagtgaatgataagcactcattaatgtgccttttctggttgataatttgacctatatcaaacataagtggtattaccacattggtttgcttattaaaagtgcatggtccatgtacatcttcagcaatcagcacatttacctgttggacttgttggtgtaatgtgtcaaactgatctacagtacaacagacatcgccagtgattgttgggcacaaactttggatccttgaagaaaacaatgtgtctggctggaaaaacaataaaacacttgctaaacaggccacatttgaataatcataaatatttttcaaagatatagggtttctttaactatgttatattcaaatcaaggtccaaggatcatattgtcagtttgtcaccttaacagctttggttgcatttgcacagtttaagaccttcccgtcacttcgttgtgcacaaatgccgtacatggaacagtaaccttctgctggtacaaccctacaaaagcaaaatggtaagatagatgaccaccaagggctccaggaatatggaacaccaagtataggcatgtaaaatagtaaaatacagcagcatattctagaagcaatcaagcatatgttagacttctgacctacaatcagtataacacaggtcactgacaagttaccttgagccattggattgctgcgcactgatcgggaacagtagataactgatctgcaccatagtaaaaataagttagatgttatttagaccacccgaatcacagtgaagttcgaccatatcaacacgcttgtacaatgtacttttatctatatgatag

SEQ ID NO: 153454 - DNA, 380 bp, Zea Mays
gaatgatgttgttgaaatagatgatgctgcacaggttgggtgtaagaggaagttgaagtctaaagtatgggaggattttgttagagttactgtatctggtaaatggaaagctaagtgcaattggtgtagcaaactattgacagccgaaggtaaaagtggtaccagccatttacaaagccacataaatacatgtgagtcacaacaagctagaaaaggcctaaaacaatcctccttgaaattttcacaaaatccagatggcagtgtttgtttagagaagtatgtatttgatcaagatgttgctaggaaagaacttgcattaatgatatgtgtgcatgagtacccgctgtctatggttgaccatgtaggctttagaaagtttt

SEQ ID NO: 153455 - DNA, 615 bp, Zea Mays
tagcacggtgggcaccaaatgttggaactcgctaacccgtggtcatcctagctcaaacaatgggagaacaggaaatagtttgataacgcttaacacacagtattagggaaacagtgttttctgtcccccataatggtgttgtacgggggtatttataggtaaccgagggacagctatatcctgtcaaagacgattgtgccctcgactacctacgttatccccagaatattccccttcgggggttatggtgggtcattacagcgtgattaattacaagcatagacatacacactaacaactctacccttatagcggcttacaagtgggaccctgtaacatgggccggttatacgtggccccttattacaataacgagcgggtaacaacacatggtcttcacgttccacgtgctcagccttcggaattctcggcggtcttcgttctgacacgtcgagacggagggagtactcaagccttcgcgcactctatgcactccctccatagtggagctctcgctctttagtcttcacgctctttggtcttcgcttgaatcccttctgacatattccgctttttgccatgtagtcgatcgagcaaggaggcgttgcgccttcg

SEQ ID NO: 153456 - DNA, 863 bp, Zea Mays
actggaatttcttctcgtctgaatcagagaatggataaattggggaatcttcctattattgattggattgggggagttggtaacaaggtttcacgtatccaggagcgtggtttttccccaacttataacatggaaaggagtagcatgcatgggtgcgggactgaggtgattaacaagcgagctccacccaagcttgcaaaggaatccatggaggattttctagatgctagtttggtcagggagacgatgatggaagggacaaaggaggaagtctgggagcgggaatccatgagcgggttaccgacgaaaaaaggcatgtcatcggcccaagtgtttgggcactcctggaggcccatcaaccccacgtggtgctgggttccaagaagcggaatccacactaagtcatgctaccctgctcgaccggacgaagtgcgtaggcttcggctctctgccaagtccgtgtctagggttagacatcaatccttggaggctcgttcctatgcccaagtagtgagggaaggcagaatggcttggaggagggatcatggagggagcaattggaaacggcgccaagatgaatggatggaggaagatgaccttctggaaggggatccctgcagagaacaagatctgcgcgctaaacttcagaggggatcaggagattctactgacaggatcccagcagagcaggtacgtgccatgccaaacattagacctgcgggtaactttgggaattggaaaaagggtcaaggaggccgtggttttgctgccaggggaggctttggaggtcgacggggtttgggacgctctgaatttgatggtcaaggaagtagacagtttgagacaaaggaaaaattccgtgg

SEQ ID NO: 153457 - DNA, 342 bp, Zea Mays
cttattctgtggggaggataagggacacacaacaaggacgtgccaagtcacgatccaaaagcagaaggaaatcgttgaagccaaagcacgacagaatcagccgaagcaggtcttgcatactgcctcatgctattcgccatatatccctaaatatgtgggcaaccagcaacccacgacatcagttgcttcggcaagtcattctcaagctgcatgggctcagttaccaccaccaccactggcgcctaccttggttcataatcagcagccagaagggcatcgccaggcgcaacaacagcgcgacactcgggaggagtccgaagctcgcacagtcaatagcattgt

SEQ ID NO: 153458 - DNA, 312 bp, Zea Mays
ctgaggttatgttgggctaattactagctaggtaattttagttgggtctaataaacggtctaaattttggtagcaaagtctccaaccagttggtagccggtcatatctgatttcagctaatttttagccaaattagcaactagccatgtgaaaaaagtgaggtacatgttttattttaatttagagatgcataccttctataacatttactctttacatttgcagattgagtagtcaatttttaacactgttttctgcattacgcaacatacttctatagtgttgatatgccattttgtgtccttttaagac

SEQ ID NO: 153459 - DNA, 767 bp, Zea Mays
gattgcgatagacctgcgcacagcaatcgataagcttaatgagagcgttggtaaccgtgtccagttattcgaagcatatattctagttcttatcatggaaaaaaaaaagaggagtatgaagaaatccagtggtagaccgcaggtagcttgtagcggttctctctctggctgaagtagtaaggaatggaaggctgcacatgcggagttttgcactggataactaactccacgtgctattctactactacctgtccaacccttcacaaaaaccctaagtaacaggatttgtattctttaagcattagataaccacaagctttagaagccggtaacccacctgtcatgagctgccaccagaacagagaatatgtgaatgcttacactagtctatgcaagtctttgggcactggagcttaaacggcacgcacccctccccatgtgggcagataagataacgacgtccctgagaatggggaaccgacccacgcccctcttctcatgctgcacccaccggccaccgacgctggagtgaattcaccgaccgtggctcgtttcgccgtcacccagaaggagacgtgtagctcgcgctgaagagattggatgtttgtttggtttgatggttcgttttggcgctgcctgccactgcagtctgcagcacagtgatcaatggcgtttgatagcagcctattgggggatcccagacctggtcagtccattttatttcatcaccattcatgggtgttacggcctgtttggatcaaccagag

SEQ ID NO: 153460 - DNA, 954 bp, Zea Mays
taggcctgggcctaatgggccttaacacgtaggatgtcggacaatcctccccaaccttctgttcccccagcgacgagccccatccctgtgacctctagggcagcagctgccacaagcacgtcgcccgctgcgcccgtgtcacaggactccttcattgtgttccagcagcaggtgttggactcccagacattgatcatcaaccacctgtcggcgttgaccgcccggttggggcaatcgaggtgcaatccgcgtcggcctcgtccatgattgatccttcatcatcgtcccacgtcttcccctcgactgcgcaagattaacctatggccctcccgactatgggggcatccaaaccgcacccgatgcgacgtcctccctgtcacttagaggtcaagtaaccctttctatataaggagaaggattatatcaattgaaggtaagcagaagattagaaagaaatcctttctctcttgccgacagtgggcaaagccctgcgaccgacctccccagcgccccatccttaatcgttgcgccacgtccccaataggatctgcaatcctatgaacccaccaaatccggatccctaacagtctcactggggcatgcccccaaaataaattttgttgcatcctcacgtgatgccacgatgggtcagaacaggatgcttgtcatctatggagccctgtgtgactaacaacctcactagggatgttgtcaagctgtgtgtagttgtaggtcttgatatgagtgtgtgtgcacatgttcagatactacaactgtacccaattagaaggtatcaaaaaatggttcactgcaacctcatctatagatagttcaattatagataactaaaattaaatatctctgatatttagtattatccctattcaaaattgtaagccatttaagctatgtcccaagtatatcattttgggatccttcaattttggctcatat

SEQ ID NO: 153461 - DNA, 416 bp, Zea Mays
cacaatcgttggaccagacgaagagaacacccttctccaagagtctagtcaaaggcttagaaatgctggaaaaatttggtacgaagcgccgataatatccagcgagccccaagaaacttcggatttcagagacactagagggtctcttccactccaccacagccgcaacatttttgggatcaaccgcaatgccctgctgattaatcacatgccccaggaaagccacttcggacagccaaaaggcacacttctttaacttgccatataactgattcttcctaagggcacccagaacgagacggagatgctgctcatgctcagcccggtctttgaataaatcataatatcatccaggaacatgaccacaaagtcatccaagaactcatgcaacatcctattcattgcttccataaaag

SEQ ID NO: 153462 - DNA, 610 bp, Zea Mays
catgcctaattcatatgagaatgttggggcattacacttgtgatgtaaacaatctgtgacttttgtttggttttcaggtaatcagccaattatagtatgtggtcctggagttcatagttttgctactttttctggcgcgacgatgtggcggaggcgatgacagggcctagaacggattggtcgtcctgctctgtgtcggaagttatgtgaattttctgcctcctagcactagacagatgattttcttcattttgcgaactccttgctcttgctttctactgttgtttgtttattttagtgcagcaacggagcctatgaagaagccctattttctgctgctgtttgccaactccaagcagatcgctcgctgaagaagcccaccctcctcgctatagaaggtatgtgtttagcatatatgaaatgttgttttgctgtctgtgtctgcaccgcctagcaagttcagaaggtttaattttcatttttagtgttggtatggactattggcatgaggtacatgggacagagaattagcaactcatcagcacaagttgtcatccttttggctcccctcttaagcagcaagatagcagtagctcgtttatctgatgaa

SEQ ID NO: 153463 - DNA, 722 bp, Zea Mays
tggccaaagaagatggtcctaaaacaacatttgtgggtctaggctttattggtttatttgagtggcttgtcatgacttttgggctaaagaatgcgggtaccttatcaaagggctatgaatttgatttttcataagctgttagtaaacatcgtggaggtctacattgatgatatagtagtcaaacaagttaggtttgattctcaattagccgatttatgatgagaatttgagaagatgtgccggtatggtttaaagatgaatccacacatatgcgcttttgtggtgttggctagaaagttcttgagattcataatccatgagcatggcatagaagtataccccgaccaaattagagctattcagtacgtaggagctcctacgtgtaagcttgggatgcagaaatttctcgtcaaagcaaattattcatagaggtttatttctaacattgctgggaaggttgatgcttttactcctattctttggcttaagaacaatgccgattttacttggggtagaagagcagcatgcttttgacataatttaggaatgcttgtcttcagctctggtgcttaaggcacctattaatatagcagtcgaagataaggtcattggagctgttttgactaaggagaccgaagggagggagcgcatcatagcatatctgagtcgtcggttggtggatgctaaaacaaggtatacttttattgagaaattatgtttat

SEQ ID NO: 153464 - DNA, 349 bp, Zea Mays
aaggtacatcctgccaagtgccaactgttttctgcctaaccaataaacatgcgccaggttaaataatcagcactcagagtaactggcaataatagcattatcttacacaacatgggtttgtagttgtatttactggagcagcaaaagaacattgtccaacttctacagtatatgtagtttactaatattgagccccaacaccaaccaaactacatagttgaaagcatcaggagactatcatcgcacaaattgtactgccagttaactcttacattcacataaaaatatattgaaattgcaacgctcaaatacatgcatcctagccaacatctcctaaacacatatagct

SEQ ID NO: 153465 - DNA, 664 bp, Zea Mays
gtttcttcatgcatttcagaaaaagcaggaggctctgaagcagctgaggaagagcctaaccttcacccttcaaagatatatagaaatgagtagatggcctccaatcacttcctcatttttaatgtatttcaaatgttcttggtactacagcaagctcatggtactttaatcctcaattcctgaagcacaggtctactacagcaggtacaacaagataggatagaagacaataccttgcaacactggctgttcctttctcttttttttgttttttcccgttcacaaatatgcttctctgtagtcgtaattttacagttagctacaataatctaataacatagcaattccataatttgagccgaagttgtggttgaagcctgtacttatcattattttccatatatacacaactaatacagaatatgacaccacaaaaagtattcttcaagagaactaaatagatatttgcactaacacttgctcttgtctcatccaaaatttgacattatctgaaggttacaaaacagtgagctacaactgatacaacccactgcaaccgaagaagaaattcagaattcctagccaccaaactacgaagacaaaaatgtcgaggagttgctttatatagatccagacatgtttcctgtaatcactgtcacctgct

SEQ ID NO: 153466 - DNA, 506 bp, Zea Mays
ctggtggcggttgtgtagacgaccatcctagcccctgggtcttgcttgggctcgtatttgtcgatgttggagaccttgaagtaaggaggccattggatggcctggagttgggggtgagcatggagaccccgcaaatttcctcctgttgatgatcatgctgccggtcccagggaggggagcgagtctcatgtcgcctcgaccgtccttgaaccggactgttggtggaggctaccgccaactcgatcctggttgcacgtctgcgtgccggtgcaccatgatcccggtcatattcttctcggcgtcttatttcattttcatgtcggcaatcgcatgaagcactgatgttgctccccgcgtctcgtcggctgttgatggcatgccgcagatcgttcggtggatgggcgagacatagaagatgattggccgcctgagtgagcactcgccggtagcccttcgcatctagggttcgtgggaggccattggctatctgcgctaggacccctcca

SEQ ID NO: 153467 - DNA, 1056 bp, Zea Mays
gttgtttttaagtaaatcgaggggctcttttgcaaaagatacaccacgaaggggtacggacgagtactggccattcgatcaggaaacaagggtacagattaaatcttccccgcttgaactggaatgccatccgggccgttagatccctatcctaccgtcccgattttatggaacctaactcaattcacagccgcacgatctcgagcggacgcactggatcaccatcggacacgatcaaatctcatccgttcatcggccaatccacggcccagagagcttctcctacctccagcaagccacaacggcagcggctgcgccagagaccacggcggcgccatggttgagacgcccgacgccccaatcggtacacgattcccatgctacccgggtgcaaaatgaaattcaggggacgacgatctcggaaatagaactcaatcgaggccataccaacggtttggaggggcagagacggattggccacagtggaagaggattagcggaccgccgaaattaccgacgagcaacacgccaccagaggctttctcaacgcacgcagcggtaccgtgacttcctccagcacgccccaaggaagacggacgacgcacggttgttcggctggcacggagcaggtatcggctagggagggatggttcgatgccggcggtgcgccacgacccaaaggctaggtgagagcagggatgaggtaagggaaggttagtcgccagggaaggattttatgccccggaaaggcgcgctagtcaagcgcgcaacgaactgcgtgtggtctccgtgcccccgccatgcgcggagctaaacggcgcggccgaagaacgaggacgacgagcgggtatctggctggcaaatggggcccacggctcagtggaggctagcgcgcggttcgttgagggaggtggcgcctcgttgcgactgacagagagggcccgcgcagcagcgagtttcactgcgcacggtggagatgtctgggccgcgcgggtgtggttcggggttgggccgaattggtctagataagcccatgcgacagttttatctttttct

SEQ ID NO: 153468 - DNA, 591 bp, Zea Mays
cgttgttacgctatgttttcctcttcgcgtaggttctcggcggggagagtttagtgcgtcatagctgctagtctgggttcgccagcgatggagcatagtggcgggccgtggcacgccatgaacggggtcctctgctatgaaatcgtcaatataccttgcccactaagttcgccctcgtctttacctcgcgtagcatcaatggtagggtgtcgggtgtttggattcatcgggatggcgtgtcaccggtgagggcgccaccgcgacctgggcagcgccgccgtgctgactgttagcgtcgacatgctcaatccatggagagaagatggtgccagtgccgtcagattataattgaagggtcgagattagaatcagctcagcgtttcggtacattaaaccgtgaccgttgatattcgatccatcggcccgagtgaacgttgcgtggatggggttgtgccgtagatttcggatccaacgacggtgagtgatgaagaagctgtatccagggccgatctaatccagcctgttcgtgctcaatcggacgaccgaaaaccctagataccccttcgccttggcatttatgctaaagagccc

SEQ ID NO: 153469 - DNA, 439 bp, Zea Mays
gtcatgagcaaatgtagttttatggagttttacgtcatgtgtaaatgccttcatgttagacctcctaaaatatggtgttttaagtgacttgtgtgttaactaattcgagtggagaaatggttaagaaaaactaattaacctgcttcaacccatgtttcgagttacaatgtctaaaatggtttgctaagtcttatacggcgttagccaactcatgttaagtaagagtcgatagcgtaagtgattgtgatatatatacatgtggtgtctcggactgcgttaataataggcaagccgacgtgtatgtcgtatggcgggctatgccattcctttggttaatcaacttgttagatggctttggttaagctcgtagttatgatgaattacttgttgtagtctaaatgtgtatggttatgaccgcgggtaaaaagtagtagtgctc

SEQ ID NO: 153470 - DNA, 663 bp, Zea Mays
tcgggttcgggtatcgggtactcccgaagtacccggatttaaaaaaaacagtcactagttcactaccctcatgaaacatacacaggtcattggtaaatacacacagggaaaataagatacaataaaatacatcaggttcttaggaactgttagactttagactccagtactccacaacctaaatagatgataattgatatgaattcaaaacagaggatgtgctatgctactctccagttctccactgtccacacacggcacttccgcacttgtccagaacaccaagtctccagcacttgtccagcaagataacacttggcttggcacacagtagcacactagcacggtagcaccactgcagtctgcaccagcacacttcacaccactctccagcacttggaacacacggacacaccactacacatctacaggctacagcagtgaccagtctacagagggaaacaatctcatctctcatgtagagacacagccataccatacagccgctagtctgccaccaacgaaggagacacagggacagacagacaatcaccaataagccagacatgcaccacagtccacagctcactgttgtgttgcttaagacttggaagtggaagtaacctcagttctttttcctttgccaccatttccaaattcttc

SEQ ID NO: 153471 - DNA, 356 bp, Zea Mays
gaattcagaaaaagaggctattggtatagcgctcaggaagtgagaatttaagattagtggataaccttggtcctttggtccttccttcacaagaaaggacacttcgcatgatttgtgtctcaacaaatctgcctccttgctgatgtagtggcaatagagactcttagtgcaagacacctgaattattgtaataaaatatgtacgactcatgtgtacatttctaatcattctgtgttcaaatgcctttttatagctgctcaaatatctaacttcattttccccttgtttgacccctatttgatgatagatcgcatctggtggcaatagcgcatcaatagtttcggccaatatgttca

SEQ ID NO: 153472 - DNA, 641 bp, Zea Mays
gaccgtggcagcactagtggaggcatctgcgggcgtgggcgtgcgtgcgcgggtggacggcgacggagtggtggagcgtcgtgagctgcagcggtgcgtcgagaaggtcatgggaagcacggacagcgcttcggcagtgagggcacgcgcagagtgctggggccaacgcgccaaagaggcggccgccgtaggggggacgtcgcagaggaatctccgagcgtttgcgtccgggctgtgacttgtgagccacgcaccgatgcgtcacgcatatggtcaaaataaacacggattttaccatgaccattcacgttaataatgtttgttgacaagaaatgagcccactgctcattgacggtagcaatcgacactggacagcgacttcgtcgtctttgtttcttccgattattaattcaacaattcggagactagaataaaacataactagcaaggtggtccacgtaaataaaataatagctaattattttgacttttctagatagataaaacaaccaaaacctatctaaacaagccaaaaacaacatataactagcaacgaagggagtatgaaaaagaaattagaacaaccttgcttaacttgccttggttgctatttatgctcattatttgatacatggcctaat

SEQ ID NO: 153473 - DNA, 287 bp, Zea Mays
aacaggtgacatacttctatgggatatgactacaaaatcctccagacaagagaagcaaagtgatgtttcatctaatattgttaatctacagctggtctcagggagtcataggcttcctgttattgtcttgcattggtctgttgggtcagaagtacattctaagaaaggagggcatctttttgtttatggcggcgatgatatgggatctaaagaagttctcacggtttgcctattttttcttactcatcattgcaatttcttttgcttgccatcttaaaggctgctgt

SEQ ID NO: 153474 - DNA, 622 bp, Zea Mays
tgtagctcatcgaggacggcccgtagatggcggaggtgatcggcccacgtgctgctgtaaattaggatgtcatcaaagaataccaggacgaaccttcggaggaatggccggagcacgtcattcatcagtgcctggaacgtggcgggggcgttgcagagcccgaacgccatcacgaggaactcgtacaagccatcgtgtgtgcggaacgcggtcttgtgcacgtcttctggccgcatccggacctggtgatagcccgaccgtagatccagtttggtgaagaatttggcgccgtggagctcgtcgagaagctcctccacgaccgggatggggaacgcgtctttgatggtgagggcgttcagggcccggtagtcgacgcagaagcgccacgagccatcgggcttcttgaccaggagcacgggcgatgagaatggggagtcgctgcgtcgcacgatcccctggtcaatcatggcgttgcactgccgctccagctcgtccttgtgggcagccgggtagcggtacggccggacagccaccggtgacgcatcgggcttgaggaggatgcgatgatcgtgggcgcgcttggggggcaaacccatcggagctgcgaagagccccccgaacg

SEQ ID NO: 153475 - DNA, 535 bp, Zea Mays
ggcaaagccgccagtgcttaaagcatccaaggcgggagtgcctttcaaattgtatattgcagcacaagagaaggtaatcggtgctgttttaatacaagaacatggtgggaaagagagtgtggtggcctatttaagccgtcgtctgctggacagcgagagcaggtatgtgttcattgaaaaactctgtttatccttgtactttgcatgcactaggtttcgacattatttgctctcaagtacttgtactgtagtatgtcaaacggatgtggttaaatatatgttgcaaaagccgattcttagtggtcgagtcgggaagtgggcatatgctttgatagagtatgatctaatttatgagtctttatgttctatgaaagggcaagttatagccgattttataactgatcatagggttgatgtagagcataaaatctcatgtcttaatattcgtccttggcaattattttttgatggttctgtgtgcaaagaagggcagggaatcggctatgttttagtgtcactaaatggtttatggcat

SEQ ID NO: 153476 - DNA, 444 bp, Zea Mays
cagtgataaacatcaaggtaagatataaaggcgataagggaaaagaaaaggtgataacgatgaaaagcataattcatggacaaagttaaggcaagactcgcaaagtaacgaagtggagaaaacaatcaaggataagtgaggttctgacataagagttgaagtaaaaattcattatcgaaggaagttacaaggaattaacgagacaaccacgagtgtgcaaaaacaatgaccgctcatggatcattaagaaacaagggtggtcaaggggacgttaactgaaatgtcttaaacaaatattgagatataaaggtaagcatatataaaaataagagtatgcaagattccaatggtacgaacatactatgaccaagagagtacaaatagccaaaaagatagcgacttaacaatagaataggaaagggtctcaaaagacaataagatcat

SEQ ID NO: 153477 - DNA, 567 bp, Zea Mays
cggagaattatgttaaaatccccacataaaaaccatggccccacacactcatcacgaaccgttctcaattcatggataaactcctgcttaaaaatatcctgatgaggtccatacacacctgtgaaccaccaggaagaaccagactcatcctgaaaatggacagagacaaagattcttcatgactgaagccacagagacaaaagacccgtcacgctaagcaattaacactcctctagtcccttgggcgggactagaaacaaaattgctgaaaccagacccgagaatagacagaatgtcaaagtccgagatagaacacaatttggtctcctgtagacaaacaatggaaggcttgatatcaaggaccagagatttaactgaatccctcttggcacaatcatttagacccctcacattccaaataagaaaacaactattctccattggaaacaaatcagatcgcccccacctgaggaacctcccagccaaacaaagctgccaaaacagcaacatgcacactcgaaagcgcggaatcaaataattttgcataattgctggcatcttcgagag

SEQ ID NO: 153478 - DNA, 1044 bp, Zea Mays
aagcacgagcatgttgcaccgtcttaagtcgtcgccgacttaagccgattgctctgttagtagggtatagtggtcaccctaagtcgagtaagcgtgagcatgttgcaccgtcttaagtcattgtcgacttaagccgattgctccgttaatagggtatagtggtcaccctatgccgagtaagcgcgagcatgttgctccgtcttaagtcatctctgacttaagtcgattactccattagtagggtatagtggtcaccctatgtcgagtaagtgttttgattccaagtttaatcaagtcgaagtcgatggataaccaatagtttgaatgcttttgagagtgaaatcttttattgaagacgtcttttccaattacagaatacaacattgctccgatagttcttgctaagggtaaaacttcctgaggtgctctatattccatgaattccctacttccgtgccatccatttgagtaagccgatatgatcctggccaagtgacctccgacaccatgaacggcccttcccatagcggcgataatttgtgccattcttctcctgttagaatttggcgaaggacaaagtctcccactacgaaggatcgatgtcgtatagtcttatcatgatagcgcctcagggtctgctggtatctagctgactgaattactgcgttcaactgctcttcttccaatatgtcaatatcttctagcctggtagcttctgcttcagctaagttttcgaatatcagccttggtgccccaaacctgaggtcggcgggtagcactgcctccaaaccatagaccatgaagaagggggtgtttccatgtagagctcgactgggttgagttcttaggctccaaaccacataagctaattctctgatccacttccttgcaaacttttcattcttgtcgaagactttcttcctgagtgctttcagtatcatttcattagccctttccacctgaccgttggctcttggatgtgctactgacgcatatttgatctggatgcttcgttgttcgcagaaatcaaagaattcaaagcta

SEQ ID NO: 153479 - DNA, 552 bp, Zea Mays
gaccctttaaagaagagagagtaactacgtaacttacaatagaatgctcatttagataagccaaaatgatcctaacaaattctccttttttgacatattcctgccacacacccagaaactaaggattgtgattgatctagattcgaacatttgtggtctttgcattcaagagcacaatagcttcagtttaatcatcattcattccaggcaaggatgctgctggccaccagttgtcatcttttttatgcttcagatgtactctggtcttttaaaagtggcacactcagtagtcagtattgttttagtcatttgtttattggcaatgccacacccctatctataatggttggcatgcgtgtgtggattggtatagccatcggtgacagaaacaggcacttctacaaactctaatatttttgcttttccttttgggaaaatcattgtcgcgagcctgaatgagtacattgcaggttgttagggctcataaagatttgccaaatccgaacaccagtaggctaattttagtcacaattagtttgccaagtttggacg

SEQ ID NO: 153480 - DNA, 316 bp, Zea Mays
agcggtggcgaaggtgttaggatagcaggcacaaccaaagacgcggaggtgcgtataggaaggggaggtgccgaagagggcgaataaaggagtgggatgactgactgccttggaggggagacgatttaggaggtaggtggtagtgtggaggcccttagctcggtaacgagtagaaatggatgcttgaaacaggagagaaagatggcacaatacttgtagttatcgaactcccgcccgttgtcacactgaacatcccagacagtgcaactgaacttagtcaacacccatgcgaaaaagtgagatatgatggggaagg

SEQ ID NO: 153481 - DNA, 523 bp, Zea Mays
gtggctatgaaggtgtgggatgctctagaatcgaaaagtacggtagcgagagtaaattcaacaaggaactcagcgagcactactcccggagcctgctgagcttcctgggcatcgacgtgatttactcgtgtccttccttggtacggagccttgatctgctggctgacggtggagggcgccttgggggcggatgctgaggtattcttggggccattcatcaagttggagtaggcgggtcctggtggcttcagctgcggacagttgctcttgaagtgactgggatcaccacagtgccaacacgcatttgccgggggttggttgcttgccactgagggggaatggaaagagctctgactttgctggctgaatcgtgacggagtgggtccagctggtctactgaagtttggccccttgggtggtaacccaaatgatcgagtcttctggtgccggtcttgctgctgagcccggaggacttggaactttcttttgagatgccctttttcctcctcctttgccctttcaa

SEQ ID NO: 153482 - DNA, 437 bp, Zea Mays
gtcgctgatgctggggactagtccttccactgaatgagtacctggcgcactccgcgggcgatcctggtcttgacggctcgggctggctccaaggtgacggctccatggtgaagcgggggcagtggtggcgtagcttgtggaggagtgccctggtacttcttgaggacacccacgtgaaacacatcgtggatacgagctcgtgccggtagctcgaggcggacaacgacctcgttgatgatctccagcactcggtacggcccatagaaccgaggcttcagcttgctggtggtgtcggtgttgagggaggcaggggaccggtcgcagaggcggagcagcacccactcgcccacctgataggtgacgacgcggtgtccctggtcatagtactttttctggacggcctgagcctgctccagacgatggcgcacatcagcgag

SEQ ID NO: 153483 - DNA, 557 bp, Zea Mays
caactttggccttccattgcctctttttccattattatcgcaccttagaatctcactatgcactgtgcctatagaggtactcctatccaagtccaatgtcccacgaatgtagcgtagtatacgcttgagggcagcaaagtgaggttctcttggatcgtgcatatgaagacaaatctgttggactgcataagaaatatcagggcgagtgaatgtcagatactgaagagctcctgcaagactgcgaaaatctgtagcgtctgaaactggatcaccatcggctgaaagcttggggtttatgtcaacatgagtagtgcacggtttgcagtcgctcatgccagctcgatcaagaatgtcaagcatgtattgctgttgggataggtagagcccggagctggtgtgctgaacatgcattccgaggaagtgatgtaattgtccaaggtccttcaaggagaattcctgctgaagagcactgatggtgcgacgaagaagtgccatggaggatgcagtgaggacaatatcatcaacatatagcaagagataaatcatgtcttcacctt

SEQ ID NO: 153484 - DNA, 353 bp, Zea Mays
ctggccacgctgcgttgccgggggcagggtgggagctcgggtacgaccgcgttgaggctgccgaggggctgctgtgcatgggtgtgagacaaggcgaggggagtggaggaaccccaagttcccggttgcatgcagatcgcaaattatgcgcaggagagaaaataggaagtgggaagttctttcctctatttttctcaaccgcacaagatgcaccagcgcaaggaaaatttgcatgcgttcatgcgcgaggtggggcttcgcagggacgggcgcctcgccatgctctggtgatgcggggcgcggggctggcgagctgggctgcgcttgcacaggcccagaagagggaggggaag

SEQ ID NO: 153485 - DNA, 448 bp, Zea Mays
agaggtgatgcgcacaataaagtccaaaagactaatgggacagaagatgtgttgtggatctcagctcgtcgattcgtacattaacgatcacatacgtgacatgagtaggtacgcgaaatctgcccattttgatagcccgatgcgtgcagagcagaggaggtttaaggcggcaaatgagaagagagcacaggatgcaagggaatgggaggcggctagagccgagaaacagatgttggataatcttgctgatcgtctcaagggaagtgagtgagaaaaatgatactataattttgttagtacaatttatttatcctgactttgctaccttatttttctcattatatttgcagagattggatatggcgtaaactatatggcagacgaggcacatgcaagatatgttcaggaaaaaatgtcgacggtggagctgatggaggaggaggacgac

SEQ ID NO: 153486 - DNA, 378 bp, Zea Mays
aggaaggtaaccgggtgccactgttgacgttactcgagactctaatccacatgctttttatgtccattgttttgcccatcggttgtagttagtcattgtttctgtttctagctgttgctcgactattcatgatttatttgaatatgtctctttaattgtgaccacaacaaacgcttcatgcaaaagaagagatgcattggttgaaagccatcataacaatattttgcgacaacttgattccttggagattgaatcgggtacaggaaaacatcaacaaaccagtcttgctagacctggggacactagatggggttcacatcacataacccttatttgattggagctaatgtgggactcagttactgaggtgcttgagat

SEQ ID NO: 153487 - DNA, 417 bp, Zea Mays
tactgctggctgcgtcagctactacatgagctgcacatctccatcccgcgtgcgaccgtggtctactatgacaatgtgagcgctgtgtacatggtagccaacctagtccatcaccgccgcacgaagcacatcgaaatcgacatccactttgtccatgagaaggtagctctggggcagttccgtgttcttcatgttctgtctacgcaccagttcgccgacatcataaccaagggtctgcccgtacagctctacactgatttttggaccagtctttgcgtccgtgattctcccgctcagactgcgggcgggtattaggatatgtatatattaggatcaatcagagcctgattagcgattgattgtaatcccctagattggctagctgccttgtatagtctaggattactttctatctat

SEQ ID NO: 153488 - DNA, 716 bp, Zea Mays
gagccccactgctagccgctactgtagccagaagaggaggagagagtttagtcgtcgtagttggggtagggctggatagcgccttaccgtggattacggtcgggaggagtcccctgagcatgcggatggagtaaatgacctcgatgggtgaagctagtcactcgagaggacgaattcgtcgttagaatcatggcaccgccggctacgtttcccaatggtcggggaacgtcaccacctcaaccgtaggtacgtcaccctaaaccaactttgttatttctttggctctgtttggagcatgtcagataatgatttagggcatctgggcgccgtcgcgctttacgccggagtaacgccatcgtgaatcccgggctatcgcctagtggtcgtcaggcaatcgggggtgggtgtagatgcatggaccattggatccggatggacggctcatattagagcattgaaaatgttacaaccaaattaaaccacgatcatccgattggatttaggcgctctagattatagtatgtcgtggcgaacctcaggccgtgaatttgtgatctgacagctcgggttatgcaggttatgcgatctaatcctagccgccggtttctgatcaaacgaccagaacttagggataccccctcgtcgttggattgggatcgggcatgtcagattccatctcggcattttaaatattgaacgtcgacattagatcaggc

SEQ ID NO: 153489 - DNA, 494 bp, Zea Mays
cccagatgtacacgctgagcctaataatggcgttgggggtcagctgatgaagataaatcctgaatttttccaagacttctgcaatcattccatgcagaggaaatctcagccctgctttgaacaaactcttaaaaactacaacttcatcatttttcggcttcgggatagtctctttcccgccaaagcgaaccaaccccttatcagcttccttgaagtagcctagcttcgtcatcatagtcatatcagcttcagacacagttgatttcccaaaatccagatggctgggcttcgatggcataataatatcataatcaatctctccttcattagcatcaccctcttcaatatctgcctgctcggtttcagcagcgggtgattcttcgtcagcagcgcctttagtcacaaccaatcctgaccgcctcataacttcagagatcggagcagtttcagcaacttcggcttcgtctccgtcacgagtaactctagctgtcgag

SEQ ID NO: 153490 - DNA, 457 bp, Zea Mays
agagagcatatcatcagatatataaaaaatgaagaagagccaaccagagttgtctgcatcgcgaggcagtcgtcccattacaccatcatagggggcctactgtatagaagaggtgtggcaggagtcctcatgaaatgcattcattcggttgctgggaagcaattgttggatgaaatccatgctgggcagtgtggaatacatgcagcgtcaaggactctggtcgagaaggctttcagatctggtttctattggccaacggcgaaaagcgatgctgccgagttagtccagaagtgtgaagcatgccaattcctatcaaagcaacaacacttgcccgcgcagcagctgcggaccattcctgtaacatggacgtttgcatgctgggggctagacatgatcggacctttcaagaaagctcagggaggctatactcatgtactagttgccattaacaaattta

SEQ ID NO: 153491 - DNA, 555 bp, Zea Mays
ctggggaatgccatgtaacctgactatctctttaaggtatattcgggcaagggcggctcctccaaaagtggtctttaccggaacgaagtgggccatcttggtgagacgatcgattattacccatatggaatcatttcctttctgtgacctgggcagtccggttacgaaatccatgcctatttcttcccacttccatttgggtattgggagggattgaagtaggcctgcaggcttctgatgttcagcctttgttcgctgacaggtgtcacatcgggccacatactgtgctatttcctttttcatccctttccaccagtatctggccttgaggtctaggtacattttggtggtccctgggtggatagagtaagctgagctgtgggcttcattgagcaaggtttctcgtgcctctcccactggcacacacaagcggtccttgaaccagaggactccttgctcgtctgtcctaaggtccggaagttgctccttgcgtgctcttcccataagcctggctgtctctgcgtccaggcgttgagccttgcatatgagatcttc

SEQ ID NO: 153492 - DNA, 797 bp, Zea Mays
gcaagatccttcacatacaagccaaagggatcaaactctatagaacaagagttgtcattgataaattgatgaacagagagaagactctgaataatggtagaggcaacaagaatgttttttaggcggaaggggtcgagaaggactgcatcaccaactgagctgacgaggaccgacccatcgccaatgacgatgaggaaggaagagatgggtgaggaggatgggtggtggataaagtatcagcgtcaggggtggtgtggtaggaggcaccagagtcagccacctagtccgagaccgagttgggcgaagcaggagtcatcgtgttgaaggacccaacaagagacttagtatcccacccgccactccaagggccacacgagggcgcaggagagcggggcgggggaggcaggataggagaccctgctggagctgaggtggggccgagtgcgccgatagcgccaccagggctggagcggcgtagaaggtcaactgaggggcggccgggtgcgatagaggaggacccacaggcggtccaggccacatggagatggagccggtccatgggttgtagaaggacgtctaggagctggcgccccaagccgttggtggaccgttgcggccgtcgccgcgaccatgaccgccctaacgacgatgaccacagtcggagccggtagccagacggggagcgccaaagggtgatcgaggagcgctccggcgagagggcaccccccgaagacagtaggagtcgtcgtgagctcctcgagcaggagatcatcgcaaacttgatcgaaggatgggaa

SEQ ID NO: 153493 - DNA, 341 bp, Zea Mays
ccttaaaccattacaaagacacaaattttccttaacccctcgtgggggagcgcaatcaagcagggcgactcccagtttccgagcaaagggctccgcagctttcaccatttcggcaagctctgtatcactccaggcatcgcagtaaccttcacttagggcctccagttcgattccgccttcgatatgggacgtaacaacgacgaaggcctgacagatcccccggcagaagtattcaattttgagctcccagatccgacctgcgaggctctcgaggcaggagatcaaggacatgtagtttctatgtgccgatatgtgccttttttccttctccaactcctcca

SEQ ID NO: 153494 - DNA, 285 bp, Zea Mays
aaaaatttaacaagcttgagtattgttgctagctgaatttgatctattaaagctttatgatcttttgttgtcattttggtttcatgattggttaatctaaatgaatgtgcacttatactaaatattgtagcattagtgttcagagcctcagacgctcagcttttgagctttagctactgctcaaaccaattgcaaaatagttaatattaaccttttgaacatagtgagttagtgatgctggaatttgttacgtatttcctttgagcttctaatgttaattgtgga

SEQ ID NO: 153495 - DNA, 436 bp, Zea Mays
gttggtgacttggtgcaataattctgaattctaattttatagtggcagttagaaaactggtcgtggtcttatttttttactcaatacagaagtataaactgtcatgtcattttagactataattcaacttgctgcgaatgaattaaagtctttacaagggattgaattggattttatttgcgaaaacagggacttcaggtggcgatgggtgatttgctgttttacttagagattaagtacagtagtgctcaacctgatagtttggtttcatcgcactgctaggtgctagcttgagttgttcggtataaaaaacttatgatgattggttctctttacagaaaatttaatttctttgagctgaattgtgtgttatactggtgagttaatcatttttatgcgtgttcttggctcctatcacaatagcaggaggattctt

SEQ ID NO: 153496 - DNA, 817 bp, Zea Mays
cctttcggatatttcaactttcgcgcatagtgcctggcttccagaatttcttcttcggatagcttcttccccgaagcgtgtcgaatgatgtagtcaatatcttcgatcaaagcttcgggagcagaagtctcgatcttttcaggagcaatttgttctgtcatctcttcctcaggcgcggtaggcttcgccgaggcgggcgctgaaggcccagcttcagcttcagcctgagttttggtagcttcagcttcggcccgagttttcatagcttcgacttctacttgtccagtttcgacttcggcttgcgctttggcatcttcaacaattttctttttaggagcagggctcaaggcctttgtagtctctagcacaacatctagcatgttctccatccttctcctcctgggagtcgcggtagaagccttttgcaccttcgacagctttgcctctattgaagggctcagactttctgatattttcattatttcttcaatctatagcccttcggccttatcatctttagctttggctgactcaactgtaggcatcgtcggcactatagtcggctcttcagtgctctgcacaattggaacagtttcttttgcttcggcaactgaagaggtccctttgccaaattcaggtatcacggccggttcaatgtaacacggccgatgagtcagaacctttatcttcttgcccttcggctcagctataatgaccgaagcaacaacttttctcttttttccttgccctcgcagtgggaagccataatcagggtatacgaagccaatagcatcaaataccctgttcaatcttttct

SEQ ID NO: 153497 - DNA, 544 bp, Zea Mays
gggtggggcaagcggcggatcccgaccgattcggccgccgttgtgaaagtgaaaccgcgtcggacttgttcatcctagaaccagcgcggaaatctaccgtttccaggccggggttgcgtctactctcgtgtggatattccgaggagcagtcgacattcctcagtctcctccacaaacaatctgacactcctactccactgtgcagtgtcactggtaacgagtaaacacattaaacagcggagtatctcaagaggaacagtgatacaggatgtggtcctcccgggacgtcacgtacccatcatcctccgtgccggtgcggcggtgcctggtccatccggtttgttgccgagccctacattttggcctctgcgtccacaattgagttgatggatctctcccctctgaccctctcccataggggtggggctcctcacccgccttcaatgactgataattgtccaggcaaagcatagctatagcagtcacaacacaaactacaattgattcccatagctgaccctcactaaaaaatcactgatagaaa

SEQ ID NO: 153498 - DNA, 411 bp, Zea Mays
tttagcttgttctggggcgtgagaattgcaacctgatacccctgatcacttctcttggaaactctcctcttcttgtcagtacagcagcggcttacatttcaatgtttactggttctatttgtttttcaacctggaggaggatttggaaaacatgggctcctgttaattgcaaattctttatttggctggccatcaataatcatgtttggacttccgcttggccaagaggggacttcctcatcagcctgcctgctctctttgtgatcaaagatggaaaatattagccttatccttgtttcttgtgttttctctagagaggtctggagttttgtgcttcagagagtcattccggctgtcagaccgccaaacatgaacagtcgatgtataactcatggtggtgccgagcttctg

SEQ ID NO: 153499 - DNA, 736 bp, Zea Mays
agatgggccacaggtgcaaaagtctcatcatagtcaataccccgagtctgttgaaaacctctggccacaagacgagctttatatcgcacaatagacccatcagatttggttttaaccttgaagacccatttgcacgtgataggtacaacaccaacaggtaactgaacaacatcccatgtacatgtgtgatgaagggcattcaattcatcagtcatagcaagctgccactcaggtataccagaagcctctttataagattggttcagcaatgactgcaccagcatggggaaacccataacgttctggagctgcaatagtgccacggtcacgaagatgataaccctgattaaaaacaacatgagagtcatcattgttagtacaagtatcaacaacaggatcatcgtcaggactggccgtgggagtagagcgaggacgacgaatgtaagtctgagtgacatgtggtttggaagagtaagactgagatggtggggaagtggaaggtgatgtgatgggaataagaaaatctggggtagaaacagtaggtggtgatactgatgaagtttcagaaattggaggaaagctcatgaaggaggtagactttgtggaataaaaagaagaattagtggaagagttgtaaaagaagggtcgattttcattaaagctcacatctcgagaaatacgcatgtgacgagaagatgaatcataacgccgatagcctttatgttcagggctgtat

SEQ ID NO: 153500 - DNA, 339 bp, Zea Mays
ccgctggctcgagtgcctgcacgcctccgccgagctggagaggaaggaactcttcggcgccggcggggaggccgcgcccgtcgacggcgatgcgttcagggcgtacaggcagaaggtggccaacctcaccggagtcacccgcaagttcatagggaacctcgtgagggctttcgagaccgacctgtcggaggtggtggcggtcattccggccaactagctagagatactagactgtattccggttaccatccatgttcgtgtttcttgcattgatcggaagaagaagaaccttgcatattgattgatctgaacaacatcgcaccagcctgccgattactt

SEQ ID NO: 153501 - DNA, 848 bp, Zea Mays
gcgagtacctgaaaaagaagacacgagcaacagtccaaaaggagttgtaatcgggttagagtgatcatcgagggtcgaaggccactgctgtgggtggattggaatcctcggaaaagggaaacgaggtttcataaaaaaccacatgacgggagatgattgtacgattggattggcgatcaaagcataggtagcctttgtggttgggagaatagccaagggagacacaaagggttgagcgaggagataatttatgtggagtggtggcggaaagattggggtagcatatgcagccaaaaacatgaaggtgctcataggatgggttgtgggcgaagagagcaaagtgtggtgtagagagtgcaagtgttttggtgggtaatatgttgaggagataggttgcggtgccaagagccgcaacccaaaaactgggggaaacactagattgaatgaggagggtgcgaatgatattgttgatggagcggataacacgttcaaccttaccattttgagctgaagtgtaggggcaagacatacttcttgatggtgcctgtttgtcaaaatttcatacttaaatggttagctgtctgttgatgactattgaatacttactgcttgttgaaagctgatctgctcaagttatggttttggactctgaattttaaatgtttaattcaccaaattatacttctagcctacagataccatcaagaagttaatagataacattcctgtcaggcccacgggtcaggaggacggaggaagagcccaccttggaaggacctgcccccaaatgaccctcgagctcgggggccgggcgaggcggagccagtaggagggtcaggcgaatcgag

SEQ ID NO: 153502 - DNA, 1347 bp, Zea Mays
gcctagtttagtaggtgtggatttagcaatacatatagcactagtcttattatagaaaagtgcaacattattgaaattgtcacatatcataccctttttaagtgtagctatcgtccaaataatttgggaccaacaacaaacaaccaactaaataatcgataacagtgcaaggaggtaagggtgttggagcatccctagcctccacgctagatccgtccttactaaactaggtctatgaaccataatgtcaaacaaatgaaagcataaatcgaaaaaaggagaggaatgataaactaaacctaatatgaatcaacaaacgaatcaacaaaaaaaatactctccctattctaatttataagttattttcaatggaaagcatcaaattaacaaaagacaattgcatgaagaaacgtcaaagacatcagattatagccaatggggaacaagagcagcaaccattagttcatgtaaataataaaatgacaaaataaatagaagtaaacttaaaaggtgtgcatgtacaaactaacgtgactatgtgagtatacaatagctcatcaacaactagatatggtagcgtcgggatctctaaatagtgtacatatttttcctaataatggtaaactaactagttgtgcttcataacatattgatgttggtttagactaaaattattattttgtaaaacaagtcacttatatattggtatcacgagctaactaaaaacaaaatagtcttcttttcctttgatgtggtgggcctgaccttttctagtgctaatgttttatatagaccttggctccgccgccaccgcctagggactgagccctagggctaagggtgcggacgtgtcatcgaaaaccatcatcgcaagccccaggcctagcaataaggtcgtgccacacggtagggactactacgaggaggaagatgacgatagcggcttcaggtcccaactgctgttggaaaacaaccatacaatgttctcgccaccgacgctactctacaactatcattcgcacaacaaggtgtgatatatacccatcatcgattcgatcgatctcctctatacacgattccatcttggtcttccattattaaccactccatatatgccaagttgcaagcaaatatgtatacaacattaggtttaagactggtcaggcccgtcgcatcaacgaaaaagaagatcggttttgtttcttagcttatggcacaactatataggtgtttattttatagaataaaaatcctagtttaagccatcatgcgtatgttataagcattagaagttagtttattattattagaaaaaatatatacactagttgtagatcatggcactac

SEQ ID NO: 153503 - DNA, 572 bp, Zea Mays
actatttcatcaaaatttaaccaagaagcatctaaattaaattgcagaaactcaaaatagagaattagttagaacgatccatttccggaaaagtttggaatgataaaagaaggcagtgccagtggttcaaggctagaaaagtccaaaatggatactggacaccctttgttggccaaagcagagttagtcgcatagtggacaataggttgactgggagcatatcatgcacaatggatgacaccatggtgttgcagggccgagcttgcagtctaaccaagtaatttgcttctgcattagtgggtccatagcctggtgctgtgggggtgtgtaagtggtagaaaatagatagcaacaactcgaatttgttcaatatgatctgggaggagcttaaggttgcttcacccctggactaggtaagggaaaggttatttgacattaatgacctgatgtcatatcaagtaaaatatatttgcaacttccgagtccttcagaatctaaccctgtgctgtgcatgttgtttttttctttccttttcggcttgtcattctgtagtgtacaatatgaactcccct

SEQ ID NO: 153504 - DNA, 490 bp, Zea Mays
ccgtcgttttctggttcgaacagaccatttcgccctcaagttcatgctggaccaacacctctcaactgttccgcaacaccactggattagtaaactgttcgggtttgatttttccgttgaatatcgacccagacgttttaacacagtggcggatgctctctcccgcagggacgctgaagcaatggagtccctagccatatctgtaccatcgttccagctatatgatgaaatacgcagtgatggcagcagcagaccggaatggaaacaactacatgaacaaatcctcaatggcacccaatcggcgccatgacacatccaagagggcctaatactacatgggtccagggtatttgtaccacctacatcacccacaataattcatattctacagctagcacatggcgcgagacatgggggttccaaaagacattacacaggcttcgcgcagacttctacattccaaatgacagaactctggttcgtgactttg

SEQ ID NO: 153505 - DNA, 487 bp, Zea Mays
tgagggaggaagatgcacagcggccgtcagatgtcaaaggtgtggtcaggatttggacgagatcacgccaccacatacccctttcgtccatcggatccccgccatcgatcctcgatctaatggttaggatggcgtaccggttcgggttctgatctggtgcgttggatcttgatcgggcggcccacattatgttccggttcacttaaagcacggttctaatctgggccctcgattctgattggacgactcaagttggctgataccccttcggcctgaccgatttgcaaaagagcccctggctttcttaacaataaacccgccgtccgtgggcgatgatcacggagtcttgggtgtatttgtagatcagtccctaggtttttcagaatttagcgcccaatccagagatcagaaagaattagaaaaataattatagaaatcgatttttaatacaaaacaatttcagaaacttgtataattcatattaaat

SEQ ID NO: 153506 - DNA, 621 bp, Zea Mays
caaattccctaagagtccttgctacctgctccctaacattttcaaatgcttcaccatcataagtcacaggtgtcacaaaaggggctgaacacaatgctccctgcgcccctgccacatgcctgtttgggacagatccttgcggcactctgtttcctatgggattaataaatggtccatatgccacattttggtaatatggctgctgcagattagaatttgctactgcactcccactcgtacccttatttgttgttttctatggtgttgggtgcaactgctattccgaagctagatgtgcccgacgaattcgctgcacgtttaccctgactctcttcttgtatctgttgaactatagatcgaatctgtctaggcatgttgttgcttatatcttgcttaaattcagatctaaacgcatcgaaagaattacgcactccctcagaaatcatacgcgtaatttctgtgacatcagccccatacttgctagctacagaagtatcaatcatgtgagctagctcttcgcaagtgacagatgaacttaccttcttgccggacgtgcttgccccaacggtctgtttgatcacaccattcttggtttttcggaagcaagccaacctctcattc

SEQ ID NO: 153507 - DNA, 982 bp, Zea Mays
ccatctaagtcttcctagaatagtctcttagcactctcattgtgtcgtacttgggggcaaactcactaattacgttcaagaccaaacacccacaagaagcttgactaagataattctatccacctactttctcgcatccaccacaacgttattgagactcttattaatcaaaactccaccatttctatttgcagatgtccctatgctatataccaaagcttgaagttgatatttcacaagacaagcaaaattctaaccataccagtaaaaacaatgaaattactctaccaagcattgagatccactacacaattaaaaacacaaaccccgtagtgattcttcgcaaatatattaacaatatttttttcttaagtaaatgcaaagcacatatgaatgaggaaaatgaaggatagaataactaaaatgagtctatgcccctaagaaaaataatcccaattatatgagaattcaagcctttgcttgcaaccagataactgaaatcgcaagaagcaacggtgcatagctaatgagcaagcaccaaacgatgtcttacaacaacatcttaactgagcatgtggtcctggtggtgtagacgtgatgattgagacaaaccaattttgctatctttgaaataccgccagagaccatgtatccaagtatgccatcaacaacaacgagaaaaaatcaagcaacatggtgtacttcctacttcaatgcagctacaataatcagcgacctagatccaagtatgtttctgatctggactctgaaagtctgaacaattccaagtcgtactcttacaccattcactcaatgccatcttgcaggctataagtcttgtattttgagtgagcagtgtagtatactaataaaaaaagcacaaaaaaaggaaatgtgttactgtcttcctgggtatcctccattaattcagaaaacataggaaagctgctttcaacgcaagcttataccttctggaagcata

SEQ ID NO: 153508 - DNA, 1649 bp, Zea Mays
cgattgaaaagtttcttctgaactgcgcatctatcctcgtgggatagtagcctctatttatatcagagttacaggaatggattgggatcaattgatccggtttacatggatcaagcgtggactgagctgctagacgcacggagccagtcaacagctaccagtaaactagcgaacctctaacagaatacatacacatactcttaacagtccccctcaatcacaacagagggtgcctatgttgaggttgtcacagttcttgatgaatggtgctcttgacagtggcttcgtcagaacatctgcaagttgatctttggatgatattattcggacttccatggctttgcgtgccacttgctctcggacaaagtggaaatccacttccatgtgcttggttcttccgtgaaacactggattactggttaagtaagttgccccaatgttatcgcaccataaccttggagccttgtgcagaaacactcccaattctttcatcaatgactgtatccagattagttcagcagtaacattggcaatggctttgtactccgcttcagtgcttgagcgtgagacagtcacctgcttccttgagctccaggacactagattgcctccgaggaatactgcaaagccactagttgatcgtcgatcatcggggcagccgacccaatcagcatccgagaagcctgaaatcattgttgatgttgatctctgaatctgaaggccatggtccagtgtccccttgatataccgtagaattcggttcactgctgaccaatgtgcatcagttggattctgaatgaactgacatactttgttcactgcaaatgacagatcaggtcttgtcaaggttaggtattgcaatcccccaaccacacttctatatctgaattgttcttcttcattgagtattgttccctgatgcttggacaatttttcagtggctgacattggagttgagataggcttgcaattgtccatctttgcccttttcagtaaatcaagagcatacctcctttgagacaataagattccagtcttcatgttcttgacttcaatacctagaaaatactcaagattgcctaaatctttaactgcaaactcatttgtcaacttttggatcagtttctcagtagcagagtccgatgagctgacaattatgatgtcatccacatatattagcatgtacattgtaatatcagcttgcctgaacacaaatagggaggtgtctgcaatagatggactgaacccaagctcaattagtttccctgtcagcctagagtgccaggctcttggggcctgctttagaccatagagggctttctgcagcttgcaaatataattatctggcttagttgagtcagtgtacccaggtggttgcctcatgtagacttcctcctggagtactccatgtaagaaggcattttgaatgtcaatttgcctcatattccaaccttgactcactgctagagataggacaattcgaatggtggctggtttgattactgggcaaaatgtatcaaggtaatcaatgccatacctttgtttaaaccctttagccaccaacctggccttaagcctttcaactgcaccatcaggcttcttcttcactttaaatacccatttgctatcaatgatattgattcccttcc

SEQ ID NO: 153509 - DNA, 475 bp, Zea Mays
caatgaggagcggctttggcgagcctaaatccatcacgttgagacaaaattagtgcaaaagaagggcggggcgatgttccttacccacgggcggtgctcagggaacctcggcacggcatagggaggctccggttggctggacgacgagggaacgtggcggcggcgaccttcggtctgcacagggaaggagttaggtgcgaacagggcagaggggccggggaaaggcgaaaccgaagcgtgttcccggtgcactctgctcaggcgaagcttactgtgggcgaggcgatggcaaaggcccggcgaggatggctgggtgaggacatggggcaaggagagggtgaatgaggggcaggggcatgctgtggggggtccaaggtcttcacctaggcgatcgggtgacgtgcgcggggcgagacgtgggggcatgggcgcggtttgtgcatgcggagcgcacgccctgggcttaggcgcgaca

SEQ ID NO: 153510 - DNA, 470 bp, Zea Mays
aggcattcttgatgtcgagcgatgcataggtcaggcccattagagagctagagtcagaacagtccagatggtagcaggcttcaccatggggctaaaggccatatgcctttagcttctgcttgaagatctatttcttggtgagcacattggcgccataggggcgtggcaacaagacccaggtgtggttcgccttaaaggcctcatactcctccagtcctcctacatggcatgcttttagttaggatcggtgagcgtagtacggacaaaggacaacttgggggagaccaccggagaggaggacgctaagagaacttggcagttgacatgctggaggacaccgacgacccgtgccagtaaccatcgggtggacatacctagggtcctagtggagggcaacagggtgatacattggcagctcgtcatgagagggagtcggtgcatcagcccaaccacaccgctagtagatgtga

SEQ ID NO: 153511 - DNA, 491 bp, Zea Mays
cttcgttcttgcgtctcttcttggatctagtagtggaatagccctgggtctatggccatgtggatagggtggctttcctagatgtagtggactgaggccgtggcagggaccagcgtcgtccagatgcagtgcacgattggatctgtgcagttcacattctgcataattcattgaaatccttgcatggttcacgtcctgtcgctttggtaattgcaattattgaaggagagagtgacaaaactggtcaaaacacaaacatagtgtgctagtctgctattgaacaagttaacttctttgtgaaatgggacatggatggactgttgtgaacttgcaaatgaattgttacatgcaaggacaaatcaactctgttactactataacttgccatgaagattctactgagcactgtaatatagcaattgagcacctctacacagtcatgttgacttgcgccggagcaaaacattatgcacggcgtctctgctttcaag

SEQ ID NO: 153512 - DNA, 640 bp, Zea Mays
accagaaactgcctgaaaagaaagatgacaacataattccccactttgatcctccttttctagatgatgtagaatctcatcggtcaaaattttagacacctcctcattcactactgcattcaactgagctgaacccctctttgcacatttggcaatatgtccgggctcaaaccgttctccacaagcataacataaaccattgagacgcctgaagtctctaagttgtctctcttgagtaagatcagcacattgttgccctttatcatccccttttggaagtgcttgttgctctttcaaatatggcaactgacgttgtcctttacctcgtcctctatccaacacctcctgttgaatctgagctagcaatatagcacgatccaccgtagtgggaacctgaacttgcaccacatcctgcagttcaaacttgaggccacaaacaaagtgggtaacaaagaatgtttcatcatattgagcattatgcaccgccactccataccgagcctgctcaaattcatgaacatagttatccagcgtgccgaactgacacaacgaaaacagtcttcgcagcgctctaggataagcctcagcaccaaacttactgacaacagctgcaccaaattcatgccaaccacccaaccca

SEQ ID NO: 153513 - DNA, 763 bp, Zea Mays
ggaaaattactcgtgggccctgaaatgagtttcggcccattcatctggcactcacgcgcagcccgttattgccgctcggctcaataccgcttgctgctcaccgtagtcactgctccgtgggcccctctccctaccgcgctcacccgcactcagttgaggtagctggccgccatgtgggcccctcttgtcatcccggttgccgcgacggtaacaatccgcgcgagtcgcacgggagtttctccctttcttgcgttaccgtcgaattcgtcagaaatctcgcctcaaccctgagtttagtcggtcgagcttgtccctgcgccagactataaagccgcagcctgacctagatgctccgccgccgcctgcactccgctgttgcgcgctcacttcccctccattccctttccgcatcgcgccttggccgtgaacttcaccctcctccctcaagccttgtcaccgctggatgagccactagttcccacccgggccgcgttgcagcaacctccttgttgaagccctggatgccgtgtcgagcgccattatcgcgagttgtggaggtatcgccgccgctgctgctccacggtctgtcgtgggcaatatacctgcaggcgccaaaccgaggtgaaaatcacccccaagccttctgttgtctcggtaaattgcgtacacgtagtttcgaaggggtcagcggggattggggttggcaatttctcgccgccgtgcggccgccaccgcggggccgctccgtaccgtaggtgagctc

SEQ ID NO: 153514 - DNA, 770 bp, Zea Mays
ccagagagggcatgtggttcgtcgccgtcgacgaccttgagacgaccaattgcttcttcgatcgtcatcgtggagaggtctagcagagactcgattgagcgagcgatctgcttgtacttctcgggaatgcaacgaaagagcttctcgacggctctctcctcatcgtaggtgtcgttgccgaactgcaccatcttctgcaacagagtgttgaggcgaagagcaaagtcatcaacatcctcacctggcttgaaggccaggttctcgcactccttgcgaagtgcctgcagtgtggtcttgcgggcacggtcgctgccgatgcgggtcgcagcgatgcgtcccatgcttccttggcagcccgcttctgcgaaagcgaaaactgcatctctggcaggacgcttctgggaaagcgaaaactgcatctagtgcccatcgatcctcgtagtagtcgacgacgccgtaccacactgcttcccacgtgacgaacctggagccgtaccctcatcaccgcggcccactcgacgtagttggtcttggtgagggtaggccacccaccgtcgggaccgatgtccctgacaacggcttgggccccacggtgaccatggtaccgatctggggagggagagccgcgccgcctgtagaggccgcgatctctgtcgacccggccgccgccacctagagcatcgtcggcgtgttcgcgcccatctgggctgctgccgcgtgcgttcttgcccggagcgccgttggcgcgtctacgcctatctaggctgccg

SEQ ID NO: 153515 - DNA, 567 bp, Zea Mays
acgaaggtgaacttaaggttcccctgagccatgggcaggggcccaacgatgtctaggccccagcgctgaaggggccacgtgtgggcgatcagcttcgtgaactgcgaggggcaccctgagcgtggggaaaatttctgacaggcttcgcaggatctgacaacccaattcgcggcgcagataatggcgggccagtagaagccttgttgtatcacctttgccgccagggccctggggcctgcgtgggagccgcaggtcccctgtggacttcgcgcaggatttgaacgccctcggtctcagtgacgcacttaagcatcggctggatgaccccctttttgtacagttggccctcgatcaatgcgaagtcccggcttctgtggtggaggcgcttggcctcgttgctgtcgactgggtgatagaacccttgcaggtacagggttattggcgcccgccagtcttcggtcatgataaggttgatcatgcgctggccctcgctgtcgttggttatttggagcccttcggggctgcggacggctggtgtgccgatgacgtgatagaacacgtcagagg

SEQ ID NO: 153516 - DNA, 480 bp, Zea Mays
cgagggtagattgtatggaagcggtaggatgggacagaaatccttcatcccaccaaattataatacagtacttgaggcacatcacagcatcctacatcagctagagataatggagccatttatccaacacatcaatgagcttcgcgagcaaaatcctgggcaaacatatgattgggtaatgaagcgacataagctgcggttcaacacatggctaattgtgaaggacattccacacagagatacaatagaagaacaaaccattaatgggttggcatctggaccatcacgccaggtcacgacatggcaaacatatgacattagtggatttacattttgtaccaagtccaaggacaaaagaagcatatcacaaaacaacggtgttcgatgcaaggccatagacgatgaaactggtcatactattacatattttggctttattgaggacatatgggagctagactatggtacatttaatatctc

SEQ ID NO: 153517 - DNA, 573 bp, Zea Mays
gatggtttagcagctagcagagagaaaatatacactgccgtggagaggaggagaggatcggactggaacttggaactggatccggctgcgtccggcgccgtcgtgtaatccccatacttactgctacctccgtaaacttcgagagaggatctgagcgccggaagcggtgctcgactcattcccaaccacgtgctctaacactccgtgtacctctcgggttgttgcgccctcgccgggataagatcgtgcctcgctaggttataaaattgtgctctgttgtctaaccgtgcggccgaaacaccagcaccagaagctaccgcgggggaaggatctaggttggggaaaccatgtgtcgccgccattacggctgggaaaactgccgccaccgcgggacctcgcctgggttgccgtttgggtcatgtggtctggcctgggggcttcacaacattgcctgggagttgatcatggttgttctggacggaatggtgctccgtggctccatcgattgctcaccggcactgaagcaccaccgcggcgccgcttcatgctgcgggccggcctcaccacaacgcc

SEQ ID NO: 153518 - DNA, 695 bp, Zea Mays
accgcatggaggttgtcttacctcagatcgagcgccgggaggggctatccacgtgatgaggcggtcacgcggcggatactggattccggcaaggaattgaagagcttccggtgatcttcacagcgtactggggccacggccaccaccagagccatccgccgaagctttctagccacaaatcgaggccgtgacgacggtgaggctgtggatctacgtcggcggcccgctttctagctttttccccacggcggccatggcggccggaatctcctcttctcagcacacggcaacgagctatatcacggtgcaccgattagagcaggcgagaagggggaaaaagcatggttcgatttatacaccggcggcgaagtccgagcggagaaaaaggcacaggactgttgaaggccgatcttccgcgcttctgttgcggctagacgcggaacgaccgcatcacgaggggaagggagcgtaatccacggaatcccatggttccgagtccgttactgcacagggaggagggagctccaacagagctacggcgcggatttggggaagaagagcgggagaaacgtggccagcgcgggcgactgaccaacggccgagaagctgtacgtggagggagaggctaacgcccaaatccaaggcggcggcacgcgattcgggcgaagcatgcgtagacgaggtcgcgaggaatc

SEQ ID NO: 153519 - DNA, 333 bp, Zea Mays
acttcagcgcccgtcctcgccatgccagatttcgccaagtccttcaccgttgagtgcgacgcttcctcttttggttttggcgcggtcctcatctagggaggccacccgatcgccttcttcagcaggccgatcgctcctcgacatcgcgcactcgctgcctacgagcgtgagctcatcgaccttgttcacgccgtgcgacactggaggccgtacttgtggggacgccgttttctggtgaagacagatcactacagcctcaaatacttgctggaccagaggctctcgacgacgcaccagcaccgttgggtggggaagcttctcggcttcgatttc

SEQ ID NO: 153520 - DNA, 567 bp, Zea Mays
tttttttattggatctcgtgtgatccttccagcttcaatttctctctagtttttgtgtcctgtgggatttttccgctgtaccaaaattttcagttgttggtcaccatcagaaggtggtacaccaaggactaaatttaggaaggtgttaggtcacagaagaacggagcaaactgtttttttttttcaaaaaaaaaatgagaagaatgtggaggggaacctttttcgatttggtttgcccgttgccccatgaatcgctgcattcaggatgacttatttcctcccaccagatcctgaatcttctctgaccaacagcaccagatgtctgactactctgaaaaccttgttccttgcaatgattctgacagagaaacaattgtgcttggtttctcatcgttaaacttcagcactctgcctagtattcctggccttctttacattctgtcttttgtctagattcagatgtttgcacagtatagtgttgtttgttacttggtagttggtacttgcatccattgggatggtactgggccagtctttaatcagctcaacattgatgtcattatgtta

SEQ ID NO: 153521 - DNA, 691 bp, Zea Mays
ctagccactaccactagctagatccaacatccaatgcactccgccggtccgcccttaccgtctgtctgccaggtagaccatcatcagtttttatttactataacgctttagtacaacatacaaccgcttcagtattttctcacattttcttttacaaacccttatttaaaatggaacatgtcatttggttcattaaatatatgatacaataatgctcatcatcctcctcctacacatcttccttattttctttctcatctagttttaaatgtttaatgatttttacgaccaacctgtggattcttttcatatcatcgtccatgttagcagtacaatgttccaaaaattggtaaagtgctaaaataatcttgattaagttgtcctctagcttgccttgtagagcttgttcatcgtgctattctcccatgtcagggcactcgttgttggcaaattttcttcgtgttgtgctcttgtcgtactatggccaatacgtcgtgttggtctgatactatttgatgatgcggagctataatcattgttcatgttgtgatgggatcgttttctcccatcactagagtcatcgttactgtgacgtgcacatcacttgtgttgatggcgaagagcacaccagatgtactccaacttgaagtctgtttcatcgagcctgttgtggaagctctcctttgtcgct

SEQ ID NO: 153522 - DNA, 909 bp, Zea Mays
cttgcctgccgcgcgggagccctgtgccgcgccgcccgagagccctgtgcgccgccgccctggtacccctgcgcgctcctcgacccggtgctgcgcgtcgtcgatccagtagcccaaccctccgatttcagtaagcttccctttctcttcactgaatgcttaccaatttgagatttgagatttcagcaagcttccctttctcttcatgtgccatagttttttctgtagcatgtcatgcattccatgtgccatagatttcaataaacttcggattaagcttccctttctcttcatgttgagcaattctctttgatgaaacagaagcctcatttacatggctctttgagacctttctagctgcccataattataggcaacctagaactatttatactgatcaagatgcagcaatgggaaaggctatacccaatgtgttcacggaatcatatcatggattgtgcacctttcacatcatgcaaaatgttgtcaaacacttatctccagtgaagggccaagagaaagaatctcatattctctctgattttagtgcttgcatgtatcgctatgaggacaaaatagaatttgaagaagcatttgacagcatgagatctaaagtgcataagcaaacttggctagatagtatatacaaggtgaaagaaaaatgggctgaatgctatatgagagatgtctttagtttgggagtgagaagtacacaactaagtgagagcttcaacagttcattgaagaaccatttgaaatcagattttgatattgtccgttttttgaagcattttgagaggacagttgaagaaacaagagctagagaactagaggctgaatttgaggcaaggaagaagctaccaagaaggcggatgtgcacacctatgctaattcaagcaagcgatgttt

SEQ ID NO: 153523 - DNA, 395 bp, Zea Mays
ggcacaataaagaatggaggtatgtcaaggcttacacgcggtaaagaagaggatattgccaaggataagataagtaaaacaccgttctcaatttgggataggagattggagattttagataacagaaataatgtcatcaccaaggtatggtcgagagatgggaaaggtcaaggcaacgctaaacaaagacacaacaaaggatggagttgaagattcacaagcgatgaggaagaggatacgaccaagggaaaagtaggtaaagtacaacactcagattgagatggaaaagaggagattttaaagggccagtataagataaacatcaaggtaagatatagaggtgataagggtaaatgtgataatgatgaaaagcataatccatggatagagtcaag

SEQ ID NO: 153524 - DNA, 427 bp, Zea Mays
gggcgacacccatagagcacttcaaatggcgaccttcccgtagctgaatgtggagacgagttataccagaattgtgcaactgatagccacttactccattgatgagggcaggcatggacaaaacaacgaaggaacgtctccaaacattgatttacacgctctgtttgcccatcggattgcggatgataagctgagctcatacgtagctggacatcagcaatccgaaataattccttccacaggttactgagaaacaccttgtcataatcagaaactatagaatgaggcaatccatgatgtttatacacttgatcgtggaaaaggcgagcaaccgtcagagctgtaaatgggtgtttcagtggtaaaaaattggcatattttgaaaacagatcgacaaccaccaggatgcatgtatacgaatgtgaac

SEQ ID NO: 153525 - DNA, 629 bp, Zea Mays
tcctctgcctcgagctcaagctcatccagtagcttgttccgccttgcccacatctcctccctgaaggcgaggtcctcctcctgccaggtgagatcggtcgctcgtttctctagggaagcttccctcaccttgagactttcctcggcacgagcaatgttgttggccttgtcggcaagttcctgttgcagcttctgcagcttcgcctcagccgcagcctgcttgtcctgctgtttctccagcaccgtattataagctttcagcttatcatggaacgctgtgatggcctcctccctttggtctaagtgttccttcttcttgaccaagcttttctccttccgggtcacctcctgctctcggtcagacaccttccggatgtcctccttgaagtcctcatgctcctgctcaagctcggcccgctctgaggcgaattggcaggacaccgccttagtgtgcttctccagttgggtgaaccagtcgccaaggcgctggtgctcggtctcgagcgcctcccgctcccgccggatagccgcctcggtttcctagagggcctgatgagcgcgggacagcacctgggggaggggagtcagcattgcttcaggtttggtgccagaccagagcggtcgcccgag

SEQ ID NO: 153526 - DNA, 547 bp, Zea Mays
agcatgtactgatccaaagttaatagaaaaaatcaaaatcttgaatttataatcatagaacttgaatcaaacatttgggcttacaaacaatatcaaacaaaaaacattgtcaactacaaatttataggtcacattcagatctacaactttggtatatagcatgtcaatgtctgaggtcgtctaaaaaataaaaaaaatggatttcagaatctaagaaattaaaatgaatatttgggcctctaaacaatccgagataaaaatgttgtcaagtacaaatttgtatatcacaatgaggaatacaacttcggtatagactatagaccatgtcaacattcgaggtcgtttgaaaaaaataaataaaatggatttcagaatctgataacctaaaacaaatagttggaactttaaacgtcaatgtctgaggacatctaaaaaatggatttcagaatctgagaaattaaaacgaatatttgggcctctaaacaatctgagataaaaatgatgttaattactaatttgtagatcacaatgaggaatacaactttgg

SEQ ID NO: 153527 - DNA, 372 bp, Zea Mays
tattggcaatttatgctggatccgatacgttgcatctgccatccagcagtatagggagtccctaggcagttctctgtccatgctgctaaacatatgccccttctcgatgatgattctattctaatatttaggaatcaaatgctaggtgcaactgttttcctttcacatctttccactagccactacctggtctatgaccaaaaacaaccatagggtcagtgaaccatcctagtgttctcctgattaaacattagggtctagatagactgcaagggacaacttcatttgggtgttgcataggtcaataactttttccccttgctgcagtggtctccaccttgcgcagcagtgtacctcatctagacattcttt

SEQ ID NO: 153528 - DNA, 435 bp, Zea Mays
accatttggtttatagtatataccataccagacaaaggactatcccaagtcaattcagcgactataagtatttaaattctgagagatgtatgcaacacaagcataaaggtcctagataggccgagtaaagtggttcgacgagaacacacaatgttttttcacaccaacatagtgaaaattttctcagaataacatatgctcgcaatctctgtgttgctaggggttacatgcccttttatcttagaatttgcttcatgtcgttcagcgacaaatagagcaatgtgtcaacaactggttgagcaatatatgactgaaatttctagcctttattcatttggcaaggtcatattgcttactaatagaatcccaatttgtgatgtcttctgtgccaaaaaggctttcatgcatcatattatataccttcgggttacttcg

SEQ ID NO: 153529 - DNA, 349 bp, Zea Mays
aatgactagaattgagagattttaggtagataatcatccgatacttgagaacgggttatagtagataactagataatagggcagaatcattaaaggatccggagattcggatgataaagccacaacatgattcacaaaggtaaaggtttactagatcaggcgaaaagagaggtcatcaaccccgatggctttgaggctgagggaaaatttaatgaggattttggacaaggtttcaaaaaagaattgaggctcgatatggtttgcacaactagacaccaaactgtttttacataaacacgtgcacagagaagcttaggtccatctagcggtcaagctatggagatctaca

SEQ ID NO: 153530 - DNA, 504 bp, Zea Mays
cgggtttatatcctaaaactacaggggcccttatgcgaattagcctggccgaaggggtatcggcaggccagagccgtccgatcacacccgatcggacgagattagaacacggcgcagtaatatgttgcaacccgccctgaccatcagatccaatatcaacggttaagggacggccacgccctggctcgatcaaaaccccacacctgcgatccaacggctaagcttcaattgggcgaaggggtgtctatcttctaatcctggccgcctatacagggatcaacggtgggcatcggatctagtcaagcaatcacctcgacctaaactgagcccttcccagaagatcggacggcaccaggcctatcccctacctcccaactaaccgagtacgccgccgcgcgtcaacgacggcgaattccatcgccggtgaagcaattccccaacgccagtgcattaaacttcaattagaaaggttctactcgttgcggcactgcacgcgaacacggg

SEQ ID NO: 153531 - DNA, 1005 bp, Zea Mays
gaatgcttatacctatggattttttaccattaaatggtctccactaaaaacccaagaatgtgatttgtgtccaacccatattaaaatgtaaaccaagtaatactaaaatccaaagatcataaagatttaagggcaaacaatagtaaaattgtagagatagtactatttatccaaacattaataaatgtataaagacagaaaaatttgcccaaagccttaatctttaaccctatgcactaaacgctgaaccccaaaccttgaactcgaaaccctaaacgccaaaccctaaaccctatgtatcgaaggataactcatatggctttttgaccattatggtctccactaaagaaccaagattgtgatttgtgtccaacgtaaacatcaaaccctaaaccctatgtatcgaatgcttacacctatggattttttaccattaaatggtttccaccaaaaacccaagaatgagatttgtgtccaaccaatattaaaatataaaccaagtaatagtaaaatacaaagaccataaacaaaataagtgtaaaccatagtaaaattttagagatagtacaatttatccaaaccttaataaatgtctagagacagaaaaaaattggccaaaccataaatcctgaaccctaaacactcaaagccaaacccttaactcgaaactctaagccccaaaccccaaaccctaaaccctttgtatcgaaggataactcataaggctttttgacaattatggtctccactaaagaaccaagattgtgatttgtgtccaaacactaaacacttaatcataaccctcaaccctaaacactaaacaccagacccaaaacacttaaccctaaaccctaacgccaaccctaaacattataaccttgaccctatgtatcgaatgcttacacctatgcattttttaacattaaatggtttccacaaaaaacccaagaatgcgaattgtgtccaaccaatattaaaatgtaatccaagtaatagtaaaataca

SEQ ID NO: 153532 - DNA, 375 bp, Zea Mays
ctcgtttgatcatacagaccaggtcagatctcggcaggtttacttcacctgctacacctaatgctagactttcttggtgaaccctgaattagcttgattcgtgtgttaaagcttcatgatttaaatcaagtttctgcaaattaataattatacatgtggccttcacgacactgcctattattttcttcagtttaccaatgcatcttaaatttagcagatttatttactgttttagggtggttatctcaacctaactatgcatgccatccacactattccattatgttaatgtgttctataagacatgcatgccaaccactctattccatacttcaattgtcaccggactagaggtaggggtgttaatgtgctcta

SEQ ID NO: 153533 - DNA, 886 bp, Zea Mays
aacttgaacgttgaatataggacaccatcaaagaaaaaatatatacttaaggtgataatttatatttgaattttcatatagtgcatcatgcatcattttattaatgacatatactttgcatctttctagagaggaatgtcatttgacgatgtagaatctgtagagaaattttataaggaatatgcacatgaaactggtttttatgttcatatagtgttttttgtgtgcaagggcaggatataaattaaaagaacaaactaaattcacagattcttctaggaatatgcgcagaaaaagggacacacgatgtggatgtgaagcttatatttatattaagcgcacaagtgaaggcaagtaccaaataacaggtctacatgagggacataaccatgagtttgtgacacccagcaaacgccacttacttcgatccaatcgttgtgtcagtgagcaggtaaaaactactcttttcaattgccataaagcaagcataggcacttcacaagcatacatgctacttcaagttggtgcagggggttttgagtatgtgggctgcacaaaaagagatctacaaaactactatagtgattttaggaacaaaatcaaagattttgatgctcagatgtttattgacaacttgcatatgttgaaggaattggacccgaactatttctttgaatatgaagttaatgatggtcggttggtacgagtgttttgggctgatacaactagtaggaagaattatgtccattttggcgatgtgttatcttttgatactacttacaacacaaaccaatatgacatgaaatttgcacctttcactggggtcaatcatcatatgcgttctattttctttggtgctgctttcttagcttatgagaagattgat

SEQ ID NO: 153534 - DNA, 576 bp, Zea Mays
ctttcatcctatttttcctctgtcgacccacagctcgttttccaattggagcaccaacttcttttgcgaaagggacttctggccaaaatgatttgtcaccgataggtggaaccacccttgagtatgctgtggtgaaatgagatacagagtagtactcatcgacaaaatcctccattctgacatccctaaattcttgagctgttgtcaagcataaagcatggttacatggtttgcccgtgtgctgccactctttgcaagagcattcccgcaaatgagcattgacaatgtgctttgaatgcacatcattgttatcccttacctcagcaatgtagttgtcagctttacgaactgataaatgacttaaacctctagttctgtcgtgtaggatatgcaggaccgaaggtaaaatccttccttgcaacctttgtgcaatcctcctccgcctgtgaaacatcaccataatttcctcctttatcctttcagccaaatcacatacaggcagatccttccaatccttaatccaattgttgaaaacctcagcaatgttgttagtcacatagtcgcacttgatgtccg

SEQ ID NO: 153535 - DNA, 705 bp, Zea Mays
actgtggcacgctgtgaagtcgatctgctgcttctccaagtcaatgctgagatcgatgcagttgtggggtctgggcgtcgcggccaccgtcgtgcacccgggcatcccgctccggcacactggcgacgccgatttcgtcttcgagtcctacatggcgatgcagaggttcgtgaacttccaccgccgcgacttcaactttctggacgagcgggagttcaacgctgcatccgccttcgtcgcggcctccagtatcagcatccccgaggaagcacaactgcgtctctacaacttctacaagtttgtcaccgagccgtccgcgttcaagctcaaggagctagttcctatctggaatgcagacgaaggaattgattcagtatgtgatcttaatgctgctgaggttcttgcagaaacaaatacagttctgaatgctaagcacattgaagggcactggacactccaatatgatgttgtttgtgatggagaagacgtggcagcatggctcatccaacatcatattgaccttcagattaaggacatggttctcaacaccttaaccaacaggtgcttgaggaattgcttcagtctcatacagagttcttgcttgcatccatttagttgtggttgggatgcagtgctgcaccggcaaccatggccgccacccatgcagttggtgatacctgctaacggcgttcaagtcagacctct

SEQ ID NO: 153536 - DNA, 483 bp, Zea Mays
gccaatcatcaggtatataaagaatgaagaggaaccagatgataaaaatgcagctgagcgcattgccagacagtcagctcactacacactcattggagagacattatacagaaggggtgcaacatgcgttctcatgaagtgcattctctcatctactgggaagcgacttctggaggaggcccatgccgggcaatgtggaatacatgcggcgtccaagacactagtcgggaaggtttttaggtcaggattctattggccaacagcgaagagtgatgcagccgagttagttcagaggtgcgaagcttgccagtatttgtcaaaacaacaacatctaccagcacagcaactgcagaccataccggtaacttggcccttcgcatgctggggactggatatgattggacctttcaataaagctcaagcaggatacactcatgtgttggtagcaatcgacaaattcactaaatggatagagttcaagcc

SEQ ID NO: 153537 - DNA, 493 bp, Zea Mays
cccatcttattattccctcggcacccccatggccccacattccctttgggcagcacacaagctccacacatctgacctgttgggtttgtgttctattcggtgtttgccaagtcccattacccattttcacttatcccaaatcggccagaggataggttctgtgctttccttttatttttcccaatttctccattcccccccccttctatagtctccttagatcaggttctgcagataaaagcaccagaaaatgaacatccaagcaactcattgacaaacaaaactgaactttgtaagaatcaatttatacacttcctcagatcctcagctcaagcacgccttgcgaatttattttattaacgatacataaaggattgaatttgtattttaaaatcttcatgacagcttcgtttttaaccatgttgagaagtacccttgctccttaaggactacaccagcgaggtaattatgtctaaaattatcctgttttcca

SEQ ID NO: 153538 - DNA, 706 bp, Zea Mays
cgaagccaaaacagtcagagagcgcagcgtggtgtgatccttgcagggactgataacattcgacagacaaaacgactactgaataatatatcggcttcaagtatcaagttttcagaatcagaaaataaaaggtgattgataagctcatgatcacatcggcggataccagagagcatcaggcaataccctgattacatctgcagacaccaggaagcggggagcctccctccgcccaagccaaaggcagcattgacaaatatgaactaacggcgggcgacagatattcgagaaggtagtacaatttacaaccacagaaattactttattttacagctgtttatcgcacaaaaccagttcacaaatgttaataacaatgtcaaatcatgtcagtgcgaaaacaaaccgcagtccatgtgataatgaagcagcgttctgaatttcggaccacgccctcgtgaaaatttgtagccacggtcaaatatgcctactaagagaaattctgaacaagcatagaccacacagatttcatagtctgaaagatgttgcggccatgaagttcagagggaacaaacaagtgagaaccaccagttgactacagtggtaagaagccagcacgttttgtttcacaacttcctaccaaatgaataacattagcctaaaccattccagacttctgaactagcagttgcccacaaccacattgtta

SEQ ID NO: 153539 - DNA, 469 bp, Zea Mays
cgattgctttctctgaagaaggaaggcttataagccggtagaagctatgttggctggccggtatggtcataaaaatgtgcaagccgtgacgatgacataggtcgcgtgggctgtgtttctttggtgcggcccaagtagctgccaggaggccgcacgcttcttaccctgacccagcttaggctttagggtcagtctcccttgctttctctgcccagcgagccctcgccctctagctcttcctgctagcgccgtctccatcccgtgctctcctcttcatcgtcaatctcagccatctcaggagcacccgctcactcccagacgcccgcgcaaaggaatcccccacgatctccctccaaacttcccactccctccacgatccccccctctagctcatgatccctctgcccgccctcacccccgcctgccacacccacgggcgcaacaatccaacaacccacacttggccccg

SEQ ID NO: 153540 - DNA, 352 bp, Zea Mays
ggatcgatgccagatcaactaaatctaactcgtaatcactagagaagaagtgttcatgaaacttatgctataaatcatcccaagaattaatcgagttaggaggtaacacatcataccaagcgaacacagtgccagtaagggatagtgagaataggcgaacacgaaaagcttctgtgtcgtccaattcccccaattgtgctagaaattggcctacgtgttcgtgagtgcctttattgccttcgcttgagaatttggagaaatctgacatactagtccccggaggatatggaacggtgtcccattgagggtcgtatggcctctgatgggactatcctaggccggatacactgac

SEQ ID NO: 153541 - DNA, 1000 bp, Zea Mays
ccatcgcctggcgaagtctcatgtacattgagtaacctggaagggtgcagttggatggatggcattgcttaaaggagtggcaaaagccaaacatgtggaaggtgagcgccgagggtgatgagcgtcaagctggggttttgctttgaactaactagccaacaaaccaaaagctacggaggaaccatcggcccatccttcgattgcactacatccatggtctcttatggatatatataccaggccatgggtggcatatgccctcttctgtgctcggaggcttgagcagcagaaccatcaaggcctgatatttttcttcgtggttgatggttaggaacaatttgatcctgcatccaatctaaggtaagttgcttctatgaattcgttcgttgttattgtaatgtagttgcagcaatatagtattcattgttgaggttatgtttttagttttaatggatctagttgctctggtttgatcgattattgaatctgctgttctgcagttattttacctctagactagaacttcagtatcaaatgtaaaaaatctgtgatctagtttcattgaaggatatatgttatgtgcttcatcaaaaaggttagattatgtagcacccgtcatgacactttccgaaaaggcagtagtgctagcgcaaaacaatcaggaaaacatcatttttgaggctgagttggccttttgaattgtctcttttgttttcaacgttttattgcttcttgatagtttagtttttttttcggatgaagggtacttagttataataatggatggttacgtgcaaaactcttgcagaggccagaatataagtgctgctccgtaagctgttatatcttgtgtatacgaaacgcgcaggtctcttccgttctcgtctatcagtgggccattatctcacagatgtgagaaacgatacaaactcaacatgacataaagccacaaacagtgtatcgctcccatataataccatctcgttaattgaaggatgac

SEQ ID NO: 153542 - DNA, 394 bp, Zea Mays
caacagggcatgtcttgcccttctactcattgccctgcagccctatatggccaggcagtaggcacttgaggagttctaccaactccattgactttgctagaaagagacaaagataggagctaagcaattactcaacaattcttcccctaattgtgatgctccttcttgatctcctccactcccaccttgttcctcaattcctggagccaaagacgcccaaggggcttggtgagaaggtcaccgtctcaccgagctgtcgagccgtctcgacatactcgatcttgatccgtgcttcctcaatgcagcccctgatgaaatggaacttggtgtcgatgtgcttgctgcagtggaggatggggttctttgccaaagaaatggcagacttgttgtccac

SEQ ID NO: 153543 - DNA, 407 bp, Zea Mays
gcaaagttggagctggtctattaagatacaactttgctgcagagcattgatctaggtgccatacaaaaacgggaggaaaattcgccccaaacatggtctgagagactgactgaagaagaatccgatggtacattaaacaaaaaaatcttctgttcagcccccctcgccgccggtggcctttgcgtccggatttgcgccggttgccgtgattcgtgcctggcacgccgtggatattcgcagggaggtaactttggacgtgtcgcgacctcgcggacctagcccgagtctagtaggagataattcaccggtggccaccgtagctcggtcatttccgccaccgtgtcatccatgcctcgctcctccctcactgtatcccttctttacgtggtaaccatgcacgaatggtg

SEQ ID NO: 153544 - DNA, 391 bp, Zea Mays
ggaagatcggttagataattgctgttggataaacagatgtgatggggcgacgatgaggatatgcttgtatatgcaccaatgccatgcacgccgcatgcactgctaggcttgcgaaaggtctttttaccatgtggcccacaggatttggctggtttattagtattagtgcattgtccaatgcaaccagacaaccatctgccgatgaaggataagatagataatgcacctaccggtctgtggtgtttacttatcctaaatatcagagattagcatggaagcaaagttattattactccatcttgaccaactgaggcggccatagcgagcgctttctgttctcgcttatcctcgaagaaactgtcggattcatgacgttgacaagatatatagg

SEQ ID NO: 153545 - DNA, 410 bp, Zea Mays
gtagctgaaaggaacaaccaaacagtgtgtgacttagctaatgctttgttgcaaagttcagggatgcctgatatctggtggggcgaggcagtactcatggtgtgctatgtcctaaacagggtgccgcctcgcaaccgtgaggccacgccctatgaaggatttaaaggaaggaagccagatctttcgcatctttggacttggggctgccttgtgaaggtgaatgtcccgttgcccaagaagagaaagttaggccctaagaccgtagattgtttcttcctgggttatgcacataacagtgcagcttatatatttctagtggtccattccgagacaagcgaagttgttataaatgtaataatggagtctcgggatgtgacattctttgagagcattttccctatgcgggataa

SEQ ID NO: 153546 - DNA, 828 bp, Zea Mays
ggagacaatctcattcattcttggcgcaagtctatttgctaaaattttggttacaattttcataaaactgttgatgagactgatcggtctaaacatgtcaattctgtcagccccctctctcttttgcaaaagtgtgatatttgcctcattaaccagatgcaggcttttgcatctatgattatagaaatcatgaatagcattggatagatcatcctttatcagttcaaagcaagacttataaaataatcctatgaacccatctggacccggcgccttttcagagtgcatccccataaccacattttttatctcatccacgttgatcgtagagtccagatctgataactcaaaagggctatagcctaagttgtcccaacgaacagcatattgtctagcacccatcctaccaaaaactgtagagaaatgattatgggcctcgagcactttatctccctgactagtgagcagtctgccgtctcgaaccagcgatctaataaaattttttcttcttctgttatttgccatcaagtggaaaaattttgtgtttgcatcacccagacgcatccagtcgagtcttgaatgttgcttagctcttgccttttgaactgacactaatccgaggattttcaattttaggcttctcctgaattctagctcatcaccagagagctgtctcaattcttgtgctctctcaaggaaggcaaggacagtctgaatgattgctagttgcactttaaaattgcctacagtctttcgactccagatctttagagctttagccgtacgggccattttcacatgcagccgaagaatggcatctgaggaact

SEQ ID NO: 153547 - DNA, 1212 bp, Zea Mays
gattttttgattaatgataacgtaagattatttttgacgtgtgttttgcagagcaaatagtaagttagatcacaatgcagcaaaatagtaagttagatcacaatgcagtaagttacgctacaaccggtcaaaacaatcccttagatgagaacttgaagctaggctcctagttgattttttgattaatgataacgtaagattatttttgacgtgtgttttgcagagcaaatagtaagttagatcacaatgcagcaaaatagtaagttagatcacaatgcagtaagttacgctacaaccggtcaaaacaatcccttagatgagaacttgaagcgacgactgaaaaacacgagtcaagatgaaggtcttcatatcctaagggtcgaaggagttgtgggacacttggtatagagttagaacttttaattttattttagccatactataaagaggagttgtggatgagtagtttgaccaagagataactagtgtagtgtcggtgcatgttcacactcaaaactagtgctatgtgtcactcataacctcactcacaagttagaatcaaaatcagtttagaaaaaccctagattagaaacaagtgcagctgctctaagggtaccagactatccagtgtgcaccgaacagtacggtggtcccctcgacagctggctagagagcgcccaagagcaagcacttggcgctagccgaatttttgacagacacccgactgtccggtgtgcatcggacagtctctatgcattgtctggtgctcctcggtgtaatgactaactgttaggactagccgttgggagagcagcattggcgcactggtggcgcaccgaactgtccggtacgcccataagcagaaaggccagaaatggctagtttggggtggttgggtatttatatcccctccactagtcgtatttattgccttgctgccccaactaacttgaattcattgctagagcattgcaagtccacaaaacctagtgaggcgattagcaaaatcataatctcatgttagtaactcattagagcccatgagagccacatagagcacacactacatgcattaagcttctcttggtcaagtgaaagtctatagcttattactcttgtgatcggcatcacctagatgggttagtggcgattggagctcagtgatcaccccagaggatttgttggtgacttgactcggtgattatacgcggt

SEQ ID NO: 153548 - DNA, 303 bp, Zea Mays
aaagatcagctcatccctaatgaactttccaagcctcatcgcttatgtacgtacagagggaatgcttgctttttgaccatgccaaacacttttagcgacttgaccaaaatctaatttcattggttcaggcatggagcttgtggaaagatggaaatgcattggaattggtcgactcatcaatttctgtgagttattcacttcaggaacttgtacggtgtgttcagttagggcttttgtgcgtccaagaccctccaaatgcaaggccactcatgtcatccatcgtgttcatgctagagaatgaga

SEQ ID NO: 153549 - DNA, 596 bp, Zea Mays
ctggatgtgcatggtgaatagttgtggtttcgggctagaaatttgaattacatttggctgcgaggaaccttgtggagagtggagactggagacattgcgtgttggggccgcaagctggatcttctggtggagctccgagctctctgttggtgcgcggatgtagtcgcatatggctcgtttctgcttaggctgttggacaagtgtcggtgctcttttttattcagccgaaacaagtgagtcgttatgcgtttgcataaagtaaagttcaaatcaactggaacgaatgggtctgttttggcatgtgttagtgctatttttgtaaacatagtaggtttatacaggcaacaaagctttatgctaaaacggggctactattctgcgctggtctgtggtattaggtaatagctggagtgtggtcacaactcaccagctattttgtgtggcatattagattccccgtttcatcaaatttgatgatgccagggcccaaggatatcgattctgtgtgcctaactagatttagtgtggccacctagctttctgttagcattccttggttagctcagataatcagtacacaggaatttgccctattg

SEQ ID NO: 153550 - DNA, 657 bp, Zea Mays
gtgcggcctcaaacgtgtttcatgcttgcatccagcatacatgcctttgcaatacccattgttgtttccttacggtgaaacatggcttccatcttggtattaggtactttggtgatgacgatgttggttcatcaaaacgaaaatacgtcacgatgcttgagtttgtaaggagacacatgcactacagattggacgagccaaacccatatacgtgttacggtagattaagtgatcaaatagatgtcgatgtgtattcaactatcgagggaaacatgctacagttcatagcaagccaccaaagcgatctacggtcagaaacagttcagggcatagctgacgccattgataagggcttcgttagtgctgattcgattggcggtagggtagttgtacctgccagcttcactggtggtagaaggtaccatgtcatgaattaccaggacgcgatggctatatgtagggtatacggaccacctgatctttttgtgacttttacttgtaataccaagtggagggaaatagcagatgccttacgctttgaacctggccaacaaccatgcgaccgttctgacttggtggtgcgtgtgttccatatgaaagtaaacgaattcgtatcggatattagagagggaaagacatttggttcgatacttgcag

SEQ ID NO: 153551 - DNA, 665 bp, Zea Mays
caatccattccaatacagttcaatccacatagaattggaataagcgaataagggcttaagtgggttttgatcccgaacaagtcaaaaaaatttatattttttcaatttcatttaatccacacgagataagaataaccgaacaagtcctaaatataaataaatggggatatgggaaaagataaaccaaggcaagttttctttcataaatatgaggaaaggtgggttcgaacccatgacctggtggctcagcgagaattcccaccactgtatcaaacatattctttacatagaaattgtttcttagacaaatagttattgtataagaagttttgtttgatctagaacatcttttttgagttgccgcaaaaacgataacgaccatatcaggtacaatcgcacatatttagtataatcatgcaaccaaaacataaacattgaggtgtgatgacctattttaaaaatagccttgagatgtgtaagtttttttaagtatttttaaaaagtcctttgcacctctatctttgtgttttgattgcagagttacacaaatatgtacggttatgcctgatatgtttgtaaaacagtaattttttggatatttgcatttgtattattatagttctttaagttttgaaagctaccattattatccacctacttgaaac

SEQ ID NO: 153552 - DNA, 430 bp, Zea Mays
gggcatcttaattaggtgagatgtttacgacaatcgcagttcatatctacacctatcgaagcttcccctcttcacatagtactgaacaacaggtagacttgagtcttggaaaacttcaagctgcttcctaacagtggaaaccaaattaattaagaaaacaagtgctagccactatcaggtccactcgcattccaactgcttaggatactcacttgttctgaatgctaactacaaatgaacgctgctttagaaatctatggtacctacaaaagttcgctagtttcagagtttttatatctgtgatttgtgctgaaaaaggttcttccttttctgtcgattttctagacgtaaattttagtatcatttgcagttgtaactgaatttacaaactgagaagtgttttgtttcatcaggaaagcctgcacgtgga

SEQ ID NO: 153553 - DNA, 489 bp, Zea Mays
gcgcccagggcggacagactgaagatggccgcgatgctgctgctaccgaggaagcgagttcggaggatgaagttcttcggtcggcgatgtacgctgggttctcgtcggaggaagcaagtgtttttttgcaagagaagaagaattcgcaggtgtctcaggtacgttttgatgctcaatttagagaagatttctggattgatttgggctttcctaagggcagccgctggtgggagaactcggattctcccattcatggtgcgcctgtgaatcctaatgctgttgttcgatccgatgctagtctgggcgttcatgaatcttcagagagcctacaggctagcctgaatgctttggatctggaatctaggatcggaacacatacggatcaaaataaaagatcattcgtaaacagttcatcgatccaggattcaggtgcacacctaaaaccttctcgtcgtggtgtccatatccggccttggcgcggtcctctcc

SEQ ID NO: 153554 - DNA, 500 bp, Zea Mays
cttgccctagggtatatgaatttctaagtttaagtctcggtaacatgcttgaaacagttattaaaagtacaccttatcttcatctgtaacagtagttggttccaattaataaacaaataaatacatggtgttaatttcaatagtgttttttaagaagtacacacatatgttaaatatttatttctaatcttttgtaggtatgtgaaattctgaagtcgacatatataagtttgaaagcaaccgtgagcataatatcttttccattcctaaagtgcatcagtacttactatccttgccaaaaaaaccggtaccttcgtcaagcgatgcatggctgaatgatagataatggttctttaccttctcagagcgctttgatcttgtgcgatgctggattgcttcagaaaattgtaaatgccagagacaacaaactcgttgaagaatgaactgaaaaataataattatgtagaatagatacctactgcagcccgcctggtcctgaa

SEQ ID NO: 153555 - DNA, 341 bp, Zea Mays
tagccttagcgtgggaataggaggccacatgttggcacttgaaggaccaggagatgaggttgttcccaaggaaaacgatgtagccaaaggtggaccgttgggtctttgggcagcctgcccagtcagcatcggaggagcagacgatcaacacaagggtggggtgtcgaaggagaagttcaaaggtatcgaaagatctgcttgacaaccatgaggtgcagctcttagggtcatgcatgtgaagacaaacttgttagaccacataggcgatgtcaggctggggaaggtgaaatactgtagggcaccaacaaggctccgatagccgtgaggtgcggctcccgggg

SEQ ID NO: 153556 - DNA, 558 bp, Zea Mays
atatacattgtgatagtatgaatgattttgaacaccaccaatatcagcatctcccctatggatattgctttcaggcattgtctttgtgacagtctacaagtttagaccaacacattcagttacgtagaaaaaattgaacaatgcaatattaattatatgtgtcatgatagatcgcgtactttagaaacagcaggttcattcatatcattccatattccatcaacaccattggagatgaagtcctttaccaaactagcccaccaagctcgtgccttttcagatgtaaaatcagggaaaacacaatcaccaggccacacctcccctgaatgtaaactgtatgagacatatcctcctaacatttaagaaaattgacgatgaatcttatttaagtcagtgatacataccaacgaacgggctgccatctgccttttgaacccaaacatcattttttgagccactatcaaaaacgaagaaacccttctccttcttgatgcctggatcaagcatccagactgctttgcaaccaatggaatgaagatcgtccaccagtgattttgg

SEQ ID NO: 153557 - DNA, 298 bp, Zea Mays
ggatcacagaaacacgaagaggagatggtagcgaacatacgaaagggagaattaccagaaatcatgcacgcagaggttgccgaccccggcacttggcggtcagacggcggcgctggattcacggcgagcgattgccatcgaccgctaaccctcagagaccaattagcagtgcgtgcgcgatcaacacggggtggagatccccccagaccttccacaaacgccgggcgacaatgagctcgaaaggaagccccagaggtctgattcccaatggttagggcggacgacggtccggctggcg

SEQ ID NO: 153558 - DNA, 500 bp, Zea Mays
cactgcctcatccaaggttctggccatttcttctgaaacgttgggacaggacgtctcgcgtcagagcggtatacaaggaatagaaaccaaaattgttatgatattgctccttccccatcgccttcgtctgataagataattcatgtatattatagaagcagtcgatatctggttccaacccctggctcctcattgtccagatgaaatctcgattttgatcaaagcttcgggggtgagttgatgaagatgtatctcgaatcttttaagtattttgaccagcattttatgcaaaggaaaccgaaggccagcctttgtaaacaaccacttcattagcttcaggaagaggaacaatattctctccttcggccctcactatagttgtatcacggaaatatttacccttcattgcttcaatctgtcctctcttaacagtggattttccaaacacaacatgacttggcctccacggccgatctttggcgtcattgttgtcactctcc

SEQ ID NO: 153559 - DNA, 322 bp, Zea Mays
cacctgaacaacttgcctgttgtactgtaccacgagcagccacatgatgacgctcctcaagacgtacaaccacaacgacaagcagcaccagttctcgcttcccaagaggaacttcgtcacctacgccgtctacgcgctcatcgccgtcgcgctcctctacctgttcgtcgacccggcagctccgcctgctgcgggttcgggtgcgactgcggcatcatctacgaccaccaccaagccatcatcatcactacctccttctccttattacgaagcatcatcgccgatcatcagcacttcatcagcagccgcaccgctgtgcgac

SEQ ID NO: 153560 - DNA, 711 bp, Zea Mays
cttgttcaacaacgaccggatccctgatcagatcattatcatggtttgtcctcatctgtctgttgatcacgtgttgcatgtcttccatttttgacaggcatatgctgattcaagtgttatcacgggccaaacggcttatatcagcaagatgttcaggagatagtgtggtcgttctgtgtacgacattgcaggcagggtgccgacagcccaaaattgacaccctgggttgttgcctggaggcacaaccaaactggccaacatgttttataaaatcatagttgtctctcttttgtttctatttgggcatgtcttttcttttttaaacataaggcaagagctttgcaattaattgaacacacccacccctctgcacaccgggaataagcatcaagcacaaaccactatgcaccaaagctttatagcagtatcccatgtagacttgtcacttgtccttgatctctatcaaaaagtctatcatggatggcacttttgcactaagttttgtgagtgcgtgagtttattgtagtgtttttgtgtgtatgggcaggctctgctttcataggggctccttacccccctctcattttctcatattcttaatataaaaatatgcagctcttcttcgtttcagaaaaaatacagttatccatgtatttgatgttatatgatacaatattctgtgggtttcttgtaatcttgtgttgctatccg

SEQ ID NO: 153561 - DNA, 844 bp, Zea Mays
catgtgtcctgcagatggcgtacactcctttggataccctcaaatgggttgtaaaggaaatggagatgaactcggtcgaggttaggcagacggttggtcatcctaccaactcatcttatgaactccagcagcttattgacaagatcctagacttatcggattggttggacatggttgccattcaatgtgcataagttattaccaattacaacccaccccctcacccactacagaagagttagaagttgccgaggaatttggacgagagcctccttcataatcttcaattcgaataggttccatgccatgctcgtactcagtgcccatattgtgtagaatgataacacaatcaacaatgaatttgagatcaatggggttccaattgcgagcatgattctttataatttggtatttgtcttgtaagactccaaatgctcgttccacgtccttttggtactcatcatgtttggcggtaaaatacttgtgcttattgctaaatgggcaagagataggttaaatcaaagtagtccacgacagataaatgccgtcagcaaggtagtaagccatatggtattgttgaccattcagttggtaactaaccgaaggaccaactccattggctaagttgtcgaagactggtgaatgatgcaggacgttaatgtcattgcaagatccaggcattccaaaaaatgcatgccaaatccaaaggttatggcttgcaacagcctctagaatcaatgtaggtttcttgtagtaacctctgtactgaccttgccaggtcgtggggcaattttcccactcccagtgcatgcaatcaatacttccgatcatacctggtgttggg

SEQ ID NO: 153562 - DNA, 738 bp, Zea Mays
tacgagtctggatcttactgctgggtaccaccagattcggatggggataacagaagagtacaaaactgcatttaagacacatcaagggcattatcaattcagagttatgccatttggtctcacaaatgcgccagccacatttcagtgtgctatgaactccattctagcaccctttcttaggaagttcaccatggtgtttcttgatgacatattaatctatagtgcttcctggagagagcatgtgcaacatgtgaggatggtgttcactaaactgagggagcatcaattttttctcaagaggtctaagtgtgcttttggtaaaactgaattgatttacttgggtcatgtgatttctcaggatggtgtagcagctgacccttctaaaactgaagctatgagaaaatggcccactccatcgtcagtaacagaattgcggggatttttgggtctaactggatactatagaaggtttgttaagaattatggagtaatcgccaagccacttactagactattgcagcacaaggcttttgtgtggactacagaggctgaggcagcttttgttgctctaaaacaggctatgatgactactccagttctggctttaccacagtttcaggtgccctttgaagtggaaactgatgcttgtgcagtgggtattggggcagtgctgatgcaaaaacataaacctgtggcttatctaagcaaggctcttagtgcaaagaatcagctgttgtc

SEQ ID NO: 153563 - DNA, 318 bp, Zea Mays
taaagcagtcaggacaaaggagcaacaaagcaccctcaggacaaaagtgccttattgattttgctagagacttaagtaagcagacaaacatagacatatgtaaataattgcaagaagtttcaagataaactccagcactacatgcctacacaacattcagagatataggtcgtacctagatacaattaaaaataggctgatgtagttgtcactgaaacaccatttttgtttccttattgttcacaacagtgtgttactaatttccataatacaatgttagcaaatttacatgatagagacactaaaatagggtgaaag

SEQ ID NO: 153564 - DNA, 432 bp, Zea Mays
acttaggcatttcagtttatatgtccatgatcttcctgtcttttgagaccctttcctcttctgttgttaagtcgctatctttcggcaatttcttgtctcttggtattggtatgctcacctccttgaaatctttcatactctcatctttttttatgcttacctttatatcccaagttatgtttaagatatttcattctacatgcccttgaccacccttgtttcttaatgatccatgagcggtcattttacctttcatatccttggtgatctctttgtttccttgtaactccacttggtaatgattttttttacttcaactcttccacttcgtcacgttgcaagtcttgccttaactctgtccatggattatgcttttcatcattatcacctttgcccttatcacctctatatcttactttgatgtttatctta

SEQ ID NO: 153565 - DNA, 369 bp, Zea Mays
attcagagtggcagaaaaaggctatgaccaagcttatggggttgcagtttcgagtggtgtatagagaagggaaggagaatgttgctgttgatgcactttctcaggtaggccatgcgatggtgatgcattctgtgacagaagtgcaacatgtttggctacaggatgtgttgaactcttatattactgatatggaggctcaagacttattggctcagctggctgttcacagtcctagcgagcaggggctttctttgcaaaatggtctcattcgaaaggatggtttaatatggattgcaaataattcagccttaaggacaaaactcatttcagctctgcatgatggggctgtgggtggtcattcgggcagtt

SEQ ID NO: 153566 - DNA, 679 bp, Zea Mays
gaggcaggtgttcccctgaggagtggtccccagcagcacccccggggctcgcagggccatgtgtttcatttccgcggagttgccggatacggctgcgcccagcagacgttgctggattgccactgataccgatcgtggtggagttgatgatgaattcgtcatagttccgcccagcagacgttgctctagattttgttatgtgtagttactgaaaatgaaaatgagggtccaaattattttaaaatctataaggtggaagtagaaacccaacttgagaaaaaaattaaaataataaggtctggtcaaggaggtgaatatttctctaaagattttgacctattctgtgtggaacgaggtcgccaaaagaaagaatcacacattctatgacttacttcatgttagacaatgttgtatcttataaggcataatgggggaggcagtatgactgcatgtcctgtcctaaatagattttccatgaagaataaggagaaaactacctaccaggagtcgattttgagaagaccttcattcttttatggccatggggttgtttgaaaaaagtgaatgtgcaaataaataaaaatcataagttgagacaaaaaaccgtggattgtatatttttgggttacactcatcatagtattgcttatagatttctagtggataaatctaaggtgta

SEQ ID NO: 153567 - DNA, 915 bp, Zea Mays
actcagaaatcgggttatatgcaagctctcacgtgattgcacctgactttcaatagaaccaaagcagtgcttcgggcacgtttccaagcacagtagtcctctcatgctgagagaacacctttgaaagcacgggtctaactaagcactcatctcattaggccctccaagtcaccatctaaaaaacttttctctttagatagagccctgacagtagagaaggttttcagcaagtcattatgacatctgttgccaagggtgtgacagttggctagaaagatttggtagttttcataagtcctctcaaatgatttatttcatcctttaggtcatcgatcttcacctgagcgctgctaaggttgatagccacttcggtggatgcttgcatcagctttgtaattttagcttcgtgctcttctttcactcactccagctcagcttcgagcgacacaattcgccagtccttttctacgttggaagcataaggcttattcttctcttcgcgcattttctagacttcggtccgattgtcaataaaatcattttctaggatcttgaaagatttttccttctcttcataatcaaactgaagcctggacacttcggatctaagtttcattatttctttctgggaagctttgccctcaacattcctcttgttccttaagtccttacttaggaatagaacctgcaaagatataaaaaagagaaaaataagccattccatcaaagcaactcaaagttaaagaacaaaaattgatagaaaataccttaagatgagtgtaagccagacaatcagaaaagtattcagaagaaatagtcgaaagcatggcctctagctttgggaaaccaacattatctgccatacagcgacatacttctgtttccatattgtctgggtagtagtataaataatcg

SEQ ID NO: 153568 - DNA, 608 bp, Zea Mays
gagcttgctttcgtgtcaactgcatggttattaaaacgacgtttaaatgtcgtttaaactataaaacgctgatagaacagcgaaacgttgaaacgttttagacttcctcgtaaaacgtcatttaacgacgtttaaacgtcacgttttgacgtttaaacacgatatatagttaaacgccacgtttcgagcgtttaagttgcctgcttgtaaaatttggcctagcccaattagggattccgcctaggttacaattttgtgcttgacgaccttgacatggatgatgaagaagaaacaaacaacagtggtggctgtggtgatgagcaagacaaggatgatgttggtttagatgatttggatgatggttattgagtgcttgagtaatacttgtgtgcttgtggttgtggacattgcattctacttttgattttgtgctatgtttgtgattgtggactattagacatctcattccactttgtttgcggttgtcgacttgctattagttgaaacttgtgtttattgtggtaatgtggttgtggacatgtcattttgcacaatattattatgtgaacttatgttggttgtttggtatttgactttatataattgtc

SEQ ID NO: 153569 - DNA, 463 bp, Zea Mays
ctgatttttccttggctgcccttatccttaacctgtgtctgccgccagcaccgctccttccttccgccttgcgccgccagcactccccagccttctgccgcaactgtgccgtgcagctctgtgccttctgctgtgccttccgctgctccgtgccgcaactgtgccttcccaacctccgccgccagcactccccaacctccgaagtgcagttgtgccgacgttccgccgtgcagctgtgccgacgttctagggattcagccgctgctcacctccgaagttgatggagaacaaccgcaacctccgagacttcttctcccaagccgggtcttcctcctcggctaggatcccccatggtcgcgaagctcccgaagaagatctgggcgtcttctaccagacgcagttgtctcggccaccgtctatcagtgccccagccactcgtctacacattgaagatctggatctc

SEQ ID NO: 153570 - DNA, 320 bp, Zea Mays
atgaagtaaacaagcctttgtaccttgagtacatgtcccttgctttcccttttccaccactagtgcagcgttggccacctggatggtggtcgtaatgtagaggaggagggtttcattaggacgggcgcaactaaaaccggtggcgaggtgaggaatgcctttatccgatcgagggtcttctaggcttcggtcatccaagaaaaatggccgcttttactaaagatcttgtaaaggggcatccctttttcccatagtctagacacaaaccggttgagcactgcgacacacccaaccagtcgttgtacccccttgacattctg

SEQ ID NO: 153571 - DNA, 448 bp, Zea Mays
aagacacccatggtaggaaccaggaactaccctgacctaaagacctgggattggatgctctaagtgtaactgtgctggttgtcacatccaaatgatctttgtttttctgatgttttttgttacttgtctgttgatcttgctttcttgtttggaactcttcttctctggctgtgatgactgatgaccaaacaccctatgcattcctttattttctagatatttatttgtcgcttatctgttgatcttcctttcttgtttggaactactcttcggcggctgtgatgtcaaatgccccatccacttgaattgtttagggtttaggatttagggtttggtattgtgctcaatacaatgttaaacttggatggcttgtaccatatacaagcaaccagtttgcaactgattgtctcattgccgtggcggtggtgtaccatatacaagcaaccag

SEQ ID NO: 153572 - DNA, 275 bp, Zea Mays
cttctccgtcattgtgtattgtcgccagatgaagggcattgtcagatgctcttcgcgacctcggtgagccggtctccaatcgcacccttgttctcaaccttcttcatggcctcaatgagtgctacgggcctcatcggactaggattgtgtgatatgttgtgttcccctccttccagaaggcttggaatgacctcattcttgaggagctcattgagggggcctcgccttcccctacaaccgcacaagctctctacagccttggtcctagcggaccg

SEQ ID NO: 153573 - DNA, 313 bp, Zea Mays
ctttgggcatgttttgtctagtccggtgtaatcaacacacattctccactttccattttactttcgaaccaataaagggttggacagccactcggggtggttaatttcgtggataaacccggtaatgaggagcttgcttttctattccccgatggccttttgttttcttcaccaaagtgcgtagccgctgtttcaccgggttggacccaggcttaattcatagggaatactcaataacttccctcgggattcccttcatgtcggacggtttccaggaaaagatttccttttctgcatggaggaagccgacgag

SEQ ID NO: 153574 - DNA, 461 bp, Zea Mays
gacggtcaagatttgatccaccaaagggtatccaatggccagatcacgcgcgcccattaccagatcaacggcgttggcactatctcccctatcttctctcaccccgacgaacaacacagccgcgcgcaggaaaccagtggcggcgccattgctggtaacaagctcgagcggcgtccggtgcacaaaactcgaaactaactggtgcaccacgagaaggagggcaacacaaacttcataggtggtttcttacctccgatgtcagtgcagacgaccatgcccgcggtggcgagcggtctgccgcagaagcagatgactccgacgagccattgtcggttccctcggccacgattccgcccgacgaagccacggtcgcatccggtgagcacccgcaaatccacccagctgagccacgaattcgaccggcgacccacggttgatgatggcgcggagcgacttcctcg

SEQ ID NO: 153575 - DNA, 281 bp, Zea Mays
gttcgggtttatgttaggtccgaaatggatcaaaatagatccgataacgtcttttccttcttcttgctcggtttctcatctgatccgtacatcaaaactacagcaatgaggtgtgtggccgcacgcttgcttgtggcaactggcaaccatgcttgcaaggacatgtgccacccagggccttgtggggagtgtgagctcatgccgaggaagatcagtacatgtcattgcagcaagaccaggctgcaggagaggagaggagggcgagctgcttggacgcaatt

SEQ ID NO: 153576 - DNA, 502 bp, Zea Mays
atcaggatgtgagcctcaataaaattggcaaccacgtcctacgtcctctcctttatatatatttgtctttctctcggcgagcataatatccaaaatccgcaaaccattcctcacataccacatcacaatcgttgccgcaccatccacaacgcatttgtgtcgcccttcagacccatttgtcatatgcccacatcttctttaatctctactttcgtccaacatccaaacttcccttgactcacagcctcacgcacaaccctcaacttctcttcccgtatcactacctcctgcaactcccagtcctgtcctagccgatcaaaaccaccccatccgccatattctctttctctcccatccgcaaggcaagactcttacttccgtatctcctcgtggtgtcaaggaagggggttcacttgaagctgctggtggagacacgggtagaagtctggagctccgccatagacgtgcttcgctggaacactgtgcgcaacacatcgccgac

SEQ ID NO: 153577 - DNA, 583 bp, Zea Mays
gcgagccacagctggatctgggcgaggagggcgtgaattcaaccatggcgtccacaatggcaaggagatccgagggggagcgggctccccacacggtggttaaagagattagttgatctatctatacttgagagaggagaaaaccatgtcaactatttatgagccccgaagacctagaaaatcaagtaatagattggtcttatttccctctacttgtccacccataacctttctcttgggaaccatgctgaaaggggtcatggccacgtccatgcaccacacacatctattgttcgctctgttacatccaacaatattcaaactggatttctattcttgtgcaaaaaatgaattggtttctgttccaacttccagcaccaaaataaagtgttagttgttatggcttcatagaaaaaggcaagtataatacttacacggacaacatcatttttcctaaaaaatactccacatgtagttcatcaacaattgtttctccttttgtgaaagacggtgtgataaataatgcagcagctgtcactctttttgacaatgatgcattggtaaaacttatgttttgataata

SEQ ID NO: 153578 - DNA, 682 bp, Zea Mays
gggtctccgcagtgccaacaggcgtttgctggcggctggttgcttgcaacggaaggtgcctgaagggagctttgactctgttgactgtagcgtgatggagtgggtccagatggtttattgaagcttggtcccctgggtggaagcccaaagggtcgagctctctggtgatgttcttgctgttgcgctcggaggacttggaatttcctcttgatgtgccctttttcttcctcttttgccctttccacttggatagctttgttggagaggtgagagaagctgtggaagtcttggctggcgaggatggtcttaagctcgggtcttaatcctttcagaaaacgggccatttttctggcctcggtgctgacatcctcgggcgcgtagcgggccagctctgtgaacttgtgcacatactcactgactatccttccgccttgagttaactcccggaattcatcctccttgagttgaactatcccctggggtacgtggtgttcacggaaagctgcttcgaattctgtccaggtagcatctctgacggcttcactgaaagtgtcccaccatgctaaagccattcctgaaagctggtgagctgccagttgaacacgctgattctcgggacaagcgatggcttccaacttcctcttgatcgttgtcacacccggttttggaaggcaaaccgaat

SEQ ID NO: 153579 - DNA, 426 bp, Zea Mays
ctggacacccttgaccgcgcctatccaaactaccgtgccagcactgcgaagagagagaaggagagtcgccacatctgctcttcgcctgtgtagcagattgaagcgcgaggctagcccagagaccttcgaagtgttccctggtgtgaaatcgtcaccgccccgatgtgaattggagcccgggacgagcagaattcctcgccggaatcctatcacgccgcgatctcgccttgctccgtgaaccgccttcaccaacccattattaccggtaaacttcacctccatttattcgctatactccgtatgtcgaatagtaccgagccatctgtgagatgggacactagaactcttgacgcagagggctcaccggagtgcgccaccatgaatcgcgtgggagccgccacgcgggtgctcgggtggagggagaag

SEQ ID NO: 153580 - DNA, 570 bp, Zea Mays
gccgacaggtggccccgcctcgtcagcatcccctcgcgcgcatcggctagcacccagacaccggatggtggacccacttggtcaggccgcctcgcagcgccatagccgcaaccttcgctgggccggtaggatctcctggcgtcggatcctaacagaaggatctccctaggttatgaagccgtagggatgcctatatatgcgagtgcggcaacctcccccgacatcgtctgctccctagtttccaagtccataggatcgccgtcgctaccaagtgaatcatcgggtcgcctgaagctaacccaagctcacaccatcgacaatccttggagtcgggtttggggagctcgggaggtcggtggtgttcgtgggacgactagatacggcctcggaccgagcagcgtttcgccccgccgtcaccgtcggtgagccattcctcttcttcgtacccttcttctctgctcatagatgcttccggggttgggcgcgtagcaataggagtggaacagactcggtcagggctgctaccgtgatggccacactgccgccgagatgtgagagagaggagtcatg

SEQ ID NO: 153581 - DNA, 418 bp, Zea Mays
ctttatttagccccacttttctcactattccaaataagggtagctcaagcctttctaaacaaacttgttgcccaaccatcgctctttaggtttactgtgaaagtccaagacccaaaatgtgtagaccacaagatatgcgactctgaagttggctatagctcactggaaaccaagttccgttctctgaattttacagaatcagccaatgttgcctccttgcatacctccctatttggctgcctggatcacccaattcacttaataatagacctctcccctttaaccaaagtgattctccatgcctagcttttcccttttttgtatagcaactcatggttgacaacatatagaacaagggttggggtgttccaaagttgcccccatcactcaacactcctgtcagttaactgaacttact

SEQ ID NO: 153582 - DNA, 795 bp, Zea Mays
cggatctagccctcctcggccatgcgcgacaaccatggcgagcagagaagtgcacagaaggtagagagagtaggaaggaaagaggagcaggaacgcgcggcgaggggagaaggagccagggcgccgcggtgggagatggagcaagggccaggaagctacgcgcgagagagatggaatgggcaccgagcgctgcggggaggagataagctccgtgaagaaaaatgtagggagaaggcggcgggatcttcttcccgcagctgagtagcgcgcgttagagcgagaaaaaaaatctaggcggctcgagataggaacgagagagaagatctttttccattttttaatttcttctttctttttttaacatagaaccgtagatattttgaatcacgatttttagcgataatcaaagggtcgaataattaggatcgacagcaacaattgcacaggatttggtttgatgaatactctatagtcggatgaatacgtatcgttaattcactttttgaagatttagatcgaaacgagaagcaacggaccgaattaaacggatttcggcttcggtatttagtctgtgcttaactcgtctaacctggtaaatctcatccactaatcaagcacccaatttctctaccgaagacaacgcactggaaaaacaggcccaattattactcttgcgctcgccaaaacagcactgaaggataaattgcatcataatctcgcgcatgatttctctcagacaatgtgcgattcagattattttagtccaaacattttagtcgtcaagttcaaattaat

SEQ ID NO: 153583 - DNA, 1183 bp, Zea Mays
ttgttttacagtacttgcaaaatgcaggcacctggaactaactggacacatgttatagaaaatcttgaccatgagggtttcattatccctgatgaagcagcttttcgtttattgatgtctatatgttattgagcctgcaaggtatgtaccattatttcttgttctgggtactaggtttctgaacagttcagctgacttgttcatggaatcatgtaggatccattcccacttcatgccatctgtgggttactatggaataatataaaaggacagttgtcattcttgaaacatgcagtggctttgccaaatgatacattcacattcgcacattgtacaaggaagatggtatctcatcctaatatattgccaactttcgcttcttaataaacatgcatttatataacctttctcgtattctttaggtttttccagacttgggaaattgtaaccagggcaatcaggcttggtactgccttgtccttcttgaggtgttatgtcagcttgctgaacttggctattcaaagccagtgcgagcaattcagccaattcttggttatcctctgatcaattatcctgaagtgttacttcttggtgttagccatatcaatgtatgttttcagtccatagtgtctcagaattaatcatatttgtatgctgcatccttgagtaattcatatttgttaactatcatgaactctaatcatcttttgcagactgcatataatctcatccagcatgaagtactgtcctgtgtttttcctgctgtggtgaagaacaccatgcacagcagtcttatgaactatctatgacatatcaatccttaccttactcttcaaggattcattgatgctcgttctgacataagttgtcttctgagaactgtggagatatgtgaagacctaaaggtagtacagtagacaacccttatgtagcgagttggctactgaacaacctattacaattcttttttgcaagttgaattctctctgcgttttcatctaatttaacaagtcctaactgagtaagctgatttttattgcatgcgtgtgaatattgtcatagaaacttagaacttatatttgtcacatggaccgtttaagttggttatgctaatggcaattgttgactgctaaactactttgttaacactacaggaaaaaatgttaatcgaaagttaagccaa

SEQ ID NO: 153584 - DNA, 744 bp, Zea Mays
tctctatttctaaccttctttgggctgggcatcaataattaagaagcataaggggctctgcgcaaagtattccaggactcagagcactgtcacggtggacggcgggttgattcttctataacagaaggtctctttagcaaaatgtacccgcgaaggggtatctagggtttctggccgttggattataaaccgacgcataggattaaatctaaacagcgccaaaccggtacactacgcatcccgttggattggagatctgtggcccaaatttaatgaatcgcttaaccatcccctgccaccggatttgggatcgacgaccgctagaggcccaggccgaatcagttttctttggtttgatctagaccatccatctatcaacccatggctagcgatttctgttaaatcccccactcacaagacggtggcgccggcgccagtcacggcagccgccattgccgacctgcgccgcctagggattaagtgcctagaacttctatccgaagggtgctacgctatgcagaagtgagggaaaaacactgggagcgaactcaccgaagacggcgaccgagatgatgctggcaacgacgaggggcgataacgcggtggaggaggaacgccgacgagaaattgcccaagcgtgaggcgatttcacacacctgaggctctcggtttgagtacagcgaccccaggcggaggtccaagacacttcgacggaactgatttggcgagggaccgcggttggac

SEQ ID NO: 153585 - DNA, 333 bp, Zea Mays
gtaagtccagatcctccaaattatgagagggcagccccaggtagttaagattaatagtgacagttctatccgatcttgttcccaacaggcttctgtagaaattatccaccagcatggctttgtcagcatgatcagtaaacacattatctccaaagaccaattttgccataaagttctttctatatctggcgtgcatatggaatagcttggtgttagcatctccctctttgagccagttgattcttgatctagaacgtgcaatggtgcgcttaaatgaggcaagggctaaggagtgctttttcagtccacatctcagccaatcctccaaagggg

SEQ ID NO: 153586 - DNA, 278 bp, Zea Mays
acaagataaggaaaggtttcttatggagaggcagaagagaggttaaaggtgggcattgtatggtggcttgggaaaagtgtgtagacccttgaactttggaggtttgggaatttccagcctccctgaactctgttgggcacttatgatgagatggctatggctgcaaaggaccgatcctacccgcccctggaataatcttcctgttcatgtccccagcaatgctaaagccctcttctcttctgtgcttgtcacagaaattggtgatggtgctaacacct

SEQ ID NO: 153587 - DNA, 430 bp, Zea Mays
tccgtcgtcgtcattgtgctcatctcgtcaaaactctatgcctgaccaggccaccggatctcggttctcggatcgggtctctttattcactaacgctaataataataataaatatgcatgcgctgcctgcctgaacacactatatagggagacgagacaacacggaccttgtcagacgatgaagtaaatatttaattatccagcagctggtaacaatttggctctgtttgtttcggcatcggatcattaggatcggtttctgtccgacaaatgtttcgcttatgagaattgtttccgtaaaaatcgtttaagaaattaacaaaaatgcagcattcatcgagtcgtcacgacacgagtaaaccgccaatttgtatcctaaactaagaagagtcctttatcttcctccgtattcaagccatgcgatatctag

SEQ ID NO: 153588 - DNA, 496 bp, Zea Mays
ccgaaggggtatcgttcgtttctggccacccgattacaactgaacgggtcagatcggttctgacattaatacgaaccggaacatgctcctaaccgccagatctcgatctaacggccacgagttcagaactacgcgatccaatctaacgcgtgagatctcgatccaacggttcctatttggctacccccagatttaatccaaaccgcccaatcgttgatccgacggcaagcggtattcttccacttcctgccccgatcctaacagttccctagccgatcgacggctaaaacttcatcccctccgacaggacttcacgccgacgcgcggtggaccacgccccgccccgcggcggaggtcatctccggcaacccagtgcacagccccccggcaagactccagcatccatgaacacacgcacccatttccactggtatggccctacgcggcgacacgattcgagcgaggcaaacacgatagggtggaacataccaggaat

SEQ ID NO: 153589 - DNA, 820 bp, Zea Mays
actttgaatagatggagtatatatgtatcaagaaaagctaaaacgacctacaattttggagagagtaatacataaccacctccaaaatgtacatggtaataaccggcttagaactgaacttaaagttccaaatatacgaatattgtgaagtttaggagatatttaataaagtggaaatgtatcgttcaaaaatgaggaaaatgataaatgggcaaggaaaagaaggtaactatgtttcctttaactgaaaaattattcagggcacatgccaagttagactcgaactattggctagttccaagttgtagaacatcatgcatatgattcttctccatctcaatagaattcatggttcattgccacattactactggttgggtaatggaatagtattactactaggtgaccttgatgaacatgcaagtgagaatctaattaataattacagtacagggcagtgacagctgacgatgtcgaacagccgttgcaaaatttcctcgcataatcgatcaaataggaaaaaggtttacctacttccttcttctagttaacctggcgacagaccaccataatattccagacaacagtagtatgatatacggaggagggcaggttcacagaatgcggcagttccgggccaaccagaagcatttggagtgggcaacggctatacggatcagcagctccgaaacagacaaggacctatcacctatatgtgttggaactgctgcaaaatcatgcgcataaaacaaaggaagaaagccttgcagtagttagaacttcgtaaccttgtgcttgtgcatcgtttgaacgaatctcg

SEQ ID NO: 153590 - DNA, 410 bp, Zea Mays
gtttactatgtctattgtattttccagatgtgtagagtgccttgtgtaaacattactacatatatcaacctcactttatactcattgcattacaagctttctaagttactaacatgttattagaatatcatggttgctcgtatccaaccctatacaccacatggttgagcttccacaagccaaaaagatttgactctccctctttctccccattcgccaaggagcggtagtttgcattgctatatttacatttctactgtcatgggctcctttgtggttcacacatacaggcgtagcacggagagggcgccgacgtacctgttgggcaagatgacaagtttgggtttttaggaaataattagaataactttgagttatttgattatttctatatttaaggacttgatata

SEQ ID NO: 153591 - DNA, 1221 bp, Zea Mays
gatcatccgcgaggagtccgacccaacactaagagccctatgaccccacctggttattgtgtgatttcaggggcagaattagagagcacagggatgatagtgagcagttggatcaatgcagacgctttgatgacctatcactatgcaacataagtttcgaactcaaagctagtcagattactcaggtcggttttaccacttcttttaatagttcaatctgcaatgcatgttttgttgtgatgacctatcactgtgcaacatgagtttcgaactcaatgctagttagattactcaggtcggttttaccactttttgtaatagttgttcaatctgcaatgcatgttttgttgagtggtaaattcagtacactcctacgttttgcagaaacaatatactcctatgttgcagacttcatgtattatctatgatattaaaattgtcatcatattcatttgcaattgcatgtttgacaatcacctcaattatatatttgccttcgtaacttagtttactactggtttgttattttataatctgaatttcactgatagagttgtctttacctaattccagagttgtcactgccaatgcctaagtgctttcttcagcatagacatttttaagtttgactagggcacttagaaccatatgatgtgaagtatttggtgtaagttctgactcctttttggatagttctgttcccctaaagcttacttttaaattttaatgattcgtcgcttgaaaatataggttgttttgcacaatgtgttaatccagataggtacagtagcacttataattttgagagactgtttttcatagcaagatttgttttcttcattaacaggaggctgtatctatctctaccatcatgaatagagagaagaattccattgagtgcttaatgactgttatcagagaaattatgcggaacacagaatttgccatacgttcttatgtacaattgagggcaaggtttgtctatccaagtgctgaaagtgcaaactctggtttttcaaatcactctggatcttctggtgctcagactgatttccatcagctcttagccacgacaccaaggtttcgttgttatagtagtgctgccaggcggccttctccttttgtgcaacaaacagttgccaggttcgaggatgattttggttactgctgcaaattgattctagaactagaacaacttctccagatgaaggatggcaagac

SEQ ID NO: 153592 - DNA, 1034 bp, Zea Mays
ttattacattaggactcttaaatttaaaggtggagatatgaggcttttctcacattttccacaatatagtgtgcatatatcaatttacaggtttcgattgaatcatagctctatttcatatttaggtattttattgtaattgatgacatatggagtacccaagcatggaagacaattaaatttgctttggttgagaatacttgcggcagtagagtaatagtgacaacaagaattggtactattgccaaatcttgttcatccccattccatcatctcgtatatgaattgaggatgctaggtgaagatgactccaaaaggctattctttagaagaatttttggctctgaggacaagtgccctcaccatttaaaagaggtttcagttgaaataattaagaagtgtggtggtttaccattggcaatcattactatggctagtttgttgactactaaatcatataccagagctgactggttgaaggtttctaattcaattggatctgggctagagaaaaattgtgatgtggaggaaatgaacatgatattatctctgagttacaatcaccttcctcatcatttaaagacttgtttattgtatctaagtatgtttcctgaagattatgtgatcaagagggattatttggtaagaaggtgggtagcagaaggatttgttagtgcacatggtagaagaaatctggacgatgaaggcgaatgctattttaatgaacttatcaacagaagcttaatacaaccggtagattttcagtatgatggtagagtatatgcatgccgggttcatgatatgattcttgatctgattacatgcaaggctgttgaagaaaatttcataactgttgttactaatagaaaacaaatgttgccctcacatggcaaggtccaccgactgtcacttgagtaccatggtcttgaaaccttaagaacaaatcccatttttactactcatgttcggtccctgaacatatttagatactctgaagaaatgcttcctctttcaggcttgcactccctaagagt

SEQ ID NO: 153593 - DNA, 487 bp, Zea Mays
ggagggggtggcgaagacatagggtgcgagaagagagccacgagatgtgcccctatagagccactagaaggtgggggagacaacaaggtctcgatcgttagggaggcaatcgtagcattggggaaaacaagcggcccaggagcatggtgacccgcctgggggtggagcgcgacgcaatcacggagaacagggttcatggcccgatcaaatgccatgaatgtgctctagagaaactagccgtcgtgaagggagacacgtgcacagtagggaggcatgggaaccgcaacggaggtaggggtccctagaagtgagaggtggggcgaagcaggaggtgccgagggcggtgggacacaataggatggcatcgtcagaaaaaatagaccgagggacatggtgagggagccctgtggacgagctcgaccacatgaaggggtgcccggaccaagggttggagagcaacggccacaccagtgcagcgagaccggac

SEQ ID NO: 153594 - DNA, 654 bp, Zea Mays
gacttaagccgattgctccgttagtagggtatagtggtcaccctaagtcgagtaagcgtgctgatttcaagcccaacccaatcgaagtcagatgtaagtcaagagtctgaatgcctttgaaaatgaaaactttatttatgatgaagtccccagattatagagtacaatgtttcttcgagaatttttgaggcctcgctagggatagaactttctgaggtgctctatgttccatgagttctccacttccgtgccatccatttgagtaagccggtatgatcctagctgagtgatctctgatatgatgaatggaccttcccatagcggtgacagcttgtaccgtccttcctcgttagaattcggcgaaggaccaagtctcccactgcaaaggaccgatgtcgcacagctttatcatgatagcgcctcaaggtctgctggtacctagccgactgaattactgcgttcaatcgttcttcctccaacacatcgatatcttctagcctggtagcttctgcttcggctatgctttcgaaagtcaacctcggcgcccagaatattaggtcggcgggcagcactgcctctaacccataaaccatgaagaacggggtatttccatgcagagctcgactgggttgagttctcaggctccaaaccacg

SEQ ID NO: 153595 - DNA, 1179 bp, Zea Mays
tagacagtgggacgggagaagaagctgacaagctaacatcctcccatggtcataacagttgatgtgtcacggatgtggtagccctttgtgtcaatgtctagataaccaagcatgagggcagaggagccatggtcaaggatgtcgtgggtcaatgtagcagtcgaggcaaatgatgttgacatgacgccacatgcgcaaagaggtgccatgtggtgatgacggagacacgtcaaattagtcattgcggaaagggggcaatgctgaggtcggcatagtcagggccattgaggaaataggtgaagacatcgatgcaatcgagggagagtctataattaagctaccatggacgaagtgtgcacttagggtttccatgatcatgaacacatcgtagacgaaggtacgcaacaatgttgccaataatgaatgtatgatgtagagggccccaacagacatcgtagtctgaggaaccaatagagaaggtcttgacaacaattgcaatgcgtagaacaacgaggtggaaggtgttgacgtagcaagtggtttttggagtagacgaagtaggtggagaagagacaaaaatgttgaagatgtggttgcaatggataaacaagaaattgtgtaaaggtggacccgtctaacctgaaggtgtgcagtttgagtagacaagcctgtctagaggcagcggtccggatgcatggtacgacggtagtggtagagttcaatgttggcaatgaagaactcaaatatcttgacaaatgccttgtgtagacagaggtgcatcaaagattgtgcaacacagtcgtcgatacacaggacaaaatgatgtagatattatagcgaagcagacatgcgggcaatgatattgtgtcctaacgaggtgacacaatagcattcctcttccttaaagaagatgtttgtagtagtacttgcgagcagataggacacaatgatgttgatacaatagcgaagcagacatgcgggcaatgatgttgcgagctaaccaggtgacacaataacattcctgtttctcagagaagatgtgtgtagtagtacttggcaatggacatcacaagaatcaggtggatcacgtagaattggttgtacatacactcaaggtggatcgacaattgaagaactcaacagaggaatcccgatttgtggtggcgatgaagaatcgag

SEQ ID NO: 153596 - DNA, 507 bp, Zea Mays
cagtcatcacctttaattgaacttggttactgcaacccagccaaatccttcctttatgtttgattactcctgataccaaagtgaatggctccattgtatcccctgcagcaagtgtactcaaaatgttcttagcttcctcattctcctcatagctgctagtcacctcagtgagccaacttggtaccactgtcgaagttgctaacacgttgagttgcagtttggaaccatcagtgcataggtttggtcgtctagaaagagcatctgccacacggttttccacccccttcttatatataatgcggaattggagacccaacagcttggttaaggctttttgttgccagatagtcgacaacttttggtcttccagatgggttaggctttgctgatcagtcttgatcaaaaattctccatgttggaggtaagggcgccagtgatcaactgcaaataaaatggctagatattccttttcgtaggtggacaatcccaagttcttaggacctaaag

SEQ ID NO: 153597 - DNA, 372 bp, Zea Mays
cccacgccgtggttggtcaagtagtaggtggagtcggaaagtttctgtgcctatatagggcaggcataattgcgtcccacaacctgcaccacattggttgtcaagcccttacaccataggtatggcaccagtacaccactatgggtacacgcatggacacaaccaccataactagtgattacatccaccatgacgtgtaggcgacaatgccataggactaagatgaacttacaccttctatagcaacagtaggcgaggtatgtctaacaggatggtaccacataacttgtgatactctcttccttggactataaaagggataggggtacccctctataagaggggttcaaacgtccaaacccatccccaaac

SEQ ID NO: 153598 - DNA, 833 bp, Zea Mays
cgctatgatactattaaacaatttaggccatcgaaggctgaagttatcattacttttgtcttccgcacttcgcatgatattgaagtctccccctatgataaacggatgagtctcagaactacacgcacctgcaatttctgctaaaaaatcattctttaaatcatcttgagcagggccataaacagcaaaaagggcccaaatgaatccatcctctttgtttcggagccggaacttacaatagaaattaccttcatcaatagctccaagtcataaacccccgaattaacccctaacaacatccctcctgatcttcctctaggtggcataaggtgccagaggaaatcgacgccactacaaaaatgtctcaaagtagactctgagaatgcactacgacctgtctccatgagagcaataaagtcgagtctatgttctctagaaaggtgagataagtaattgtgtttagccaaatcccccagacctctataattccaaaaaatgcctttcattttaaactaattttagagggtgtaaatggctttatagaaggacgattaacctttctatttgagaaagccttgttcgatttctttctacgcggcgcgacagaaagctcacaacatttatctaaagtggtcaactcagactcatcatcccacctatcagcagtgtgagataacgcaacatcaaactctgcttcctcagcatcactttaaagatttctgctataggaagatggagcaaccgtgagtctatcgatctcaatatttttaatagcaaccaccgattgtaacacttggttttcagaactaccaagagaaatcccaatcttttca

SEQ ID NO: 153599 - DNA, 296 bp, Zea Mays
agtagcgctccccctcagcgggatgagcagagactattctaccgacttgtccacccgtatcacgcttcctccgttgccatactttgcccttaccactctgccaagtgtaccactcagggaagtcacgatacagaatgccacgagccccctcatgtagcctattcgcttcaaaatatgccgtgagcattgacctatcagcacctggacgattgacgactcgctcgaccatttgccgttcgtgaaacgccaccatgtgcatgtttggaagatggagttgcagttgcatcacaggtgga

SEQ ID NO: 153600 - DNA, 601 bp, Zea Mays
gttgatgggcctaggagaagccaacgggtgacacagcccaacgtccggctgtcgggccatgaatgggtgaaatgatttaggcccagatggtttagcagctagcagagagaaaatatacactgccgtggagaggaggagaggatcggactggaacttggaactggatccggctgcgtccggcgaaccgacggagtgccgtcgtgtaatccccatacttactgctacctccataaacttcgagagaggatctgagcgccgggagcggtgctcgactcattcccaaccgcgtgctctaacagttggtattcagagccttcgatcccgagctggagttcccgaagcacgagcacttcaccaggttgcaagccaaggcggggaacatggcaccgacgcgaagtgaagatccgatgatgcaactcatggtcaaaatcgaggaaggcaacagggagatgcagaagcggatggatctgctgcagacaacgatgactggaatggaggtgactatgaagggagttgtaagcgagcaaatcggaattcagaaatggaaaccggaaatggaaatgaaggtgaaggatctaacagaaacattgaaggacgtcca

SEQ ID NO: 153601 - DNA, 453 bp, Zea Mays
atcagtcagtgctttcaagttgttgtttgaatattcttaggaatgatggcgtgtacccaagttcatgggacgatgatggattttgccttccaacattgtgatgatcagctctctctgtgacatgctgatattgcagtgtgaaacttagaagaataatgatagcttggtgcttggacgtgcttgtgagaataaagggagaaggacggaccattcagctaccatgcagatcagccgtggatgtcaaataaatttgtgagttaagaaggcagtcagcaaccagttgctgtccacacacgtacaagcatgcagaagagtatcaaccatccaaacagttccattaggccaggctattaatagaagaggtgctacaacttcctgctgtgtgttcccatttattttatctaaactgaaaataccactagtgctatatgtatccatgtaatagatgacgac

SEQ ID NO: 153602 - DNA, 446 bp, Zea Mays
tgcacatatacttaacttgattgtttctgatggattaaaagaaatggatgactcagttaaacgtgtaagggctgctgttaggtttattaagaattcaccttctaggttggcaaagtttaagaaaattgcagaggaggagaatgtacaaaccagtgcttttttgaaactagatgtttgcactaggtggaattcaacatatcttatcttacacagtgcaatcagttatgagaaagctttttgcaaaatatgaggaagatgatccaacctacactattgagttatgtggagacaaaggttatggaattccacttgaagatgattgggaaaatgcaaaaaagatggctgaatttcttggccatttttatgatatcactcttcgtgtttccactcaactaactatgacaactaattagtactttcatgagattggtgaagtgaagatgctg

SEQ ID NO: 153603 - DNA, 988 bp, Zea Mays
ccaatgcctactattcataggttccacggtccactgaaactaacaaaaatgtccaaaagaaaggaaatgacacggcattcccgcatccaacacaaaaggcgtcccccactgataacggaatgtaactatttcctatcgtccccagctgccatcgccaagcatagacaaaaacgaatccaagaaatggaaagatctcgcgatgtaaaactgtttccgcgtcgctggaaatacatgtaaaatgtaacatttcctcatttaccgcacaattttactgctcccatctgttcacagagagcagtacctcagcttatcttcacatctagatatccaaaaaaaacttaaaatttacagcataatttcgcagattaccactgttctgagattccagtgcaggcgaaaagcgagagcaaaatgggaagataacaaagtagcagggcgaagcaacggagaaggtcctaccttgtcgagcttctcgaaagactcggcgcggcgtggcacccatccgcgcacggcctccggagcgacggcgacgagccaaggcggccaccccacggccacctgctccgcctcaaccgccctcggcacggggctcctcacctggcacgccgctgccatcgccatcatcgcccgcctcctctcgagcgcctcctccctcccactccctgccctcgcatgctgctgaagctgcaactgctgcttccgcgcctcctcctccctcctcaccgccgccgagagcttcgcggccggcggaggcgtcgcgcggcactggccatcctcgaaggaggaggggcggccgcagacgcagcccatggcgcgggttgtaactgcgacagcaacggcgcccgtcgactggaattgccggtccggctcagctcagcctgcggcgccggcgggaagggagaggcatgaggcgaacggatcttgaggctagggttaggctcccgagaattagggttaggagtggcgtggcactgtggtggcggaggag

SEQ ID NO: 153604 - DNA, 674 bp, Zea Mays
tgcacattgtctgcatgatagaaactgattttacttctttgcccagttttatttttcgctgcatcacaattactaagtgcatagtatctcttacgtactctgttaataaggtgattacattggatggttccggttttttgttagcctccttcccatatctggaaatatgttcctgtttttagtatatacttagctacttacaatgcatgggctgctatcagtctaagattccttctttgaatatgatcttggagcaccaggccatgctttgatagttcctgacatggttcttaggctagcaagcttaaactaacatgagatgtccaaagcaactctgttagtgtttctgaagaccagatcaccagaactagggttttcaatgagcatttcaacaacaacaacaaacccttttagtcccatgcaacttgggtacctagagttgaaatccaatagaaaccacaattcaaggttttgtcactggatatctgttttccattcaaggctaaatctttggatatatttcatcctttcaaatatgcttttactacctctttccacataaactttggccttcccctgtctctctctctctccattactatcgcgccttaggcccactacacattggtgcccttggaggtctctgttggacatacccaaaatctcaattgtta

SEQ ID NO: 153605 - DNA, 456 bp, Zea Mays
ggtggctgatctcttaccggcttggaaagctgacttgatgacccgtgctggcagagctacccaggtgcaatttgtgctcactgctactgttatttatcaaatgatggctctggatttgcctaagtgggctattaaagcaattgataaaatccgccgtgagttcttgtggagagggcgtaaagaggctaatggtggtcattgtatggtggcctggggcaaggtaacacgccccaaagagttagggggacttggtatctctgatcttcaatgcttaaatagggcccttcgtgttcgatggatttggctccaaaaaactgattcttccaaaccttggactgatttgccattccattcaaaccggttcttggatagcttgtgctctttggcaatggcctccatagtgggtgatgggcagtccactcttttttggcatgacagatggatcctgggtcagag

SEQ ID NO: 153606 - DNA, 1081 bp, Zea Mays
tgagaaagaagtccttaaagctgttgagtatgtgcatgaattgatagacaaagaagtagctgcgggaacgagcccgtcaaacatattcgtttgtgggatgagccaaggaggtaaatcaatgagcttaatctgcattttatttagtattctaggccataagatagtaccaatacagatacttctgtttattttcgcaggtgctctagctatagcgagtgctctactctacccaaaaactctgggtggctgtgctgtcttcagtggctcagttccgccgaataaatcattcgccgataaggtgtcacctgaagctagaaaggtaataagctgcagctatgcttatgttttcagaactgcatcttgttgactcttgttacctaaatacgaactcttgtttcagacaccggtgttatggtttcatgggatggcagatggggtggtcctatttgaagcaggacatgctgggtgtgcatttttagaggagcttggcatgtcctgtgaattcaaggtaatacaggaagctgtagtcaatgctcacttttaaaacattttgcctccctcccaacaagtggctctgcaaacatttgagctcgttttcaaacacgcctgacttcagctatatgtctgttttcccaattgattttttgaccagttttcccaatcatctactcaggcttatcctacccttggacattcattggttgacgaagagcttcaatactttcagcaatggatcctgattcgtctagggatggctgcatctggagcggctgaaaccgcaaggccatcatcgtcatctaaccacaacgaccatctccaatagctgttttttttgtcattgcttagtttctagtacaattcattgctgctatctttgcgtggcacatcagttctcgttgtgacgaacataaacatctttcttaatctccttcacattatttttttataatagcagtaattgacttaacattattcaactaaggaattgaaagcctcacgagttctaacgtgatccgagaaggtttatgataataacagtagttgacttccatcgtgattcgtgtccgtgaatttgattcgt

SEQ ID NO: 153607 - DNA, 321 bp, Zea Mays
tcgggtttttgggttcaccaggttcagcttctgcttccacgtggttgacttgccctcgattaatggataagggctgacttttgcctcctgaagcctgaccttgcttcattagagctggagtggtataagccaccctgttaggatagtagttggcatagtgtccagcctgtccacacttgaaacatgacctgtttgtgggggtattaggagcaacaggtccagctagagtgcctacttgaggagtagcttgtgtctattacatctgttgcccagaactaccacgggcagatgtactttgaggtgtagtataatggggacggg

SEQ ID NO: 153608 - DNA, 467 bp, Zea Mays
ctggtatgatagggttctctgtcataggattccaatggtcattctcttcatttgtaatcttatcgaacatcttggaaagatctgcctcgttctgtagagggcctttcttaaactttgcacaccctgggatttcctagaaaataattacagaccaattatgtaattttagcataattacaagttgagatgacaatgttctgtctcaagtgattgctaaccgccttgatcttcctccaccactcagggtccgtttcaatggtctgtctcaagtgatcccaacccgtgcctgtttgcctcctcatcagttttctccatgcggttaagtcacattttagtttttcccatttgttctttagttgagtcttagataattcaatcccagttatctgaaaaaacctagaagacacttcggtataacccacgacattcaaatgagtgtttggtcgattacccttttgaacttgttc

SEQ ID NO: 153609 - DNA, 381 bp, Zea Mays
aatgccataaatatcaatatcatcactatcgttatcctcactcgatgttgtcccattcaagtgcactgattcaaaatcatcattgtcttcagcatctactattattggaggttcaggctcaactctctcttgttctgcgggtgttgcattactagtttcggtctgtccttgaaatatcaccaattgcatctctctttcattggaagatggagcaacaatatccttcttttttgcagcagctcttgctaaaaaagctctcaaatcagtggtaccactgctcttcctcttcatttttaaatctgcaaataaatcacaatacactcaattcaatgactattttaaaacaaattaagatacactcaattcacaaattagtgaaac

SEQ ID NO: 153610 - DNA, 321 bp, Zea Mays
accgattaagcgtcctaatcgtcaccctaatcgcgattaggcgcctggtcggtcctctggaacgaccagctggtcgcccgacctgaaaacaatgcgagaaacttcagaagggcatgagagaaaactttaatgcttacttttgagttttgacacccttattttggatgatcaaattcgaaattggactgatgtttttttctttagtaaagtttcttatggtactaatgttttgtatgcactaacatgggcaatagaagattcacaggtcagcataggcttatatacttttggatatttagcatgtaaagtcaatttgcatgc

SEQ ID NO: 153611 - DNA, 610 bp, Zea Mays
gtctctagcgctgagttacaaagacagcaaaccggattacactgccaatgtctcttctgaaggttgtcagcagtcagcactttattatgcaaaagagtccacgcaaaaaaacgacatttaggttcagcttttgctttccaaatggggttgatattcattgtgcaataatttgttgcaaattggatcttatatgcgctgctagcgctatactcaccatcttccgtccatctccaagaaatggagtcttctagatcattcagcccgtgtgtactattgatagcctgccaaagggaaaccaattctttgatttcatctgcatcaccaaagggagagcatagctggatccaacgattatttctcagggcctggaaagtcgaaatgttcttcctttttgctttttggaataagcttggtgcaatgttttttggtgcttgaccatggatccaactagatttccagaatactgcagttttcccattgcccaccgtcacacaggtggaagcgtagaaaagatcttcatctgttttatcacatggcagctgcaaatccacccatgctttatctttggctttccaacgcaaccacaaccatctaagtcttaaagccctcg

SEQ ID NO: 153612 - DNA, 556 bp, Zea Mays
gccggagttggggaggacgccgacgccgccgccaccgaggctgccttccgggagcttgcccggctcagacatccaaacattctcccgctccttggttactgcatcgcaggtcagctttaccattctcttttattcttatcaaacaaacatcgtttttagtatcaaattaagaacagcatgaaagtgacagcaggtgccaccgcaaccggggcaagttgcatttgtcatttataaactggcttctggaaacaagaatgtctgaacaaaaaagtaaccacgctgattagcagatggagctgaacatatattattatatactttggtccttattacgatcttaatcctgaaaatttggatttttaggggaccaaaagcttgtgctctacgagtacatggagaagggcgacctgcaccggtggctgcacgagctgccagtgggcagcatggacacggaggacatatgcatcgacgcaatggaagccatgacggaagacagcagaaagcccgcgggcgactggcccacgcgctaccgcatcatcctaggcgtcgcgcgagg

SEQ ID NO: 153613 - DNA, 847 bp, Zea Mays
gtgaataatccgagacaccagtgggtgcgctagatgcttgaatacatagcggagccgattgcacgctcaatttatagggttcgagggcggtggcccgtgaattggagatggcgtggtggcggccggagagaaggaaagttactggcgcaggtaataccgtggccttcaccgtggcaagcttaccggcgacgacccagctatctaaaatggctcagtgcgacgtggtaaatggcctgaggcatggcgcaaccacggtgaatggcacaagtttctgtgatggtcgcttggccacgtcgccggcgcaagtgggcacggcataggacgtaatagcgtttcaagctcatccgcagcgaagatcttttcactctgaggcattatctgggcacaagtgagcacgaatcacatcgccggcgtcaatcatggcgtaaggtcaccggcggcgatattccctaaacctgttgatatttgtgtggcactgtaccattggaggcctattcagagcgcctgatagaccgacttgcagggcgattagctccaaatttcatacaatgacatgaccatctctctggatcaaagttgtagtcctataatccaactacaaactgactatagagacctgactcatttacccactcctttgagcttgaatcgagtccaaagttgatcaaatctcactgtcaataaaaattcaggctataggggtgactgacagcagtacttggagtccatttaactccatcttttgtacagaacttatgtctgatgacttaaccaaagttatacccctttagtagctctataattttgatgtattgaccctggacaaattccttgtagatttagaaat

SEQ ID NO: 153614 - DNA, 517 bp, Zea Mays
cctcaactgccttgagccataagcaatcactctgccttcctgcatcaacacacagccaagaccaatacgcgaagcatccgtataaactgtgaaacgcttaccgctctcaggcaaagctaggataggggcatccaccaacttgctctttaatgtctgataactgacctcgcaatcgctggaccagaagaagagaacacccttctccaagagtctagtcaagggattagcaatgttggaaaaatttggtacgaaacactgataatatccagcgagccccaagaaacttcgaatttcagagacactaaagggtctcttccactccaccacagccgcaacattcttgggatcaatcgcaatgccctgctgattaatcacatgccctaggaaagccacttcgaacagccaaaatgcacacttcttcaacttgtcatagaactgattctcccttagggcacccagaacgagacggagatgctgctcatgctcagcctcggtcttagaataaatcagaatgtca

SEQ ID NO: 153615 - DNA, 334 bp, Zea Mays
tcgccggtccgtcagatctgcagcggcgcgaggggtttgaatgcggatagtgccccatcacgtcagcgcgtcctggtcagcggatgctcgccggagtgtaatggccatctcgccatcaatcggagcaagtctgcttcacagagggtggaagaagatggttggacggaagtcaagccaaggtactggtggcgcaaaaacctaggaaatcttggaaaatctcagcagcagatcgatgcatcaagctccaacctgttcaaatcgaagcttcagggtaaatgtttcaactgcttctcaccaaaccactacgcttttcgctgctcggctactacccggt

SEQ ID NO: 153616 - DNA, 1339 bp, Zea Mays
gggccttttcttcttggcccatccgctcacccagctaagccgacgctctttccatttttttaatccccttgccgcggatgacatcatcttgatgtcatgttgacatcaacatgcaaattaactccgttggagcctgttggccagaaccgttcgctggccagcatgtgtttcactggcatgtgggccaccttctcttgtcccatgttctttcctgtgtacgacccaaccttcttccaggaatcggcaaccgtgttcgttgcaggcaggagatgcgccagggtggttaagatttgattcaatccagttagacttttggatcctcaaggctataaattcggacgctcctacccatatgccgtgtgcgcatacgtgatttgagcgctcacggccgtacccgtacagaaggagagagagaattagtgaacttcggtcgccgttgttgcgcaccggcgattgccgtcgatcttgggcgacccatgcactcggggcagctcggcttgggttggtgggcgtcgtcaggaggaattgcggggcggtatacggcctgcgcgcagaggattcctcaccggtgtgccatcctcgccgtgcaatccgcacatcgccgtcgacgacgcgcctgcggtcgccaaactaaggtgaggatcctcgccaagccttcggttacctttgtgaatacagtacacctagaatcgtagaggtcagtgcagttgtgggagagcgattggtcgtcgtcgcgagttgtcaccgcagagccgctccgctgcgtgagcaggatccgtgcgcagctgattcccttaagtgatagctctgtgagatttgttagaggatcctctacctagatctcgagttgagggtaggaatcagggctctggatcacgattgggtgttcctccggcgatgctccgccgtgtgggggttttgcgccgccgccgtcggtagcatttgggaagaaaggcgcgcgaccgtccgatgtccaaggaacggctctgattagatcgcgcttaccggttcgttcagtttacgtgtcgaccgtccgattgggatcggatggtggctactcgtgctgggactcattaaatcgggaccgtcggattgttatctgagggttcgcgctgcgcaggtggcgagatctaatctcgtgcgcccatctccgatcgggcgactcagatttaatgataccccttcgcgggtactttttgttaaagagcccccgaaaaaattactaatcaacctgccatccagagagtactattctctgtgtctcggagatcttacgcccgagacccctgcacttttcatattttagcgcccagtccagagtagattaaaaatagagaaa

SEQ ID NO: 153617 - DNA, 791 bp, Zea Mays
atcggggcagagcacaggagtaggttgcggcgtagactgaagtgctactgtgtttagggacgctcaggtgacgtcatcctgtcttctccgcctatcacccttcgccttggtgactcgcacgttacagtggggccatgatggcatcagcccatgcggtgcagagagtcagatgtcccgcctctgtaacacgcaatccattgtgtcgtccgtgtacttcggtcgtagcgcccgccctggagtgggcaggtatacgtcttatccgcatttaatgctaaggagcattgtactccgaaggtcgatatcgggtttccccggtggcccatgctatgtgtcgtaggatacgcgacagcagtgtgcttttcctagtgaggggagcagcggtcggcaccgctcttccttgtgtcagctccaatttgccacctcacctagtaacctataaaaaggtgtccctgcatgtggccttattatggtgctcaacagtgtatctgtgggtcgttgttccgaacgttgtcaatcttttggattttgtttctgaacctcgctgagcagggtctcatgacctgtcccccggtcaggataaggcctaagcctttaggggctagtcctaggttctggaacaaccatcctaggatggtggagtgtgcggtcttagggtgctggaccaggctaagcggttacacggatccggattacctctgagaacgtgtccctctccccccggacctggcccttcatgatccaggccttatctgttatgagggaggatgagaaaccggatgacaaagtggaaa

SEQ ID NO: 153618 - DNA, 1024 bp, Zea Mays
ggatgccaaaccaaaagcaaagaaaaggaagctttctgtttcatattctatacaatacaaaagctagggtcccaattcagaaaagaggggaaaaaagactaggatcaatgacaacaagatggcatggtctagaaattacaaaaaacaagtagatgcagttccagcagaaattaatttaggaactaaagtataaacaaaaaaaatcattttaaaagcaacccatggaatatttatccgcataatataccataccagccattcagatgcgccaagaaaacaaggtgttgaattgcatatgtttgagccatgtaaacactcagattagacttgcttcttttcgaacacataccgcatcatattgcctaaatagcatataagcatgcaaaaaggaatctttttctaggcacaatcggattaaaaaaggtgaaaacagaaaagagatgacgactggatgaaattggaactaacaaagttagagaatccatgcgcacaagtaaataggacaaacaagaaagagacgatcatatgttgattgtgatgtgcacttgtagttcagaccaatagcaatagggatatgcatgttcatgtaccatgctgtgcctatgtctgtgtgcggtgcacagcaggatcaagaaagaccatcctgcaaaagcatttacaatagtcagtggccgcccatccatcatgataccatgaccggaatatttgacttgcaattttcttccctcctttacttgtctagtataaactgcaaacattttagttttccgacatacataacttttgatgcgatatacacgagggccaaagcaaacattacatcatcttgcatattgtggtgattcatcatattccatagtgcagaaactcaccactaaaaaggtaaacagttctcccaacagatgcactcagctgacattgtagactataaaatatatacaatctctggtcagctactcacctggattctgtttgttgactgttggttgcacaagtgctcttgcaagaatgaacccaaaaaaaa

SEQ ID NO: 153619 - DNA, 884 bp, Zea Mays
gttaggcttaggcaggcggcggggcgacgaccggtgacgcggcgacagcgaggcaggcagcggcacggtggcgggtggtaatgcgatggcgccacggcgagcaggcgtggttttctccaaccgcatcgctgactccctccttgactccctcgctgggcaacggtatgtttccatagccaccgccgctacgaatgtcacctacaagttcatgtgtagccacgccagcagcaccacatttaaaccatggatgcgacatatgtggactagtggaggagaaatcaatcttcggcatgcaaatgttctattctgtgcaggatagtgaaattggtatacaaatgagttttcagtggagaatgtactgtgcttagcttgttcttagatcatttaaatcattgttgtccactttattcggttgttacatgttaccaaaaccaaatatcagtaacattttcttttcagtcattagcaaagccaaagggcaggttctaatacagtcatatagagatgcttcacatgtcaacatgttcaaatgagtggtacacttagttcttacaagtttatactttatagttcgttttctttgactgtgtatgcaacaacataatatcatttaattccagaaagacttcctattgttgataaaagcaacccaaataattaatgaattgatcattgagacgaacatatatcattttcttaattaggtaaccacttatttaagttaattttatgttaattgcaattattgtgttcaaatggaattcatatgtgccaccagctatatatttgtgtgatttcaaaaatttagttgatataaataatttgtagtgttatatccggccctacactaatagagttcctggctccgccactgcacattacgc

SEQ ID NO: 153620 - DNA, 726 bp, Zea Mays
ggaacggcttcgtgctcagcaccgacgggcatcccagcagcctggggaccttcccggactggatggtgacgtcacaggacaacggcacctcgctggtgctgaaccctcctccggacagctctaacctgaccgagttcttgcagttcagcctggggcaagtgagcctgatgcggtggtctgcagcggcgaacacgaacagcagtggctgggtggctcgctggaccttcccgtcggattgcaaatccagtggcttcttctgcggtagctttggtgcttgcaggagcaatggagaatgcagctgtgtccgcggatttgagccttcctatccagcggagtggagcctcggatacttcgcaaccggttgctcgagaccgagatctcttccgctgagctgccagacgaacggccagactgaacaagacgactcctttatcctgctagacaagctgcaggggctcccgtataatccccaggatggtttagcagcaactgatgaagactgcaaacaagcctgtctcagcagatgctactgcgtcgcgtatgcgtatcactccggatgcaagctgtggtactacaacctgtacaacctgagcttcgcttccagaggacctcctccatacagcaaggtttatgttcgttggggctccaagctcaggcccaagagtggtctgcgcacagggctgattgtatccatggtggtcgggtcagtagcgttggctgccgtga

SEQ ID NO: 153621 - DNA, 371 bp, Zea Mays
ctggtttcagtaattttgtttatagcccagcgattggtaccagaggaggggtgttaatatcctggcgtgatggagttttttcatctttggcttcagttatcaagcagttttcggtttcagttaaattgcaagagaaaaatggttcttgctggtggttcactggagtgtatggtcctcaccaggacaatcttaaatcctcctttcttcatgaattaagagaaatcagagatacctgtatgggaccatagatcattgggggcgattttaatctgattttcagggaggaagataagaacaattccaatattaacagggctatgctgggggacttccgtaggcttattaattccttggatctgaaagagattcct

SEQ ID NO: 153622 - DNA, 844 bp, Zea Mays
aaacatccctcaagtggtaaaatttagcaaaactttagcatgtgctaaaatttagcagtatggaaatatacataccctaattcgaccatctttttcatcgacctttttactgtgtctcattgggcaccaaccaaacgcaagacgtaggtaacgaacatggtaagggtatgtacaaccttgagactccggttcaattttctaaatacaagagacgactaaaatactacatgatacaatcatgagaccctaaatcataaatacagataagagacaacatgtatagaaagtcgtgaagagacagactcttcgtgaagaaccgatctcttgtttttttacttagccctttagagacaacttaaaagattgtattaaataaggttatacatgttctaagggctaaggctctctccaaccatagatactaacgcgttcggtacgctatatttagagtgtaccatggttcccaacagtctccaataaacacctacaaagcgttcgctaaaatttagcgaccgccaaatctagcatatcctgttcgtccgctatctacactaggccatctgctggcctgctactgtcatagcaccaataaaaaaacaaacaatgccaagaagaaacctattgacgtctccggtgaccggtaaacaaaaagaacgaaaaaaataaaaccaaaacatcttctatggacatatgtgagaatgaccatttcatatattcgacatcttttagttgtacacagatattttaccatgtattatacaatgatttgtgatttgttgcaaaaatacggttgcaataatttatgataatatggttgctaaaaatatatacgatgagatataga

SEQ ID NO: 153623 - DNA, 355 bp, Zea Mays
gtaagatcgtagtcacggtgatttacttgttacagtctaaatgcgcatggttatgatcatgggtaaaaatctgtagtgctcatgtggtgtctaaactaaaatgcgaactagtgggtgaaaagcgctttgatatacatatatgccaaaattgatgattgtggtgaatgtgttgattaaatgtgtatgttagttctagcgcgcgaaatatcttggatgaaaattagtgagtctacttgttagtcctcatttgattattttaactctaacaaatggtaaagtgttagaataattcaagtctctagagcaaggcgattcttgaattatataggagctgaaatttattgattgctgtttt

SEQ ID NO: 153624 - DNA, 541 bp, Zea Mays
agaacaacaagtacaagagatttcaaatcttcaggaggacaacaaagacctcaaagcagcaaagactgatttgcataatgaggttatgttacttcaaaaatagaaaattgtagcactgactcagttacaagaatctgaggctcaaatcaagaatcttcagagtgacttggaatagcagcagaaccaaatttcagttatccagcaagcaaatgaagaaacaaaggataaaaattcaaacttgcaaaagcaactagaagaaactaagactaatctgcaatagttccattgtctgagcagtttaacaatttatgatcacattgttttagagatgtctacacttcctatttttaatgactgttttttattgtgttgacacttcgcattacaccataagcagaacttggagagttgattagcacaatcaaccaccagatcaaccactaatattgaatttagtattcaaaatctgtaagtgatatgaaaagggaaactatgtaggtgtgctagaaattagagggaaattatgtccaatacattgaga

SEQ ID NO: 153625 - DNA, 557 bp, Zea Mays
gcatctcgaaaacattcaacggtttctcgctctagtacggaggccgaatacaaagaagttgcaaatgctacagcagaagtaatttggatccaagtccttcttcatgagcttgggatttctcagcatcggcctcctattttgtggtgtgacaacattggtgccacctatcttacggccaatccaatttttcatcgccgtatgaagcatgttgaagttgattatcactttgttcgtgaacgtgtggcatcgcggcaacttgatgtgcgcatcatttcttctagtgaccaagtggcagatattatgaccaagcctctagcaggaccggctttctctaagatttgtaccaatctgaacttaatttcatatcgtccagattgagggggaatgttaaacatagaaggtcatgtatattaggaatgggccatgcgcacttaaatccgttgattgaggctcggttgattgaggcctcctgtaatcttggcatgtcaatcacggcattgctgtcatgtaatacaccctgctgtacgcgcatatatatacatgcctatagccccaag

SEQ ID NO: 153626 - DNA, 542 bp, Zea Mays
gagcccaccaccctacgaagaaagcatgtcaccaggatgatggaggggcaagaaatgaatgaattcccggaaaccacccatcccctgcctgcgacacactcatgacctatcagactaggcctgagtacacagatcgctggcagggcgtaacacgacatgccgcaccgagccctaggctacgagggccagaggtcggcgtagcccaaatgatggcgctcgggctccacactgcttgtgacgtccgccataaagaatatgagacatcaggcgaccccggggcccacgagcacgcgtggcttcacctcgtgtagaatgcttgtttttacctttgcccggtggccccttcctagggaaaccaccgctgggcgacccctcccttggcctataaaaggaagggttggccctcagacaaggggatgcacacacgcacggacggaccccaaacgagaagaaacccagacggaccgacgaacaggaggaggacgcaccgatgaggatccagaggccggagccccgccgccaagccaagacttagttaggac

SEQ ID NO: 153627 - DNA, 541 bp, Zea Mays
cgtgttcatttggctgctcatcaactttccgggatggccctatcctagtgggataccttcagcactgccgtcagagatgctacctaggcagaatttgaaactgctttccgagaacatcatgttccccaagggatcgttcagctcaaggaagatgaatttcaggaactaactcaaggtggaagatctgtcagtgagtacatgcacaaattcacagaattggctcgctacgcgcctgacgacgtcagcacagaagccaagaagatggcccgctttttgaaagggctaagaccagaactcaagactatcctcggcagccaggatttcctcagcttctcgcacctctcaaacaaagccatacaagtggaaagggcaagggaagaagaaaaaggtcacctcaagaggaaattccaagtccttcgagcttagcagcaagaccgacaccagagaattcgatcctttgggcttccacccaagggaccaagcttcaataagccagctggacccactccgtcacgtttcagtcagcagggtcagagctcct

SEQ ID NO: 153628 - DNA, 573 bp, Zea Mays
tgtcgcagcatagttacaaactccctggagactcaaactctccacgtccgacgcatgcaaaagtagttacagggagcatctatgttgcgacaagtttagactcaccggaaaatttcaatatgaagaaaatcttattgatgtcgatcaaagttcaggtaggttatagttgaaacccaacataaatcacaagtcaagattcaggcacatgtataactgtttcctatggtgtatgcactcctatagtcctatttaaggctaaatatttggatatattctatccttttaagtctccttttactacctctccccatctcaaatttggccttctcctgcctctcttcccattgctactgcgccttaggaccccacaacgtattggtgcttttggaggggtctccgttggacataaaaagatcaactgagtcaatgtaatcgcggttcgataaaaagatgtatgttatatccggatcacaagtctatttgtttctacgacatcccatgaattaatgtaaggggttcgctactaacatacaactgatcaactgagtcatctgaattgcagatgcacagaac

SEQ ID NO: 153629 - DNA, 803 bp, Zea Mays
tacaactggtacgcattcaatggcttagcgactgtcgagtccctgatctgatggcatccatcccatagcccataataactgtaccctggtccttcctcctcccaaataattgacctctttgggatggtacaacaagtagtatgtgttgaacaagttgcgttctctttggtgcgtacatgcaacagaatccaattaatgtacgatagtaagattcagttgttgacgcatggcatgtctgcgtacctacgataacaagtattcttgacagatacttatcgtgttgcctaatcagtaaacagtggtgtttccaaacaaggaccactgtttactgatccgtgcgattcgtggaaacgtccaagactgtacctttcgttgctggagtaatgtggagtgacatcacagatctctgaatctgatgctgtaaaactctttgccgacacctcaggagggtcactccatggcatttttttaacctttgggtaccatatatagacgaagaagtgtccatcgagcagtgagttagcagatggaaattcccgtataaatagagacatacaggtggtaggtcgttggaacgcccacgagacatggcgttcgttccatgtcaaacagaaacagtgcaaagaaaagaggggcgggccctgttactgtcagatcaaaggggaaagagagatgccaacagcacagagctgccatcgcaagcaaagatcagacagctaacaacgggagcgggggggcagcatgtgctaatcatcaaaggggtacaggcatgtcgtcctagacaggatcgatcatgtcccccc

SEQ ID NO: 153630 - DNA, 1390 bp, Zea Mays
gaacaattcttcatcattttctctgacccaagatcaaagcagtgggctcttgaccggaattcggtctcgtatcgtggtcgtgtctttcactttggtgattggtctgaagaaagttacgctagaaaaactttcttcgagtttagagttaaggtccgggttgaaggtgttccaattcactgctggggggaggatgtggtcgcaagggttctggggaagagttgtgccatccactttgttcaagagcgcgctaggcgtagagagcgcacgaggtcctttgatctctgggcctggtgctctgatccttgtgaaatccctaaggaagtttggcttacagttactgaacctgatagggagccccctccggtttccaccccactgccgcttgctggtgttagctatgatgttccatcagatctgaaaaaaggccatgtttacactcttcggaaccacattgaaatagtggaagatctctcattcttgcgcgggagggacagcaggggggaccttcgaaccgtaagcctcgcagagagtttgaatggagctatggtgtaccagattccattggcgagaaaagggagtatccgggtgaacgtcgtggaagggatttggttcgccgcgactgggatcaagatgatgatgatgtgtatcagcatggtagaagacatggtcctcgtcgtcatcgtagcctttctggttgggttcgttcgtcgcgttgtcggggtgggactgatgactgcatcagctcgaatggaaaatacagaacttccactcccttcagacgtaatgagatggggatgtcacaatcaaagcgttgggtacctaaattaagagctaaagctgtttcttttgctgacccactgatatctgctgtttggccttttgagggggctgagggggctgcaggtgctgataggctcctgctgaacagtggcaataaagatggcaatctggaggctcattatttccatgccgttgggaggtcatcaacaaagcatttggcacccaaggtaaatgctactgcagtctccattgcagattcactactcactgccgggtcgcctgcgatcgttgaggagctggtcgctggtgatagtcccatccaggatgcagtcaattcattcgacatccagaacgacctcgccatacatactactgcatctcccaaggtatcatcgaagctctcttcagataatgcagtaacttcacttgctagtatgcctgtgttcagtgctatttcgaatctgaataatactctgaatcacaataactcaatcgtggacacaactcaacaaccgcatcaggggttacttcgtgtcgagccccaagtagattcaaatggtaaacatgccgagcaagtctgtaaggtgactgttctacaggacgaaactcc

SEQ ID NO: 153631 - DNA, 353 bp, Zea Mays
ggggtactcagcataagtcaaatcttcttgaacactaaggtcttccattggtaattgctcctcaggtaccctgagacatttcttcagctgagatacatgaaatacatcatgaacatccgcaagacgatccggtaactccaattgatatgcaacttctcccactcgctttaagattaagaaaggtccaataaagcgaggggacaactttcctttgactttaaaccttctcataccccggagtggtgacaccttcaaatagacataatctccctccttaaactcaagcagtcttctccgggtgtctgcataacttttctgcctggattgtgcagttctcaaattctcccttattt

SEQ ID NO: 153632 - DNA, 437 bp, Zea Mays
ctcctgtgtttcttcttggggctgggcatccttgtgatgtttcctttttggaatacctgacaattcatcgtctgacagtgcatatgctattagttgttcttggggagaccattgtcttttaataccagaaaacaaaattcggttcttctgttttgtagtttcactttcgtttgtactgatctggcggcaaggaattccatagtactcacaacaacaacatgttccaaggtcacttgtctgttggtttggttgttcatccttttgtgtcttgaaggtctgttcatcagctgtttcatttatagtgttgttttgacttgtcaacacaccacattctttgcatttagtgacatcacttgtcgttgacattccaaggtctgacatctgtatgggtatggaagaatggaagggacaaaagggttgagcaaagatagattgta

SEQ ID NO: 153633 - DNA, 464 bp, Zea Mays
gcgttttgggtagtggagacaatctcattcattcttggtgcaagtctgtttgctaaaatcttggtcaatattttcatgaagctattgatgagactgatcggcctaaacatgtcaatcctgtcagcacctcccttttttgtaaaagcgcgatatttgcctcattaacgaggtttaggtttttgcatctatggtgatagaaatcatgaattgcacttgatagatcatctttaatcagctcaaaacaactcttatagaagatcccgataaaaccatctggacccggcgctttttcagagtgcatccccataaccacatttttaatctcatcctcattgaacaagaaatccaaatctgacaagtcaaatggactatagcctaggttaccccaccgaacggccctctgtctctcaccccttctaccaatagcttcagtgaaatgatggtgggcctcatgcagtttatct

SEQ ID NO: 153634 - DNA, 605 bp, Zea Mays
ctttgagaatgaagtctttttattgatgatgtattttccgattacagaatacaatgctgccacgatagcttttgaaatctagctaggggtaaaacttcctgagatgctctatattccatgaattccctatttctgtgccatccatttgagtaagtcgatatgaccctggccgagtgacttctgctaccatgaatggccttcccatagtggcgacaatttgtgccgtccttcccccgttagaattcggcaaaggaccaagtctcccactgcgaaggatcgatgtcgtatggccttatcatgatagcgcctcagggtttgctggtacctagctgactgaattactgtattcaatcgttcttcttccaatatgtcaatatcgtccagtctagtagcttctgcctcggctatgttctcaaagatcagccttggtgccccaaacctgagatcagcaggtagcactgcctccgaaccatagaccatgaagaagggagtgtttccaagcaaagctcggctaggttgggttcttaggctccaaaccacatacgacaactctttgatccactttcctgcgaacttttcattcttgtcgaagactttcttcctga

SEQ ID NO: 153635 - DNA, 567 bp, Zea Mays
gaaggccctccacctttcgataccgcaacgactcgccgtcgtagcacgcgtcgacgcgctcctcatcgtgggagagcggggtcacgagctccactgggtcgtgctcgacacgagcaggcgtcggagaggacgttcccggagagggtaccgttggtgcttgagtacgtggtgacagagagctcgctggagccggagttgtggctagattgcgtggtggcgaagagctcgttgtagccggagttgtagagcgtggcgctggagtcagtggagacttgggggctggggtaggcctactcggagaagggtctcctactccccgactccctcaaagtggacgtacttgatggtgaagttgtcgtacgtcggagtcgtgccgtcgtccaccgccttgccccaggcccatcctcgcccttcgtcgaacgctacgtcgcgcgccgtgtgcacacgcagtgttcctgggtcaaggatgcagtaggccttcgagccctccgcgtagccaatgaatacccatggggtgctcctgttgtcgagcttgtcgatgtgaccaagctccttggtgaacgcgag

SEQ ID NO: 153636 - DNA, 946 bp, Zea Mays
gtctgaagtggctttcctggggcatgtgattagtcagcagggcattgcggttgatcccaagaatgtcgcgctgtggtggagtggaagagaccctctagtgtctctgaaatccgaagcttcttggggctcgccggatattaccgatgcttcataccaaactttttcagcattgctaagcctttgactagacttttggagaagggtgttctattcgtctggtccagctattgcgaggtaagctatcagacattgaagaacaagttggtgagcacccctatcctagctttgcctgagagtggtaagcgtttcacagtttatacggatgcttctcgaattggtcttggttgtgtgttgatgcaggaaggcagagtgatcgcttatggctcaaggcagttgaggaagcatgaagggaattatccaactcatgatcttgaattggccgcagtggtatttgccataaaatcgttgaggcattatctctatggcgagtcttgtgacatttacatcgatcataaaagtctcaattacattttcacttagaaggagctgaatttgaggcgacgacggcggctcgaattgattaaagattatgatttgtccattcattatcaccctgggaaggcaaatgtggtggctgatgcccttatgtgatactccaattttctgaaaagaagttaaacttctttttctcttttctttcatgttttgtggcattggggtttggagttttaggaggcattcctcaggaaacagtagatcttttggcatttttttccgctggggttgggagctcaaatgggagagcgagtttgggccattgatctcgatccggtggatgggagcccccctctcctccccaaccctagccgaccccctctccttctccccaatttgttgcagccgccccatcccaaattgcaccaagacaagcacacttaacttggag

SEQ ID NO: 153637 - DNA, 481 bp, Zea Mays
ctgcttagttcctccattttattgttgctatctgccctcgtgcctccattttaatgtattaaatcactcttctttcggcgcagttcctgcataagtttgcccaatctggcacattcattcactgattcttgttccccggacaaacctgcgcgtgacaagagaactgcaccttttcagtacaacctacgcaagaagcgtgccaaaaccacttccacggtaagttcttttgtgcataacttatcttgtttcttatgtcctctgtttcagaaattgttaaatgcgcctttgtattcattgacttacagcaagttcttatcttgtttctttgaccatggcaagttcttgtttcttttactagatgtcctatgttccaaatagttacgtgcatgtgcaacttgcccacatatgagttcgtcggaccgtgccagttgggatccgatgacaactaaaatattcattgacctatgcatcaatcagaagg

SEQ ID NO: 153638 - DNA, 310 bp, Zea Mays
cttatgagagtgatcatctatgggatagattttcgcttttcatcttattcagtgatggttcaatttttgtgctctgtccagttgttctatttggaagtgactatagcaagaaacatattcaagaaatatatgaagatgttaatgcatttggattgaaatcttcaaatccaaatgttgtcactaattcatatttggtcaaaagctaatgcatatgcatcattagatgattctctgacattataggggcctctttgtagagtttgtgaggacaataatgaatctgaaggcaagagcagcagttgtgaaggaa

SEQ ID NO: 153639 - DNA, 674 bp, Zea Mays
gggatacgaactgtgtggcctcgatttggggccggggcactacgcagtgtcgcggggtcgtccagattcctcgccgcccctcctcatcgccgtgaagccgccgcagtcacttcgtccgctcgtcgccgtggggagcttcactaccgccactatatctagtatggattgcgctcccaggttcaccaattcatccgcttcgagtaggatctatcaaagccgagaatcacgcatcggggtataggcggaggtgatcaccgccgtgctatgccgtggggcagaacggcgccgtgtccggtcgtcgtgggggaagaaagaagtctggccgtaggatcctagatgtgcggccgagattagattagctgaccgattcaactggacaatctgagtgcttgattttatatcccacggtcaatagcgttcaccgtttcatatggagcccgatctgatctgggctgtccgatcatgatcggatggctcactgcgtctgataccccttcagtataaaggttttgtaaacgagcccctggaaaatcggttaataaacccgcattccatggcctgggttctctatgtcttggcacactttgcgctagggcccctgcacttctgagtatttgacgcccaatcctgaaactaatgaaaatgggtaattaataacataaattgttttttaa

SEQ ID NO: 153640 - DNA, 819 bp, Zea Mays
aacactgtcaaagtgctttgcgctaccacgaccagttcgcgaatatgcgcgacaccgagggagaccatggattttgtgcgacctcctgcgcgagctactggacacgtgaatagttcgatttggttacacttttttacgcatctgcgaccatatgcgtgagctactaaagatagttattttgattgccttacccttaagtacaagctgtagtatctgacctcacacactacccacgccgaacacacaccaccacacgcacacctaacctgtgagctagatcaacctatacctaaagggacacacgcacagctgagagataccgaaggcgaccttcggcgaagacgagcatgtttctctgaccattatggcatatctacacatgaggcaatatccgatgggaaaacctaggttgagcagtgctcgaacccaggccggtgcgagcacacaagtaataaaatggattagatgtaaaagaatgggctttacgagaccctcttttctcgttttaaccccttgaaaccatataataacttaaggaatatataacaagtcaacctatcctagtcactcctaggctaggagaaatcatacggttatacatctcggttgtaacgcttattgtgagtattgcattgatagtggaaagacaaattcaggttaacatccaaccaacatagttcctagtacacttcatcaatgttgtactaaatgattctaaattctagtacttccatatcatcaaactgccctacgcattactcataatctcctgcaagctggttcactacttccaagcacatcaagttgaggtgcacacat

SEQ ID NO: 153641 - DNA, 791 bp, Zea Mays
gcttttactgctctgaaacaggccatggccagtacccctgtccttgcattgcctaatttccctgaagtttttacagttgagactgatgctagtgatattgggttgggtgcagtgcttatgcaaaaggacagcctctagcatacttgagcaaggctttatctgagaagaacaaacatttgtccatctatgacaaagagtttctggccttgattatggcagtagaaagatggagatcttatttgcagtaccaagagtttgttattcttactgatcatcaaagtttgtgttatctggaaagtcagcagctgcaatctgatctccagaggaaggctatgtctaaactcatgggtttgcagttcagaattgtatatcgaaaaggaagggagaacttagctgctgatgcattatcgaggatgggaactgtcctgtctttgcagactgtgcctgaagttcaaccaatgtggttgcaagaaatccttaattcttatatgacagacccggtggcccaacaacttttggctcagttggctgtcaatagtcctaatgaagaaggtttttgcatacaccaaggtctgataaaaagagggaatcagctttgggtgggtcacaattcagctctcaggaccaaacttatttctgttttacatgatagtgccttgggaggtcattctggtattatggatacatatcaaagggtgaagaaagcattttattggcaaggtcttaagagggatgtggaggactttgtgaaacagtgctgcatttgtcagaaagccaaatctgagcatgtc

SEQ ID NO: 153642 - DNA, 818 bp, Zea Mays
taaaggcgtatgatcagaccgagatctgtcaagcgcctggactgtgacattagggaatttaagttcccactctgggctcattaaaaccctatcaagcttttcaaaagtgggtggaaccaagccatttgcccaagtaaattgtcgtcccaccatttctatttctcgtaattctaaattcgcaatgatagcattaaacagattaggccatcgaaagctgaagttttcattacttttgtcttccgctcttcgcataatattaaagtcccccctataataaaaggatgtgtttcggcaccgcacactcctgcaacttcagctaaaaaatcgttctttaaatcatcttgagctgggccataaacagcaaaaagggcccaaatgaagccatcctttttgtttcgaagtcggaacttgcaataaaaatctccttcatcaatagcaccaatgtcataaacacctaggttcacccctaacagcatccccccggatcttcctctaggtggaatgagatgccagagaaagtcggcaccaccgcagaaatttctcaaagtagaatccgagaaggagctgcgacccgtctccatgagagcaataaagtcgagtctatgatctcgagatagatgagataagtaattatgtttagccaaatcccctaggcctctacaattccaaaaaatccctttcatttaaaactaattttagtgggtgtgattggcttcttggaaggacggttaaccttaccttttgagaaagccttattcgatttctttttacgcggcgcagcagtaagctcacagcatcgatctaaagcactcaaccca

SEQ ID NO: 153643 - DNA, 304 bp, Zea Mays
gattgatgagcttttagagacatgagagaaccaaggacaacaatcaaatccattgaaccaaatggatatgccatttagagataagttgataaaacaagcatcatgaccctcggagaagggggtatgagaatgaccagaaatgagacattttaagcaaatcaacatccgatacttgtggacggcttatagcagataaccagataatagggcagaataattaaaggatccagagattcagatgataaagccagcatgattcaccaggaaaaaggattaccggatccaggtgaaaggagaggtaggc

SEQ ID NO: 153644 - DNA, 644 bp, Zea Mays
ctcctttcaaggttctttatggatatgatccaccatttgctgctgcaccgatggttccagttgggactgatgaggatgtatcagctctattagctgatagagcaaggtttactgagctgttgaagggcaagttggctgaggctcgtaaccgcatgaaattgtatgctgacaagcttcggactgaacgatagtttcaagttggggaaatggttctactgaagctacagccgtatgcgcagcattctgtggtaaacagatcatgtcccaagttggctttcaagttttatggtccttataaggtgcttgaacgaattggggaagtggcttatagattggaactgccagccgaagcgcaggtgcacccggtgtttcacatttctcagctcaaagctttcactcctaaccatgtgcctgtcttctccaccttgccaagatatgaggatttgagtaaacaaggtgtggttcctttggagattttagaccgcagattggtcaaaaagggaaacaaggcagtgtctcaggtgcttattcgatggagcaacattcctcaagaatcggccacatgggaggattactatgtgctccgtcagaagtttccggatgcaagtgcttggggacaagcaggttctgtggagggggcaaat

SEQ ID NO: 153645 - DNA, 444 bp, Zea Mays
gagtagattaccatgtgggaaataccgtgccttcaacacttgagcacataaggaatcagggtaatgaattaaacgccagccctgtcgagctaacatggccaggttaaaacaatgtacatccctgaaacccatacctccctttgattttcgtttgctcatcatctcccaggacaaccaatgaattttcttctcattatcctggttcgcccaccagaatcttccaatcatggagctgatctcatcacacaacgttttggtcagatcaaaaacagacatcgcataggtaggcatagactgaatgactgccttaatgagtacttccttccctgccttggacagaagttttattttccagccttgaatctttttccatattctatccttcagatatgcaaaggtttgagctttagatctccccatataaactggcagtcccaaatattt

SEQ ID NO: 153646 - DNA, 646 bp, Zea Mays
ggtggattgagctgaggcatggtggatgccgctatgcgcattatgacactggtggaattcccatccgggctttccgtgagaggcaagtagtcccccgttgtattggctgcatgacactactagctagggctgcaacttgcctcactacgcagggaggtgagtccgacctctgatcccggtaggataatgtccaagaatgagtcctgaacggggtccagcatccctacgacctcagtctatgtgattggttaccgtagaagtcgagccaggtccgtataagtttagccagtattagtagaaccaagatgagttcgtgcaaacacctttgtttggttgtgtgtatagactcgtgcagattagacatagatttggtttggttggttgcaccgaaatgtgtattagtgaagggtgtataaataaatctttacatatttatcatgagtgacttagttttgttcacaaaaatcggaggaatacaaatattaaatggatttagtgattaaatattttaattggaagatataaatagaaaagcaaaataaaaatatctcgatttctgtgcttaagtttgcagtgagcctgcatggggggagatgctcccgccggctgtttgcgcggagcctggctgcggcgtacggcttgcatg

SEQ ID NO: 153647 - DNA, 414 bp, Zea Mays
taaccatctttgaattgaattctaggtcaaaagtagtacagaactgtcccacaaatctttgtaaatctgatcaacaaatacaatgaagtaaacgctgtgtgagcatcatcaatctgaatgataaattatactttcccatctaaaatatttggaatgtaaaagagggacgagggtgacaggattcttacatgtttcagatgatgtgagcaccatggtgcactagtatgggacagtcactagcttcgtagtccaaaaggtccctcccctgatcatgccttcagataacttttctgaaaattggtctgcagaagtaggatctgaattcgttgcaatgccactttcgttaatgtataacactgtactccagactgcaactactcaaccacagcaccatagacttcatcgtgccctgcc

SEQ ID NO: 153648 - DNA, 402 bp, Zea Mays
tgtgtcgccattcgtcaagtgttattaagttcctcgctcgttcacaccagggagagaggtcatgcatggtaaaagagctagggtaaaaggtctagtactagtagctaagcatagttatcaacgaaagggaagcgtttgtggcaactggtggcaacaatatacttcgcctttctattggcatcatgccattgcatgcccgaagtatattgctcaatgctgcctgctgctcgttgctgcccactgtgagctgagaaagcgagcagaacgagttgaccccaacaaatactattttaattagctcttgcttttcaacatgatctacgacgtgtgtggatgccgagatgtgatgtgctgcagaggctggacatgacaccttgaccaatcatggaagctaaggcccgg

SEQ ID NO: 153649 - DNA, 416 bp, Zea Mays
gtgaagcttgttgacaaattacttttactgataaaattaatagaagagcacatgttacgttatacacatatacaagataactaatatgaaatatatatcgaattgcctatatatattaataaataagtattggtgtttgttgcattaagaatttgcaccaaagaaaagtctaatatttcataccatgtgtgtaataaaataaaaactccctcttatttcaaatatttcaaatgtgtcaagatgttggcgaatatgaagctcctacctgcattatttttgtaaacaatctttaattaagaatgtagtatatcatatgaaaatattttccatgatgaatccaacataacattgaacacatgttgtcgatacatgtagcttttcataaattgatggtccaaataattggaaaggtttac

SEQ ID NO: 153650 - DNA, 423 bp, Zea Mays
ggtcaaacgccggtgcaagtcgtgccctggggcgagtgcagcggcgccgcatggcgagttagaggtagaagaaaacatggatgccgttgacgtgaaaagcaacggtcaggattcaatcagagacttaaggatgcgataaccggcctcggccgttgatctgctcgtatgcggctgagattagctcatgtagaaatggatttgggccctcggatcttgatccaacggcctgtagatggcgctggttcattatgtggaataatctgatctgggcggtccgttttcgatcggacggttgatactgcccgataccccttcgactggggacaatttcataagagccctccgctttagttgtattcaacccgccatcctccttagggttagactgagtctgagaatcttctcgcttaagtccctgtgttt

SEQ ID NO: 153651 - DNA, 525 bp, Zea Mays
agatttgtaagaaaagggatacagaaggattggtttgtaatttagtttttttagtctataattggttcaaaaatccatagactttttttatagtcgattgtgggtgattgggagagcataggtattcaactacttattatgtgggataaaagatggataggttaggacaagaataggcagaggtaagaaagtttatggtgacgaagaactccgtgctaggtggtaatgtatttgaaggttgagtttgacttctctccttccttgacgaggttgatcttttcttctcggtcttgagctcattgattcgaggttagtgtatattatcagagttggggaaatatggttataatagttatgggtgagatgggctacatgatgtaggccaaaatctagtttgatgtcaggtgggggttaatagattatgcaatccatcaagactctattggttgggttggtgtgtcgtgctttttagagtgaactaggataaaacatgttctatagaagtatttattttaccactattaa

SEQ ID NO: 153652 - DNA, 348 bp, Zea Mays
atgtatttatataggaggaggtatatttagtttccacaccttggcagtgtcaattagtttagaaacatgtgcaaagtaacttcaagagaatttatgccaataactaagcagatgggcacaaaatgtttcgttttacacaatagcattagtggacatgtccatggaattgaatagaacatgagtgatgggttatacatttttcaattaggaactattgaggggaaaattagaagttgtatgattttttgaagattagggagaagaagcatcgtacaatatgtttattggtataacatacctgtcttcagatagaagttgtaggctgtaaacttgagtcttgtgagtgac

SEQ ID NO: 153653 - DNA, 1024 bp, Zea Mays
gagagtatcgaaagcaggccatctaaaatgcagtttgtcagtgttgaagaatgtgaaagtctgaccttacctaaaggaagccctctgttgcaaatacactacatcagaacaatccatgtcctacacattagtgactgtaaagaactggaatctgctcccctgttcgatgaaatgagaaaccttagagagctcagcatcataaattgccctaagctgagggcatcaagcgaaactgaaggcaagaacctgtcaccatcactaaagaatcttataatcaagcagtgtggtgatctagtgcattttcttattaagtcactacatggtctcgttaacctttcagagctggtactagaaaattgccccggccttctatcccttccgtcagctgatgtgttcaagagtctcaagtcgctgaagttcttggaggtaattgggtgtgagaatctttcgtcatttggtggactcagttccctttgttcccttgttacactgaagattagctcctgcagtaagcttgcagctccacctgtactgggtggtgctgcgtctggtcctgctaattatgatgatgatgttatagaagaagagaatatggtgttgcctgttaattccttgcagatcgactatcttgaagttgatctcccatgtgtattgaacattgaacctctcagtagactttgccacaccaaaggattggtaattggaggcgggacacagatggtgagcttgccagagcaatggcttctacagaaccacaaagaactgcagtcactaaaggtgttatgtgccagttcattggagtctctgccaccaagtatgcgagccctgagagcgctcaacttcttcttgttgtcaggagctgggaaacttacatcacttccagacatgccctcctccctacaatggctccatgtcataggctgctgtccagagctggtgacccagattagagtgaaggacaaccctgaatggagaaagatctccacagttcccaaggtgcacatagctgctgccaagactgtcc

SEQ ID NO: 153654 - DNA, 352 bp, Zea Mays
gcaatcaagtgaaaaagactttttctctctacttctctctcaaacttgggttaaaatgcgctaactctgatgtttggaccaaattgtgttttagttgcatattttgtaggatcacctattcaccccctctaggtgctcagcttcatatacacaaagcgatagaagttcagtaacagtttcaaatgcatcataagcaaattaaggagattttgggctcgtgtattatggccatttagaggataataccgaagctatcgccagaatgtgtgcttgcatcatcatcacatgggattgatgaattcataaatgaggtacgtataaacaaaaactttaggcaccaagaaaagacaca

SEQ ID NO: 153655 - DNA, 632 bp, Zea Mays
ctttggatgtgatcatctttcacattcatggtgacgccgcctttgccagatggccattcgacagtcgatcaacagccaggtggattcgaattttgaaggttagggtctctgtccagcagtctctaggattactcaacacacaagcaatctcgacgcttcttcctctgctccttccctgaacccgggcagcatatactttgctgcatgttgcctgaaagaaggtcccccgtgcaaactatgatggacgatgataatacttcctaccttccccctttaattctctggggtcttatcactttgcctgttcaaccttttctagggtggatggtgttgttaagtcacctaaacatctaacgagtgatggggtctgtccctagaatggggtcagaaggctagaatgcatcagctgagctgcgctccacctcatcccttcataccacactgatgctccatgttgtgaatcatctttgtggaatgcatggattttaaaatattttagcttgactaacttttgttaatggtttagtatgatcaagacatccattagctccaaccagcaaaacgatgctgaaaatgtgatcaaatttgtaacagcacatttcttagaacaaagcagctagtgcttccttttc

SEQ ID NO: 153656 - DNA, 283 bp, Zea Mays
tgcatggtgaaacttccggattgtttaccgatagaattcgtgtgtggcacaatgttgtccttataactggccagtgaatcaaccgagaagacacatcgttgttggtggcgattgacgtcgcgtcacacgtgtcaaaaaagataagccgaaggagacactgttaacgacagtatgatgttgagcgtgtgatattattgtctgtgagagaagaaaagaaacagctagctacatatggcctctgtgcatccttttgttattagttggaacgatatttgttttttcc

SEQ ID NO: 153657 - DNA, 369 bp, Zea Mays
gccctgtgtgatttagggaagatagtgagcacgtttgatttgtgacacaagcgttttaggtgtgattaaggatgtactcagggtacccctaattatggcacccgacaagtaactcacggctgacaatcaccttcttagaatcagcacacattaaacgatatcctttgacaccagaaccatagccaacaaaagtgcatttttgagctctaggtactaccttcccattgttaacatgagcataagcaggacaaccaaagattctaaaattagaataatcaactggttatctatccatacctcttctggaatcttaaaatcaatagctgaattcggagagcgattaatgaaataacaggcgacagatgcagc

SEQ ID NO: 153658 - DNA, 513 bp, Zea Mays
agggctttcatctcgcatgttcagaaaattcgtagctaacatgggtttaatggagcacatatgattctagattatggggtcatcaatgcaatcatctccttcaacagtaagtacttgataagattggttgttatccccagggagtgattgcatatgggttatgatggctcctcctaagctacacaatcgacaagatagcgaaccttgagctagtcatagaggtttaaattccatggccatgcaactatctgaggggatctaaacccttcccagtaggtcagaagttgttggctaggactaacacatgttatcccagtcagaaacaattgctattgttacgattggccatattggaatgatgccctgtctaagtgtctacctttacacacttagacagggcatattgttacgattggcaaggatcacgcaggtgatgcggctggagtcgcaggccctgggtcaagctgtctcattcccgccaacagcagccgtggagaaatgagcacactcggt

SEQ ID NO: 153659 - DNA, 635 bp, Zea Mays
aggcccaacaaattagggtaacccggagcccaccaattcattaagcacacccaactcaaggaaagacccaatcgccccaaagactagttcaatgagggaagggggactctcccttttaaagtgacttcctcctcccaagttaagtgaggtgggataattctgaggctcacacggtcgtcgtccgactacaattgggccaactaggacaattgtgtatttgtcaatgggtaatagttgatgatgggatgatacacccagcctaggtggtgttagccgaggcccaacaaattagggcaacccggagcccaacagttcattaagcacacccaacttagggaaaagtccaatcgtcccaaaagactagtccaatgggggaagagtggctctcccttttaaagtggcttcctcctcccaagttaagcgaggtgggatcattataaggctcacatggtcgccgtctgactacaattgggccaactaggccaattgtgtatttgtcaacgagtaatagtggaaggctagcataacgatacccggtcacctaaagcccccattcccaaggttagtggattgtcactggatattttagaaaagattagggaagagatagtcaggttgttcagggacaaattcag

SEQ ID NO: 153660 - DNA, 493 bp, Zea Mays
aaaaagactcccatggaactcattgttcatcttagtgccactgatggtgagcctcttattgatcctacctgctatcgtcatatagttaggagtcttgtttatcatggtgtcactcattctaatatttcttgttttgtgcatattcttagtcagattgtttcggtctctactcaactccactatagtcacatgcttcgtgagactacttgtgtcatctattctttccacgcacaagttctttataactgcagacctactatgatactctccgagctagtgagtcgactaagaagtagacaacagttctagtttgactgttcgagtgagttgcgtgctatggctcttgtgacaaggatgacttggttatagtggtggtttctgtttctatgtcgactcctcttttgacagtcagtacaagtgctattagtattatgattcgttcaagcatgagctattaagcatataggtgttgatgcctattacatgtgtgaac

SEQ ID NO: 153661 - DNA, 704 bp, Zea Mays
ggcgaactcctcgaagcaactgaaaatgggcggtccaccggacagagaaacatccggtgtgcgaaaccaggaactgcgatcaggagaattttggtttcccaccaaaagggcccgactcccaaaggcagggaacgaagtcagaggagaaccgaaggaagtaaacttgctaggacaaaaaaatccacgtgtccccggcccttacagaaatgacagcatagagtcttagagcccggtagcccagcaggcccgcgagcacgcacgggacgccattgcaggttgcagggacgagaccgaccggagttcaaaatttgaaatttagaacggttagagggtctgccaccaatagcaacaccagaacgattagggtccaagaactgagggagaccagttcttccattagaagcggaaagccacggtcccgaatcctgcgggcgaagacggttgaacacggagaccctcgggagaggccgaggcaaagcctgcgggcgccagctgttaagagcctgggcacaattagtggaaggacggcccaaacgattgaaaaccgaagaaccagcccgagcagcgtgctgaacaccaccaggcgacctggcaaggctccgaatcggaacaacattggcaccggtgagagggagtttaaccacgtccgcatatgaaagagaattcctgacccggaccttcgaccaggaggcagcttcctccgc

SEQ ID NO: 153662 - DNA, 654 bp, Zea Mays
ggcgaggtggcggcggtgcttgctgccaggatcgatgttgccgccagctctctggttctccgtcgggcctctccgtcgagcttcttgttggttcttccggacctggttctggttgagcggttgattggccttcggcagccggtcagttcttctggaggcggtctcagtcttctgtgcaaacgttggaatcgtttggccggagctcatggtcgtgtgttgtcgtccttgattgatgtggagcttcgtggcatccctgcccatgtgtgggagacgtctactgttgatcgcctattgtgcccttatgcctggatacagcaagtgcatcctgatacgctggggttgttggatctgtcaagtttcagatgcttggcttggtgttccgcaagtgcatcctgatacgctggggttgttggatctgtcaagtttcagatgcttggcttggtgttccgatctgtccaagcttccttcttccagggaactctgggtagttgagccgccgtcggccatcgttgaagtccctcctgtgaaacgggtgttatcctatccagttgagttgcggttctcggaggttcacgctcctgctgcgcctagtcctcccgtgtctgatggcagggatgaggacgatggtggtgactcctccaggggtcgtcggcg

SEQ ID NO: 153663 - DNA, 324 bp, Zea Mays
aaactctcgattttttattattatttttattttgaattaagttgttttctgacgaaggttgttttggcagagtatactactaagtaaagtgctgagaatgcaacaagatcttgaagatgagaagaacgaagctaccatcaaagatctagaaaacaaattcagaaattacgaagctgctctgaaggaaaaagactctgtcgttcaagatcttgaaatcaaagttaaagatcacgaagctgccttggaaaagaaagacttcgtcattcattctatggaaggttcattggctgaagccaagccgaaaataaaaaattaaacaatgaa

SEQ ID NO: 153664 - DNA, 603 bp, Zea Mays
gaattcttgttccactaacctatcagctgctgacaattcagctcagatatgttgggaaacgttgatcatgaactaacaagaacgaggattctatgcactcttgtatgcccgatgcaacttcttttgaaatcaggtactcacatctggcaagctaagccatgccagttctgttatcttatactaagcgttcctggaccgttcttcctttggtccctgggagtgcccatctccgcctttatggacaattatacttactaacaaaaattcggtttgcacccatcttctgagcaaacaaatgctcaggatttcactgccgtacccccaacgaccttccttcacccttgctttttccacactccatggtccttcctggtggccttgaatggcctgcgtttgcacgtcaaacattccagagcacaggcctgtagtagcagtatgttcaaattaaatcatcaaacacacttgctatgtcaaacttcactctttaaacagtacaatctataatgcaaagcagtgttttgtatggtctgttttgcacaccacgatctgctgagcacgacctaagatggtttcatgaaaactatatagttagctcaacccgac

SEQ ID NO: 153665 - DNA, 423 bp, Zea Mays
gtgacatgcccaagtagtcaccgcttccctatttttataagccgagtcaatacccattaggcgttcattaattttcacgtcgcgcatagtgtatggttgtactcgtgacaaggaggtgtaggtcttactcaattagaagtttggttggatgtgataagtagattggaagtgtgggtttgttgagcactgtgttgttggacgtgtatgtcgaggtacgttgtagtagtaattgcgttaacttgaataagagtcgcaagtgcatgccgtgctatggttttatttgaggtagtaaattataagagttgcgagatatgaggttcgatcgatgtagttaatatggattggactgtagagaggtggtgacatgccgaagtagtcattgctttctctgcggttaagtcgagatcatgtgtgatcatgcta

SEQ ID NO: 153666 - DNA, 474 bp, Zea Mays
ttcaggtttgatataatgattacccaccaaaagttcgaaaatttagaaactaaagaggtccaaaattgagaagaacctgctgctttctaaattctttagtgaactgaatcaaacttcagattctaaactgaattcgacaccagactgaacccacatcttccactccttgcatcacatgattccaaatgataccaaagaaatgacctaaatacaaattgctctccaatataccctttaactctttgctatacagctcgaatctccatggactaggtataggggagcttaaaaacccaatgaaaaacactgaatttcagattcagtttactgaacctattgctgaaatcctagtctgacagcacagctacaagcaatctttctcccagttcttagtaacaacaagccaaccttggttcacaaaacatgttcacaacaccaaactctacaagttttctgtagaagccctaagctaaa

SEQ ID NO: 153667 - DNA, 649 bp, Zea Mays
ctgaagctaagtggcaacttgcaagtatgtgtaatggttcataagtaaaacactctttcatgcagcatagctaaatggagaaatttggaacaggaacgtacctaacttttccgtcgcctcgaattttcaaggtgattacagtttgagatgacacatcgacagttgaaagagtgataaagtgataatacaaacatatcatgaagcacataggaaacctatgtgtatgcgcacatatttatatgttgcctagatgatctataaagtgatctctcgttatatatacatagttatataaaaaatcatgaagtacatgaaaagaattatatacacacacatattaatttgtttacccaaatcagatatgaagtgatctgtctctatatatgcaaagctatataaacaaatcttgaagcacatggaaaacgtaaggccaattttacaaaaggaggtccatggacgaattagaaatttaatcaatgcataccatgcaacagactaataatgaaataaacacatgttaatgtaagtgataattacctcgatactgaagtctttaaggccaggggaattattcgacgtgtttgaagaaaagcatacaaccacaaagtattcaaaagacaaatttattccttttacataccaatgatgt

SEQ ID NO: 153668 - DNA, 320 bp, Zea Mays
cagaacattttttccctgatcagtttgggggagcaggctccacgtacttgtatttcatagagtgaaaacggggctgtcagcctacagcaaacatatatcccccaacatagagagttacaacaaagaaggttgtctctccaaagtccaaacctcgatatcagccttatctgtcatgtatctgcatgcccagaagtccacttctctaacagcaacacgaatcacatttttaggtgtgtcattccggtcctgttccgagcatttcagacacgccacgggatgatcaaaatcataccaactggacagaggagggtagatcgagg

SEQ ID NO: 153669 - DNA, 1033 bp, Zea Mays
gatttttttctttacagacagacatctgcccaagcgaagatgcttgaatttatgcattgagttatattgtgctggctaatggatatgttgtggcgatttccttaatactcaggtgcttcaccgtttggtacctgtggtggtgactggcgaggatgctcttaaccagttgtgcttgtgttcaatataaggtggagcaaggaagaggagtataaaacgtggaaagaaaacataaagaaagggaaccgatttttttttaatgtgttcctgtcagcaattgcattcttgttctactgaaggtagagggtttcttgctgataccgattgttgtgtatttgctcccttgcctttttttcgcttggtctttgtcttaatgaatgagctgaaatctatagcagttgtcatagtgcccactacccaccaaaatgtagggcattacagtgctgagatgagcaggaacatgcagacatcatgcgggtcgcattttgccatctcttgtcgcttgaaaatctgattggagctctggtatgagttggtgtgatgagtgtgaggctaatcgtagattccgacccatgtccatgtgtggtatactggtataacaatctgaggtcagtgccctgtgccagacggcatcaagctagtagtactgcattattagtgggcgctcacaggtttagttcgatcggagatagtatcctgctattacgtgatggttatttgccttaatcagctacgcactcacctatataagtgcattcatgtaaccagacgtttagagccatctgatcggtggaggtggttttctggaacgacaaggaacgcactgcgccacgccacgcatgccgcttcccagtccacccaaccttcgctggacttggtggaggcacaggatcatatcgcccccacgcacgtactggactggaccacgccggcatgtgacagcaactaaagccatgcgcccatgccagactctgggacgcacacgtacgggcggtccgttgcttgctcgcccctgcttcgtagtactagctgttgc

SEQ ID NO: 153670 - DNA, 388 bp, Zea Mays
tgtaccttccggcacagaccaaatgacaggatccagagggtctaccgtcacatggcacagcagatcctccggaaagcttcccgtctgttaacaaactgtacctccgacagcagtccgcccatccggtgcacagctgtgatcgggctgtggaacggcgtattttaacaaagacagacagcccccaaagctaccgataccgccacagagaacaaatcacagggacacgccaaccgagccttctccccactctaaaaatatgatgagcagagcatgcttggagttggaatgcacacccctgtggatccagcttatggacttaccctcgaagaccccaactctacatagttatactaccattgcagttgcaggcccccagtacactccctaa

SEQ ID NO: 153671 - DNA, 555 bp, Zea Mays
ggttttcacaggagtattaataacatgaccaatgttagtgttcatacctgccccactgtctgtgattatctgatctgtgcccttatatttatgctattgtacttgttctagatcgtcagcttgttcggatcagatgtgatgtcatcagtcgtagctgtgtggaggtaccagttagtgtcgacaccatagccatgaatgccatgagtggccgcaacaataatcttggtcttggaggagtatctttcattgaagtgataccaacaatctagggtaacgtgccctactttgccacatacttggcagatcttgttagtgtgctgggattgtgagcgtccattagacgaggagaaagacacacattgatggctacgaccactaggaccatgacgccctctgccccgaccatggccacgacacagttgttgctttcgtgaccttgaccagcaacattagcagaagcttgatgacctccatgaagtagatccatactgacattgaagctgggaggtggctacagtcacggtgacctgctcaacatgggccaccagagttgag

SEQ ID NO: 153672 - DNA, 783 bp, Zea Mays
aatgtctcctgcgtgttcagtctggaatagtttcaattttcctaaggtgaggttgcccgtggcagtgaatgcatgtaccagtgcctatgatgatttgtaaagaactaatttaaagatagatcttttgtcgaaggtttttatatgagtggatcatgaaaaacgataaatcgagacaaagaaattttgttttggttcaggactagcataaaaacaatattacaatcgatggctataaacaagatataacatatttcgctgtaaacctactccctaattcttgctttgaagaactaaaaattcgaagaagtaggtaaagggaaatcaagaattcagatgcagatggatatatataggatctattcatctcacgaaaagaaggatcggggcatcgggcaggtctctgccgtcgtcggctcaccgttttggatctagctagctagacgcatgcaaggattggtaggtctgcatgcgccggggcttccaacgccggcgaaggagttgctcctggtaaccggcaccgaccgcggttgcctgggccgatagcccttccacttcttgaccgtcgcgccatcgacgccgtcgtcgtcctcgtcgctgccgctcgggacgcggcaccgctccccgaggatgatcgtcttggtccacagtgtgccttcctctccgacctcgccaccgcggtggcaccccacgaagacgtcgtcctccgcggcggcggcgccctcccccggtccgccgcggcgcatcgaccgtatcctgccaacccgctcggcaaaccgggtgtgc

SEQ ID NO: 153673 - DNA, 388 bp, Zea Mays
tgctgagggtgatcctgtggtttggttggacaagtgcttggagtatttttctgtctaccaagttccagcatctatgtgggtgtctgttgcttcgatgaatttggagaatattgttgtgcagtggtggcactatcataaactgaagtatgggttgggtggttggcatgaatttgctgcaactgttgtcagtaagtttggtgccgaggcttatcctaagcgttgtgaagactgttttcgtcgcgtcagttaggcacgctggataactatgttcatgaatttgagcaggctcggtatggagtggcggtgcataatgctcaatatgatgaaacattctttgttacccactttgttcgtggcctcaaatttgaactacaggatgtggtgcaag

SEQ ID NO: 153674 - DNA, 679 bp, Zea Mays
gttcgtgccgatgcagggttttcctcagtatctggctgcgcctactcctgcaccgactactcctatgccgtctcagtttggagctccgcgtctgcctcacccgacgactcagtggggttcttctgttaatttcactccgggagcttcctcttctgcgggtatttccggggcttatgtgctacccgctgcggatggcagagagcaaggagacgtggtgacaggtacgatttcagttgattcgtttgtggcccatgctctttttgactctggtgctagctatttgtttgtttcggaggattttgtgtcacgggctggtctttcggtgcagaggttgggtcacccaattttggttagttctgctaatggctccattagtagttgttcagtttttcaggagtgttctgtcattcttgctgatgaggtctttttggccaatctggttgtgatttccttgggggcattcgatgttatcttgggtatggattggttatcccagtatcgcgcagttatatgctatttttggaagacagtgttattgcaggcaccgtcaggtagggaggtggtattcttgggaagttcccctaagttcacattatccttgttggcgcaattgcttccggatcgccggtccaggaagtcgggaatctttttctccatggtggtggagggtgaggctgcc

SEQ ID NO: 153675 - DNA, 646 bp, Zea Mays
gcttgatcttgcatcattgacaggtggagcaggatcggacgaagtcctcgacgatgcggcccatgtcggggagtggatgtcgcgccggaggcggtggagggtgcgttgtacgccttcgtggccatcaccatgtacggcggccaagatctcctggaggagaggtgatgacggagggacgtagagcctgctgttgtaggtgagcaggttgtcgacgatggcctagggatcgccgcgggtgccggtcgcgacctcgtctcggaggaccgggatcgtcctcctgctcgtgcctcagacgtgtgatgtagtcgaaccgcggcgccgagacgactaggacaaccccctcctccagcgtctctctgcgagataaggtgtccgccatgacgttctgggaccccagcttgtattcaacgtcaaaatcgaagccgagcagcttccccaccagtggtgttgtggaatggtggcgaggcgctgatcgaggaggaatttcaggctatagtggtccgtccggactatgaagcgtcggccctagaggtatggcctccaatggcagacgacatagaccagccctatcagctctcgctcataggccgcaagcgaccgatgtcgtggtgccaccggtctgctgaagaaagcgatgggatgcgcc

SEQ ID NO: 153676 - DNA, 559 bp, Zea Mays
ggggaaagcgcgcgcgcgcccgcgcgttggcggctttgcagaagggtccctgttttcttgaatatcccgacaaagcccaaggcactatttaacacagtcgctgacaattgcaaagacaccctcgcacttctatctattctcggtttgaagtccccgacgacggtgaacgcggccgcgctccggtgagcaactgtaccggccgaacggggccatgaccggcgctcccgagtgacagacaccaaattagacctgccccgagcatttcccctaagtcaattgcatgattggtgacctatttcgctctgcccacgaggacagcgaaagccatggacattagttcgtgttcccagtgattggtgggctcctagttcaattggacggtttggagagcatcaccagcatacagggacatgagaacaacgcgcgaattggatggtgccttaccagaacggactggccacggtggagttgtgctttacggtggcggagaccaatttggggaaaaaggggaattctccggctatggtgggcaatcgaggggaagaacgggtgtgtgggc

SEQ ID NO: 153677 - DNA, 350 bp, Zea Mays
cccctccctgaaatagatttcataagccgattttgcggagtactagccatcacaagacaaccctccaaacatggcaatcatcaatcctaggttgtaacaccacctcagagagcaaataccagagactaagaaactcattaataactccaaaagttagagctccatagatatccatcacccaagagtgatcagtaagagcttcatgtactgtccttttgctaattctcatcttgggaactgttgcaaagacttgtggtgcaaggtcagcaattctctgaccctgaatccatctatccgaccaaaacagggttgctgccccattgcccacctctgaaaccactgctatggag

SEQ ID NO: 153678 - DNA, 613 bp, Zea Mays
tggggtggaagtggagcttagaagctgtagggtggagtcctagctaagtattgcctcgatggggctccggcttcctggtcctcgtcggcgcttctcctcctgttcgtccttgtgcgttcctgtccgtctgaaggcgtctggttgccccaatagctctctcattttgatcccctttccctaaggccagcctctcccttttataggctgggagaggggttgaccagcagtggattccatgggaaggagccgtaaggcaagggtacaacaaacgttttatcccgggtggagccatgcgtacttgtggggcccgaggctgctagtctgtctcatatttaccgcgacagatgatgtggggacaatgatggtcctaggcgtcatcattttggctacgccgacccctggcctctatagactgggactcggcgcagcccgtcgtgtagtgcccagcgggtggtctgcgcactcaggcctaatctgatatgccataagtgcatcgtatgctaaggggtgcacgggccattaatgcaccacagtacaaggggctcgtaggtcatgagtctatgcgacccgaggtgcttgtatgtcataagtgggaagcagaccgacgatcatg

SEQ ID NO: 153679 - DNA, 695 bp, Zea Mays
tatacacacacctgttttctaattcagctcagatactcaatgcggaaggcttaatgaagatgggggtaggtttattaccgcgaattgatgactcgacggcgctggccacggtgtacagcggatttcgcggcagtgccctacgacggcgagcaatcgccgatggtgcagtcgatcagttgtcgcgctcggtgctcggtgagcatcaacggtgtccaccgaagaccctggacctcttcccagagctcgggtgatgcctacggcccaaggcagcgacggtggaaccggcactggtggcggcggaatcgtcccttcccagctaatggcgcgcgactggctacggtgcctgggtctgcacgagaggatggaagaggggtagttaggccagaggacgggcggcggcagtacttgtattgccgcacgaggaggcagtccgcgcgcggcgcgtggtcagttgtaacagcccggacttcgcacggaggacgatgtctaggatcgagccatggcgttgagcacgcgtgggggaagtctatgccagcgggtcccacgcaccagaggaagggcgcggagaagagtggaagtctgacgtcccgggcccgcgaatccgtgacgcacagaaggggccgtgcccgtgcccgacaagcggccccaccaacagagacgccaggagacttgctcggggatgacgtgggctcgct

SEQ ID NO: 153680 - DNA, 452 bp, Zea Mays
caaaactatctgaaccatccttctttccaagtcactttcaccggataccgcttcccagatacttgccaaaatgttgcctggaaagccctccgacaactatgccagagctacaacaaagtgatctttgaaaccccccttcgctacttcccacccagcaacaaaaatacacccgcctggacgaaaagacttcaggccctgtcaggaggagatcctatcgaagatgaccccaccatcgtctacatggctggatacctccacaccctcgataaccaatatgatgaccttgcctcccactgcactcacctaaacttccgggtggaaagcctggagcaaaaagtcagggaacttgcaagggaaaaggcgacccttcaagagagcctcgagatagcagaaggcgaggaaaccaacacccgtgaggcctaccgcacactgaagatggattacggcaagaa

SEQ ID NO: 153681 - DNA, 408 bp, Zea Mays
tgacacgattagaggaaagctcgaggcatcgataacccttatggtcgtgtgagtaaccaaggaagacacataaggtggaacatggggcgagcttgtgtggcatggtggcagatgtgtttggataacaacaaccgaacacacgaagatgggtgtaggagggagggcgatcgtatagggcttggtgtggagaaatcgagggttttggtggggtggcaattgaggaggtgggtagaagtatgaagtgcctcaacccagtaaggaggagggaggtgtgcttggaagagcaaagaacggatgatattattcgtggtacgaagaatgtgctcggccttgccattctgttgagaggtgtagggacatgacatgcgaagaagcacgccaagtgagagaaaaaacgcacaagagaac

SEQ ID NO: 153682 - DNA, 436 bp, Zea Mays
actatatccttggttatgcttttaattattatcatatgtacccttgacacctctatatcctacgttgatgtttgtccatacctgctctttaaaattgcccctcttctgtctcataccttctttctcttggttgtatcctcttcttgggctcacgagtttgtaaccccgtcctttgttgtgcttttgtttcgtattgcctttacccttctcatctcttgatcttaccttggtgattacgctatgttcgttatctaaaatctccaatctcctatcccaatttgagagctgtgttctacttatcttacccttggcaatatcctctttaccgcgtgaaagcctggacgtaactccattctttgttgtacttatacaactggctcttcaatgccttcatcttttctctcatgcccttgtcagttatcgcctctgacccttc

SEQ ID NO: 153683 - DNA, 283 bp, Zea Mays
accagacaagtaggtagacagagatgtggcatctgcatagtctgatatcatgatcctctcatgctctttggggccccagtagtagccacgcaaggggacaagattggggtgccttacactgccaagcttctttatttcacgggaaaattctttcttactcttagcaaagccctccttcagccacttcactgtcagcatgtacccgttgtcaagtgtagccttgtaggatgtcccatggcagctcctgccaattatctcagcaggggcacgagagagctcttca

SEQ ID NO: 153684 - DNA, 1150 bp, Zea Mays
tgcagggaggtttttcgagaccctgattgggagggggaacgagccattgtggaggctcttatccaagattgcgatactgtacacactggagcccatcttcaccatcatattcgtgatcaatataactatcatctgggagcaggttatggcaaggctgcggagccagatatttcgaaggattctgatccaaaaggtgctttcagccgacatcccctgttttattaatgcttttttttattctgcattctgacaacattggatgtgcttgtatgaatgatgaattgatatttgctgattacttgcatggctttgttaccttgaccatagctcaaaaaagttatcatcaagtgttttttgtacaccttcagagatataattattctccgtgtcatgatggaatgattcacattgttttccctcttagggtgtagaagcatttaatatagttctactaggtaaatatactacgtagtacgtacctggatgatactggcagcaagttatttaaatattcatgtaatatcaacactccagtgcagtaggcattctatgcatcgatgatgaaaataaatctttaaaacaggttgtgctttagttgcctatttgtgtactagtaatcctgttaatgtatagcctattaactctcaatgtattatgggtctatgactattgctttcatagtcatagtgcatatgtttctttatccatagaatttgttggaggctgcatttctcattacattttcaatttgccactcagcaaaagagtgcatttacttcttgttgttaatagctccttgcttggaaccccgtctaaactttcttatttttgccttttgcagatgttattttttgatcgtcacaaggtaacatattttctagcaattacagcaccatcttcatacttaatcatggtagttatgtgaaagaaaacctcattaacaaagtacacatccctcacttgtgacttaaaagtatgtactttttgaaatatcaccaatagtactgtagattagaaataaaatatatggttcttgtttccattgatactggcaacatgtgatacttctataatggcatgcatagcattaacattggtctaatctgtatgattacgaagaattttacatgatttattcaagattagatga

SEQ ID NO: 153685 - DNA, 420 bp, Zea Mays
cctctgcctccacttggcaccgtcgtcttgactacctcggccacgacgtcctctccagactcttggacacctcggccatcccttaccccacgacagtgccaccttgctttgccatgcctgtcagcttgggcgttacactcgcttatccttctcttccatctcccgagctactcacccattcgacctcatccactgtgacctttggacatccccctattctaagcatctctggttattggtattatctggtcatccttgatgacttctctcactacttgtggacctttcccctctgtcgctagtctgacaccttcaccagtctttctcaccttttagcgtgggtgtcgactcagtttggtcacaccatctaggatgttcagtgcgataatggacaagagtttgataacttctacgtctcac

SEQ ID NO: 153686 - DNA, 700 bp, Zea Mays
tttgaacgtgtcactggtaccagattcgagagagctttggattgttgagcctccctttgccgttgatggtgaatcctatgacaggagaatgtttatgtatccaatctgcataacattgtcgtctgcccctcggtaggatggatctgatcctaaccctcaggttattgaagtggacggtgatgatatagggcgtgtgcagcagtgatatccacgttcaagacctccccagtcacgtcgcgacagtgaggaagatggttagtcgggacgtcattcatttcatgattgtttgggtccaagagatgatgacatgaagcatcgaaacctgatttatgagaaggcagaggcagatttaatgtggacagtggaatccggtggggggatcctgtctcctgggctgaaagagatggctgaagataggcaagacaaccctgatgtccttaatcctgcacttgagaaggtgaagaagctgaaggtttactctcgtcaaaggctcaagaacatcctgacactagagggggctggagctcccactcctgccactgcgcttcctccctccccctcaggtgtggcagctgccgacacaattccgtctgaggctcctgtcttagatgttgacgttgtgctggcaactccatctgaagatggcctcccattgtcactttctctacttgagcctggaacgctacctccctccctgtca

SEQ ID NO: 153687 - DNA, 515 bp, Zea Mays
tatatatattgttaccataaaaagaaattcgaaaataaaaaggaaaaaaatacaaaaccctagccctgaccgaatttggcccacttggcccaacaagccagccgccgcacccctaaccctaagtcgtgccccctggcttctccctgccagccgccaccttctacctcctctccctgctcccaaccgaaaccggcgccaggaaccgacgccgagcagcccaagcaaccccactgttcgttcttcattgcgtgcaatgaagaatcattgttgccatttcttcctccattactccctccccacgttcatcctccattaagatcaacgctattgatggccatgaaacaccccgacgacctctgctctccctctctctctataaaatcccagccgagccctctccttctctctgctcgagctcgctctctcttctcgcgcctccctccctctcgcagtgtagttcgccggagttcatcgctgttcctcgtcggagctcgtgttcaccgtccgcgtttccc

SEQ ID NO: 153688 - DNA, 1052 bp, Zea Mays
acttgattgctcatcaaggttttgcctactcagtggggtacgaaggttccatggctagaccacacatgcccctcttatctgaaatatccttctccattctgaggtatccattctcgccccaagtcgtgccccatgagttcttcatcagccagtacttagtaccatcactggtctttccataaccaatggctgcaatcccatggtccaagtcagtgccacatgagccagtcatcacaccaccagagtagaactggaacgtcatgtctccgccatccactgccaccgagacaggctggtttgccacggccttcatcaaggcagcctcatcatttgccggcacatcctcgtagccctttatggttgcagcactatttgatccactcttgcacttgccatctgcagcagtgtaaggatagctggactccgtggttaggccgccgttcttgatgatgaacttgaaagcatcgtccatcaaaccaccctcacaaccttgatcctcgccatggacatcgcaatccactaactcttgttctgcaagagagacgagcttgcccgtgctgattttcacaatgccttctgtggcggccacggctgagaacgcccagcagcaacctgcaattgattattatgtctcgacttatgtcatcacactctagtttttatttccaccataatagagttgtcggaagtgttcgtgctactaaatatacataccacattgaccttgatccttgatgggagtgacggcacccttggtcctccaatcgatggtcgtcggaagcgcatcggcactaacattctcatacctaaatcctgtagggatcttcatattgctagatttgagacccttattagtcttggtagacctgaactcgtcgttggtgagatcggcgaactggttaaccccgagccagaacttattattcccaccagcgttgaacgactcgatgaactgaacgttagccttgaacacctcgaaccgccgagccttctcggaggcgtctttgtagacgcggctgtactgcgccatccactgctcatgcctcgccacc

SEQ ID NO: 153689 - DNA, 559 bp, Zea Mays
tcgactaagttagctggtgccgaagtctgtcgtaagatggtgaaaatgctgcactcgcttgaagtggtcccgcgggggtttttgaaatgtgatcgttgatgagacatgttactgtggcactgttgagttctcgaggtgtcgctccgggcctataaaaagctgggctcgggctaaggcttttcacttgctcgagcgcacgctgttgaaaccctagttttttcatctgcttgcttgccctctctactctcgttcttctgaagatcaggcccccatcaagaagactgctcgccgccaccgacggtacatgaccatgtcgtcctcttcgtcattgtcgtccgctgcgagtgcgtcaccggccatgccgccatcttagaagacacttagcgattcggcggcggtagacctgcaccctggtcattcgtttgagtttggtacctcgaggatctactcgggccgcatgttggagatgcaacaactgggttactttggaagtggagttaggcgggctccaggggctgaagatgtccgtgagccggaggggaagttggttgtgtttgag

SEQ ID NO: 153690 - DNA, 554 bp, Zea Mays
gttgttaaggaaaaactgaagataagtaagcctaaagtcaggctgtcaggttggataagtctgaaaatcagactggcagattgatgccatcaacttcaagcttaaattcaagcatgatccaaggggtttttgtggcatcatcatattacaaagttgtagaggggatattgctctacacttttgctgcagagctcgacatgtgttgacattagaaattaagagaaaatgatgctccaagttcggctgacaggctgttgaatgggatgcaccatggtacagtaactgaatcagataaggtcgccgcacggctgtcttcaccgccggtggctcgtcgccgttgattgccgctcgccatgattcgtgcgccgtggccatcggataaacatagctcggtaaaaatccccgccgccggtgggctggacgccatcccggccagccgcggtacccctccccttgctcaccgtcgtggataaagctgctcaccgccgacgtgcccttgccgttggccaccgcgtgtcctaaccgcgccattgcatcaccgtgattccctacta

SEQ ID NO: 153691 - DNA, 950 bp, Zea Mays
gcgtgttagccctgaggattcaaacaaaaaatttgcggagattatcgatattccaggaatgctctaggtcctcgccggatggcgtagttagcctgtacgcgctgggggacgccttcgtcttgacgatgaaaggaccctcccactttggctctagcttgccctgtgactctggccgagttgtccggacgagaacgaggtccccttcatcgaattctcttgggacgactgtgtggtcgcgccaggccttcgtttgagcttggtatttgttgagagcctacagggcgaagacacggtctccatcgatgaggtctttggaggttggttcgtctacgtcggggacggctgaagcgcttgtccgtggtgacccatgtttgatttcctgcggggtcatggcctccgatccgtatagcaggtgaaagggagtgaatccagtcgcccagcattcggtcgtgttcagcgcccagactggttcaggtagcaggtcggcccatttacccttcttgttgtcgagaagcattttcttgatggcagtgaaaatcttgtcgttggcgcgctccatgacgccgttggattgtgggtgatatactgaggcgaaggctagcttggtgccaatggagaagcaaaagtccctgaagtcctggctgtcaaactgtttgccattgtcgattatgagctcagacgggactccgaatcggcagataatattttgccagaaaaatttctgggcagtcttcgacgttattgtggatactgcccttgcctcgatccacttgataaaatactcgatggtgatgaaggtgaacttgaggttcccttgagccatggtagtggcccgacaatgtctatcccccagcgttgaagtggccatgtgtgggcgatcaactttatgaattgcgaggggttgcccgaacgggagagaacttctgtcaggcttcgcacgacctcgtgac

SEQ ID NO: 153692 - DNA, 650 bp, Zea Mays
caacctccttgagtcgactgcggaaagaacaatgcccgggcggctgagctcctcgccgccattgaaattcaggcgctagtgccgatttggggccctctggtggacgtgggaagttagcccagtgcttgcgatggggattacgtccggaaacaccgcggtgcgccggtggaactccgccaattcctggtcggagttggtcatcggaggtcgcgaccgccatccctgctgctgaccacaacctcgccgcgccggtggtaagtttgccacggcccagttcaccgcattgtccacatcgtgtaactagtactagatctggttgcggggcaccgggggccggaaatcggtggcgccgccggccgctccgtcgtggggagattctacgccgttgtcagacacactgtgggttgtcgccgattgagtaactgtggatcctcgtttggacggtccggattagaccctgtaggtaccccttcgcagcattaaggagctggccgttgatcacccatcgtacggctagggataacacgtgtgtatctgtcgttcatcattaatcccacggatctggactctgatctagcggtcagatatcttcaataccccttcggccgagaacatttactatagagatcatgcgcttatcagaaaataac

SEQ ID NO: 153693 - DNA, 686 bp, Zea Mays
caccgtgccaagtgaagcaaccaaacaagccgggggagagaaccgatgccgctggggtcgacctgcgcgcacaccggcgatgaggcctcaacgaccgacttgagctcctccttgggatgcctggagtttgcccgtgacctcaaagggtggcgcttgtgtcgggatggcgcagaatttgtccccgaaggccaacctccgccacgagtcactgtagggcgtatgcgacattatcggtgccctcatcgtgggtaagatcactcccatggagttcgccttggtctcctatgtgcgcagcatcatcagaatcataggttaccgacctatagcgtgggtcgggaaatccgaccatgccgccaccgttgacttgtgggcggcggcgttggtgctgtcagaggaagaaggtgaacctagggccgtttgatccactggtggcgataggattagatctgggggtgtgtcatcgtttgccattgatgctaatatggtcggccacgattatatcctggcataccgattcggtatgtgggtactggccatccggtggggatcggaggaacgtagttcgatcccgcgtgagttaaatctggaccgctggtcgctaatccgttggtagaaatcacacaccggttgggttaaagtgtagatctaatccgcgccactgattttggatcgggtggctggggtaa

SEQ ID NO: 153694 - DNA, 858 bp, Zea Mays
ttgtctggtttttgaggtgatgcgcgaaaggtggcatcttcattcctccaagcgtcgaggatttctcaaaaaaaatacgagggtaaaggtgtgcacttttagtgtgcgaaattcacgtaatctgtaaattcgtcgcggagtgggtacgctataattttccgggaatggaaggcttggttcacttttgcaatgttttcttgagggatttgaggcgatgggcgccgtcgattgcttgaggggtgggtgctgcgtgtgtacgccttgatccaatagaaaatcacatggaacctgttttttaccgggagtgttacggccggccctatgctatgttatgttatttatgtagtggtgtttggttcctacctcctaaactagtcatttttagtcactaaaatatcaaacggggtgactgaaataggtctttcaaatagaatttctaatgactaaagtttagtctataaaatttaggagggtggctaaagaaaccaaacatcccttattgtgtcattgggtgagtgttctaaatatagggggtgtttgctcctaaactttagtgaccaaaatttagtcaccttttgtcgctaaaatactaaacgaggtgactaaaataggtctttcaaatatgatttttatggaccaaagtttagtccctaaagtttagaaagatgactaagagcatgttcaacaattgtcttaaaacagtgccctgtcttaaaatatagggctcaatccataaaaaacaacttcaagagtgtcatattttgcatttttttgttaaaaaaatatagggcactgtatgaagttacccaaatatactacatgctacactagtgccctatgtttgttttctacaccatt

SEQ ID NO: 153695 - DNA, 575 bp, Zea Mays
ccacaattagcaaacagaggaggatctcatccacaaagaacacgaaccctaaaaccatgaagtcgagcaaacgctgaacaaaacgattcaagaaatgggatctgaacatgataaacaatatctgcagtagccgtgggggaaaaatgaacccaagcgcagattagaacacgaagactgaaggagtgcgaagatggaggaagcgcggactggaacacgaagactgaaggagtgaaaatggaggaagctggatcttccgcgagatttttttggataaagaagcggcggagggattgagtaggaggaagcggcaaagagagcgaggaccaagaggacctgcagcgctggggcgaaaggaggcaacaagacgtagtaccgacgagaaggatcgaggagcgtgcagaacaaggaggttcgcgatgcgtccaaggcaagactgtgtcgtcatgatgtagccgttgattggaaatccgacgcctagatatatttgagccgacgtggacaatgttatagtcgccgtttccttacggctttaaagataaggaaattattcagacctcttgttctcaacatagaac

SEQ ID NO: 153696 - DNA, 335 bp, Zea Mays
gacttcggtagcattgaagggaaggaattgtcgaatgccacattgtactgcacctgcactcataaaaaggatttcttgaaaacatgtttcaatctgttgcgtaggctaatggaatatgcaatattggggtgaaaatgggggaaatcaacacctgcagatccgatttcaccttgaattatttaaccattcaacactacagccagggaggcacttacttttcagatacttcgaagtggcatggcaacctttcaggagctgtcatcatcaaaagtaatagtcaagcatgatacagttaaacataatatataccaactgaagagctatgacagtttgct

SEQ ID NO: 153697 - DNA, 652 bp, Zea Mays
ggatcgtcgggcttgtggctgcgcgtctccggtggggtgtcgccgcgtgccgtgcgtttcgccgccgcgtccggcctgggagggagatgagcctccaccgttggatcccagccaacggtcccgattagaacctgagtgtatcgcttcggggattgaacctgaaccgttgatccttgtgttgacggtcgagattagaatcgcgtaccccttcgatttacgaaagcgatcgggccgttgatcatgaatcgtgcgggtcagggtggatcaggacagttttaaatccgcaccgttgatcgctgatcaaacggctatagtatcgtaccgcttcactttagataggatctaacataggccctcggttttggatcgagcggccagtagtattccataccccttcgcccatagcactttgcataagaaccctccgaaaattaactaatcaacccgccgtcctctacggggttagcctgagtctagggatttattgcgctgagacccctgcacttctctgtattagtgtgcctagtccaggaagctaagaaattagataaatggaattagaaaataatatttaatgcaaagataaatgctagaatgtgtttaaatcatagaaatttcatatgatgtccaaattagttcattctaattcctg

SEQ ID NO: 153698 - DNA, 311 bp, Zea Mays
gtgacagctaggcagagatgatgataaaaggcgcgcgaagacgtgtagcattggaacggatccaaacatgtgatgccaattaataaagggaacctaagataacaacatgcatggagagagacgtatcatttaagaaatcgcagcagaagtagtagcccggcccatgctcccctctccatcagctgcttgccgcccaaaccaactttgcattgacaccattaatgcatgcccatggatggatggatcctacaccattcaattcatgaccacgctcgtgattagtagcacagaaatttattttccctgccgcg

SEQ ID NO: 153699 - DNA, 1135 bp, Zea Mays
attgcaagcactttgggcatgaattaatgcatgatcgagcaagtatttgcctaggattgctataacaatattgtagctggatcttagggctataactttgttaaagggtgtcgatcatgttactgcacaaaattggaggttattggctctgtaattccccctgtcagaagcactgctggagcattccatggtacagtaacccgagtggatcagaatgccagcgtagcctgctcgccgccagtgaccctccctacgctatgattcgcgccgccgccgtctcaattcgtgctctggatgtcgtgataaacgctcggagcacaccgccgtggataagcccggcgattaaagtatcccggccaccgtacaaagttcaccgcggtggaaccagataacctcgccggtgcactgcccccttccggccttatgccgcgtgtcctaaccgcgccaccgcatcgccatgactccctctagcctcttcgttgatcgccggaatgaccgccacggtagaagccacctagcgcttgcgccagtaccttcttctacctccggccgccgcgcgtcgtcgcccaatccacggccaccgcttgcgcgctctataaattgaccgtgcccccagctccgccatgtacccaagcacctactgcacccacctgcatcccaaatccctcactagcaagctcgaattttggattccccccaattcggtctccgccaccgtaaagcacaactccaccgtggccagtccgttctggtaaggcaccatccaattcgcgcgttgttctcatgtccctgtatgctggtgatgctctccaaaccgtccaattgaactaggagcccaccaatcactgggaacacgaactaatgtccatggctttcgctgtcctcgtgggcagaacgaaataggtcaccaatcatgcaattgacttaggggaaatgctcggggcaggtctaatttggtgtctgtcgctcgagagcgccggtcatggccccgttcggccggtacagttgctcaccggagcgcggccgcgttcaccgtcgtcggggacttcaaaccgagaatagatagaagtgcgagggtgtctttgcaattgtcagcgactgtgttaaatagtgccttgggctttgtcgggatatt

SEQ ID NO: 153700 - DNA, 341 bp, Zea Mays
gagaagcgcatttctaacttgcccgagggcgtctcgagcgacgccccaggaggtacacgcctcggccaatcactccgatccggggacgtgcgtctgtacgattatctgccccgctgaaggtgttaaagtcaacaaagaatgacacgattagagtctaatctacctttactgccatgatgatggtcagggcacgaatacggtacactattcccccactctaatgactgtttcaaccaccgcgagtgtggctacatgcgacatataatcccagcctcggcctcgagagaaatcttcgcctcgcctaagctcggcctcgaccaactgccccaacaggaaagcac

SEQ ID NO: 153701 - DNA, 424 bp, Zea Mays
gcccagtggccagtttgcccacacttcctgcactggtcacgacctagcttgcggccgggtcccgtgcctgttctgccgctcaacgcaggcacgccgcgacgtggatgccgctgccggtcaccggatttagacgtgccaccgtctcctcccttctgctgctccttccgccgcgcctcccactgctcctccgttaggtacagtttaccccccgtcgaagttggtggtgcatcgtcagcatccttggccgctttcagccggccggtgatgtcctccaccgtgagggtcgagacatccagtagagtctcgatagaaattactagctgcttgtaccttgaacgcgcgatccgaagatacttctccaccaccttctctggagcctccgggtcacccagcatggcgagctgcgcgacgacatcggtgagcc

SEQ ID NO: 153702 - DNA, 467 bp, Zea Mays
gacatgtacaaagaactgatggtgtagtaaatttgacttacatgagaagggcaccatcgtttcaaaattagattttacggtctgcctttgaattcaaacaatgagaatgagattcacattcactattggatgttgctgcttaaattgtactttagtgtgtctaggtgaagagcctgataataaggtgatacattaacattaaaactttgctggcaacgcaagcaaaatgcagaacaagcgaagtctctatttcaacaaactgatgtgtctaacaccattgctatatttggagtaaacagcaatccatactccaggcgagttagcatctgcttataaaaactgatgtgatgttcagcaccagtacctttgggtcagaaaaaatatatctgaacgtgaatacaacgggagcactcaaaacataacgctggagctggttacgttgccaaagagagcgcagctaaaaaaat

SEQ ID NO: 153703 - DNA, 278 bp, Zea Mays
aacaaatacttcaagatcggtccttagattgaagcaagcaaatgttgctgctagcgttccaaagtcttctgcccaatatcaaagagaaattgatttagatgaattgccttatgacccagttgatcggaagagaattacagagtacactaaaaatcctaagaagcaagatgagattaggagaagatatttaactagaggaccttatagaccaccacctaattttgagtatccatatagagacattggaagtgaccgtcgaagatttaattcagaatggt

SEQ ID NO: 153704 - DNA, 328 bp, Zea Mays
agccgacgaagtacctgcaggcgtgagtgggtgccaataggctagaccaccacgtcatcattggaagacaaaagatctaaatcattagtgggatggggcgaggcagagaaagggaagtctgcctcttcaaagaccacatgacgggaaatgtgaatacttggtggaaaggtcaaagcagcgatagcctttgtggtcactagagtagcctaaaaaacacaacgagtagaacgaggagatagtttatgggaagcagtagcggacagattggggtagcaagcacaaccaaacacacagaggtgagcataaggaggatctatgtcgaacaggc

SEQ ID NO: 153705 - DNA, 560 bp, Zea Mays
ttttgaaataacaccaagggtcaaggtgagaataagggtccataatccttagaacgaccgttccactctagattagcggtcctacagtgcagatgccaatagataagcgttctgagtccatgagaggtcatccccctgttttcgcctactctgcagaccccatggacgtcgaagattgctgcgcacaatggagcgggagctgcacaccgccaaatgcaatgacaaagagaaggtttcgtattgtcctcgtctactaaggggagaagctcagtcttggtgggagtcctatcttgccagccatgccgaccctgaagctatgacttgggaggagttcagagaacttctgccaatatcattgtcggtaccctgaaactagggtaccccttactactgtgtaaagacatagtgcccacgcggctgtccattagtcgcatggtaaaggtgctgtgtgtgggaccaagccacgacttgccccagtctcgggcgaatacactgggtccacaccagcgctcgactccaccacacgggcgggtccggagacgccacgtgtccagagaagg

SEQ ID NO: 153706 - DNA, 967 bp, Zea Mays
tgccctctctggtgattccccgtctgctcactggcggtgatcgtcggcgacgtgctcctgtgactttctccagcgtgggcacctctgcctcctctcggtgagcagccttgccttccctctctctaatctctacttcgctggtcagtgagcttgccaccccttgattgctcaaattccaaattccttccgaattctgtgaatctctgtgcttgaatgagtccctagtgccacattatatccccctgcaggttcctagctccttagggagggcttcatattctcacatgagcttttctccaaaaccctaattccctgcacgccacgtgctcggtgaaatgtccaaaccactcaaaattgctccgattgaacccaaacttttcaggcaccttcataacactttcagtaacatattcgcgcaatttcacgccaatccgatataccaggcttcaatttcacacaattccccgtttcggcgatcggttccgagccgagtgccaaaatttcattttctttgcctaaattcaaaccaagcacacacttcactcatatttacccatataaacctattcatgaagtatcggctcaattccacgtaatttcatgcctcaattcgaattccaaacctcctatggcactatttctcgttcaaacgtcgttttcgcgtcgtttgacctctcgattgccatatctctcgttttctgtgccataattctctgtgtatgtatttattcacatttcatatacttatgactatgtgactaatatgtgttcacctcttctatcatttcagtgaccttgcctgcccgtgagccgtctcctgtcctacctggattttcacctctcgtgtgagctttccaggtagacatccactcttctgatattctatcggcagttatcgacttgtgcttagcttctctctctcatttgcagtcatcaggtcaggatgccgcgcacgaagaatgtgtcg

SEQ ID NO: 153707 - DNA, 361 bp, Zea Mays
catagcccacaggtctacaacaacctgcagctccaccgcggcgtgttctccgtcgatcagaacctctacagggacggctctacgcgctggatggtcgaccagctggccaaggttctcgttaagctcagcgaggtcaacgtgctcaccagcgtgcagggggagattcgaaaggtacttatgcagcaggtttaactaaccagaacacccgtacctccattgtcggctctcctctactacatttattaatttcctcttgctataattttggtttagtcaaatttgaatttcaattcattcccttttatatatatcatttgaatgaccaagctctttgagtagtaatgaacaaactgttgttttc

SEQ ID NO: 153708 - DNA, 516 bp, Zea Mays
acttgcgagggcaggcgctagcgaaacagcgaaggaaggtctccaagcattggttcacgcgttccgtctgtccgtctgtttgtgggtggtaagaagagctgagctgaagctgagtgccagtcaatttaaagaggtgctgccacaacttactagtgaatactgggtcacgatctgaaatgatgactgcgggaagaccgtgtaatttgtacacattgtcgatgaacgagtgagccactgttgcagcagtatatggatgcagtaaaggaatgaagtgcccatatttagaaaacttatccactaccacgaaaatacagttggctgacccagaccgaggaagtccatcaatgaaatccatggaaattgtgtcccatgctgttttgggcactggtaggggttgaagtttgccgggatacgctgcacgatctggtttggcttgtaagcaggtctgacactggtcgacaaaattgtggacgaaggctttcatgcggcgccaagcaaacaactgtttcagtctgc

SEQ ID NO: 153709 - DNA, 466 bp, Zea Mays
gtgccatataaatagtaacaaccaaaaaaagacatggataaaatatcattcgggaattcgcagtgggtaataatagctatttgagatcgctggctgcagcgcggggttcggatctgacagcctgacggttggtgaaggcgtggcgtgtggcatccccgggagaaaagtctctgttgcgttccttttcagatcaaaaggcaagcagcgcatggcattggcatccgccatttcggaggaaggcaaaaggagcagagggcgtgaactcgagatggaagactccatccattgttaacctcccctggaattttagatcatctatctgagagcgaagagatttgagaaaaccagttagtgctagactgctggttgacagtcgctgtggtggtggtctccactctctagccaatgctacagagtcagcacagatagctcactcctgttcagtcctgtttgaaacctaaaccga

SEQ ID NO: 153710 - DNA, 746 bp, Zea Mays
ctactatgaatggtccttcccatagtggcgacaatttgtgccgtccttcccctgttagaattcggtgaaggaccaagtctcccactgcgaaagatcgatgtcgtatggctttatcgtgatagcgcctcagagtttgctggtacctagctgactgaattactgtattcaatcgttcttcttccaatatatcaatatcctccagtctagtggcttctgcttcggctatgttttcaaaaatcagcctcgatgccccaaacttgagatcaactggtagcactgcctccgaaccataaaccataaagaagggagtgtttccatgcaaagcttggctaggttgaattcttaggctccagaccatgtacgacaactctctgatccactttccggcgaacttttcattcttgtcgaagactttctttctgagtgcttccaatatcattccattagctctttctacctgatcgttggctcttgggtgtgctactgatgcatatttgatctggatgcttctttgttcgcagaaatcaaagaactctgaactagtgaaattggatcccaggtcagttatgatgctattcggtattccgaacctgaatattatatcttgtatgaattccactgccttagctgaagtcagtgaagcaatgggtttgtactctatccatttagtgaatttgtcaatagcaaccagtacatgagtgtatcctccttgagctttcttgaagggtccaatcatgtctagtccc

SEQ ID NO: 153711 - DNA, 2648 bp, Zea Mays
cgacgacatgcccgaaaccgtactccgctctatctctctcagactctcccgccccctcgcatcacttcttactgacctggtgttctactccctcgcaggcggcggaggccaacctccgtaggcaactggagcaaaccctcgccgctgaaccctccagcccgctccaccactacaaccttgtaggtttcgttgtccactgcattgagcccgtggtcgcgcccgcgcttctccgttgcgcctaatcacctgctggttggtcctgccgtcctgctcgtgcagggcgtcttcctatgggaccgcgccgaggcagagcaggagggtgatggggaagaggcgcggaagctccgcgcggaagcgtcggagcattttctcgcggcggccaagctgaatcccaacgatggcgtccccttccgcttccttggccaccactatgcgcgcggcggtgacaatcaacgagcggtcaagtgctatcaccgtgccgtgaccctcaaccctgacgactctgaggctggtgtatgtgtgggaatatgtatattcatatgcccaatgtattcgtcggtttgcttgtgctggattctaatgtgttttcccctttatttctgggatatggcgcaggacacactctgtggcttgctagatgttgaagggaaggagagcttggagcttgctgtctgcaaggaggcagctggcaagtcaccgcgtgcgttctgggcttttcggagacttggctatttacaggtaacttgtatagcaatttcttgaatggactatttgttgaagcaagaatgccaatagtatgtgtcattaacagaggtcctgattggatatgttatgttaatgaatcttacggcttcattttgtatcgggtcagaatccacaggtccaaacctgtccgagcctaaacccaatgctattggttaagggaaacattggtttgcagcaattagctagatttaacatggttatgcagaatgatgaaaatactttaaatttaacctaatctaaccccttcaatatttaattttttatagcaatctcatccatttgtcatcgatgtttcttgtactttatacagaggcagtgttcacttccattaattttggcattgatgtcatgaccccacaaaacatttatgttaagttgttaatgttagtgacttttaatgattcaattctgtggctatccttttaaattagctgacagatgaaattagaatgtgcaggataacatgactcagttggtcattcactattagtatagcattattaagttaaattctggattgtactggtcttggaaatatttgagagctttatgcgtggttctagcctgagcaacatctcttatgataacttctacttgagaagttgatcgcttattttctttaaaaattggtaagggttttctgttggaaggagatactgctgctaatattttaggtgtgcaattttcttttgtttgtgataaggcattacaaaatttgtatataatgtgtattgacatgagttggtgaaaggttaggttcatcagaggaaatggtcagagggtatacaaagccttcagcatggaatacgaggttacccaacatgtgcagatttatgggaggtgggtgctcccccccctccagtttgctcttgccaaggtttcttagtgtaacttatatgtgatgtgtcttcaagttatcaattattgaatttagacattccatatttatggctacaggcacttggtctggcataccaccgtttgggcatgttcaccgcagcagtaaaggtttgctgttttcagttgtgagcatccttaataactgttgcagtgcgctgtattgagccttctcaatgtgcttaattcagtttttgccggcagtcatatggacgagctattgaacttgatagttccagggtctttgcattgatagaaagtggaaacatccagttaatgcttggttactatagaaaggtaggaagttttctgcttgcttctttaactatctatcgttctgctggtatacatgatttaatcagtcaatgctaatctaacggtgaatccattcaaaaatctatgtagcactgatctctttcattgttaaaactatttaatttctctcgaaatacacaacgccagggagtggagcagtttcgttctgctttggaaatggctccatgtaatcattcagcatactttggccttgcttctgcattgcttgcatgggcaaggaattgtgtaactactggggcctttggttgggctgctagcctgttgaaggtactttgatctgatagtagctttttaaatatcattgaataaaccatagctgtatagctttaccatatagtttgttttctcataggaagcttcagaagcttccagaatttgtacttctttgactggaaacctttcatgcgtctggaaattgcatggagatgttcaggtatttgatatttcatcatttaagtctccttgtcatctacttataagtgaagagttgcaatattatattctactatataccttgcctgtttggtgtcagctcacacttgcgagatgctttccatgggtggatgggaaaatcaaaagggtcatggatgcacagatgttcaaaaattctgttcaagagtggagaaatacatgtttgttagcagcaattg

SEQ ID NO: 153712 - DNA, 285 bp, Zea Mays
cgcaatcgtctctctcgctcggtcgtgacacaattgatgacgaaattggcaaccacctcctgcgttctcttctatatacccaccccactgtcgcataacttctcgcctccctctccagatccaaatcgcgcagaagcacacgtccctgcacacggcggttttcaggtgagtcatctccctctcctccctcccctctgttctcggttggccggcggccatggtgcccgcacgacggtctggcgtagtcggtcagcctcgccccccgccgatcctggtcctccggcg

SEQ ID NO: 153713 - DNA, 1043 bp, Zea Mays
ggtcgtgggtgctagagagacgttagtttggggctggtagtaggattgctggtaatattttatattttactcctcataccctatcgcgaacggtccagtgtaatacctggatggtttggtgatgtgctcggacggtccgcgtgtatagccagacggtccaagcatctctattgtccctagcgtggacttcagtttaccatcacgggggacagagccagccgtcgctgggctggacggtctagcctcaggcctggactgttcgactatgcgcaggggcacgagttcgaccgtgcgcaggggcacaggttattcccatataggcggtggaggatgtggctagtcattataggagttcagcaacatcccataaagggactgggattaggcatgcctttgctgtcgatgaatcttgtgggtgttctttggtttcgacctcgtgcgatggaaattagtaatggctaatttatcaaacgcatgcgctagcctcctataatcttcttgcataccacctaagatttgttgcatctattcatgtggttcttctatgtaagatcaaagagcttgcatgtcgtcgagcacagcgggtcgaagatttgtcaggttgtattccctccgtcggacgagattctggtttcgatcgaccttgaaatcaaccaaaagtagctcgtcaacttctgcctgcatctttttcttggcgtcttccagcctctgatattcttcaactggcagccaatccgtagtcggtttgatgatatttcttggggagagattggagttatcccttggatcgaccatatggggccgatcttatagatccaaccttagtctccccagtgaagttgccaaaaagtgtgttggcgtgaatctaggtgccaatcactaggagttgttccgcttgtcgggctctctgcgacgacgcggacggtctgtggcctagggccggaggatccgcgacctggcagcaggagtggattcctctacatcgagtcgaacgatccgcgcccggtggtcggatggtcagtgggtgtgcaggggcgacgacg

SEQ ID NO: 153714 - DNA, 320 bp, Zea Mays
atatagagcaggaggtggtggcattaataggacacctaggacacatctcggacatccctgggaggaaagccgatagaatgatgccaggcaacctgagatttccacccacaaacttaatggagggccgccagacgtgctagaaagaattagggatgaagtagccggattgtttagagacaaactcggttttagtgtgtcaggcatagggtagtcatatcggaaatcttatagtcaccgatttgatgtcgtgccatatccccaaggggttaggataccgatcttctccaaattttccggtgaaggctggaagagcatgcttg

SEQ ID NO: 153715 - DNA, 363 bp, Zea Mays
ctaccaggatcccaatgtctgtcgtcgctgtgatctgggcagtctagaatatttgaatccgattcgcttacggcttaggtcgggccgggctcgggtgacgtttaagaatgcaaatccttgccggagataacctgcgtgggcttgtcgtgagcgcgcaacctcgtgcccggcttagggtcgccggagtcactatcgtagacttgagtttgtgaataagcaaaaagacagggatctcagtgctaatgcccgatagcttggttgggttgtgacagcgatgataaatccactaaagaagcaaaacaaattttattttgatatagagagagtattataaactatacatgtgatggttgcttcggtaga

SEQ ID NO: 153716 - DNA, 276 bp, Zea Mays
gtcccttcactttaagattttttagtggatcaatagctacatgatcaacacttttaaagtacatccattcttcatctattccagctggctcatctccattaggatcacacccaacagtgataaaagtgctccttttcttcctgtttagccattggtggccctgcagttgtttccccatatttaggtattgctgcacatgcaaatcctccatttgcttcccccaaattattatccattgcatcaagtgtctcttcttctatgttcactgcaacaggt

SEQ ID NO: 153717 - DNA, 742 bp, Zea Mays
atcaatgagcatgaccaacatctgattctgaatcagagcttggaccctcatacatccgtcacattatgtgccaaactcctccacacacttctcctcattctccaacttctgcaatacttcatcagtcaaaactagacccatgtcttccacgatcagattatgtagttgagttaccaccctcttcggacattttgcttgatggcctggctcaaatttatctccacaaataaaacacaacccattcgctcttctatattccctcaactacctgaactcaggatacaatattccttccctattctctccccttactcctgcaacctgagttttgagaaccagtcccttttgatttctaactctattcttctctacaatctcctgatacaccttggccaacctcttcgccttatccattgtcttaggcatctgagccatgacttggttctgaatttcaggttacaaccccttaatatagtgtgtcacaaatagggtctcatccaactcagaattgtgcaaagtagcggcatatctgatatcatcaaaagcttgagagtattcctccactccttgttgttgggtcacattaaccaaatctctcatagcttgagggtattcgtccactccgaacttctccctaactacttgtgtaaacttcccccaatcactaaatccatgtttcagcttatacacttgtaaccacttcgacgcattcccctccatgtgcatagaagctgaactcgcc

SEQ ID NO: 153718 - DNA, 2650 bp, Zea Mays
gtcttatgctttgttctaagaaaaaagatcctcctttccttagcgataccctgccacccttggtgtagggtctcctttaggtggccatccaatagcactgtgtatgcaactacatcaggcttgattcctaaatttatcatttgaacaaataagtcacatgcttcttgcaaccgaccaaccttgcaataaccattcatcagtatagtgtatacaatgacatcagaaagtcctctttcatccatatcaaggaaccataagtgagcattgtgcatatctctgttctgacaataagctgaaataagtttgctatatgaaattacatcaggaataacattcttttccagcatcatactacacacggttgaagcctcctcaaccttttcatctatgcagaggccatttatcaattttgaacatgaaaattgatccaccatatttccttgtttagcaactctaagaaaaagtgcgtgagcatggtcagtccagcccgagtgcaaataaccacaaaccatagaactgtacagcagttcaatattatctatccctttttcttctactatattaaataatacctctgcttcgctcaagttgcctcctctacaaaaactagtaatagctacaccataggtgagtgaattaggctccaacccttgattcatcatgtgctcaagaaggtcatataccttaataacagtgccattcctgctatacccactggccaatatgttatatgttactacatctggttttacattttccttcagcatctgctcaaatacttgccaggcattttccatttctcctttcagacaataaccattgatcaggcatgtatagtggattttgtctgggaccaaacctcccgccatcatttcagttagtagcttaactgcctcattcatgttcccaagcttgcaataagcatccatagcaatgttataaagaacgccgtcaagatggagtcctagatctctaaatttctggaagtgaacaataacttcagatatcatgcctagcttcttgaggcactgtagaaggtaaccaacaatgtaacaatttatctcgatgccatgggataccatggcttcaatataatgccacaccttttctaagttacccattttgcaataactacgaatgagatagctataaccatatagatcaggggtagatccatgtctggtcttgatgtccaagactttttcagcctcctccagtttcatttctttgcatagtccatcaattaccatattataagcgatggactcaattgcaaccctttcctgggtgatctcatgaagaacagtgtatttgcttaccatgttataagctagatcgtactttccacaatcacaaaggccaattataaatgatgagtatccatgtgcatcaggtttcattcccatttcaatcatcctaacccacacttgaaatgattcttctgccttatttacttcaaaaaacgacctaatgactatgttcaatgattgagtatccagcatcaactgaaagcacttcatttgatcataagctctaacaaccatatctgaatcaccactctgggatacaaatttgataaggaaactgcaagcccaaagtgtaggaacaaatccaagcctgcaaaggtgacaaaacatctctactgtttcttgtacgtcgtggctgttagtgtatgccttgattaagcaattgactgcatatgagagtatgtgagaagtggcacaagttttgctcaagtgaccaataagtgttaagatttctgggtcaccattagcagttcccgaaagaatctcacaaaacaaggataccaacatcttcccctggaatgaatgggataaaatttgtatgatctctgagtaggttgagaagtcatggttaaaaccaaggctatgtatatctttaaagtaggcaaatgcaactgcaggcttcctccttaggcagcggagagcctgcacaacactgtaagagctcaaagacttctgctgtttctggataggctcattatcagaagcataattcagcctttcatcaccgcttgagtcatcatggtgaactgaagcgagtacggagtagttgcaagaaggaacttcccgcgataaatccttactgtgcctgaaccattcagcagtgcatttgagccaccgtgacaggatcattggagatataaatctttgtgctcttctaacgacccattagccatcaatgatagaagaaacattcctgcatcagaaaagaaatagacaaaacattttcagatggttcccataaccgaacagtcaaatgtattatttgatttaaatgctgattgcacataatgatttaagtcaagagatgattggaaaaaagacatgatttcctctgaatttctgtatgtccttgtgacaatgttacatcaaaccagctaaatcagttaaaaccatcaagaaccttctcttgtaaattgtaactgaaattaagtactttgctaatttgcagaaccagctactttcagtagtactgtttggggtttcgaatcctggctacttcatcagcagaagtcattaaggaccagccacataagaactttgttaaggtagtgaatagtgacagatcgagcaccatttctccatgaggaatttcattgtagagttggtgatacacatgcaaagag

SEQ ID NO: 153719 - DNA, 776 bp, Zea Mays
gcagtttccttgttgctcacttgctagattccttaccagcaatcctatttctagtgaatcctattcatttgctctacaatggggaggaagagggtagctggtagaaaagctttttgtagtagtaggacagatgattccaacaatcctatttctagtgaattctcccctaccattgaagtccctgggtctcgacctgtttgtagtccctccttacgagtactaacagattgtggtggcactgagcctgtatctggttttagttccttttcattactagtactagtagatggtagtagaggggctgagtctggttctagttccttaccagcagatggggatattggtgttgatgtgccagtaaagggtgctaaaccatctgtttcttgggcagaatgctggaagcatatggataagcgggagattatcgaggatggtataaaaagttatattgctatatgtcactattgtaaaaatgagttgagtgcagattctgctggtggcactgggcatttgaatcgacacttcaaagcttgtttaaaaaaggcagggcaaacttttggtgcaggtatgcaaactcaactaaactttgctgcggacggcattgtaagtacttgggtttacaatccacaattagctcgtgaagaaattattgctcagtatcagaaacaacttgttgttcttaaagaaaattttaaaaaagttcagttttcgtttgctttaacttcagatatttggacttcatcacatcaaaagactagttacatttctgttgttgc

SEQ ID NO: 153720 - DNA, 747 bp, Zea Mays
gtgtcacagtgaggtcgcctaggcgtcggactgagtgctgtgttgaatatagatgtccaaacagtgcgggccgcccgtttggcccgtggcacggcacgaatttagcccggtccaaacacggcccggcacggtcggttacgggcccgggccggcacggcccgtttagcgggccgggtatgggcacatacggcggcccgcgtgctttggcccggcccggcacgataaatgggtcggcacgacggcggcccgcatatttatgtaaatactaaatatgtaaatacatttaattctctcatagtatgtaaatactaaatacgcggccaaacatatataaaatgcatacataaatataaaatgcatacataaatattttgttgtcttaatatatataaataatatgttattatatatgattaattatgttaaatatatgtatttatataccgttctactgttggttcgggccagtgcccggcccggtccgttgaggcccaccgggccaacgggccggcccggcacgattttttcctgtgcgtgccgggtttgggcatgtctctaggcacgtgggccagcccgacccggcccgaagcatcaacgggccgtgcctggcccggccctattcgtaccgggccgaaacgggttcgggccgggtccgtgccgggtggcccgtttggacatctatagtgttgaacgactaggatttagggaggtgagccgaacaggtagtgtttaggaactgaacgtcgt

SEQ ID NO: 153721 - DNA, 897 bp, Zea Mays
aaaatacatttaccattcacaaatgtaaacaactagcaaaacattcaccagaaaataatatgcacattcagtcagtcattcagcagaatgtaactgaagcagagttcacctatgtagtatgtacaaaaaaaaagaattacaaagtatagtaactgaagcagagtttacaatttacacttgaagcggagattataatcagctagcagatattgacaaatgaaaagtagcttcatcacaaatgtaaactagcttagttcaaaaatgaataatggcttcaaattcagatgtagtgacggaatctgaataaacatatgcagtgacagaattttcacaggctgttgtacatagtaatcaggctgttctcgttaagagtttcattgtgttatttgcaataataatcagatcaacactgcagattgaagcttaaaattcagatgtagtgacggaatctgaataaacatatgcagtgacagaattttcacaggctgttgtacatagtaatcaggctgttctcgttaagagtttcattgtgttatttgcaataataatcagattctggagagtacactcacaacatcctgagaaaactggcagcacgacatgtttatgcctatgttctactcacaatgaagcttcaatttgcataaattccgtcaccggcgtcgacataggagccgtcggagatgtacacgatgtcggtgaccttgtccgtgtacccgctggagtcggcgtccaggtcgtagtcgatgctcaggaaacctgcatgccacacgatcgacggctcatcagttccgaagtccaaactggagactggcgagatcagtggcgtggtggcgccgcccaccacctgtgctgcgccccggcgttcttgagctccgcggcctgtgacggcgccca

SEQ ID NO: 153722 - DNA, 3015 bp, Zea Mays
gcctgacagagcgcctcgatctgcttgcttctgtgttgtgtccatcaacaacttcgagtgggccacctgtgctaacatccccccagctaaagaagctggttgcccccaaacagctgcatatggaaactgctgctgcaaggcctgttcatcctcccaagttgctaaagccaacgacatatgggaccgttgcaccaatacttgtgagcaaggagacataccctgtgtaatagtacgacgctgaatgatcttgatgggcacactaaactgataactgtcagttggtaatacaggagatgccacacaatctgaaccgagagcacgcttcaactgagacacatgcaccacaggatggatctttgcagaatctggtaacttcaacttgcaagcaacctcacccaccttctgagtaatctaaaagggcccaaaaaacttgaatgataatttctgatgtgaacgcaatgcaactaaagcttgaacatatggttgtagcttcaaatagacccaatctcccaccacaaacatgcgctcagaacgtcccttgtcagcttgccttttcatgcacaacttggcgcgttctaaatgttgtcgaaccaactcagacatgagatgcttgctgctcagccaagaagcaagatcagaagaactaaccatagtggagtcggtaatgccaaagtcccgcagtcgggttccatataatgcttcaaaaggagaaatgccagtagaagagtgtggagatgaattataccaaaactgcgccactgacaaccactggctccactgagatggacacgcatgaacaaagcaacgtaataatatctccaagcactgatttacacgttccgtctatccatcaaactgtggatggtacgcagagctcatgcgaagacgaacatctgccagacgaaataactcttgccacaactaactgagaaagattttgtcacgattagagataattgactgaggcaacccatgatgtttgtagatatgatcatgaaacaccctggccacagacagagccgtgaatgggtggtgcaagggcaagaaattagcatattttgtgaaggtatcgaccaccaccaaaatgcatgtataattctgggaccgaggaagagcttcaataaaatccatcgagataatttgccataaagcaatcgggacgggtaatggttgtaacagccccggtaacttggctcgatccgcctttgcctgttggcacatggtacagtgactgacaaactgttgtacaacatgcttcatgccctaccaagcaaagagctgcttaagccgagcatatgtcactggcattctagaatgtcctccgactgctgaacagtgaaatgctgccaaaagcttctgttgcaaatccaaatcagcaccaacccagattcgattcttgtatcgaagtattccatccttccaagagtggtgtggaaccgctgttgagtctacaaccaatttggtgatgagctcctgagcaatcttgtcctgcatataagatgatgccacttctgcaatccattgtggagtagcagaggataccgcaagacataaagctgaaacaactgggtgtcacgacaaggcgtctgcagcactgttatcagtgcccttcttgtatataatgcgatattgcaatcccaaaaggcgagtaaacattttcttctgccatggagtatgtagacaatgttcatctaactaagccaaacttcgatgaccagtatagatgtgaaattcctttaactgcaaataatggcgccaatgatccattgctaccaaaatggccaaaaactctttttcatatgtagacaatccctgcaattagggtcccaaggctttgctaaggtaggcaataggatgttcagcctgcataagaaccgcacctacacccaggccactagcatctgtctccaaacagaatggaattgaaaaattaggcagggccaatactggtgccaacaccaatgcttgcttcaacgcttgaaaagatgattcatgtgtcagagtctagatgaacaacactcctttcttgagcagtgtggtaagaggcttggcaatgatcccaaagtggcgtacaaaacatcgataataccccgccaaaccaaggaagctacgtagctccttgagggatgctggagtagtccactcagccactgccttgattttgtccggatcagtggccacccccttggctgaaatcacatgccccaggtaagataattgattttgagcaaaatagcacttggaccatttcaccttccattgatcttggagcagcaactaaaaaattgcccgaagatgctccaaatgttcctcaaatgtggagctatataccaatatgtcgtcaaaaaataccaaaaacacctttacgcaacaagggggctaaggtagcgttcattgctttctggaatgtggctggagctctagttaatccgaatgccataaccttaaactcataatgaccagaatgagtttgaaaagccatcttgtgtgtatctgaagactgcaacaatatttgatgatatccagctgtcaaatctaaactagaaaaccaagaagcttgtcccaactcatccaacaattcctcaatcataggtataggaaaaacagacttacctgttagtgcattcaaatgcctaaaatcaacacagaacctccacgtgttatccttcttttttactaatagaacagaagaagaaaactgactagtactaggttgaatcaaccctgactataacatagcagtcacttggcgctctatctcgtccttcatggccagtgggtaacgatagggcctgatatgcactggggtagctcctggcaccaagggcatagtgtgatcacaaaaccttgaaggaggcaagccgactggtggagcaaatatctctacaaattcagtcaacaatgacaccaacagaggaggcaacggtaactcttcaaaagaaggaatgaactgatccactgctgttacctccacaacttaacctagcagaagaacaactgataacccatgtagta

SEQ ID NO: 153723 - DNA, 271 bp, Zea Mays
gcgaaccatgagatagagccagtgacaggactgtccggacagtagcaggtttaacaacaggacttaaagtctcaaagaaatcaatgcctgaacgctgggtgaagccgcgaagaacccaacatgctttgtagcgctcaagagaaccatcagcagtgcacttgtgtttgaaaacccattttccactggcaatgttggagtgcgaaggacgagggacgaggtcctaggtcttgttatcaagcagtgcagagtattcctcttccatggctgtccg

SEQ ID NO: 153724 - DNA, 500 bp, Zea Mays
cattaaattttcaatcaagcttaaaaataggagaatccaataagcatgctacttttaaaaatgaaagcaataatccttgataaaagcgatattattttaacaagtttgattgatgtgaagtagcatactatatgagaaacattattctcatgcaagagactatatgaaattactaaagcaatagtctcaacataatcaaaatataataatggactccccctaaagatatgcatcaagtaattgaaaaaattgatttcgatgcattcacttttaagaacatagagagagaagcattatacattttgatcaaggctcataaatttagcaataaacaacttaagccttgcaacctcataatgaaaaaggatttagaatgcttacaaccacaccattgattgttgtgaaaaccttattgtccaagtaggtgttgttgtccttgatgttctctccttttcatttgagagtcctccctttatatttgtctctttttccttccaaac

SEQ ID NO: 153725 - DNA, 525 bp, Zea Mays
cggttgggtggtggattgctcgctggtaagtagctcggcgcagacgtcctcatcgccgtgtggcccacatcacgcaatcaccgattgaaggttaggaggccgccgttgaattcacctaagtcatccctacgcgtaggcgagtcatgggcagggtaggatcctcgggtggtcacgatgggcgcatcgccggcatggctccgccaaggcttgcggcggcgctgcctcgggttggcaagggaagaagaagcccctgcaccgtccgtcctgggattagtggttgggattcaatctggcgtgcctgctcgcgtgatgagatgtgcgccgttggatcgaatcttgacgaataaaaacgaaccgtgtcacgtattgaaatcctaagcgtagatctctaatcccacggctggggatgcgtaccggttagatttataaaacaatctaatctggaccgtatccttttaatccaatggctctgtttgcttcttaccccttcggccatgccattatgcaaaagagaccccatataac

SEQ ID NO: 153726 - DNA, 348 bp, Zea Mays
aagatcgaaaacatgagtagcatgcgaggaagaagaggaaaacggaagacgaacatggcggcctaactggcatgcatgacatagatgctcctcaggagatcgagtacatgggatagtggcactgcgagtaagctgaagaaaggcatcacgtccggggtgtccaaggcgacgatgccaggtagtagtagatgtggtggcggcaaaaacagcagctgtgtcaggtgacgaagacgaagaagatgtggcgtgcgggagccgaagggtgtagagggggccggtgctgtcacatcagaggagggggtgccgagttgtcgagtccttcacagtaagaccaaaagagtcaaactc

SEQ ID NO: 153727 - DNA, 410 bp, Zea Mays
agggtgtgaagtcccctacaaaagcaacttccaaaacagatatcgcctaggggcgcaaccgataactaaagtgttgcatagtcatccctacgacacgaacacgattactcatacaagcgcgcaatctcaaatatacaacaaacaaagggctcaacggcaccatcacgcaataatacaaatcacaactgttaccctcacaactctattgggaagagggggagggcactgttttcactcactatcacaacaagagcagtgagggcaactaaaatgtcacataggctccgccttcagaataagacccgcctcctggaaattgaacaacatcatcctcaactcttccccctcaaataggtcccgcaagtccccctctccaatgcatgtcccggacgtcgaggaaagtagctcgc

SEQ ID NO: 153728 - DNA, 600 bp, Zea Mays
attaacatgtgatcttttcaccattttctattagtttgggcaattcaagctccaggtagcaaattgagctggataggtgtaaaacacagtaaataacacctgcctgtagataaggcggagccagagcaatatcttggcctcagcagccgttgttgacattttcggttactagtcaaacatgtgatgaacagatgcttgcaaactacaaagtcatggtctagactgtggtgagagagagcaacacaattagcaagctggctttggcatagggtctggcatgcgctcaacgtggtcaaaccggtccaaatcaacttcagcaagcacatgcctcaatgcctgcaagcgagaaagaaggttagtcacccttaatgacatccgtcttgagtttcgttcgatcctatatataatcccatcggaactggttacattctggaatctctgaatctaatggaaatatgttaagaattcgtacccaatccaaggcctatgcccctacaaaatccagctcactcaacattgttagcttgctgcgttattgctgttaatcatcctatttttcagcacgatggcatatctcaactcctaagggccaaggaagcg

SEQ ID NO: 153729 - DNA, 337 bp, Zea Mays
tgcatctagagatctggtttgacttttatccttgacgattaccttccttgacggtgactcttatcctttccttgatgaggttgatcttcttcgtattggtgtcttggttaagatagatttgtacgtaacatgtaggtagagcagctggtttagtagatggctgagtttaatgaggttagtcagaatctggtttggtcgtttgcttctagacgggtgggataggttatgtaacctatcatgtaggtcaagttgttgggtatggccgagttgatctaagtcaccaatttaggcgtaagtgaattagaagtatggccttatcctttgtaccagcattaag

SEQ ID NO: 153730 - DNA, 519 bp, Zea Mays
aagagttacttcctttagttgttggaccttcagttcaatcaggacttccttcatgtcagctaagtaacctttagctttcactgtgtctgggaattttcctcggtattttccagacacacacaaaggagaatttgctgaaaggtccggaatgtactcagaatccacctaaagaataaaagaacagcaattagacaaccaaaactggtacttttccagcagaatcttgcttctggaatcaggtaccaccgtgacataaaatggtaaaacattcagcatttgatggcatcatgaactttgaaatgtaatttgggtctgccaaggtcaataaccaaggcatatagattgcactgtcacaagcatttaaaataggataagtaacaaaaaagtataaccactaaccaatcatgcacaaactcacttcaaattcatcaagatgtgtcatagcatcaatggagatattttccacaattgtacttgatgctctcctgaaccacttaacaatctgattctcgattgatg

SEQ ID NO: 153731 - DNA, 382 bp, Zea Mays
ggaaccaatcgccattcggcagtggcagctacaggagaagctggtgcaaccttatctaggcgggcgccctccttcttgcgggtggagaagcgggtgggagtctgttgtggagtgggcgagtgggacacgacgactgacatggcatggaggttgcagatggcgtgaagactggcgactggcgtggaggtcatggtttgctggcggaggaagttcgttgtgagagccaatcggcgcgaacgcgagaagcgagaggctggctggggcttgtcgtgcagagggtgcgggaggcgacacgggtgttggcgagcgtgcgcgggcctgggggtggagtcatggtctgcttgtgtacgatagaggtgagttggtgtgcattttggtgcgg

SEQ ID NO: 153732 - DNA, 629 bp, Zea Mays
tttcatcgctgcacctacctcgctttggcatagtcgtctcagacatcttgggcatgaagctatgtccaaactcatcagctccactgttatctcctgcaataaagatgatctccaccatatatgtcatgcgtcccgctcggttggcacacacggcttccgtttgggtcttctagctctagagctcttaataattttgatttgatatattgtgatctttggacatctcctattgttagtgtgtctgggtacaaatactattttgttattttggatgattgttcccattacatttggacttttcccctccgcaaaaaatctgagatgttttgtactctttctaatttttttgtgtacacactcaatttagcaccaccataaagagcgtccattgcgataatggccgtgaatttgataattctccgtcccgcacgttctttctctcccacggtattgcacttcgcatgtcatgtccatacacttcccagcaaaatggaaaggccgaacgctctctccgcacacttaacaatattttgtgttctattcttttccaggtgagtcttcctctagtttactgggtcgagacccttcataccgccacctacctagttaactggctccccacaaaaacc

SEQ ID NO: 153733 - DNA, 705 bp, Zea Mays
catcggcatttcatcaaacactgaatcttcagagaacatcggaacagcaccacccacctcactgcaggggtgagacatttcatcaaacaccgaaccttcagagaacatcggaacagcaccacccacctcactgcaggggtgagacatttcatcaaacactggagggtccatactttcaaacagaactggaacgcagttgtggccaccatagtcgtcgtcgttgttatcaatagcccaacccaggttgttgttccaactggtagagacatcaaaaccaccagagagcacgccacctccaagaggtgtaatgtcaaaggctctgagacagccatacctgtcacccatgatgccgaactcgactgcctcaccgaccttaaggttctggtcacctgagatctcgtgggacttgagggacggttgtagaaaatacaggaactcgccatggtcgactgaagtgacgaatccggaacccgtggtagcgttgaaccactccagtgtccccttcattttttttccgacgacatcgcctccacctttctcgccgctgcggctgcacgatccgcctgctccttgagtcaaaattgatctgcctccatcacctccagtctacttcccaaccgatccaacatctctatcctcttctcccaccgctcaacacccttatgttcaaatgtcaccatggccgagaactgaaattgcgcccac

SEQ ID NO: 153734 - DNA, 413 bp, Zea Mays
aaatgattgaaaaatgtcaacaaaacacaaaaaatctacctatcccaagctcaaacacaagacgccatggttcacagtagcaaggggttaccattgcactagtcaagtttgttcattagtaatagagcacatttgtatttaatcatcaactgtactctgtccaggaggctaaagttcagagttctgaatgctctcagttcagatgtaaccgagcgcatttggtcctgacatctgcacagacaagcagtagactaatagcagatcgatttaacaatttcgactatggtttagcttactccattctactttagctgctagcataatagtgttaactacccagttcatgttctgcacaaaatgtaatctgaaatctgaattctaaacatctgaacatgtaaagatggtcattttca

SEQ ID NO: 153735 - DNA, 506 bp, Zea Mays
gcgcttcgcatgggaatacgcaagaagccagaatatgtctggaaggaatatctcgagaatggaatggagaagtgctctatggcagtctacctgggagaaagccgaaactacccgaaccatccttctttccaagtcactttcaccggttaccccttcccagatacttgccaaaatgttgcccgaaaagccctccgacaactatgccagaactacagcagagtaatctttgaaaccccccttcgctactttccacccagcaacaaaaatacccccgcctggaggaaaagacttcaggccctgtcagggagagaccctaccgaggatgaccccaccatcgtctacatggctggatacctccacactctcgataaccaatatgatgaccttgcctcccactgtactcacctaaactcccgggtggaaaacctagagcaacaagtcagggaacttacaagggaaaaggcgtcccttcaagagagcctcaagatagcggaaggcgaggaaac

SEQ ID NO: 153736 - DNA, 666 bp, Zea Mays
agaggggagggagatcgcacgcgcggggagagagaggtcgtgggtatgggccggaaattggcccagccaggggggaaaggtttctttttttcattttctatttccatttcttttatctcctttcctcaattaattaactagataatcttaggtgctaaaaatataatctatgtgaggtgcttctaatcaaacaaagtgtatgcatatgatgagaagacctatggggtggagtttagggagagataaataggggggttagattagggttccaaacctcgggttgaaattttgggatgttacaaacctaccccacataaaaaatatcgccctcgagattcagacggggctcgagaaaaggtaagggtatttcttcctcaaagagtcctcactttcccaggtagcttcctcttctccttctctgctccactgaactttacagagtcttacttctgagttgcgggtctttcggactgctgagtcaagaatctttattggcttttcccggtactggagatctttctgaatctggattgtctctgccttgatgtggttctctggtacttgcaggcacttgcggagctgggacacatgaaacacattgtggatatctgacatggattctggtaattcaaggcggtatgctgcgggtcccactctgccaatgat

SEQ ID NO: 153737 - DNA, 948 bp, Zea Mays
aaaaaggagttagtatgaattttatatgaataaaatgagtttctggaattttatttatatactagaaatcattttctataattatttattttcactgctctctggacctcgcgcacaaaaacagagaacaacagagacctaaatcacaatttctctatgacttaggctactattcactggattgcgggttgattccattaaaatccgaggactcttaagtaaaacgcccatgccaaaggggtattctttgcactgggccgttcgatcaggaacctagggctatgattagatctcagatgctgtgaaccggaacgcacgagatccacaggatcccagataaagggctaagatttaatgcgtgtgtgatctattctccgccctgcatctgcgatctaatggccatcctttgctcaccctgaaatgatgacattgaccagatctacaacgttgcacaccgatccaatagtcatggttccatctacgaagcagtatgccctggttccaatctggacgctggtttatggatctacggctaccactcatcttctagctcctgacaccgagtcccgatgaccaaccagagcaccgtggcggcgccaaggaccggccacctctaccaactaccatgccaccccaatgccccaaactcaacaaaatcgggtgctaacctacacggaatcgatgatggctaatacgcgggaggaggacataccggcgagcggcgatggcgcagcagagacccccggccacgcaacacggtggatacacggaggagttcacaccctggttgaccaaattctgggctcccgatcgccaaaccttcacagcgagaacccaggtactgtccttggggcgcggcgaggcttctaagctcgatccccacgacgaattaacggattgacctcagcggtgagtcgagttccagtcgaacgatgacgcaacgagcat

SEQ ID NO: 153738 - DNA, 325 bp, Zea Mays
ggacaattgacataaagcccttgtgcatcgtatttatcgcgaagaatgacatagcggtcaaaagtgtcactattaccgcctgaggccttaggtgtacctgcaaacaccatgtgatgtgtatgggtaaaacagtcatcgtagccacacttggggctgtagacgtacccacaagcattataaaggccgtatgaccacaccaactaagaactatacgtactcaacggcatggatcctcacacttaccactacaacatgatatgtttgacactgtggcacatcagagacatgcaccgcgtatgactctatgactacaataagataggag

SEQ ID NO: 153739 - DNA, 422 bp, Zea Mays
aaacatacagtacaccgaaaacagtacgtgcagcccaaaacagcaatcaataaattttcagctcatatataattcaagaatcgccgcgttcgagagacttgaattactctaacgctttactatttgttcgagttaagacaatcaaattagaaccaataatttgactcgcaaattttattcaagtcatttagtgcactaaaattactacaaccaattaacaacgcattcttcacgacaatcgctctacaatttgcgttttaaattagacatcacatgagcaccaatacttttcattcgtaaccataaccatacacagttagaccacaacaagcaattcatcgcgactacaaacttaaccaaagccatctaacaagtcggctagccagagtaacaatctaggccgctacacatcctacacgtcg

SEQ ID NO: 153740 - DNA, 560 bp, Zea Mays
gttgaactcgagaaccgcgggcacttgggccaccgtggagcattcggccgctgcgccgtgtactctagaagcttcgaccgtcatcaatttcgtcattgacgtcactttaaccgcgcgatttctcatcggtgttgcgatttccgccaaaccagcgccccgccgtggtcaccgcaacctgggcaacaatccaaggtacgggtcgccccactcgaaccgccttgatttcctgtacactcaacgctaggcaaaagttaggaatttgaaactgtgtcgccggagtgccatcgccggtggtgttatccgccgtagcatagtgccttcgcgtgggaacgtatgggagctcgtcgggaacgatggtcgctggccgttggatggccagcgtgtggccgtgatctaattcgcgaacaacccatcgtccgaagaaaaccctaaccgtagatctgcgatcctacggctcggattaaacctagtctcattaaatcgtaggcgtcagagttggattctgtggcttagatcgcatactgattcacgtatacagcagtctaatcggcgcgcccaag

SEQ ID NO: 153741 - DNA, 298 bp, Zea Mays
gtttaagactttaaatgcagtgcaaaatagagataattcacaatgtttcacgtctcttctaataatcactttcacatggacttgtgctcatcatatttattttactttcagtctgtagcattgaaaaaaatgtatacaatctcctaggactgtgaatgcaaaagttcagttctaggggctatgttgcttatttgctctttgccgatctattctagatgactagtgcaggtactaagtgatctggtggagactgtaagactcgttgatcaattctagatgattagtgcaggcacacttg

SEQ ID NO: 153742 - DNA, 319 bp, Zea Mays
taccatgaggatgtatgtatagtttaaaggaaggggtacatcagcaaatggacacaatcagagctaaactcttgtggcaaagggccaatgagaaatcagaatatcatatggtcaagtgggagaacaagtgctaatgccttgtttgctatgagagggtgattctgatataccattttgtagacaattttcccttcttttaatttgaaagacccgtgaatattgattgaaatcatgcagaggagctagacgcagactatagacaatttacccttctctcagtttgtagtcaattttccttttttgacgtgttctggcgcta

SEQ ID NO: 153743 - DNA, 416 bp, Zea Mays
aggccatcgttgagtcgactgcccgtggaatcgtcatcgtaatcctcattgtcgttaagtttcttttgtttagttattcaaattatgtaataaagttgtgacattggttgctatacactaatgtcattatatgtgtgtgaattaatcctggcgcacatttgagatgtagttggttttgtctttgaaatccgagtgtgacaatgagtaatcgggcggccaagcgctcattacgcgtattcattcgtgatctgccggaagcatgaatagttgaatgcgaccgcgcaaaataagtattcgtggtcggattcagtttctgctcgagataaccttagaatggttgtagcgtcgtccggcggtgccccctccccttgcactgtagatgtttagtgtcacacggactgcacaacgcctagccc

SEQ ID NO: 153744 - DNA, 494 bp, Zea Mays
ttcaggtgcttcattatccccactattatgatgacctggataatacaaaattgcaaatgctggttgggtgtggaacgatgcaacagcaccatgtttttgtagattaaaaaattcacaatgccggcgacagctgaggcacaattagtcatgtactgaaccaagcttaagagagcgcaagagtcttcccctagaatgcagtagtaattgaagaacagttgttgaggcagagaccagaagatgagatggaggtgccattgaacgggcaggtgcatgcgcagctgccagtcctgaatcttgatcgccggtcaggtatataaaaaaaaaatcatcctccgcctaggctagcactgcttgtctgcatcacatcagtccatacgttcaaattctttttgttgcagctgtgtctgtggagggttcctgtcttcgtgggcggtcaatattgggtcctcatggaccgggaggcccaagttgaggcccacctggaggaggccgtg

SEQ ID NO: 153745 - DNA, 471 bp, Zea Mays
acttatacgtcgaacaagaagtatcgtctccaagaccaagagaagcaaccggactcttcctttctttctatagccattgcactccatcgagggtaagacggatacgccatgcacttcctccgcttcccctcggtggatagcactttcttcttcggccaggttgaaaatttgcaagccatttcttctttggccagattaaaaattggcagggactacgtatcattaaaggtaaccagtgggcaccttaagtagtaatggagatttcgatgaacaaaccagtatgtaaaaaccataaaccaagtggaggaaacaattgaacatacaaccggtatgtgaaaccgtaaaacaagtgtaggaagagaggctattatctagctttcccaatctggtgagcccgccccgttcacagttttgccaagctttcagtggcatatgactatccggatgccacacacctatctcaaccctcca

SEQ ID NO: 153746 - DNA, 441 bp, Zea Mays
cagggtttctctctctagtctagcgatggagccgtggagagagtggacggctgccgaagaggatggatcgggtcggtcgcaatgcgttccaccgagccgagagtctgagacaccaagagtgaaggaaactgaagaaggcagtatggtggacacgaaggaaaccgaagtgcatcagcaaatcggcatactcacatagctatgggaacaattgagcaaagatataactactctaggtgtttgaacaatgttatgctttatactgatgcaacaatggaaatatttattcatcaacctattgtgtgttgttgcagcgcacttggatagattgcacatacaaagcaaaaaatgcaaatatagaagatggatcctaccaaagaccttggcaaaaacaaggtgcacatgttactaaataaacatttcagcaagcaacataaatggttt

SEQ ID NO: 153747 - DNA, 925 bp, Zea Mays
gatacaagtgttgggatcatattgggaggagactctttgtgaatatggatgtgacattccgtgaggaggaaccatactacacaagaaaggttgacctagaaaaatttctagaggacttctctccagtcaatggaagtgaccgtagagagggggagaatgatagtgaccaggatgattgtgaccaaggtagtgatttagttagtaagacttcaggaggggtgattgttggaggtatggttccaccataaatgagggaagtgataaccacagagattgtgagtaatgatgaaagaagtggttatggagatcatgatgatccaactgtcaatggtctggaggggatacaggatgatgaagctgtgattgttgggacaatcccatgttctattggggaagaggtgaataagaagcaggggggcaacgacctatagtgtacgatcgaagacgagctaagaagcagggggagcaacctctacctgaatagacacaatctgaacaagctgaagctctagtcccatacctctcttcaaactcctctccagttctggttggtaatgttgctcctccctctaaacatgtagaattacctcttgcacaaagaagatatcctagagtcaatgctggaaaacccccttctcgttatggttatgaacatgatattgttaagtatgtctcatactctagtgtctctcctgcgtatagaacatttgttacatctctacaaacaatatctattctgaaggattggaagtgtgctaaacaggaccaaaagtggaaggatgtcatgaaagaagagttgcttgcccttcaaaagaacaagacatgggtgtgtggccaattttggttggacgcttcatcagctggatgtgacgaggtctatatggaaattccacctgggtttgcaaatgaacagacaattgggaaa

SEQ ID NO: 153748 - DNA, 752 bp, Zea Mays
ggggtatcggccaatcagaaccgtaggatcgcgggtcaaaggttaataaaagaaactgaatcggtatgcaacggtgacccacggatcaatggccaaggatacgccatgccattcatctaatctgatccgcacaatgagatccaatgatcgagatacaatctggtcaaaggggtgggttgcttctaatcctggccgatgatctactattcaacgacctagattttattatggctataccttatcacacctccacggcttagatcaaatcacccagatgatacgcctagcgccaaatcacggtcgttgcacgctggatcaacggcgcaagcttgcccccacctcacgtcatccaagcacggcggcgccaccagcctagacggcggagagatggccggagttcggccaccccgtccaggagggccttatactctaatctaaagtgtgaatcatatagtgcaaggcatggcgaacgcaggggaagagttctcaccggcagggacgaagcatagaggcccgaccgcggagagtgggtggtccgcggcggattcagtcaccgacgagaaattcaccgagccctggccgcccacggccccggaattccacacggcgacgtccgcaaaccttgacaaagctttcccgagcgcacgttttgccctaaatggacggtaatcaccgagggccgattacggcggtggtgctcggctttccctcccccttctcattgtttctcttgcggtggcttagaaatctgc

SEQ ID NO: 153749 - DNA, 527 bp, Zea Mays
ggatggggcaagaacaaagcagacacgaatccgggaggggcgttgctagccatgggcgcagattagggaacggtccgacggccatgtgcagaggaggatatgatccaagactggggctacctactgtttggtgagaagaaatatggtaggtcaacgacgagcaaacccacaacgacccatttatggtccaaaacattgattttgttgatatagaggatgtaatttagaggacgctgctagagatgttaaaaatgtagaggataaaatattttagagagaactataaaggactgaaaatatttatttatgggatgaaatttagaggatgttgttgtagatagccttagattgtcttgagtgccctccctaaattccgccctctatatcccactttcgtgccacatcagcaatatcactctccttatatattcgccctccgtaggaccatcccaataaaatatacatttcctcgtaactaccactcattttattttatttttagttttccaacagaaaacccatacgtg

SEQ ID NO: 153750 - DNA, 875 bp, Zea Mays
gggccatctccaggtgcctgtgcagattttaaatcggcgtgtggtgttccgcggtgggcgacaagtaccacaagttcacgtccgctggtcacagtctgatgaagctttggccacttgggaagatgaagactccttgcatgctcgttttccagcagctgccgcttggggtcaagcggcctctcaagggagggggactgtcagcgaccctgttcgtcgctcgactgaagatgaggcagcgcttcaggaatcaaggcagccattgggccgacgggtgcgtaggcccaatatccgtgtgacagggaaagagtgggccgcctgatgaggcaggcgtgtaataaatactagctgatttgatatttcgcacaggaagaaaatgaacaaagttttcccatctttcccagtttcatagtttctatccgttcttcttcctcgcttctatccttccacggctgcatcagcgacgcgaggctgacacagcaacagaggtgtgtgtcacacaatggtctgtttcataatagattcaacgttctcccatcttctccagacgaatttttttagctggcacgaggctggggggccatcgccaacgacaaatggctgtagaaggataccggacgcaatatgaaacgatttgttgttgttgttaaaaggaaaaaagaaacgcggacgagcgtgccagtgagaccgatgggagggcgcataaaaagtcttatctgatcttgctagcagttgagaggctgaggcattgaatatgggcgcagacaaacacgaaaacacacgcacgcaaagttggagatacgtgcaggcaccacgacagaatttagttggagttggagaacggttaacaacttcatttgttactacccttagagagc

SEQ ID NO: 153751 - DNA, 765 bp, Zea Mays
cattgtttagtgtgtggacatcattcacttgtaaattcatatcggttatgtgatcaccaccagggaatctgttcatgcgtgaaaagtgatcgtgcttcatgaaaagtgatcgtgcttcatatagtgtgtggacatcattcacttgaaaagtgatcgtgcttcatgaaccttccttcatacaaccaatacccaggctcaaaaatatacagtctaaacaaccaaatgctacctccagtatggtatttagaatcatgaatttcagggtcccatggtacactttgacattacctgaccaacctgaaagtttgatatggaagggcttcaccaccagggaatctgttcatgcgtggtgaatttgatgctagaaagggattttgttgactcgttggtccccttgcaagatctgaggaatcggaaccgccagtagcttaagggccatttttttggctgtagaaatttggttaatatctcttgtttagtgaattaaatagatttttttcacatgctgctggatgtttagttcgtactgtaacttgtgaagatccagtgtccaaatacagtatcatcaatttcactgaaacagatacaatatattgatctcttctctctatggctgatgcattcaatcaaagatctatgtttacctttacgaaaaataaagattttatatgcagctgccagtagccagcgagtatttggtttgaacccacactgctaaattgcctctctccacagagtcgtgacgttgtaagaactaagttgaac

SEQ ID NO: 153752 - DNA, 728 bp, Zea Mays
catggatgaacttaagttggatccaaaccctaagagtgcaagaaaccctaattggaaccccagaaaaccctaaacctaaaccctaaggggctaagagcaaaatcagtgcacttttggactaaaatgcaaaaaccatgataataaagcatcttaagtcatatgatccacaatcatgaaggtttgcaatccaaaacttaagatttgggcttatttgcaaaagagccacacttgaactgttttggttaggtcggaaaccagtgatattggccccactttgaagccctatattccccaatttatgaggattttgttctatgtcaccacatcaatattgtaaacctatcaaaggagaacaattttgcttaagagtgtaagcaaggttgttatgaagaatttggagataattaaacctaaagtcaggctgtcaggctgttaaagtttgaatttcagactcacagtgcaactgcagtgactttgggcatgaattcaagcaggattgagcaagaatttgcttaggatttctataacaatattgtagctagatcttagagctaaaactttgctaaagggtgatgatcatgttactgcacaaaatcgggagtaaacagccctacaaatcgctctgtcaggtgactgaatgggctttcccatggtacagtaacctgaaacggatcaggacggcagctcaactcgccgccgacgatccccaccacgattcatgcaggcgc

SEQ ID NO: 153753 - DNA, 468 bp, Zea Mays
gcaatatacaatcatcattactttcagaagatagaaaaacatgtaaacagaaagaaaccaaggctgaacgcagtctccatgacatgtatttgcttttagctggccccttagattttaaggccagactagactagtaaaaaaacacaggaggaacaggataaataactgacatgactatagaagacctaaacaaactggcttacctttaaggaagagggatcatattctaatttccaggttactgccaggaaactgatccatcagattctaatttccaggttccttccaggaaactgatcttttcctcaagggattccagacgggagaacgtactcagattttgatagtctttaagtaacttattggctatacaaaattttaaagtaccacctaagatgccatggtctttaagatatttcattgcatcctcgtgggtcatgccattttgtaatgactgagccacatgaa

SEQ ID NO: 153754 - DNA, 607 bp, Zea Mays
gaatataacaaacccaagtcaaggtaacacaggtcagatccggacagtagttaaagtttggggggtttttttatcgtacctgcaggtggctaaacaacgtcacgtgcagatcagactgatagctggacgacttgctggggggcctccgaaccgcggtggtgaaagaaacgcaggcttctgcactggcgcgtgcaaatcaatcacccatttcgacttctgacacgagtaaactcacacgaggaaacatcgtatctaatgtccgttggatttaatctatatcagcttatattacttttacaatgtttttgtgtctgtatgaattgaagtatgcaataaatcaaagtgattcctcgggaaaaaaaaaaggtttctgcaaaaagcaatgcgttccaagtgggtcccaagactcactcctactacagtagcccgtcaacgaccttgaggtttatgtcatcaaactgttccgaccttgaggtcgcccgtcaacgaccagagttcctgtacatcgttaggcgattcaatgcgggtatagcgagactgtcggcacatgaagcgaacatgggacctgatgatgcttatccgagattgctgggcctgggcgttagct

SEQ ID NO: 153755 - DNA, 332 bp, Zea Mays
gcttatcccctggtttatctctgtgtttgttggagtctgtttcagttatcccttaagtttagcagataagttgttaggccacctgagttataaaggaggccttagtttgtattagggtttttatctaagaagttgctgccggctggcacagctcttgggtcatcctggcgagtttcccatctcgccctggtgcccacagtcgcgtgtccatcgccggagtccctacaacatgcgttcttcttcccaatctaacctgctagtgcattcatcctggtgcactccccctagacctagcccaatccacataacccccatcaatttggtaccagaac

SEQ ID NO: 153756 - DNA, 715 bp, Zea Mays
tgagcatctcttcgaggaagcctccatcgttaccaggctacaccttgatagcaaaaagtttgataaaggtaatttatttgttttctgcttctttttacgatttacatattacaatacaatgaccaagttaatgtccgtctgtgaggctggactgtggtaatagattaatggaaattaaaactaatgttttcatggttcagtttaccttgcttatcgtttagtatggtttagtatgatttcaccatttcgatgttcatggttctgttagctatgtgatacctagaatagaaacccactcatgtcccatccttgtttgtttctccctgtaactgacttgattacagtcacgtgccctactatggggattttttccaactattcttgtttttgctaccatcaggttctgaacgtccagcacattcaaaagctagataatccaactgtaccaagggatgtcgactaaccaccatggtctgatgagtgtggatgacattgcctcgaggtacacagtagaagcctctgctgtccaacacatttggatgactggagattggtgaataatttttcctcttttttgaatttattctgctgcaataattttgctgtttactgatatatatagtgatgatttgataagctggcgtattagatgtttaacttatcagctttacaatatgtttctactgattggttgagattaaagagccaccttttc

SEQ ID NO: 153757 - DNA, 807 bp, Zea Mays
ggtggctctgggagttcggttgagtggacggaggagtcgtcggatgaggacttggattactttgcggccttggatgtggcagcggtggagtcttcgccgcgcgctgcgaatgctgaagttgtgcctggtccgagcgctgggcgcaggcggcgaagagcggttgcgaagcgtagagtgagtgaggtggacggcagtcggcttcgtgtggacggggctggcaagcaggagttgttgtcctcgccggccattgcgagtgtaggtgagggtgagttgcgaagtctttttgagggtgaggagcttaggataatgctatttaactatagggagatggggatcattccgaaggttgaaccgatgtaaggtgtgatgccctcgctgtacatatgtaattgtaatttgtatgatgaggttatgcgcctgcgctgtgcttgtaaaggagttgtgtgcttggtctagtatgtttattatgccggtccggtgcgcctgtggtcggtcctggcgcgggcagtttggtgtagggtttagcatgggtagacttttgtggaagacttcgaatttgcgcacttgttgtggtagtccggctgcacccttgggcgacttttgcacggatagtctttttgagaagacttcgcctttacgcacttgttgtactagtccggctgcacccttaggcgacttttgcacggatagtccttttgaggagacttcacatttacgtacttgttgtgctagtccggctgcacccttaggcgacttttgcacggatagtctttttgagaagacttcgaatttacgcacttgttgtgc

SEQ ID NO: 153758 - DNA, 695 bp, Zea Mays
atcagtagatacctcttaaagggtaccaccatcgcttcatattcaaaaaaagaccatcctaaaagttaactatgaaggacacatatcccatgatatttaagtccactatacaagtcaacctaaactgtacagatacataaggaaaatttgactaactgatgtatcagaactaagaatggagacacaattcaaggcatatgtgaagctacatacctgtatacaaagaatggcagctaatctagccttcgaactccggaagcggtctccactttttgcataaccatcactatcactcaggtctgagtctgatgagctcatatcataccaagaatactcactatctgaattttgaccttccagtgaatcattctctcttctctccttgttcctcaaatgaggtggtctatatcgtccacgtgaagctctgggttttgaatctgttctagtttcttttggagctagtgtaggaggtgaagatgacctcagcccatatacgaaaaatatctgcagatttgctacaaaccctgcaaccttgaagttttatggacattgttacaatcagaaaaaaaaacatgtagaaaatttgtttaaatgagaggactaaagttttattttatacttacatgccctgaaagtggtcctttgggatccacaagaaccaaatgtagacaacgaagaaaagatgtataaaatct

SEQ ID NO: 153759 - DNA, 398 bp, Zea Mays
aaagattgtttatttctttaagtactcttcttgttgatgtaaaccgtggtcactaattcaaataagttacgatttgaaggatggccattcggacttttaaaatggaagactaatgtaggtaggacatagggaattaggtacccttcagtaagctggtcatttggtttgctgaccatatacccgtatttaactaaatgaaatgtctcaatcaggattttctattaccatttcattttagctgccttgtctattttgaattttcgatagaagggcattacgggaaatctgggtgctctatatacatctttgcatggtgctgtatttcatggtaatattcaggcaaattctggcatttgtcgaactagtatattgaaaataggactgtatttaaagcctgc

SEQ ID NO: 153760 - DNA, 420 bp, Zea Mays
gtcacgatctcgatcacactcgtttgtcccgtctccctttaaacgggccaagttggtgccatttggatttggttgctgtgcctgtgcctgccgcgccatgggtccgccaagttgcaggtgtgcgaataaaggaaactgtgtgcagctagcttcctgggtcagagtcgctacttgcgcatgcaatgaatgaaacaagggggccggggccgcctcattagattcttcagcagcttccatgagttcggctggcgggcaagagctgagccagatccggcggcacgagcctgcagcagaagctatgctctctctctctcacgccgtgtcgctctcgtcgcaaccgagccttccttctctcccgtcgttaggcccccgcgacctaaacgtcagcccttgccaccaccgctgcgtcgccacactcag

SEQ ID NO: 153761 - DNA, 323 bp, Zea Mays
gtgactcgggaaaagcagaatcggagaggacgtggcactccaaggagaatttggtgagggagagaaggaaagattcacaccagcgggcgtagaaggtggagttggtgtcaaggagtagtggaacaagagcccggatgttggttactgcaacagcctgggcgtgaaggtttagcagcgcggttgccttgtggtggagaagagcagcatgaagagttgcaggtgggatgtcgtcgtcggcagcagtgccagacgaacgagtatcctcctccggctggggaggagcagcggctacgcgttcccgggcggtgcgctcctaggcagtg

SEQ ID NO: 153762 - DNA, 582 bp, Zea Mays
caaccatcggtgtactgatagaacactgcttgtgcattggactgtatgtgcaggaagagttgctcctgcagagaatggaagaacaccctctgctgatgctagcgcaagagccttgggaaggtgacaagcgagaagccggtggtgcgaacaaggctttggtggtgtgtgcaggcgaccagctggccggcgctgatgccttcgatggcagcttcagcagcaaccacagtgcctatggtgacgagaagatggtgctgaggaaacgtatctgcgtgcgggagggagcatgccagtggcctaggtctgctacttccagtggcgctacggctggcagccctggggacctgccggagccgctgacaccgggtgcggatctgatcgtcactgacttcgacaccatgatcgatagcctcgcgctaccgtccatggaggagtacctacaggtcgatggtctccccacgccgacgtctgcctcgtccaccaccgcatctcccaagctccagctcctcccctcaccagcctcgccgagccaggtccagcctctgccgtcaacaaccatggtcgtgggcgacttcaacatgcagc

SEQ ID NO: 153763 - DNA, 538 bp, Zea Mays
aagcaagcctcgacgtggcacatatgctaacgctaggatgagacaaccgaggtagaaggggcgaatgacattgcaccatggaactcgcttaacactggcctatcagggggctcacagacaaacccattgtgtcctgttgttcaatgccctaggttcaatgtctccataacttgaatggtgtgggttgatgtttggaacgatagctgcgatgacatcttaaatgttgccatgacagagctaggttcatactctagatcccaattaggtggacaactttgattatgttggagcgcttgcatgtctctaggtggcacatggttgggggtggcacgctcgttggaagaagggttggcaataatggcatgatatcctcttatctatatgtgggtgtgagatctcggttcttagtgctgacatcacacatcaatgattagttagtgctgagcccaataaatcaagtgttgcttggatgtcttgtctgttggacatgcaaaggctagattgcaagttttttgttgaaaagcaaaggagatgaaag

SEQ ID NO: 153764 - DNA, 431 bp, Zea Mays
ctcgcctgtgcctgcgggggcgttgtgtactttgtctggtatgttgtttgtactagttcggctgcgccttttaggcggctattgcgtggatggtcttcgcggtagacttcggggtttttcgcacttgttgtgctattccggctacacccttaggcgacttctgcgcagatggtcttcgcgatagatttcgtgttttttcgcacttgttgtgctagtccggctgcacccttaggcgtcttctgcgcggatagttttcgcgatagacttcgtgttttttcgcacttgttgtgctagtccggctgcacccttaggcgacttctgcgcggatagttttcgcgatagacttcgtgttttttcgcacttgttgtgctagtccggctgcacccttaggcgacttatgcgcggattcgtcgcacgcgagggtggctagc

SEQ ID NO: 153765 - DNA, 438 bp, Zea Mays
cacacctcagatggtgcacggttctgcctcccaggctcctacatcgggcccaacgtgcagctctgctccctcgccctcccaacgcatgcaaaccagcaggtccatttcctcacggttctgcctccaaggctaggctcccacgtcagctctgctccctcgccctcccaacgcatgcaacccagcaggcccatttcctcgccaagcaaaacaaatatctacaacattacctaaatcgttctctaccaacgccattgagccgctagcaagttaacatttggggctgcaccaacgcttataagccgttctctgcctgtttcactagccggtatggcactaaccacaatagtaaagaaagcaccacaaacaatgctcgtgtcctgggctaaaatcttcatgtggcccgtattccagcgatgtttggtgcggcccagatagcga

SEQ ID NO: 153766 - DNA, 494 bp, Zea Mays
agcggaggaggtggagcagactgaaccggaggtactgagacaccagactgctgtagcatgagagccatgaatgccctactctcagcccgatcctgaagtagctgctgctgaagcgcatcctgcctgtcctgcatgttctgaaacatcgagagcatcctttcggataaccgggcctgctcggctgccaggtgagcctgctgttgagtgatagactggagaatcgaagcaagagcagggtccataggctgaggggtagcaggggcagcactagaactcccagcctcatgatcatgtgagcgtggaggcataggaggcagaggaggaaccccaaaatcatcatcatcatcatcatcaactgttgtagcctgagtgtcgaactgatgaagagctgcatcctcgtcctgagagtcaaaaacaggagcagaagctggcacaagaatctcaggcgcaggacggtaggatccaaaaacgaggcgtgaggcctcaagggtgcc

SEQ ID NO: 153767 - DNA, 370 bp, Zea Mays
cgagagggagttcttctgacatagctccactgacgtcgcctcctgacacacgcgtaagcgcacttccggtatggagggttgctccgtcctgtcctatacatggattactgtagagactccggtgctaaggcttcccatagcggagcttggttggtcccacagtgcagagtcaggggacgttaagggacgtggatgatgacacctcgtctcgttgatggagactccccttcactcgcctgacatgtcgtggcgttagtcaagatatttggtggcaacatgccttatcgtggttggcgtgggtcagcaattcacactagaacatagtcatgacataggtctctcacacaatcacactagaatcactgatgta

SEQ ID NO: 153768 - DNA, 440 bp, Zea Mays
caaaaagggcaaatgggtcgaccagttacccgaagttgtatgggccctaaacatgacggagtgccgggcaaccgggttcacacccttccacctaatgtatggatctgaggccataacgccgcaagaattaaagcacgggtcccctcgaacaaacaattcagcagcacccgatgttgacgaaccaacttccaaagatgtcatcgacgtagaccgtgtcctcgccctgtaggccctcaacaaatatcaggttcagacaaaagcctggcatgacaacacagtcatcccaagagaattcagcgaaggggacctcgtactcgtaagaaccacccggacagagtcccggggcaagctagaaccaaagtgggaaggtccatacatagtcaagacgaaggcatcctccagtgcttacaggttggcaacgtcatccggcgaagatttag

SEQ ID NO: 153769 - DNA, 421 bp, Zea Mays
ggcgcgcgccgcggcgaggtgcgcccagtgcggggacgccgaggaggagtgcgggcgcggggagagcgaggtggaggaggagaaggacggcagcgacagcgagctccgcgcgctgaacgtggtcgcggtggtgaaggaggacgtggaggcggaggcggtggaggtgaaggacaggtccagcgcgccggcgccgccgtccgcgagcgcgggagggaagtgcggggagaggccggcgtcggaggagagcggggagaaggacgcggggtcgtggacgtggtggtgggcgacgtcccccattggcggcggcgctagttccatgtgcatgcagttgcagagtgagacaggcggggaggagaggaatgaacggacgggcgaatgcgagtctggccgagtcgagtgagagcggggcggggtgcttata

SEQ ID NO: 153770 - DNA, 400 bp, Zea Mays
cgatgacatccggacggggcgagccagcgcgacctagtatcttcctgactcctgaggaacggcgccgcaggggcgatggggatggaggtgcgaatggtgtaagcagttaccttcggaaaagacgtcgaaataggaagcgttctgcgttcgggaaaaaaagcgacgccgaggcagcttgtcatccgcgagactgggattccgtctcacgcgaactcttctgacttcctcccggagcatagcaccttctggagaactcgagtattcccttcaagagaactcgatgcttgtacgattaaaaaatgcagacgaacagtaaacgatagatggacggtaggatcagcttcatggctgtatgaactgacgactaagaaaattctaacgacgtgtccactgtgtcttg

SEQ ID NO: 153771 - DNA, 980 bp, Zea Mays
cccagctggttttgccataaaaaatggcggtttctttcacatcccctccaacaagaagctcactaagggtagcaatgagaacaggttggcaataatacaagtggtggaggggtgtattagcctggacaatgtgattcgagagttggaaaggctgctacccggacttggtccatggaacgtggatcaaatcaccccaaaggtgtttcggacttcctttcctgcagcagcggaattgcaaaggatgatcgaatggggtccggtccagactaagtctcagaaggcaattcttgagttcaaggctagttcatccgggggtcgagtgaaggccactcttactgacgtttggatacagtttgatggtctaccgtcggcactgtgcacttatccacatatttggggagttgggtctacgcttggcaccactgtggaggttgacatggtattcttccggaagcatggcatctgtcggatgatggtgggtgtaattgatccagaagcagtcccctctactggtgaggtggagatcaacagagttatttatgaagtgcattactgggtggagaggcacctggtggatggggtcccggtgccgcttgcttttgatcaggacggagaagaaggcagcaggaaagataaggataatttgggtgatcccaaagggaaggctgatcgaaacaagaatgggccagagaacagttcggaggagaaaaatgtgaatggcagcaaggccgatggcggtcaggtccagaaggaggatgttaacggtggggctgatggtggtaaccacggcctggttgtcagccatgagacacacacggccagtgagctacaggcgttcgcacctactgagctcatggatgagcatcaggggatggccgtggatgctgtgctagagccgatggtggataatttcatggtttcaggtacaccggaaatggagactagggccgccagggttgagcgccttgcggcgatcccgg

SEQ ID NO: 153772 - DNA, 279 bp, Zea Mays
tactgcatactattaattgattatattgcatcatagcatggtcgatggtttctagttaaaatggctaagaagttcctagaaacttctcttgcaataaacaaatgcttctttgcagataacactattgaaaacattaccctaagagcaccatcagataacacaatatatctggattgcttgggtgatgataaatcaacattaacctccctgtttgggccaagctccaatgtagagtttcctgcttgactgatttgacaatatttgtatgtggagaagatg

SEQ ID NO: 153773 - DNA, 361 bp, Zea Mays
tttgacctgtttggtctttctgtgaaggatcttgccaccaggacccttctcgctcggtgtgacagccccgggccgctctacacactccgcctgcctgcttcccctacatcgacttctgccccacatgtccttgccgcagccgcctcttctgtgacttggcatcgtcgtcttggtcaccccggccgcgatgtgatgtccaagctctccagcagcacctctggttcaggttgtcggggatcttttgagcacctttgtcatgcttgtcagttaggtcgccatgttaggctcccattccccacctcctcttctagaacagcagacacttttgatctgatacattgtgatgtatggacatctcctg

SEQ ID NO: 153774 - DNA, 612 bp, Zea Mays
gcaggtgacaaagaagaggatacgaccaaggggaaaataggtacagtacaatgctcagattgagatggaaaagaggatattttaacaagccaatataagataaacatcaaggtaagatatagatgtgataagggtaaaggtgataatgatgaaaagcataatacgtggacagagttaaggcaagactcgcaaagtgatgaagtggagaaaacaatcaaggataagataagtgaggttccgaccgaagagttgaagtaaaaattcattatcgagagaagttataaggaaaccacaagatcaccaaggatgtgcaacataaaatgatcgctcatggaccgttaagaaacaagggtggtcaagggcacattaactgaaatgtcttgaacaactattggggtatgaaaataagcatacataagaatataagagtatgcaagattccaaggatacatgcacgccaagacaagggaattgaaaaggccaaaggataacgacttaacgacaaaataggaaggggtctcagaagacaagaagtgcatggacacataaattgaactgtttaaataggcaacaaaggtacaagggtaagtactttagattaagggataaggg

SEQ ID NO: 153775 - DNA, 562 bp, Zea Mays
aaacagccctgcaaatcgctttgtcaggtgactgaatgggctttcccatggtacagtaacctgaaatggatcagatcaagcactcagctcaccgccgacgatctccgccatgattcgtgttgcctgcgtctcgattcgtgctcggggtaagtgcataacgtctcgggtagaaagatcatcaccgccgttgagctggacaccaatccggctagccgccgtacctcccccttgttcaccgatcgctcgggtaggatctcaccgccgttgatccctcactgccgtccgccgcgtgtccaaacactttaccacatcgcagctaactatgctacgcacgtccgatgatcgccggaggagcagccacggtaattgccacgttgcgcggccaccagtgactcacccagttcatacctatcgcaatccgcgctcctcctccgattccggtcgacgacctataaactgagcaaggattctgcttcttcaccacatcccgcacctcagtaactgagcaatcggctcaatttcaccggagaactcacgcagcccacaaattccctcctccctg

SEQ ID NO: 153776 - DNA, 457 bp, Zea Mays
atttaagctgaacaccttctcaacgagtgtactgtgtactatgtgatactagtcctactcatacttaacacttgttatggccttttaatttttctttattaattgctagactagttataggctaagccaagttaaagtaacgaatacagtctagaattgattgtatgtggttagggggtacggcagaatacatagtcggtgcttgccagtagtttgagaaggtcagcttgttagtttgggttaccccaagaaagtaagtagcttgacctctcggccttaaaaacacaatgccaataggcatgaaaaattctcagcattggtagtgatatcatctagcatcgtactaaattgtcaactcaaactctgaatatacaagagaaaccaaaaatacaaatttgaatgctcgttattgtcctttcctgattccatgaaaagttatcctttttctcgtttcctc

SEQ ID NO: 153777 - DNA, 589 bp, Zea Mays
ggatgttacaacgttgagattgtgctaaagcttgacaagaataaagacaatctcctgtaattgatgccctgccttgcctgttttgttaaactgtctgcaactttgttcatctctctttggatcttgagcacttagtagttccttcctggtgtggcatcaatcagtgccgcaagggttggtccgaggcactaatggctgggttgcggagcacgaagccggaggtagcagcattagccaagtagccaacaccttattatctgttagaatgttggtcacctgcaaatatagagttgacggctagtttggcacctagcagtagaacatgtcctgcctccaatgggtccatgagttgagttatggcaactagaaagaattaaagaactggagcacaagctacgtgtaagattagtaagtgaagatgcgaatgcatgtttgatgttgggttggagtatggtgtaaggagatagaaacgtcacaaaagatatttgtttcgacgtgtatctgcaaagaagcactagaagtgtggttataggacacacaacagggttattagcttcttcagattctctgatgttgaactagccattta

SEQ ID NO: 153778 - DNA, 533 bp, Zea Mays
atggtgccaattacaaggttgtaggcaagcttctaatgaaatggattcctacattattttggagtctatgtgctgcacatttcttggatctaatgttggaggacatagaaaacttgaaggaattcaagaaaccaattgcacgtgcaaggcgtgtgacaactttcatgtatagacatgggagaatccttgctgccatgagaaaactggtggggctaatcttgtgaggcattatgccactcattttgctacttcctttctcacattgaatagcttgtacaagcacaaggatgctttgaagtctttatttggaagtactatttggactgataatagattggtaaagactagtgttggattgaatgtgtatatcattgtcttctccacacagttttggaattcagtagaagattgtcttagagcctcaggaccactacttattgtacttagggtggtagatggagatgagaggccagctatgccggaggtccaagcattgatgaaatgtgcaaatgaaaagatcaatcaaagttttg

SEQ ID NO: 153779 - DNA, 381 bp, Zea Mays
aactccgtacagaagcctacgggagcggcctgatcaacgaaagcacgcagcttcatcacacaaaattatggttacatacatacagcgagggcatcacacattacattggctcaaccttcgggatgatacacatctccctatagttgaacaacattatcctcaattcctcacccgcaaacagacttcgcagctccccctcacccacactcgccccagctggcgaggacaacaattcccgtttgccagtcccgtccacacgaagatgaccaccctccatctcaccacgatgacgcctatcacttcgcgagaactcacccactctccgtttcaccaccgcccttcgccgcctacgcccagcactcacactcggaagatcctcag

SEQ ID NO: 153780 - DNA, 484 bp, Zea Mays
tggtgttcctcctcccatgcttcccctggtttcaggtttctgtgaacatcgtgcaacgagtaccctggttttaggtttctgtgcacatcgtgcagcgagtaccctagttttcaggtttctgtcaagactgtgtagcgagtagcgacaacacaatgtcttctctaaatgaagctccatcttctgtggctggtgagtaacccgaagaacgatccaaaccagaagccacggaagtctgctagttcagggtggaagtatggattttggtcagatcttcaaaacaaagataaggtggaatgcaccctatgtggtcaggttattagtggagggataaagaggttaaatcaacatttggcagaggcatatggagatgcaaagttatgtttgaggctagcagtggattaaggaaggagatgacaagttatttggaggcaaacaagaggaaaaataccaatgtttctagatgaagatgaagaagctgatgaag

SEQ ID NO: 153781 - DNA, 788 bp, Zea Mays
tttgcatggaaacttggtttgcacctgatatgttgccctgtttggcagggctcccaaatcagctttggctcctgcagaagccctttcaaatggtgccaaaaaaacagctctcaacgaagagtatttagaagccggagtcacttttgggggagaagttggaactcaaaaattggcaccaagcacctcctcccccccactcccagtcctacccctctcccgcgccacctctcctccccatgctctgccctctcccacgcctcgaccaacgtcgaccgccctacgtccgacaacgtctccccgcccatcacccaccgctgtggacttgcgcccgaattacgtcgccccgtgctcgtcgttgcttccccatccaatgcccgacgcggtggcctccaccgcacccgcaccttggccaggctattagtcatcagtttttataatttgtcataatcatgaattatttacacattatttatatgtacgtgcatgagtgttcgtgcaaatggctacacagggacactagacatgcggtgcacctacacccgacccaaagtccgagtttctatttcgacccacgagtgtcccacacccgacacgaaatttgattcattccttattttgcgccgtgattcatgaattttgcacttgaccctaaaatgattaagacataatagtaattatcttgaaaaggtaacttgccttaatgattcatgatttttttcttgccgctagacgtgagaaggcttaagatccatggatataactcaattattgttggtttttaattgttt

SEQ ID NO: 153782 - DNA, 317 bp, Zea Mays
catggaggcctttgcctgcttgtctacctgggatagcacatggcttgcagtccgacatgcctgcgcgctccaagatattcagggtacactgacgctacttaagaaacatgttatccgggcgacgctcaacagaatcctagaaagtggtgaagaggacccaaatcctttattgtgaattcatgttgaatggttgtaatgatccattgcatgagactcaaaggagagacgacaatgagcataatgtcatcaacacacaagaggaggtacatagagtcactatgatgataatagatgaatatagaggcgcctaacttaac

SEQ ID NO: 153783 - DNA, 489 bp, Zea Mays
ggggccaccttctctagagtctagcattgcctcatatggcgttaggtgttatgcttggagtagaagtggtaggaagtagcactcctcaggatagcttagcttttggcatcgtggtatactaggctaggagtcaagtcttttctctttaccaagtgttacacttaaaactttctttcggagggttggagaaaaaatgagattgagtcccatctatgaattaatgcaaccagatctaaagtttagaaatcccactgcgtactcatagcttatcacaaatatagatcatgagtaacaacaggaactccttaatttcagatggcaggaagagcacgtcgtgggcagaactagcagattccccgccactaacccagcctcccactatgcaagagctgatggctcagtagaacgagattctatggtagcttgcacaatgccagcagcaacctcagcactttgggggtggcgagcagtatcaatgcccaccggccg

SEQ ID NO: 153784 - DNA, 938 bp, Zea Mays
ctcattgtaccagcttcttgaattgtcacgtcaggtacaaatgttcagtgactagtacctgctttctgggttaagtgaaatatgtacaacacttgctgaatatgtgtatagttgatgatatgttgccttgaacggttgtaatatagtttacgatcaatagatacaaagcattcaatttcattttctgtgataaacctttcaatgcaactaaaatgtcaccaaacaaaaagcatcaaagtagacccacaaagccttttagtctagcacgttggggtctgttaaaaaaataaagaaaaaagaatcacccaaacagacatccattaaaatcttcgctcactttggctggagatttacgaataggatcacttctatttagatgtaaaagtttgttttgtttcttctagttgttttgttcactggtgaattcagtttgatgatttttgttatgtggtgatataaactgttgggcatactctacgtgtgaggggaaggttggaatgatgttttttcattatctaaaaaaatagacatctattaatttagtagagtccatgattcttcgtgctagcgaagagtcaaagcacaccaaagcagcagtcgcaaaacttcgcattgatccatttgtccttcagatcccaatgcgccccgaacatgggccttttcatcacttgaatttggtaatcctcactacaatttggtaaagcactaaaggaggtggctcgcgtgcagacatgaaccacgattctagcacctggcatgttacttaaacaaatatgctaaaaggttcctttagttgccattccgcctataatgtaatccaccactcatttctcctttgggggatctcttttaacattgtttccgtacatctggcattagaaatatcgaagggcggacctgatgtagcggtaagagctgtctcagccaccaggttccag

SEQ ID NO: 153785 - DNA, 439 bp, Zea Mays
gctcactagtcaggaagataaagtgctcgaggcccataatcatttctcccaagttattggcacgacgggtgctagacaatgtgctgttcgttgggacaacttaggctatagtccttttgagttatcagatctggactctgcgatcaacgatgatgagattaaaaatgtggttatggggatgcactctgaaaaggcgccgggtccagatgggttcatagggttattctataagtgttgctttgagctgattaaggatgatctatccaatgctattcatgatttctataatcatagatgcaaaagcctgcatcttgttaatgaggcaaatatcacgcttttgcaaaagagggaaggggctgacaagattgacatgtttagaccgatcagtctcatcaacagttttatgaaaatcttaaccaagattttagcaaatagactt

SEQ ID NO: 153786 - DNA, 1603 bp, Zea Mays
ataccttccaagcatatgactgataaaaaatttgctgctgccattggaaaaccatggactcttttttccatctgaatatagtccttggtcaagtctgtatcgccaggatttagctgattggaatgtcacaacctaaggcagaataacttattattagtacagattaactttatgcaagggaagtaggagtattctgaattctgaccttctcatctgctatcatccaactgtaactttggcaagtttcatagaaggaaaatagatctccctgagaagcattatcatttaaggaatggcaaacgtgaaaagataagcatatagcaaacagatacaaagcacaccttaggcagagatggataaactggcatgctacagccaatacaaagacgttcactttgagtattcaatgtcatagccactgggatatccacttcaactcttccaaaagcttcacagactaagatacctccatttgctaaaacagcagcacgtacagtctaaatagtgcaacagctcagtacattgagtgtataactgatccagattcaagattcaggagtaaatgatctcaaaatggtacaacttacagagttccccacagattttgcagatagtttcccagtggtattttgaacttctacaattcccatgttcagacttgagtattcaatggaaactccagtttttggaccacctttaacagaaagctaagcaggaggaagataaaactcaggacccacaatctttttacgaaaatggaactaaaatgtcaatgatttggcaacagcatgctaaggctattcacaatggagattccgtaccactttttccaacactgccacatcatccaaggtgtcatgaaactcagaatgaaacaatgcctctcaatgcaaaaaaatcacctcgctatttcagactaacataccaattaaatgatgtaactcaatgaccaatagaagttagtaaaatatgtaaagatgaaacaaatcactctcaatggaggttccacacggtttccaagaccttggaaacgagttgacatggtttcattcccatgaaactagtttcatcccatgaaacttaattctcttaaatgatatgacatgtcatcaaaaggtctgatgtggcacactattaaatgtgcatgaaaccacaatgaaactactatcgagactagcctaatagtacatccccaaatgtgcattagaaacttgtagggatgtagatatagctggcataaatttatagaaagagagcaggttattaatggttagttggttaccacaaaagaggcgcctggagtgaggtaaatatactcaggatgtatttgcaatggtccatacacttccaccttgacaacctgacttaaaactctgtgtccagagctttgtttagtactgacctgaagattggacatagtaaggatcatcaaccaatacaagcaactgaacatatatctatcaccaacttacatatagagatgtaatgccgatttttgcagctttaattgaaaattcgggtccatccattgattcgcttggaccaataagctccagaatctcatcgtcaagatgcaactcaatgtccatatatttgaactgca

SEQ ID NO: 153787 - DNA, 617 bp, Zea Mays
cttcaagaccctcaagcaggcgctcatgttggcacctttgctacagatgccggactttgagtggcgtttttacatcgactgtgacgtctcaggtgccggtttcggcgccgtcctgcaccaaggcgacggtgtgatcgccttcttcagcaggaccgtggtgcctccccattagaagttgcctgcctacgagcgtgaactcatcagtttggtcaaggcggttcgtcattggaggccatacatttggggacgaccttttactgttcgtactgatcactatagtttaaagtatattttggatcaacacctctctaccattcctcagcacacatgggtgagcaagctcttcggatatgacattgctgtcgagtacaagccagagaagatgaatggcacgactgatgtgctgtatcgcatgacgagtaggtggtggcctccctccacaccatctctacgccctccttcgagctcttcgaggtgttgcgcaccgagcgtctcaccgacccgcaggctgcgacattacaccgacagataaccgatggctctgctccagaaggctggactaaggtggacgacctcctcaccttcggcggtggtgtctatgtgctagatgctttggc

SEQ ID NO: 153788 - DNA, 545 bp, Zea Mays
cgggtgtgacactaaccgctctaccctggccagcgctccagcgaccaaccggccaagtcccttgcgcatggccagcgtggcccgtccccaaccttcggtgatgctccggcgtggcgagtccttagccaacagccccgccgacgaagcccacagtctgctccctgcgcatgcgactgtgcttccgtcaaaaactgcagaaaggaaactgcctgccccccatctgcatgtcgtttccccatgatccgtgtgattgatgaaaccgcatatgggcccagctcacatgcacatgcacgcatgtcaccaacccagcagactagagaaatagaaatggtcttctcagcccacacacaaatctcatggaggcatggatgaccaagcgagtaccactagagcacatctttcatccctgcgtgcatgtgaaccagggaaaggagagtgggcccattctggccacgtgaaccttatctggatcccaggattgtctgcggctgtgattcttgtggtcttggcccttgggtgtggctagcctctggccaataaaactt

SEQ ID NO: 153789 - DNA, 507 bp, Zea Mays
gagtgtttggtttgataaataaagtagtcatcaacttcttactccccaatttaatgtttggtttgtggattagaatgggttgatctatcgttagtttattcctactaagctaataattagtagtaatatgatgattgagtttattccaccaaatttgtagaattgactcttaatataaacgcacttccatgtcctgatctcggatatgcatcccatatttaagataaatagctctgtggcatcacctatgagtatgacaaactgcgcatgaatacgatctgttagcaaccgaatccgcttttaaatcgcccgtttgatgtttgtttcaggcattgatcatttgagctgtcgtctccatgttagttttcgactcgagtaggaacaagctggacagagaaaagtggacaggggacgaatgtgtttggaattttagctagatgaactcaaccaaatgtttctgtacaggttggggctgctacatcgcgtgcagttattttgtcacaattt

SEQ ID NO: 153790 - DNA, 661 bp, Zea Mays
actaaatttcagtatctcttcttttttccccttttgcgaggaaaacactttcatattgatctacaggaaactataaaaatcagttgtttcatgccgagttgtgagttggtgtcagataaggaaccacactaggcagggtgacaccttcgattggcacaacacgagttaatataggtgtgcttactgaccaatccacacaggggttgctgccatggtctggctgcggtatgtggttggctaattagccaccaagaccatatacagactcaaatcgagtcaaggcgcggacccagtaaaagacatgtacacccaataaaatttgcaaaacaaaatcgatgttggtaggcataatacatgtacatgctggtaattagattcgaaccgaatacaaatagctgaagttagggtttgagtgattggtttcagcatagcatgaagggaaggggtggatgtactcgtcgccggcgaagggtcccgaagaattcctgacggagtgtcctacgaagactcttagggcggaggcggcggcggcgtcggtcgcgcacgcggggcaaggagaagcggaggaagaggcagagccgcggagcggcggaggccgcaggggtaaaccaccgggatccgggactgtatggcgcctccagcagacctggatgttgtttcg

SEQ ID NO: 153791 - DNA, 508 bp, Zea Mays
cgttggaacagcaaagatagggcgtgggctgccttgaagcttccttgtgacaaaactgacgaagatctcttcaacgcttccacaactgtcacggtaggcaatggaaagatggctgaattctggaagtctagttggattcaaggccaggcccctaagaacattgcgccatcattgttcaagaagacaaaaaggaagaacatcacagtggccaaagcgctcaataacaacaactggattcgtctttgctcaccgtatacgggggagggagagtttggagagttgatctctctttggcgggccataggtaatatgcacgagcttaacgggctagaagacaacatctcttggagatggacggcagatgggcagtacagtgcttgtagtgcttataaaatccagttcgcatccaatttcagtagtatgaatctaggccccatttggaaggctaaagtggaaccgaagtgcagattttttgcttggactcttctccataagagaattctgacgg

SEQ ID NO: 153792 - DNA, 636 bp, Zea Mays
tttaccatcaccaaccctctttcgagcttcctgcaatagacgatcctgctgctgagccgcacgcactctctccatgagagaggattgaataagcatccgagtctcctcgctagcggtgccgacataacacaaagcgatccccaaacggtccagatcagtgatcaacggcaaccacctttggaaccccagacctgctaagggcatcagccaccacattagccttccccgggtgataatgaatggacaaatcataatctttaatcaattccagccaccgacactgcctcaaattcagctccttctgagtaaacatatacttgaggcttttatgatcggtgtaaatgtcacaagcctcgccataaaggtaatgcctccacgactttagagcaaaaaccactatggccaattcaagatcatgagttggataattcccctcatgcttcctcaactgccttgagccataagcaatcactctgccttcctgcatcaacacacagccaagaccaatacgcgaagcatccgtataaattgtgaaacgcttaccgctctcaggcaaagctaggataggggcgtccaccaacttgctcttcaatgtctgataactgacctcacaatcgccggaccagacgaagggaa

SEQ ID NO: 153793 - DNA, 390 bp, Zea Mays
ttaacttgaatggtaaactcattgtcaaagttagaagacctggtggtgagactgccatgtctaacatacttcacttagtcgaagaagcccagacaagggtggtccctgttcaacgattggcggatagggtatagtatgtgaactgattcctacatttatgaaagtttagaggtatgatattcaaagcattacatctttgtcctgttactatctcaaccatctctgtgtgattggaatagtatatttagtacatttatcatggccaacatgaatcatgggttctgtagagcttttttacttctgtagaatttttttacagaccaagtgaacatgggtgattagttacttcatataaatgttttacccttcggtatggttaatatttaaaat

SEQ ID NO: 153794 - DNA, 1653 bp, Zea Mays
caaaaatacacctgcaagatgagtttgacttgcaggtctctcttttttgagacaatcttgataaatattcaaaaaacgcacaggaggcaatcttgaccgttgaggatgaccctagggatctttcctaatcatcactaagacctcaaacaaaaaaaggaaataatgcctcgctaacaaacaaattaactaagtttatctcaaaatctgctcttacgcaaattcctttctgtgccactcatcgttatcacatcctctaaggttaccaattgtgcaaaccaagaaataccagaaaaattaattggaaactgggcaatgaactttttaggggaacaaaatcctcatgatatatggtgcgatagatttctcaactcctgatgcaaataaattgttttctacacgtaaacaaatttgcatcagcccagcagtataagtagtaatgcatcaagccaaaatatatatcttgctataacagaaatgctgcttaaagtgtgtcttaacatacctcaacatagaaactgaatgcaagcttggagatgagcagaacagcccaaaagaagacatacctgttgatttcatttgagtgtcgtcaatgataagaaaaggcaataacttgagaaatgtgaagcgcttacttaaggattgacaaaatatctccgtgcatcccacgtccaacatacaatctaggctggacatagcaaaacattgtgtaaccactaatgatgtgcaatgcttcaagcaaccgtgtgaagacattgcgttcaaaaaaaccgtgtgaagacaaaaaggagggacagacctgaatccaccacatcaggagaaccaacactcgtgaatctgagcgctccatgacattctgaagttgtggcaacaagaaaaacaaggcagcaagaatatccggaaccatatatatgacgatcgcaatgttataaactgattgattataccaatccccaatccaactatttaggattttgccagcaccggatgggtatttgatggaactagaataggtcaatggaagaataattatccaagcaatggcgacaacaaattttagtaaatatctgactaactttgtccactccatactaccccatgcttgtacagtaaacattatatccagagttactgcagaagtagaaaccagaaatttgaattataccatgtaaacatattttactttaaacataaataaagtgcctgtgcataggtcaatgcactaaaatattgatgtacctgttataaagttgagtagagctgctgtgataaaaacacttaatacattttttaaaacagttccatcggtaattccagaaagagatccagaagaactccatgaaactatgagcattgcctggaaagacaaggcatatcttcttaatattcataaggagaaactcaaaaataatcttcatgcacttcaggagaaagaattacctggaaagcaagtataaaaaacatccacattcgattaaaacttctaaatatgtgcagaaatgtgcgtacttcaacaaaattggtcttgggctttcttgccatgccgcactgtaaaaaaggaaaaatagtttgagaagagcacctggcataaccatttggtcaagtgaacatgaaactcttctaatttctaatcgtgtttaatggctcctttttagg

SEQ ID NO: 153795 - DNA, 554 bp, Zea Mays
catctagctcccaggcacgaagggagtagtagtggcagtaacgacccaattggagacctagaagccagggtggaacaacttcggtcagagttacgccacaggaacagggcacgtgagcaggacagtcaccacatagcggaattgtcagccgaagtcagccgcttacagtacgagatttcagaacgggattcggccattgattgggccgtcaactcgcgttcaatcacgacaaggtggcggggttctcatggcggtgaggtcgtgatagggggtgggatgtggtgctctgtgttcgtggtgatgtggtgaagttagtgagctagcttaatttgaccctaggctactgctactggagaggggaggaggagagctcaccagagtgaagggaggcggcagcgctagctcgattgagcctaggggagagggagggagagtggtcgaggccggtgcgaggagaaatggagctcggggaggcctttttataggcacccaggggaggggagcggctaaagcgggctagcaccgatgaggtgcacagcagcggcgataatagc

SEQ ID NO: 153796 - DNA, 1236 bp, Zea Mays
tgtcgattcgcttacgggtccagaccgcgagcgagaacaccgtcagatgataggttggaatgaaagagaggattgatgagacaagagtgagacggtcggctttgtttatccacttccctttccaaccagggagtctctgagcaacgcgttcgatgagcagttgaacgtgcactttctttagagggcgtgtatggagctacagtccagcgacaagggaaagattctctgaccccattgaagggctcaaggacgtgatctagctcgatgtggaggctagagaattgtccaaaagcttagagaatcgccactaccgcctacatgtcttgtctgaccaggtttagaaaaatggcctcatcatctgcgtatagcaaggttctccatctagtcgtctctccagcaacggggaaagtgtgccttgcccagttgctaggtcaagtaagcgttgcagagggtccatagctaggatgaaaagcataggcgagagagggtctccctggcgcaccccctggcatgggaaagctttgagcctgggcatccgtttatgagcacagaggaggtggccatgcggaagaggatggacacccattcgcgccaccgctgaccaaagcccagaacacgcaggacttccaggaggtagctccagtcgattgtgtcaaaagacttatggatgtcgagcttcatgaagagtgccagcggcttatgcatgtgcatttccctaatggtggattgcacataaaggaaattatcatggatgcttctcttcttgacgaaagcactctgacagttggaaaccaaagcatttaggtgggggcgtgttcgttggccagcaacttggcaaaggctttagcaatgctgtgaataaggttgataggcctgaaatctatgatcttgggagcaacagttttctttgggagcaggacaatattagctgagtttaaaagctcgaaaccttgggagttgcctttggtatgaatgtatgtttacttagggttttgagttttgactctcttctttaatacaatgatatgcaactcccctgcatgttcgaggcgagaaaaaaggaggtccaaaagaaaagaagttaaaggctttctaccctgcattaaacaagagggagaaacagataaagttaagcttcagttcatcttcgttgccattttcgaaaaaaaaatcatcttcactggttagagattacagaaaatactactttttgtgctattttattttatatctaag

SEQ ID NO: 153797 - DNA, 990 bp, Zea Mays
ccaggaaccataattatgaaacatatttttggacagccatattgtgcccagaagttcatgaatttctcgaaaaactaggatagtccaaagcttaatgagcttcttggatttagcttgtgcccaaacgctaccaacgctgcgaagacggacgcatctcacttatccgaagcatctgtgaagactgaagagagtttggcattatgcttgaatgtaaatgacatgaaatatcattataacaaaatcgcgaaagctaatttgtaaaactgctaatgttatctagcataaatcaagcaacaggcaaagcgtacatagaacagcggttatgtaagtcgatttcttaagcaaaaccaaattggcatcagaagggatgtcatgtattcatatcaccgcgggttgggctacaagtgcccatgaactgctcatagcccttgcgcaataatcccagcatcacttgccattggaaaggggtgtgaataaatcttatatctcaggaaaaaatgccaggtagaaacggcaaattaaatgctttttttgtagaaaactgaacaatcacaagactacaaagcaaatgaagtttcctcgcaaaagggtgcagatccaggaccgaaaactgctgccatcagaagggataatacatacatatgttgtgatctcatcgcattcggcaaacacaagccacgaattgctcaaagcccttgcgcaatattcccagcatcacttggcagcaggaaaaacacacacgtagatttggggctacaaggaaatgaacgaatgaagcaggcacgcccaaagactgggaggagagacgaggtacacggggacacggctgtgtctggcaagaagcaacaaatctcccatggttgctgccttgctgattggaggcggcggcggcgttccgggcacagcggtagggttaagggggtggcttaacgacgacgcgtgcgcgagtcatgggctaaatcgggctaccaaagatgggcttgacatcgc

SEQ ID NO: 153798 - DNA, 506 bp, Zea Mays
ctagattttcaaattggtttctaagacacattttatttgtattagagaccaaaaggaagtcgaaaggagcttttgctagcttctgtgggatccaaaaagtcaatgcacaagatatcccatagaagccagtatttcaaatcaaaggcctagacaaacaggactgggtgtattttctaaaggtagacagcagtcaccatctgtctcctcacaccaactgcgtatatcggcaaaagggcacattaggttgcaaagtaatgatctggagatcgagtgttgcaaactttagccaagtctggtgaaaattaggttcagttcagagcataataggtccatggcagtacaggtgcaacataaatgtgccacatctgttttggcactgcagctaagaccgttgcaacaataggaatggaagcgtaagagtcactgtagtccattgctaatttaaatgttgcccatcacaactagacaacgttttttcagaggcaaaagaaaagcgagcaaagaag

SEQ ID NO: 153799 - DNA, 614 bp, Zea Mays
ctttaggaatgagggtcatcctgctgagggagttgatgtatctgtaatacttgtgcatgttggtggactcccaatattttccagactcagagagatgaagatctctggctacatctttggtaggttggcggaaatcatggatcttgatcttatcaccagaaatatcattgtcagtgaatccaagaatgtgagcaaaccgacggtagctcaccttgtaccagctgccttcgatgtagaagttaagataaggaaagttgtagggactttcctcatcggccagcttgatccacagagttgagtaaaactgggcaatgacttcatcattccaatcatattggaatgtcattatattcttcatcttctttctttcacaggccctcaacgcctgtgtcatttccgggtccccaatagcctcacatccttcccagttgatgtagcgttgatgtagtatgggctgatgtttcttggggaggatcactgagttgtaaaaatccacatgctggagagtctagaaacggttcccatcaatcctggcatcacgaatgcgcaatgcaggattctggaaacggatgtcctgaagaagagcagaacctccgctggcagtgaaatcagta

SEQ ID NO: 153800 - DNA, 478 bp, Zea Mays
gctgcgtctcgcactcgagacgctgcccccctccccaacctgctccgccccctccgcgtggacgtcgtctcccgtcgtccttgcctcaccgattccctactccgttccaccgggcgtccccggggtccgcacccaagacgcctccccgttgtcctcgcttcctccctccaacgcctgttgcctgtctcactccacgacatggatttggaatggtgaatccctcactgaggccccgaatcccgcaaccaatgccgccttcttctccccctcccctctgcacgacattgcctccccagccggcggctgaggtgcagcgccaagtggccaagtggcgccgccaatcccccatgtgatcacatccctactcggcaacaacctcctttctcgcaccgctgacaccgcgcatcatccacatccacgcctctgtgccagtagcagcaccgtcggctcccgctgccagatccaggtatccagccac

SEQ ID NO: 153801 - DNA, 369 bp, Zea Mays
ataagtctggctccagcaagattagctaaagcagtttattcgctacatataatggatgctggcttccggtacgtcttcagcaagggctgctataggctcctgtaaatttagtacacgctgccagagacgccaaatataaagtttgtcggccgtccgctatgcactgttgcttacgtacggtcaccctctgtaatactcaaaattgaataagaggattatatagtaaattccttattttgtgcgccctatttacatcatgaaaagaacatacctataattaagagatgaactaaaacaaagtttgtcggccatccgctatacactctgctatgcattgttgcttacgtacggtcgccctcgccggtcaag

SEQ ID NO: 153802 - DNA, 716 bp, Zea Mays
gcaggtagtaggcaatccagcgcaaagctagcgagaagctgtttctggccgagatctcaaaccatgcctctcctctgttgatgtgacatatggggcaactgggattattcagttgaggctgaaactacaaccaacatgctcctccacacgccacttgttcctttttttaccaccaagtaagcaagtgcaacagagatcgaactcagttcacaattaatcagatctgacatattggtatgtttgacagaacctgcgactctgaacgtcattaagtggattatatatgtatgtttctcccttactttcctaatctagtactcattggctgcccttttagttctatagaccaaagtgcctacgaacagattagctaatcaaacatattcctaagcggccaaactggtttggcgtggctgcattccaggactgttccactggctatatataacaagtgaaggtgtgtaccaaaatacaagcagtttacagcctgctgggcgtacttggtttggtggtcaatttttgtgcttgggaggttacgctatctccagcagatcccttattatttcagacttctctctacaaacaatgtcatctacaattccacgtctcttatttgtcacactttactggagacagtcttatctctcttgtttatgctagccgagaagttttactagatattcagtgaaactgtatgcctaagggctacatatcac

SEQ ID NO: 153803 - DNA, 569 bp, Zea Mays
tcaggagaaggagaagaaggtagacgaggatggcatttccatagagttcagatagtgttcattacaagcataattcctgaagacagacatcatctcctacatatacttcacacacacggggacccaccaggcagactaacagatagataaacccaccacacagagacctgcatcaagcccactccggaccactcgtacgaacattaggacgacgcttgcgagctcctcggtaagtggtttcctttgtgtgcaccggcaacggaggtgtaacattccctggctcttgaagacctgcttgaccccaagcaggggcgaacggaaagcactgttggagagcttcacggtcctcccaagttgcgagatcgagcggtaggccagaccattccacaagcacttgctggacaaggtgatttcccttggtaatacctctagtttgaagaatctgttgaggaacactgaactccggaagagctgatggcaaggtagcagtagtggcacttttgaagcctgaagcaagccggagttgagaaacatggatggctgggtgtattttgctagaagcgggtaag

SEQ ID NO: 153804 - DNA, 1684 bp, Zea Mays
agataggttaaggttgtaaggcaccttttttccaccatacagttgcgaaaaagttggaatataaagaattcaaaacaatagatcaccttttaaacctcaaatgacgtttctatgatattgagggcattgtattcacaactagtggatgatgacgttattgggctagctaatgaccttttgtgatactaggtttcctataatcccctctattcaaggcatacctagatggtgtttatgtccactcaagtaaaacaccgtacatcattttttccacatcgtttctcaaaataaaataaagaccatgggaaatttatccaaattgcgtgtgagatctgtccaaacataggttacggttgtaaggcaccttttttccaccatacagatgctaaaaggttggaatataaagaattcaaaacaatatatcaccttttaaacctcaaatggcgtttctatgatattgagggcattgtattcacacgagtgggttttagagtacaactagtggatgaagacattattgggctatctaatgatcttttgcgatactaggtttcctataatcccctctattctaggcacaccaagatggcgtttctgtccactcaagtaaaacaccacacatcattatgccacatcatttctcaaaatataataaagaccatatgaaatttagcgaaattgcgtgagagaactgtccaaacataggttaaggttatatgacacctttttccaccatacagttgctaaaatgtaggaatataaagaattcaaagtaatagatcaacttttaaactaaaaatgatgtttccctgatgtcaatggcattgtattcacacgagagtgtattagaatacaactactggatgaacacgttattggactagctaatgaccttttgtgataacaggtttcctataatcccctctattcaaggcatacctagacggtgtttatgtccactgaaataaaacaccacatattaatatgccacattgtttctcaataaaacaaagaccatggaaaatttagccaaattgagtgagagaactgtccaaacataggttaaagttgtaaggcaccttttttccaccatacagttgctaaaaagttggaatataaagaattctaatcaatagatcaccttttaaaccacaaatgatgtttccatgatattgagggcattgtattcacatgagagggtattagagtacaactagtggatgaagacattgttgggctagctactgaccttttgtgataccaggtttcctataatcctctctattcaaggcatacctaggtggtgtttatgtccactcaagtaaaacaccgcacatcattatgccacatcgtttctcaaaataaaataaaataaagaccatgggaaatttagaaaaattgcgtgagagatctgtccaaacataggttatagttgtatgtcaccttttttccaccatacagttgtgaaaaggttgtaatacaaagaatacaaaacaatagatcaccttttaaacctcaaatgacgtttctatgatattgaggacattgtattcagacgagtgggtattcgagaacaactagtggatgaagacgttattgggctagctaatgaccttttgtgatactaggtttcctataatcccctgtattaaaggcatacctagatggtgtttgtgtccactca

SEQ ID NO: 153805 - DNA, 365 bp, Zea Mays
acaaagccacccatgtacgcagccggaacaatacaagcgtacgaatacgaccaacaggccacaccaccattacaattacatacacacggcgagggcatcacctattacacatacacgacgagggcatcgcctatcacatcggctcaaccttcggaatgatacccatctccctgtaattaaacaacattatcctcaattcctcaccctcaaaaagctcccgaagatccccttcgcctatgcccgcccaatttggcaaagacaacaattctcgcctaccaacctcgtctactcgatgtcggccacgctccattcccatgcgacggcgcctgccgctccgtgaaaattcacccacacactgctttccc

SEQ ID NO: 153806 - DNA, 891 bp, Zea Mays
aaaagttggtcctctttcttggagcctgcagacgaatggtgcagcggtgaaggcaggaggaggaggaggacataggaggggataggagccgccgcagacatggctggcggggtggccgttggggtcgtggcgctgttcttggctgcagcttcatttggggctaatgccaacaccgactcgaatgatggtgagtgagttctgctcctttttagtcgttttcttcttctctcagagcactcttggcttccatgccacgcctactgcagaagaaatttcgggttggcgtatatgactgttgactggtttcgtgatatttcggttcagatacaggtgttgagccacaactctatacggtttcttcttcttcttcttcttgttgaaccagttaagatgaccaggggaatgctatcccttcgttttgctacttgcgaacatgcatcctagttaagcaaaaatgttgtagaacagcaaagcatatgaaagaaataccggctgctgactggtttcttgaaatttcggttcagatacaggtgttgagtccacaactctatgatttttttcttttcttgttgagccagttaagttgaccagtggaatgtcatcccttcgttttgctacttgcgaacatgcatcctagttgttataagaaaaaatgttgtagaacagcaaagcatatgccagaaataccatgtttacctgaaacatcaatcaccagttattatttactgattcgtcgcaagccttgttcttacatatgcagtgaatgccctcaatgtgttctacacaaccatgaattcgccgccgcagctgacgaactgggtgtcccaaaatggggatccctgtgggcagtcgtggctgggggtcacctgctcgggttccagagtgacagca

SEQ ID NO: 153807 - DNA, 674 bp, Zea Mays
caaaggacattgttctcttttagagcttcgggccaactagtcataaaagttggcttgagccttcggggcttgtgggggatagatatcccctaggtcctcatgagcactaaaacatgtcatgggccgcctaataggtttccgggttagtcatcctatggtatggatctgcacgatagggccaatccaggtaggcccgacccaagttaacggagaccgacatccgagttaagcgccactaatgcctggatgtgtcggacaaggcagttgtaaacacccaaagggcttggcattcgacgataactaggacggttaggcgataaaagctccagatatgctaggacacgatttgaagtaaaggacataagcaagtagatagtaatcgtgacttgtaatgggataactctatctggtcgtgtatttaaggtccagggggacccccaaccatttgatgtctcatcacccacaacattagctcgccctcacccacaatcctcatcttgtaatcctcatactacaaaaatcaatatcaaacctccaataggaagtaggatgttatgcaattctaagtggtctgaacatgtataaacctgcaagtaattcacgcgtgcttctgcgcaaaccatcaaatcacgatcaacgatgatgtcctaaccaaaagcatcacatgagtaacc

SEQ ID NO: 153808 - DNA, 540 bp, Zea Mays
tcttatcaagtagacatgttgcacgttctttagttgtatggtatttctcgaagtaagattcagatcgaccataccaacaccacgaacattcgcatgcgcccctttccccatcgacaaggaggaatttctcttgacccgataagaagaaaacaaggaaatatcaacacatatgaatattggccccccttgtcaacccaccatttaggtgaatgacaaatggaaaaatagtaggtaatacattaccatacctcaaagtttttctgccaacctcaatcacatttgcatatttcttattcaacttccacttggcatccggacactcccttgaataatgttgatcttgccatagtcaaatagttgccttttattgttctttttcttcttaaaaggtgtggtattcttttggttgagctcttacttaaacttcttgtggggttttggggattttttttatcatatgggcactagaagtcccctcaacacttttatttccatagtgatcttttgctctcaccttctcttgaatatctaaagagccaa

SEQ ID NO: 153809 - DNA, 474 bp, Zea Mays
ctagcccgggctcaggagccagtatcccaacaagctgcaggtgcagctatataaaaagcgagcagctcggacatacccgcaccaaaaggacccaacgaagtccagccagctgagctgagcctcgtgaaccagagcatttgctccttcctcgtcctcctcgatcgacctctctccttggtgccgctgccgccatatatgaactgctagcacgcgcagcagccagcagctgccgaccggcctataatcagaaggccagaaaggatcgatggagaccatcaagtgctgcatcgcgtgcatcctgccgtgcggggcgctggacgtggtgcggatcgtgcactccaacggacgcgtggaggagatcagcgggggccccgtgctggccggggagatcatgaaggcgtaccccaagcacgtcctccggaagccgccgtccacgtgcccggccgacggcggcatcgtcgtgcagaagcccgt

SEQ ID NO: 153810 - DNA, 687 bp, Zea Mays
ctcgtttgtgcccggacgaccatgcagaggccccatcgcgccggcgacttcaccgcaaaatcccgaccgtagcaatgttgggttaatcacaacagaaagatgagcgacacgtaatccatgaaagcacgcactagagagggaggactcaccactgggatgccgcgccgaggcccgcccatagcgtgaggcagatccgcggcagcgcacacgcatcgctgagtgattgccggagcccaggactacccttccccaatcggacgccattaccagctcccccaatccacggcgaacctcaccaaccctccacgaaggcgtagacatgatctccccagatggatcgcgattctctctctcctcacgcttatgtcttcatggctcccaggtgccagtacaaggtggatgagggcacgaccggttttatataaggctggagcaaggcggtgacgaagattgaatctcaatcgattcctagtgcagtttgaggaacagaatccccaagcagactctaacgttcggcatgaccgacgcgtgaaggagggataaggatcttgatgaactggccacacctgtaagggacatgtagctgtggcactagccgagttcttcgggtgatttccgctacgctgttggtgttccacttccacgccgagaagggttattacggatgcccagccgcggatctcgcga

SEQ ID NO: 153811 - DNA, 569 bp, Zea Mays
ctagaactcccactgcaaccatgaggtgagaggagctattttatgctcaccagtgtttgagcttgtaatgtctttcttctatgtattcatcaatcaatgagtggcaggaggatgtaggatattatgcacaccatggtatgaacctctctaactgctcacgtgatggatttcactcatgccaaggttcaacatgaccaccgacctacgtcatgcttcctcctaactttctccctctctggtacccttggtaccatggtgttcttatgcaacaacatctaccaagctaggttgatgggtgtcttttcttttgagtttgtcgtgttttgctatgtagcatgacgatggtgatgtcaatacatttgtcaatttgagcaggtgcatgtatctaacacttgctctagcaactccgaccatgagccatgccataggaggcataggaaaatcatgcagtccccataattatggcctccaccaggtggatttgccttagtgggctcgcacaacatggctcacatagcccatcctttgcttgcacccccactagggtacataatgccctaggagtgcta

SEQ ID NO: 153812 - DNA, 473 bp, Zea Mays
gagcgtgactgacatgtctttggatctatcagtgtgtatatcaatgtgtaggctggtgttggctcaccgaggcatggtacctagtgtgcttcaccatttgtgaaacagcacctgatacatcacgcaggggccctcctctctacaaggcacttttcacggttttggcaagggtctacggcaataatgcggctcatgggcatgtgccacccgaaacaccgcacagcacagcacagcacggtggacgtaagaacaggacagagtcctgaacaccggatagacatagacccatgacaagtcggtggccgggggcgggcacatgtgttttacacatgcatgcagctcattagtttgttactaggtggatacctttcatctatgcacatgttcaccgtatgcaatgcaagtgcaacgatgatagattcagattagatagatagagcacgccgaaaggaatcctaaaacttccaagagca

SEQ ID NO: 153813 - DNA, 457 bp, Zea Mays
atgcgccctaggtttgcagttataataatacacggctcgaatcaagtcctattatatattagcccagccgagtgcctgtgctcgcctgcggtgaacatgtcaccgtggttcaccactcacgcaagcggacaagccaaacgcagccggaaaaccgcagggaactgggaaggaggcctggccggccattaatggacatcggcaagctagggctgattggggtgaacaagtgaggtagtgccaccgctcccttgatagtccgtctacgccgtacgttggctgaagagatctgaaacatcactctaaaagatctgaaatctgtgtttggtgatccgattcaaatccaaacccctcgaagccttatcatataaaaaaaaagataaagtaaaatcgcaaccccctcatattaaaaaaaatgaaatcgagatcacaaaccaaaaccaaaccagcatgggaaaac

SEQ ID NO: 153814 - DNA, 538 bp, Zea Mays
gtttaagttatcttgaccatgcactttgtggtcttttaggcgtgatcacttccattttatattaccacattcgcacttacccctgcagtcaatttttgtgagtggacatgattttcgggatgtgtatgagtgatgttggcgtccctgggtttgcgacactgctcttatccctggcaatttaagacatcttctagttttgctatcagtgtggaaattatcaggcatatatcttctgatggaagttcaggcctgaaccgctgtactcctagtcctaggcaatacaaggaagtaaattgcatatgcgtacctgaatgagcagacggcaaccagccgggtctccgctctcgccaggcgaggcggcagcttgtgcgacgccacagccacgatgggcaatcgcctcctcgccgccgtcagacggtagtccagttcgcggttgccggttgctgtcaggctcccggccccgaatcccgaacggattcgccctcctcgccctaggccgtttgcgggccgaacgccgtgccacatctataatccccgg

SEQ ID NO: 153815 - DNA, 746 bp, Zea Mays
atgttgaggaccgtgcggatggtgacaggcttcacgatcggactgaaagtctcatcaaaatcaacctcgggctattgggtgaagccgcgaaggacccaacaagctttgtagcgatcaagagtaccatcagaatgtagcttgtggcggaaaatccacttcccagtgacgacgttggtattcggagggcgcgggatgagtgaccaggtatgattgtcgatgagggcctggtactcgtcctccatcgcgtgcctccaatgtggatcatcaagggcacgtcgataagaggtgggtatgggggagacaacaaccgcttgaaggtttaggcgaggttgccgaaacccactcttagcccgagtgcgcatgccatgaaggttgttgactggcgcagcaggtagagcgccaacagggagacgagtatcgacgtcgagtgcccgaggcacacgggcagagcgctggccagccccggcctagcgccaggcatccacaatgcgtggagcggcaccaggcgcagtaggcggtgaagatggttggagcggtgacccagccggaagcccagaaggtgtggtagcctcagatgatctagcgccagatccaggggaggtcgtagacggcccaaccgttgaagccgtggatgggggagcctgagcaccaggcggcccagcactgcctaccgacggccgagccaatgaggccagggatgggggatcccgagcaccatgcgacccagcgccagagggtatacgtag

SEQ ID NO: 153816 - DNA, 927 bp, Zea Mays
gtcattatgtttagttttgtaccttattcattaggtttagttttgtaccctacttgtcatgtttgacttattaagggctcggagtttggggattttgtttacttaccatccattggtactagaggtggtattctggatcattctgtgtcagtctgttttatgaaggaaaacagcaccaccttgtggttctcgggggtctacggcccccatagagatgaggagaaattggcttttctagaagaactttctcaggtcagaaccagttgccctggtcctgggtgattgcaggggacttcaatatgatccgttgtgctgaggacaagaataattcgaatcttaatagagctctcatgggtagcttaaatatttggattaataatcactctctcaaggagttgcctctaactggaagaagattcacctggtccaaagagatgtccctaccttagtcaagcttgacagggtgttctgcacttctgattgggaggccttattcctagattgttctctgcagagtaatgcctctagtatgtttgatcactgtcccctggttctgaggcttaatgtgggctttaagggaaagaagcgtttccactttgagagtttttggccaaagatgcaaggttttcaggaggtggtgtctgattcctggaactctagtatttcggttttttttgtcccatggagagattatctattaaattcaaaagacttgcgaaggccctgcagtcctggagtcaaaaatatgtgggtaatgtttcttctcaacttgctttgaccaagatgaccttacaccttttggaaattgtcatgtggggacaagtctacactaggaggcgccgggccagggacgtacgccgagcagaggaacacgcggccaggggggacacacgcacagctggctcgagctgatcgagtagataaggc

SEQ ID NO: 153817 - DNA, 752 bp, Zea Mays
ttgaatagacctccaatgtttcttacctgtattagccatgaatctactaacaacactcgatgagtgagataaattaggacgagaaaaccatgacatacataaaagaaccaactgcactgaaatatggaacattaaacatgtactcaatatcacatctaactttggacataaagttaagaataatctgaaatatgtagctaatgaagttagattcgcgagaatggtaaaacttagagttagattcataattttgatgcacttgatagggtgttccgacaacttgagtttagtgaagttagaaaaagttagtcactcctattgctctggttacacaagaatataatttcgttctaattgttctttgttctttccatcacttctttctattaccatcgatgcatcacactactatcttagaagctgcgtgactagccttgccctgtgcctagtcttcacaatcatcgatcacaagcctcgcctcatcatgcacgctacgccactaagtgggaggtatctggccaagtgccaaccccgtcgcatgccaagccctaccttgcatgccgccacatggagccatgttagtgctagctaccagaatgtgcggcttgacgacgatcgacaaaacagggatcgcgcctacgacgtcacccactcttttatacatgtgaacatatgagaatagcactaccaaaatgttgtggcctttttggtttcatttgttcctcttatactggtgtctacacactctagcc

SEQ ID NO: 153818 - DNA, 450 bp, Zea Mays
aattccgatctcctgctgccgctcactaatcactgccggatctagactaggagcgagaggaaggctagggctctttacctgactagataagcacgacgcggaagacttgttgagacctgaagacagcatacagcgaaaatctggcactgtaaactggaagaggaccaaccagtgcccaaaatttccgattacccgcgggaaaaactccatgagattcttgtgcaactcgcgaaccggctcacaagagtagcaacgctctgatctcggcgagattcggtggcgggtgaaactcacggtagctcgcggattcaatgaacaaagcacggaaacaagagctagcactagatacgagttgcgtaaggtgatgcgggggggcctggtcctcattttatagtctgtcctgacgtgggaagcacgcggggaaaggagtccaacggatgaacgccatcg

SEQ ID NO: 153819 - DNA, 404 bp, Zea Mays
taaacgaggttgattaaaaattagtgacctttacattcatagctatcacgtgttaacgtccgcactagtggtcgagcagacgataaacacctgggtgttacaattggaatattggagaagatcggcataggcggccacagtatcagaggacgccggacgctagcaccaccgtgatctttgtggttgctacttctccgctgatgtgctactacattcgctccatctagtattcttaggtgaaggactgaaggtatgatccgctgcctaactttttgcctcccatgtgatcttgcatgttcatctaatttttattttttttctttgacttgcattaatcaagccaacgccgttgaagcagcatccgttcacatttgaatttcgtgattatcttattataattgtat

SEQ ID NO: 153820 - DNA, 625 bp, Zea Mays
tcgcagtagttgctcgccggcctgatctcctccttgtagcacaggcaccacgcgtactggtcgtccggcgccgtcgcccacccgcctgtggtctcgtgagagatttgcgcgagggccgccgtgacctcgcgtttgcgggtgctggggtcaccaggggcaggcctcctccactgcccagggccgccgtacctcgcctctgctacgcggatgacaaggaaagcgaccacggaagcaacagtccacaaggcgcaagaatacgccattgtgtctgacgaccagctttgtgtgtactttcattgttctgcctcacctccgcttagatcttggctagcttcttaggcttctcttcctcctggccgtaaaagagagggactgagggaagagatcttagctagcttcttatgcttctatttcgcttagatccttcctgttcgtcttcgttgtgggctactcgctcggcctcctgtcgttgtccagtagcgcgtgaaaaagcatatatgcgcagggagagaaagatgcggagaaattacacacgtcaaatttcccttgctcgacacaacacgatccttaaatctgtccctgtttattatattctagtccaggatcaaaactcacagcctcttcc

SEQ ID NO: 153821 - DNA, 707 bp, Zea Mays
tactaattcataatgctgcaccttacaatatttagctatatgtaatatttgatacaaaaacaaaatcattctagacagattataatgacatctcctgaataaaattttagcattttagttgatattgttgtacatcgcatcttcatgagcaatgctaagaaaaagtacttggaaaaaagtcttgtgtgcactgagtgttgagcaccatatgtggcatctgaagaggccagacggtccacggggtagctcggatagtttgtgagaagatctgatcaggttagataacccatttttcggtgcgtgcttatccaactaatcacgcggattctattgaggaacgtctaggaatgggtccataccttctctagatattgaaggggtacgatcgattgctcgacactaacaatcgaaccaatcaatccatttatcaattcttttacttgccctaggagaagtaatctaggtctagtttagctcttcctcaatcccaaattttcacttctcttcgactctacgtcgtccagggatgtcccaggtggcctaccgatcctgaggcactcctccctgacgggatccctacggcgggcgagatctagggtaccatgccgccaaaagactccatgcgccatcgcggaccatccagacctatgcatggactgtccggtttgacgcaggggaggagccgctcctgcagcgaggtcacggac

SEQ ID NO: 153822 - DNA, 541 bp, Zea Mays
attgtgcattgccctggtttattatgtgaaaagttaatgagtactccctccgtctcaaactagtattcattttggctcttgtttttaggttttgaatatggacattgactttagagagctcgatactcacaacctttcacataatgcaacgaggcattacacaacacatagccacatagggcttaaaattagcttgttgactttagtgagctcaatatattactccctccttcccaaattaaaattcgctttttgaagtaattaatatattcctacattgtttgatgtatgcgttttataaatatgtatagatttatcatcatctatttgaatcaacatcaacatgtcttgttgcatttgggacatatattaattacttcaaaaaacgaattttaatttgggacagaattcacaaagtattgaagaaaggattatggataaagagttaatatgtttctacttgagttctatactgttatggtcactattcaaaaccttgatttaatatagttatacctgattacatatttgtttcacaatg

SEQ ID NO: 153823 - DNA, 899 bp, Zea Mays
aggatctcatctcatgttacattttcaatgccttactgtaactctgagccacagcccacagccaccacgcctcacacatcttgatccttttcttctctggcgggacactccttaaaaacggttttcaaagatggacgtccctttttttctgtagagtaagcttctgattaagtcggctttatattgcctggacatatctcgatcggccgtctttgtatatattcatattgacaggtagctttaaagcctccacaatttgttgtatagaaacggctcatgttactcaatcgtctattatctgtcgtgattgtgattcggtttgcgtggaccaaataataacggaacacattgttctgtactataagagctagtttgggaaccctattattatacggggttttcatttttccttgagaaattagtttagaaaaataagaatctcttagaaaatggagctcctaaacaggcccgggccaaaggcatgtgcagtcagttcgcccgaacagggcccatgaaattatgggggcgcacaaaatttttcctctagtagactatctagtacatatccgtctgctagttgcgttcaagcgtgtgacaactgacaacgtgactgtgtgagtccctcactccctctcaaatcctgtcgttcccaattcgctctggtcccctgctaggctgctcctcctaattctcaatcacaattctcctgacatcaagcctgcaaaatcgtcgggcggctgctgcttgccggcccctacctaaatgcccctacgacctaatttgcactacacagcaccaagaagtacaacactaaggcactcatcaaggcgagagaagcaggtaattgctcaagatcatctattcataattcatctaatgtgtgtaggagtttagctcta

SEQ ID NO: 153824 - DNA, 372 bp, Zea Mays
gtgttaagtttctgtatagcagaatcatcgttaggctgcagctcgaggacgacctgcttgtctagaaggggtgtagtgtcaggtcccctcaggtaggttaggtaaagataaggctagttcgggataaaattagaattagagataagattatattttgtgcttagaggtcaagtaaccctctctatataagaaggactgtatcaattgaaggtaagcaagagattagaagcaagccttcttcttgcctggccgtgggcaaagccctatgcccggcctccccaagcgtcggggtcctggccctagaccccaaaccttccactcgtattaaatcctatcaacccaccagattctgatccataacagatagtctcc

SEQ ID NO: 153825 - DNA, 414 bp, Zea Mays
ccccttagtatagcgctagttaatttggatttcgggcgctgtgcggccggggcatcgtgccggcggtggtctctgccgtcgggtctgtgcgtggtggccggtgtggtgtctggtgagggagataggggtaggtgacgatcttttggccgtcggatcggtggtggaaggatgagatcacaccatcacataccctttcgcccgtcgaattcgtaccgtagatcgtcgatcggtgggtggagaacggttgggaccttattaaatcctggccgtcgatcttgatctgatggctactgtctcataccgctttaataaaatcccgatctaatctccgccgctgatgggggatccaacgactcgcgtgtgccgacaccccttcggcctgtgcaatttgcagataagcacctcgccttatta

SEQ ID NO: 153826 - DNA, 316 bp, Zea Mays
actcctaagaaagcaaaatctagtctcatcgaggggttttgtgaagatatcggctagttgattttctgtgtttacatgacataatttgatatctccttttgcttcgtggtccctcagaaaatggtgtcttatgtctatgtgtttggttctagagtgttgcacgggattgttggctagtttaatggcgctctcattgtcacatagtagtggaattcttttaaaatcacagccaaaatccctcaaagtttgcttcatccatagcaactgagcacaacaagcaccaacagctatgtattcggcctcggcagtggaaagt

SEQ ID NO: 153827 - DNA, 426 bp, Zea Mays
cgcttctcgccaagggggttttgttgaacattggagtttgctttgtgactattgaagacgaaggggccttcctagagttgatcgcccagagtaattcttaaaggtagagaatgccagtggcccaccagctagagaggcgtgcaaaactataaatttggagatgaaacccatttgacattcttgaatttatttgtaaatgaatcaagtgttgaattttaaacatggaaaccaatctttaaatgatgccatttgcaggtcgattgatagtggccatattgtttacataataagcatcgaatcagttgattgcacgaagaaatatcatgcctcacatccacgtgtgtaggccacacactaacttgggctcaaaggcctcttgggcctccaaataaaacgagaattctgagccaatttcagagaaagccc

SEQ ID NO: 153828 - DNA, 866 bp, Zea Mays
ctcactaccggtaccgtgagcataagacccagggcaggcgaagtggccgcttccatcagcagaagcctacgtgcagactcagctcactcccaatatcatccaacctgcagcccagggcacggaccaactcccactccccgtgcaggcgcactatgcataggacggggaaacaggcatgctaggccaacaagacagcacgatctgggaatcggattacgacccgtcaccagagccattcatggaaccaagatgcatgccaatcctgagcagtaccaccaacaggtagtaggagctagaagaacaccccacaaaaccaaaccaaccgcgcagcaataacaaacactcggtctatttgagcagcgtggctgcctctccaggcccggtaaggaagcacgaacacccaaaaataaactcaacgcactgacctgtatcggattgatttgatatcaacacaaagaaaggcaccgtttgctaggcagaatgtggcggaggctgtccttttagcatgcatggctccatcccacttgcaaagttgctgctccacaattgctagtgacctaagctcagtgcttccaccgttatgacctgtttacacgccataacgaacttttattatagccacaagattcaggaaggtccggcacgatagagacacttgcttttacaaattacaggggagaaatccatgtgaattaggttttattattaccatggcagtcgctgtaagcaagaattaggtttcattataaagttacttgtccaatgaacttaccatgaagtgatcaaactcgattgctggcacagatggacaagcaagcagcactgactctccatggtgattgccatgtggctcaaaaccagagccc

SEQ ID NO: 153829 - DNA, 321 bp, Zea Mays
tggcctcctgttcccagcgcctctcacctaccgtgtgccagtccccctcacgcgccacgccccccctcggataactactagttgccgtaccgtgggagcgccgcctcgagtctcaccaacaacacctgctggtgcgtagccgcgcccgcgcccccgccgcggctctctggttggattcccgtgcgggatcggcgggcgaacctccgactcaccgccgcgaccgttcccgcattacaggggcgtccgtgcgtgcgtgctccggatgggggcgtcccacgacgacgaggcggggccgctggcgagcctcctggcggcgcgccg

SEQ ID NO: 153830 - DNA, 393 bp, Zea Mays
gaggctgggattttacagtaggtcctaaaagttgattatgtccttttagtcgcttgtgatccactatgttgcaggcagcttgaagccttagctacctacctttttttgctgttagttcttactttgcatcctgagtgtttgccattcctaggcttcttgctgctgctttttttggatattatttatgtgagaattgaagccatttgttttacaatttggtttcatgtaggatgatctgttgattggtttggatacagctgctaaaagaaagttatgttctatctgaatcagtgcgtttgaccaccttgcatagttcagtttctttgttttggctgccgtgttatgacttatggggttggaatcagggagcattactgcatctttgcactgcac

SEQ ID NO: 153831 - DNA, 496 bp, Zea Mays
aagaaaatgaactgaaccgaaagaatcaaaataagcaatgtgctaatatggaacgggaaatctagctgaacagaaagaatcatctaatgagaaatgcacttcttccaatcagcctaaataaattagaatagccataagtctaggaccataacgcataggaaaacacaagattcctgaggaaaattgctaagcaaagtcgcaaccaaacagtaacaaatgtccaatgataatgtaataaacattcaaaatttcctgataaatcaaagtaggtgcaaagcaagcaacggtgtgccttgaaatggaaccataagacacagcaatgatatgaaggctttaattgcaaataactaaaccaaatgcctcttgacccatctaatcatatacactgagacaggagcaatgcaagctcgctgtcagaattaaaataccccaagaccatcagacaagatgaagagaatcattattaatcctaggacatctaacagataatcgtgcg

SEQ ID NO: 153832 - DNA, 479 bp, Zea Mays
cccccgaacacaacagtcttcccaccaaagggcagcccaagccgtcccattatatcacgcatgctattgtctagcgcctcaattgcttgtctcttagtcattgatgcctcgtcccagataatgagcgatgctttttgtagcaactttgctgtcccgctttgtttcgtgaagctacatacaacaccttcatcaatagtaagtggtatcttgaagcgcgaatgggcagtcctccccccaggcaatatggaagccgcaacaccagatgtagctgttgcaactgcaatcttgtcctgactgcgtagttccgcaagcagtgccttatacagataggtctttccagtcccaccaggcccatccacaaagaacactccgtcgttattggtgtcaacgacagataggatcttatcataggcagacctctgctcctcgtttagggtttctttcatagcaacgtcttctgtcgtcggcttgatactttc

SEQ ID NO: 153833 - DNA, 486 bp, Zea Mays
atacctgcaatttccttatacaatgtagagagaccatctgcaatactgtcgcaatcagcttgcaacccctcatcacccagaacaacttgaatatcagtgttcatgatttccacatcaataaacattggtcgtattgcaacatagtgttgcatagcactggttccccggttgaactgtaatcaatatagcataaaaatatttttttaaacgaaatagtattatatgcctgtatagattagcacctacccttaaattaacagaggtataaaagcttaaaccaggagcaaaaggtaaatacatattcagttccacaaaacttactcatgcagaggtttacaaatcaatttatccagttagcctttaagccatatatataataagtaagctgcctaagctacacatccaagcccaacaatttcttccatttagcattgatgctctcaatattttaactgacaaatcctagtttcaccatcacatgtgtca

SEQ ID NO: 153834 - DNA, 706 bp, Zea Mays
ggcgggagcgttgacgtgtctgtcttaacgatggagacgttataccggatctggttggtgtaaggtctggtaccgtatacgtagccactttcgaggtgccgtggtgtgtaataatcatgggaggtgaaccgcttgccgttgatgttgatgttgaactggcgaacaacgccggcgcccgcctgcagcacctcggagaagtggaagaccggtatgtacccaagcgacgagcccttggagttccaatagaagttgatgctgctggtagcgtcacgcggcgtgatcgccgtctgcatcaccttcgacggcacctcgaagaggtcatcatatatgttccgcaccttttccgtcgtggatagcaccagccagtcgatggcgtcaataatcataggtgtccataatctgtcgtattgatcgtcagggtacctgctggccgttcaatttttttcacgggcaacacttgctcagtttaattaaattgctggatgactttgatttgagatacaagaaaagactcaggccgagccgagatttttttttaaaaaaaagacgtttcgccggatatatatgactagtctgaagcctaacccggtcggatatgattaatctagagaaactatatataggtgaaatctggccaaattatagaaaagagtattaccatatacatcacattaaaatatataaattatgaaaacatatttgataa

SEQ ID NO: 153835 - DNA, 287 bp, Zea Mays
gatgatttttctctctgtctctccagcctaatgcaacatatgacaaagtacagtgacatgacatcagtaagaagaaactcatcgataagttcctccacgccatccataaaaagtgcatgtaggttgccttagtgatgaagacattgctagacctctttgaggtgatgatcgaggaggtaattgacatgcacatgtcacataaacacatgagagtgacatgctggttctattcctagtactcaggggcatcaaggtaaactccctcccacactggttgctctgctatt

SEQ ID NO: 153836 - DNA, 997 bp, Zea Mays
taaatttatattgaaagacaacacactctctaggtatcaccttgcaatcaagcatgcttgtttaccctctctttttacgaggagaaattcaatctgactagagttttggctactattataggtcactaaatgagattctcttccttaagagagtgttggatatcaataggtcaaaagctaccacaaactacaagactttttctccctcctgattcctattaccatatccaaaacctttatgaaccacctcaaaacttgcacttgttctgcctacatgttcaattaaggcctcctatgaaaagcttcttggtagtaggtatagctctaaccttaccatttaagtttttctagaaaagtttcttagcactctcattctacttggtggacatacacactaattatgttgaagaacatatcacccactgcaagcttgactaaaataaccctatcttcttgccttctcgcatccaccatattcttgatgctcttatcagtcaaaacttctactccatttctatatacattttttcctatgtaccaaagcttgaaaccgatatgtccatcttccgacccttctatttagtatcttggacgcaatagatattttcacacattatgttgttgccttagctaacccacttaacttgtaaatgattctatattccaactacctaaacgagttttacttggttcgactagctttcttaccctttttacatgttcatgaaaaatgtaaaataaaaaatgttagaaactactattctacatcaccattttcaacggagacaacaaacagactattctgcagtctgcaccaccattttcaacagaaacaaccaacgaagcatccaaagggcaagtaggaaaaaatccacgtcattcaactaagcattgtttcacaatagctttcaacacgggaaggtttccatctgcatacgactgaatattcacttcactaagaagtgaactttgagaacaagctcactgctcactttca

SEQ ID NO: 153837 - DNA, 339 bp, Zea Mays
gcagggagaagggaatgggaatggcagaacacagaagcggcacgttctttgtgtcctcggtggatttgcatttggtttgcgtaggcttcctcgaacgaggtggccaccgtaatgaccccgcgaggtccgggtatcttcaacttgaggtaggtgtagtttggaatcaccatgaactggacgtagcacggtctcccaaatattgtgttgtaggctctagggatgtccatcacctcgaagcataacagctcggtgcgaaattagacggagcgccgaatgtaaccggtagtgtgattcgctcgagtgggtgaattccttggtcaagcgtgacgccttgaactc

SEQ ID NO: 153838 - DNA, 397 bp, Zea Mays
ttccagtcttttgacttatcataaggacagttgtatttcccccaatctatactaggagtgagtgatatatcatatatgcatagctgtacatttttttgtatgttcaaacttcaaagtatatgcccacagcccaagctatgtaatgctagacctacagatttggttagaggtgtgctaggaggcagctgcttggtctcgtgcatgggtgtgaaactgtgaatgtcatgagtatgctgtggatcagtaaactgtgtaaatatggtttgtgcccaacgatattttgtctaaaatagttatcttgttaacttttctctttagatatggctgcaactgtgtaaatggtttgtgcccaacgatattttgtctaaaatagttatcttgttaacttttctcttta

SEQ ID NO: 153839 - DNA, 997 bp, Zea Mays
ttccagattctattatcagccacggaccacggaatgacctactccgtaccctacttcctaatgcagactatatatgttctgggtttgtacgctgattatattcaatatctagcagttctggtgagcattattgtttagacaatctcttgttatgtaaaaatttaaagagatagatatgaccaagaaaatatctgaatagtaacatcctacacaatctaagattggctactaagatcgggaaattaaaaagaccagcgtacttcataaaactgaaatgcaattgcgcattttcaatggctcttgatgacacttaacttacttcatatatcctcgtgctgccagcctaaacatgacttgtgagatcagcgcttacttaccttttttctacctcgctccatcttttccttcttacctctacatcgtcttttataattactcttcttcctctccatccatctatggccggcaaaaacttatacaaaaactaggggctttatggccctggatccgcccccgtgtgagaatgtggcactgcaattctatgtgtgacacaacatgggcctagaggtcaactagagccaagaggatataatcttgggatgagaattccagtatggcgcatggcatgtcactaccggaatccggctctttatcgagtgtccactcggcaaaaaactcagttccggtagtgtgtatatatgatggtatcatttcactaaccatcaaagctgtgctagaatcaagcaaatgaagaagattcaaaacattctccacacatgtcgaccacctattattatataggtaggacaacaattttactacttccaataaaatggtcaaacatggagtcatacaattaatttgaatccatgtaaagggctcaaataaaacaaattccactcaactagtaactttcaggtactattccaacaagtgacatacgtatcttgttaacatcattatcacaacgatacactctgtacttgtcatttctagg

SEQ ID NO: 153840 - DNA, 1436 bp, Zea Mays
aaaattcagcctattttttgtctatccattttttaggcccgtctctctctaactaccagacaatagagactttctttgtccagacttcatctagaccaatatggagtatgaatcctaatctaaacaggttcctcagatcatgagtactctaaaattgaacccatatataataatcaaatagaaaaggtaagagtcgttctgctatttattttgctcgactttctttatttagttctctatcaagagggagacaaaaaaatcatgtccatgtgttccttattttatattctccgtccgtttacaaagcaagcgaactcccaatttttatctccttttttattcaagcttgtagagttcaaatattttacagaaacgtgatggcaatctttctaaatatttttgtacaaatattatgtagtagtaacatgttcgggcttgaactccgggtgaagaacgacagagatatatggtatatagcctgagacaccatacatacatgtatataatgaataaatacatatatattacgccgtaccattattgttattctttagtttgatttgattgagtgaagctcttcagtagattcagatgcaatgaactgcggtgtggtgtactggtatgacctcgtgacattgaaaaggcggcgggcacgaggacgaccatgaccaacacagcatcgtggtgcacatgctagacaacaagcgtggcatgagtcggacgtaggtggctagaccgaggtcgtcacgggagtctctaggcacttgacctggttcgctttgacgacagacgacgttggcaataagttgtcatgtcaaggccatcggagtagctccaatatgacaggatgttcgttttgggcaactttaggtgcactctaccctatgactccgcaatttctagccacctcgccgtggtcgtatctcggatgtggctagacctttaagtttaattccgcaattatttcggtcagccaacgttaagttttagaaaagactattcgccccctctagtccaccatatagaccctacagcagcgaccgatgacacccataagtaatggttataactagtgcttcatatatattgtatgcatctcgttcattttttattaatcatatcctagaaatgatgttcgtacctaggacgatcggatcaaaagttgctgcggcattaatccatgatcggaatgctcgacaccaatattgggaaccatccacaagtgtgtcaagtattgctcaccaatttctaaaatataattgcgcctaaaaataaaggactaataaatacatcaccgaacatacatcactcgtcaacacaagacatctcattgtttattattcaatatattgagtaggacactatatatagattcaacacatacacttaaatgtatgaaatcaaccatgaaagcaagatcagacatcacactcgca

SEQ ID NO: 153841 - DNA, 841 bp, Zea Mays
ttttggttgaaggaagtcgctttcctaggacatattatcacaaatggaggaatcaaggtagaccccggtaaaataagtgaaatactaaattggaagcattcaaaagatgtgtccaagatcaggagttttcttggattagcaggatattatagaagatttattgaaggcttctctaagctagtgaaaccccttacttcactgctggggaaaggtaaggagtttaaatgggatgaagcttgccagaaatgttttgaagaattaaaggaaaagctaaccactgcgccagtcttagtaatgcctgatattcacaaaggatttgatgtatattgatgcatcgcatctaggacttggatgtgtgttaatgcaggaagtaaaggtagtagcttatgcctcaagacagttgtgaaagcatgaaaaaattacctgacacatgatttggaactagcggatgtagtacatgctttgaagatttggagacactatatgattggaaataagtgcaaaaaatcttcattgatcacaagagttggaagtacatattcacccagaaagaactcaacctaagacaatgaagatgacttaagttaataaaaggttatgatttggatatacaatatcatccaggaaaagcaaatgtagtggcagacgcattgagccgtaaaggtcaggtaaacagtattgctgcttatttgatacctcaagaattatgttgggaaatggaacaacttaatcttggtatggttaataatacagaagcaaccgttatggaagtggaatctactttggaacaagagattcgtaaaggacaggaatccgatgagaaaattaaggaaattaaaaa

SEQ ID NO: 153842 - DNA, 620 bp, Zea Mays
cggcaggacttcattcgaaaggaggtccggaagctgctagacgccggcttcatcgaagaggttcatcacccagtgtgactggcaaacctagtcatcgtccctaaggcgaatgggaagcttcggatgtgcatcgactacaccagccttaataaggcttgtcccaaggacccatatccactcccacggatagatcaaatcgtggattctacctccaggtgcgtcctgttgtccttcttagatgcttactttggtttccatcaaatccatatgtctagggaagataggaagcataccacttttgtaacagtggatggactttactgctatgtcgtaatgccttacggtctgaaaaaatgccttgccgacatttgtgtgggcgatgagtaagactttcggggacctgatcagggacaaggtggaggtatacgtcgatgacctcgtggtcaagactaagagagggtcaaccctagtggaagacttaaccctggtcttcgacaagctgtgggcaacgcacacgaagctgaacccggacaagtgcgtctttggtgtctccgcaggaaagttgttgggtttcctggtttcgcaccggggcattgaagcaaacccagagaagatcaaac

SEQ ID NO: 153843 - DNA, 343 bp, Zea Mays
cgaaccaaaattcaacttcgaatccatattctcatgaaaacttttccaaaatctggaggtaaactgtgatcctctatccaaaacgatcttcttcggtacaccgtgtagagacacaatccgagccacatatactctgccaattgagatcccttataagtagtcttgaccggaatgaaatgagcaactttggtcagtccatccacaataacccatatagaatcatatcctttcgagatgcgaggcaatccagtaatgaagtccatatcaatctcttcccactcccactcgggtatctttattggatgcagtagtccagttggcctctggtgttcagccttaactc

SEQ ID NO: 153844 - DNA, 564 bp, Zea Mays
cccgtgagccggtactcgcgctagccggtgcagtgcggcagcacctgagccacgccgaccgcagggccacgcccacggccgggctagaggcacccgcacgctggcagggttgccgcgaccgcgcgcacgctggccgcgcctggccacgagcaagggcccgcagtacctacggggaagaaggctggggaagacagagaaggggtttctcacctgcgttgagagagctccggcgacggcgcagtgcaggggtggaagggcgccaggtgtgagggagatggagggctgctacgttctgggaatgagggggaagagagagagcgtcatgtgtgctacgcaaaactgcatagaacgtggcccttttttgtgggcaagtgaggtgaggagaaaagtggggccgaggtggttactgtttttgtcgtgggttcgaactcagccgatcgagcggagggaagtttggaaatcaacccaaggtagagaaaatcatcacgacatatgagtttgtaccataaaaaatgaggataatgatagatggcccagagccacggtctgagaagatgaagctgg

SEQ ID NO: 153845 - DNA, 613 bp, Zea Mays
tgttaggccacggtggacaccaagctatcatcaggcctacctttaaatgtcaggttaggacgcccaacgtgcctgagtagcaaactaggcatggtactatcattgggtcatgcttagcgcatgcaaaaaatgtggccttcaagctaggccatcgggctacaagatacatgcacatctatactaatgcatgtgcccacatgtcagaggcagtgaaaggggacaaattagcgagtagaccctcacgtgtcggtgggagatgggttgggaaaacagtatatgctatgagacatctaaggctctaagcacgaggtgagtggtggaggattacgggagtagtgctactcgttaatataatgcaaaaggtttacaagggtatcgattatggtatggtagtggtggttggtttttgctggccctagtgggatgttcaagtgggaacactatttagttaggtgcaaccatgggagtgttagatggttgtgtgcttaatcaaccttcaaagctcgaggtacgtggccctgacttgggggtcctctagctctaggatcgcccgcgacattactaccgcggtagcgacagtttgactagcacaaggaaaatgccaataccattg

SEQ ID NO: 153846 - DNA, 422 bp, Zea Mays
ccccgacgccgttcacacgcggtcgtgctctggcgagcacctgtaccggccgaacggggcaacggctgggttctccgagcaacagacaccgaattggatcgaccctaagcctttcccccaacccaatttcatctaagaccacctaaggagcactggccacggcaaccgtgatcatggcggctatacggtcgtgttcccggcgaccagaggactcctagtccaattggatggtccagtaagcatcgcagacatgtgagagagcttaaacgagggagagggagggttggactgaccggaaagggggctggcctcggcgaggttagttcgcggtgttcttgaaccgaattggggagaatgcgcaattcgggcgtgctggtggacgatcgagggtgggagcgggtgctacagcttcacaactacat

SEQ ID NO: 153847 - DNA, 3648 bp, Zea Mays
tgttaacagaattagaggatatctctcaggagtattatctccttaacaaacgcacgcgtatctggtgtaatctgttatgggcaaccgggagctgcgcctcccttgatcaccgcaagtcggttgtacatgaattgtaatcatctctataaatagatagagccacagccgtattgtgcgtggcgtcccaaacattttcacatggtaatagagccaagatccaaccaataaacaatggccaccctttcttctaccacctcctccctcacctcctccagcgcttccaccatacaatctactcctgctcctctccatcagatcgttaccatcaaattaaccaagaagaattttctcttatggcgtgcgcagctgcttccttatctccgaagcaacaaactcatgcgcttcctcgatggatctcaacccatcccgcccgcaatggttcctgcgtcaacaagcgccggtgccgaactcattgtcaacccgacctatgagacctggtatgatcaagaccagcagctactgggcggtcttctgtcctcgatgacggaagaagtacttgctgatgttcagtccgcgacaacggccaaggaggcgtgggattctctcctgcgcatttatgcctcctccacgcgggctcgcacggtgcaaatccgtgttgagttggccaacatcaagaagcgggatctcacggccgcgacgtacttcgccaaggtcaaggcgctcgctgccgagatggcagccgcgggcgcccctcttggtgatgaagatataatctcatatttgcttgcaggacttgccaccgactacgatgcctttgtgacctcgatcaccactcgaagtgatcgcctttccctggatgaggtttattctcatctcatggtgtttgaggctcgactccaacgcaaccaggcggagatgcagatgcatctcaattcctcggccaactacgctcgtcgcggcggcaacaacttgcgtggtcgcggtggccctcgtggtcgcggcggtcgcggaaactactcgcatggtggttcttcgtcgcgtcctacagatccgcctggtgctcgacgtcctgccaccaccaacaacaacagccggcccctttgccagatctgtggcaaaataggccacactgcggtacgctgctggtaccgtcatgatgactcctacaacgaagatccaccgatggccaatgtcgcctctacgttgccttcatacaagcttgacaactggtacggggacacaggcgccacagaccacatcaccaacgaacttgatcgccttgcggtccgagaacgctacaacggcaatgaacaagtccaagtgggcaatggtgcaggtttgaaaatttcacatatcggtcactctactattaatactgctgcacgtcctttatttcttcgtaatattcttcacgttctggggattaccaaaaatctattatccattcatcgtttcactcgtgataatgactgttattttgaatatcacccttggaattttttcataaaggaccggcaaacgaggagatgccttctggaagggcaatgtgaaggtggtctctatcccctgacgatctctagcgcacaagacctgacgcatgcattggctgcccgcaaaataaatcgtgatcaatggcatgctcgcttaggtcatccagcttcgcaaacagtccagtccatcttacgtattaataatattatgtgttctagtgagtctttttcatcagtttgtaatgcttgtcagatggctaaaagccaccaacttccatattctaggtctatgaataatgcttcagctcctcttgaattaattcactccgatgtttggggtcctgccgctacatctgttggtggttatcgttattatattagttttcttgatgatttcagtaaattctcttggatttatcttcttcatgatcgttctgaggctccacaaattttcttgcaatttcaagctcatgttgaacgccttttagattctaaaattaagtgtgttcaatctgattggggtggtgaatatcaaaagactcataacacattctttaaaaagttaggcattgctcatagagtatcttgtccgcatacccaccagcaaaatggagctgctgaacgcaaacatcggcatattgttgaaactggccttgctttacttgcccatgcctccatgccccttaaattctgggatgaagcttttctcactgctaccttcttaatcaaccgtttaccaacccgggtcattgataataaaagtcctcttgagcgcctcttcaatatttcacctgattattctacacttcgtgtctttggttgtgcgtgttggcctcatttacgcccttataataaacataaactttcttttcgatcaaaagaatgtgtttttcttggctatagtcctttacataaggggtataaatgtcttgatttgtcatctggccgtgtttatatttcacgcgatgtcatttttgatgagtccatatttccttttgctaagcagctgacgacttcatctcacattgattcatcaggcagcagtgttaatagttctgttgatcgtttgtgttattctctgcctactcacctcttgtccacagaaaattcccctgctgcagaaccatcttcgggatcgacgctcgtacttctcccgcgcggattgccttcggactttgagctgcaattgcccccaacaaatcctgccacatctggggtcgtgcatgctacggctggtactgcgctggaaaccgcgtcggattctcttgcgcccagtagcacacctgagtccttacctgatggacgcattcatgaggaagcgaggaccgccgcgcctacggggaccgctggacccgactcgtcctctgcaccaacaactgctgctgcttcttctgatccggtgcatggtgctgtctcggatcatgtgttggtgccctcttcaacggctaatggtgctacaaatgaagataattctcatcactacggtacgcgattgaaaaataatattcgcaaacccaagatcagaacagatggcactgttggctattctgcaattgttacatattctgtcactcgtactgctaatttggaaccatcatctcatgtgactgcactaaaagatccaaattggaaacaagctatggttgatgagtacaatgctcttatgttcaacaaaacttggcacctaattcctcctgatccctcactcaatgtcattgactgcaaatgggtgtttcgcataaaagaaaaaccggatggctctattgatagacataaagcacgattagtggcaaagggttttactcaggagtatggcattgattatgaagaaaccttcagtcctgtggtcaaacatactacaattcgaattttgctatctcttgctgttattagaggctggtctatcaggcaaattgatattcagaatgcatttcttcatgggtttcttgaggaggatgtttatatgcatcaaccacccggcttcattgattttcagcatccagactacttatgcaagttagataaagctctgtatggacttaaacaggcaccacgggcatggttttctcggttgagcaataagttgcttgagttgggattttctccatccaaggctgatgtctccctttttatcttccataaggagggtttatgcatc

SEQ ID NO: 153848 - DNA, 502 bp, Zea Mays
tgggactgggagacagccagatgggaataggaattaggagggcaagtgaggaggttaggaagacaccgaagcaagtgaacagcaacagcaagcgaacatagcaaacataggtactgcaccaaatctagatgaacatagcacaaggtactgcaccaaatctagatgaacatagcacaaccacagcaactgagccactgagcacaaccactgcaccaaaacagcaactgggagacaccgaagcaagcgaacatagcacaaccacagccactgagccaccgcccaccagcaagcgaacaacaacagcaagcgaacaacgaccaacaaagctacaagatctagatgagttctgcacagctacagcaaccgaactgcaccaaatctagatgagttctgcacagctacaactacaagatgtgttctaaacagctacaactacaagcaagcgaacagacatagacggagggagggatgagggaggaggacggagtaccgttgtaccgga

SEQ ID NO: 153849 - DNA, 767 bp, Zea Mays
gtagactatatgccccctcgttgaacagataagatgactgcatatcgttttattaagaagaaaggtctgaaacaggaagaaatcccaaaccacattcacacccacaacactctagaagactagaacatactttttctctctcgaaaacacaggagagctgcgcttcattatttaagaagcagcaaacaaggtcccaaaatgggccagcacaaagggtggcactttacagtagccagcacctgacatagacaaacttatccataaaaacacgtcacagcactcaaacacctaaatcaggcccatatcccggctaactcagtagccccagcaagggccaattcctggcatcctctccgatatctcgcagcacctgggacacatccgccacgccttcttcgaagatagtaattgcgatgtttccacaaccaccaagccactaaaatcaccacagaattgaactcatttccctgcggtttggggactcttctctctgcttgattccaccaatcctgaaaattgacctccctgggcattgggctaaggtgctgtaagttgattagagaaagaacttgaaaccagacctgtctaccaaacgcacaggccaccaacaaatgctgaactgtttcctctttctgatcacataacaggcaaagttcaagatgctcaagtcctcttctagcaagccagtccacagtccagcacctattgaggctcgcaagccaaatgaaaaacttacatttcggagggccccaggttttccaaaccct

SEQ ID NO: 153850 - DNA, 272 bp, Zea Mays
cgtgaagttgattcccttggaatagtaagtgaataactcgggcgtcatatcgatgcttttagaggtagttgccgagtgacttgaagacgacgtcagcgttttagaggtaacgccgagcaacttgaagacgatgtcagcgttttagaagtcacggcgagtgacctgagggcgacgtcagtgttttagaggtaacgccgagcgacttgagggcggcgtcagcgttttagaggtaacgccgagcgacttgaaggcggcgtcagcgttttagaggt

SEQ ID NO: 153851 - DNA, 648 bp, Zea Mays
aagatagttcgatcattccataccccatggtgcaggaaaatatagcaccgacctccacaaaaaccgttgaaacaatcatatcacctcttgcgaaggaactcgacgagggggacgtagacaaaattgttcctaagaatgtcgacgcaaacataaaaaaaaagcaaaggttgacactaatgttaaagggccaactacttcaaagaaaattcatcagtgaatcgccactgacaatgtcaagaaatcgtcagaagcagtgacacgctacctgcaaaaattgaatagagttatgacagatcaaccaaaagcggaatcagcatctcgtggagtacgcacacggtactaaatagacaatttcgaagcatgggaagaaaatggaatgattcatactcgagaatcattacgtcttaaaatcaatatcccgatatacaaggaggatgttcctcctaaatttgtgaatgggaggccgttcttgacgatggtgcaactttctaagttgtcgactccggagattagaatgcatgagtggacatggtggctagcaacaaatacaaactcgagaacttcacatttgttgtgccgaaagatgcatttttgagcaaagataatatagatcttgtgcggcatttattctttgacgatctgtggtcc

SEQ ID NO: 153852 - DNA, 406 bp, Zea Mays
cagcttcacacccagcccacggcgccaacccgatcacggcgcccatggccggagttcaccaatccccccgcccccgccctaaacccgaatccacgaactattacagattgcactggtagaaagaagttgcccagggagattctcaccacggattacaaggtttcaagctccagcagtgacaagaggcggattcaccgcgcaggaccaacgccggcgagaattgcccgcggtggctccccttctctccccatcgtgcttcctcttgcccacaacacgtcggtttctggcgatggtgagatgagagaagggatacgacatggttgggatttatatactgcggtagagtctggtcagggggaaacattttgcgagtggatcggaattgctccgccaagctcgcgcgcca

SEQ ID NO: 153853 - DNA, 613 bp, Zea Mays
gccggagcgtaataccctactccactgtgtgatgtattgcttcaggagcttgtatgaacttgtgagtgtctgcctaagattgggtctgtcttgtaacgctgcatgcctccccttttatagccaaagggaggcatgcacaaaggtactgaaccccgacatgtgggcctagggacataacgaatattgtacttggagccacaaacgtgtgctgctgaggcgatcctctagtgccctaacacccgagatcttcatatcctcggcgtgcaggggaggcttcttgtagaagggatgatgagtatggtgcaccgctcggcacaggcgcactgtttgctaatagaccggtcagacgcgccgcctactggatgaccctgacgccgcctgccatcggattggacaggacacattaaatgctgggagggcgtgtcgcctgctggcgtggtggcaggcggcgcgtcctttcagcaataaatacagagtccgctcggcttggtgggctttatgccaggcttggcccattggtttatgtgtcgggccacaagccacgtggcagcagtgggtagtgcagaacaaggtctggacacgtgccagcaccggacccctacctacgccgggg

SEQ ID NO: 153854 - DNA, 414 bp, Zea Mays
cgatccaagggttccagtttgatcatcgccctatcgactttcaaccgttcatcgcgagacttacggccgagataatgccctggcaaaaccgcggactagtctaatctagaacgttcgcgcgcggatcgacggccgagaatggttcgccccaaaccgaccggaccacggcggcgcaccatccgcggcggagctactccggtaaagtattcaaccacgccccggcgtcctaggtcccatccgcaaggagttaactgcagcacgaccaacggtgaacaagatagagaagattattaccaaggacgacgcctagagttcccggtctacggtgtggggcggatgtcggagtagaagcctgctccgacgtgaaattccggtgatgtgtgttggtcccgagcaccggtgagccttggatgt

SEQ ID NO: 153855 - DNA, 275 bp, Zea Mays
aaaatgggcggggtgaaattttgcctctttaatattaggtatatagacatagattggaaccctacgttttgtgtcccaaacattagcatgacacgtgatttacttccgcatgaactggttttgcatcctggtagtattaagtgtagaactagtgctgtgaaatctcaccggactggccggagctggtatttgggtgaaagttatattgaatatttatgtgactcgatacagatgggagtacacagaatcacagtagtttggctttcgtctgttgt

SEQ ID NO: 153856 - DNA, 1038 bp, Zea Mays
aacaatctgaaccattagttttgagggtgtgttatatatgggtacaaatgaaagtcgtctacagggggtgaataagcgaaatctaaaatttaaagcttagtacaaatgacacggtgatttgtttatcagagttcggtttccaaatgaaacctatgtctctgttaaggtgtcccaaatgattggtctctttcaactctctcaagcgattctaaaggtcgaccttgagtcctctctttactcgaatgagagactagagtctctgtgagaatctccagacgagttgaagtctctcgctagctttacaactgaatggaagttaaaactccaagctcaagagcaaaagaatggagcaacacactctcctctattactcacacaagacgctatgactatattttgctcaaatcactagaatgtggcaattgggagactttggaacaatggaggtgttgctctattgtaaggacttaaatgctcagctcttgtgattcaatgggtcgattggatgttggatgtatttatagtctccaacaaccaaaatagtcgttggcattaaatgctaaaatctacaatttctgtgtgtgcactagaccttgaatattgtcagtctggtgtgtcaccaggcctttgtcaaactgatggggagcagtcttatcagagtcatcgaacctatctagtgcaccaccgagcatcgccacgtcagccaccacatcacctagccatcgggtctggaacttcgaccattgaactctgactggtccagtgcgctagcgccttcaaacctctaaaacggcttctccgcgtaatcggttcggcgtaccaccaaattatctggtgcgccaaccaaccaatgcacatttacagtgctctctgtgtacttggtctagtgcatcagtggatcggtctggtttgcctcagacgagcagacttaactccattttaggtaaatcttcttcaatctgattttgttgtgtttgagggtgttcctatgccttagacaaacatatctaaagactatccaaccagtctaagtcatgg

SEQ ID NO: 153857 - DNA, 2078 bp, Zea Mays
ccgccagagacaagaacaggcacaacacagagaaagactcaatgagttctgggcacttgcaaattcgcgcagcacctctcatgcattgaaacagtcttcttaaaccccccgatccgttttccccgccactccttacagctgcacgacgcccctttcaagcgggagctcgcgcgacttgcacggcatgcacggcgtggcggaaaaccagggctggacgcggtcactgcgcatactgggcagtctccagtacaccagcgattctacgcggtacacaaacagatttataatttaactacccgagctaatgcagctaaatgcactgataacatattgacatgattacagaatggctaaatgcaacattcacccccttaatcttgtcaaccttctatcttgacgacgcccaattgcctcctaagttctgagaatttcatccggccaagtggctttgtcagagcgtcggctaactgaccttcagaactcacatgagccacatctaccatcccattgctgacgcactctcggatgtaatgataccgggtatcaatgtgtttgcttctttcatgatagacaggatttttggagagttcttgagctgatctgttatcaatcagtaaactgaacttcttcacatttacatctagcagatcactcaacaatctgctcagccacactccttgacaggtcgcagtagcagctgcaatatattcagactcgcaggaggacagggacaccactctttgtttctgggaggtccaagtgattaagttccttcccaagaaaaatacaacaccactggtgctcttcctcttttcaagatcacctgcatgatcactgtctgagtaacccaataagtctgaatctttccctttcaaatacttgcagccatacccaactgttccagctatatacctggcaattctcttaatggcagaccaatgttcagcgtttggagtctccataaacctgcttactattcccactgaataagctaagtcaggcctggtgttcaccaagtatctcagactaccaactatgcttctgtacctggttacatctagtacctgatcaggcttcccaggcaacagcttaacatgttgttccattggagtatcggcaggattacaccccttcataccacaactctcaatgattttggcagcataggcactctggcaaatggtaatctccccaggtctctgtttaacttcaatgccaagataatagctcagcaacccaagatcactcatactgaaactcttcatcatctgctgtttgaagatgtgtatctcccttttgtctggcccacaaatgataagatcatccacatatactcctatcagtaataaagtgacatcctttccccttttgtagacagcatgttcttctctacttcttctgaacccaagttttactagctctttgtcaagtctagcattccaggctctaggtgcctgcttcagaccatacaatgccttgttcagttttagtactttcttgggagaactgggatcagtaaaccctggtggctgatgcacatacacttcttcagtaagatctccatttaaaaatgcagacttaacatccatgtggtgtacctcccactcaccttgagctgccaaagccaggagtaacctcactgtctccagccttgcaacaggagcaaaaacctcatcataatcaactccatggatttgtgcatacccttttgccactagcctggctttgtattttaccacctttccggttgcatccctttttaccttgaacacccacttcagaccgatagccttgtgatcttttggcagttctgtaacttcccaggtctcattctgatgaattgactttatctcttcttccatggcattcctccagcagtcttgttcaatagcttgctcaaaattttttggttcatcggcagccaacatgcacagcccactgtactcgaaatcttggatttcttcagttgagtcaaacaaatctgctagtgttctgtacctcaatggtactccttctgaaaattgaggactctgtacaggaggagacaccatacctgtagtctgagctgtacttgtcaa

SEQ ID NO: 153858 - DNA, 342 bp, Zea Mays
attaagagcgtattagtgatttccttatctgatctgatctctctttgttcatgtcctttacttgtttgagatccgagagtatttatgattgtaatatttgcctatgacaacacgtacggccgaggcattacaaattgttatttgaacgacgaattgtaggttgtgtgtatttacctaatagtcagtttcatgagtgcacatgcatgtacactccataaagaaaaaacgaatgcaaccacatgcatttctccttgtaatatatattgcagcaattaattcctttcattaccttttcttcttcggttggaacaaatttgagatatgcaaaacaatccaaaaaac

SEQ ID NO: 153859 - DNA, 366 bp, Zea Mays
gccgaacggcccgcgcgatcccgccacggtcgctgtggtagttgcgtcaacaggcgaaacccgaggataaatccccgcatcacctcctcgaccgcgagccctgaagccctacactctcaccagacctgtcgtccctctccatcatcgcgaaaaccacgcatcaaagagacaccgtcgtccgccgccgtgggctcgtgcctataccgacgattggaggccagtgtggagtcaggatcgttcatcggcatgtgtggatcgctagcatgaagtattgagctcggaggcccgtccaagcgccctagatttctcgccgttgtcggattccgccgcgcgccacgaatgcccctgctcggcccttaatccccg

SEQ ID NO: 153860 - DNA, 670 bp, Zea Mays
gtgttatgctgctttgttgacaaaattatgatatatacatcaatatgttatgcattaaacatctcgctgttcaattagggccagcacgcacgaaatagccagattatacattaattggacgtcgcatatgagcagaatttttattgatccattacgtttttatgtatatgtgttgtttgatttggctcgaacatcatatatgaagaacgcagcagcacgtctccctatccctacatccaaacccttcctagtgggccctagcagtgctccccggccccctttgttcatattttgcacaacatgcatagatgttagtagtgctgctgcatgcttttttgtgtagtaatggaatgcatggtcatgaactgaactgaattgatttgcgcttatctttttattgctcctttacgttttttatgtatatgtgttgtttgatttggcaggaacatcatacatgaagaacatagaccgacctccatctaatctaaaacggattataattcagtctactcaagagtgctttagtgtcgacataccccgtgttccggcggaaactgttagacacaaaacaaggcaggctgctgatgaggacgatgactttatgccattatcgaagaagcgtaactttgatgacagtcctccaaaagtcttgaagaagatagttacaaag

SEQ ID NO: 153861 - DNA, 705 bp, Zea Mays
gagactaatgggcctataatcgcttgcagtcatagcatcggacctcttagggagaagaataatataggctgaattcaacagtccaagtttatgagcatttccttggtgcagaaaattcagggcagccagcagatcttccttaataatgctccagcaggtcttgtaaaacctccctgtaaacccatcaggcccaggagccttgtcagaaggcaggtcagcaatcgcatccctcacctccttctccgagaaagggttatccagctcactgagatccgctgcaggcctatgacagcccaacaaatcaatagtaacagaccttggaaaatcagtgcctagaaggttggtaaagaaaccgtccagaactccttgaatatcctcatgatttgtgtacacccttccatcctcctctagattggaaatgaacttcctttttttacggtaaacagcctgtcggtgaaagaaatgagtattggcatctccttcttttaaaaattgaattctggaccgcaaacgtgcaatagttctttgcaaagacgccaaaactagacaatgttgtttcagctgcccccatagccaaagctcctccctggataaggatctgatatcttgcgccatctctagcctatgcaaaacctcacgggcaagtcccaactgggcattgacattccccacctctttgtgaccccaggactgcaaacacttagc

SEQ ID NO: 153862 - DNA, 400 bp, Zea Mays
tagcaatcttatagtctgctgaactaacatgaagttgtcttggatgaatcggcccttgataaacgcactttgattcctagaaatcagcttgtccatatagccactcagtctgtttgccatgatcttcgtgattaactttgcgaagctgtggatcaagctaataggccgaaagtccttagcaaggatggcatcctctttcttaggtaaaagaatgatgaaagctgtgttgaggtatctgaaattccggaagtccttgttccagacagccaggatagcagccataatgtcttttttgatgattgaccagcaggccctatagaaacagcctgtgaacccatcaggcctcggggctttgtccggaggaagctgtttgatggtgttccacacctcctcctctgag

SEQ ID NO: 153863 - DNA, 498 bp, Zea Mays
gtggactttcactacatatggctttctgtcgtgttggctttcagtggtttttcatggtctatctgtgatgtaacaattttttatagctcgtccggtagctcgttttccttcagctagtgaggtgatacgatgtagactgtatgtgactttctgtcgtgttgagctttgtgggttttcacggtctatctgtgatgtaacgataacggcttattggtaggcaagaaccagtgatgcacactttcacacgtgacgcacaatacaggagacagaagtcttagcaagatacaatttgatctttattctatctcattttaataatggttattctagatagcaggatgcatcactaatagatcttgatggctacgacaacatcttcgttgtggggatcaatttcgttggtaaaatattagtttatggtactccgtgtacggatattaattcaggtcgttgatcttattatacatgggtgcggagacgaaatcaagcgtctaaatt

SEQ ID NO: 153864 - DNA, 849 bp, Zea Mays
gcaaaaatggagccatcacaaggttggcaatgtaaagctgcaacttgctattgctaaggaaattctgcaccgccttgagattgccagggacaatagagtgttctcacctggggaggaatggctcagaaaaaaattgaaactgcattgcctcggaatggcatcattagagcgcactattgcgaggctccgctctcgcattttgtatctacaagagggtgatgcaaatacttctttctttcatcagcaagcccgctaccgcaagaaaaagaactttattgcaaaatttcaggttgaggaacatattgtcacctcataggaagaaaagcagcaagcagccttggatttttatgataacatgctaggtacagctgaacatagggactacaccctggacctgcacaacctgggcattcagcaacatgatttgagggatcttgagcttgttttttctatggaggatgtttggtcggttgtaaaagatctacctttggacaaggctcctgggtcagatggtttcataggtcgtttttataaggtttgctgggatatcatcaaggaggatgtgatgggtgctttgcttactgtgcaatgtgggcatgtctccaaactcaaactcctcaacacgacttttatcaccctcctgcctaagaaggtggatgccctgctggtcaaggattacaggcctataagccttgttcacagctttgataagttggtacccaaagtgctagcagctcggttgacgccccacctgccaagtatggtctctatcaaccaaagtgcctttatcaaaggaaggagtatacaagacaatttcctactggtgcagcaacttaccagatccttaca

SEQ ID NO: 153865 - DNA, 514 bp, Zea Mays
ctcgtgattcgttatgttcttccgcacctttgatctccttccggtttgcttgagtgagatctcctctcctttctctttctttctttaaacggttggttcgtcgtcgatgcctcctattgttgagtgaaatctctgcccctagcgattcttttacttgtctttgtacaattgtactaaccattcgctctccggctcaaaagtctcctccagtatgaccttcgccgtttccttgttgctgatcttcgccgtttcatgagtaacatcacgggggactgcagtctgcaagtctgttatggttattgcgcctccatttttatttttattttacgtttcgtgtcagttacgggtaggtcaaagcccggtgctggtacctggtagccgttgctctagtgaggtcactgatctgtgggtgaacgatgaaaaagggtgggcggaccagcggagtgtaggagcagcggcttcatcagttttttttcctctccctggcctgatgaggccggagccggacgaggaa

SEQ ID NO: 153866 - DNA, 397 bp, Zea Mays
gacgaagagcagggtcgcgtcaaactcaaaccaaaactgaaactggggaggatttggcaaacgcagggagtcaagaacgcaccgcgtgctctccttgcaagctgttgcacatgccctcgatctgatgagcaacacaacaccttgcaagggggttggttcgggcattgactctcttgctctgtcctcccgtcgtcgacctgccactctctcctcggtccatggccgggctgtagtagaagctcgtccgtcagacagctagctaggagcttagaccatgcatgcatgcatatgtagcttgtaactgggattcttccattgtaacgtgcctgtacctctgcctctgtgcatgcacggagcgaggttgtacgtctatggagattgcagaagtctaaaaccg

SEQ ID NO: 153867 - DNA, 304 bp, Zea Mays
agtccttccgttcctgctgctgaagaagtgccggtgcctgcatttgctgaaactaatcccgatgggtgtagcctgcctgctattaaccccaatgggtgtgacctggatgacgttgaccccaatgggtgtactgtccgtgttgttgatgatggtgaggaggaggaggatgaaatccctctaactcggaagaacagtcgacgctacattgccagtggcgaaagcagtggtgttccttctccagccctgtctactcttgttggtctacaagaattgtctctggccaactttgatcaggctcttgagg

SEQ ID NO: 153868 - DNA, 567 bp, Zea Mays
aggcacaaaggctctcaagttctggcctaggacaagcgcatgtgttacgtagcaggatgatatgaatagattcctcaggcaacctaaaaactatgatgtggctctggaccagtggcacacctttttttttactgtatcatccttatatatatagtcatctatctcctaccagagtatagcataatttcctgtaaaaaatgatcatgcatacagttctttctagaccagcctgtgtacaaagtgcaaacggttgaggacacgcgaccaggaccagagttggcaactacaaggaccgaactgttgtactccatacgcacaaaagctgttggctcccactcttctacacaaactatcacttatggcgctacacacggatcaacagaagaattactgattgctgccagccatctacaagtttgcaagattgtcatatcaggaactgtcagagtcataatccgacaactaatatcaggaactgtcagagtcataatccgacaactagtaccagcaatcctatgaagtgcacggtccccgctagaaaaaaatacgaaaaaggatctgttggca

SEQ ID NO: 153869 - DNA, 315 bp, Zea Mays
gctatcaatgctctttgtggagtttttggcatttcttcgatgaaatgtgtccgcagaatgttatgggcttcttgtcggctttattgctccattagttctgtagactttctcccttttgtggggtgcaaagaatgttagattacatgattatcttttcatgatggcaagaacggggtttaggaagattaggagttttgtttcaatagaactacttgttttgtggtgctgtgaagtgaggtgtttgatcttcatatacgttcatctggtgtggatgttttaccattgaattaaaatgaattgttgaagttggtaagg

SEQ ID NO: 153870 - DNA, 573 bp, Zea Mays
tgatcgcattctgattaaggtatgcttatcaagaaacaagaatattactatcgtgacactatccagattaattggctactgtactgctctgttcatgttattttaagcaagccttttccgacgccacaatttgtctagaaatttcacacacaagttgcatattccatatacggaaggcttcatctctagtgacaacttatatcaagtttagaaaattgtgtttggagcagaataaaccatataatacgacatattcatccactagaacagaataggaaagccacacatcggacaggagtcaaaaagttttattatgtctttggcagatgttctgtttattcatgatatgtctaaatgtcttctgtcaagtctggatactagagcaaagcatgtccaggaagctccaatttctgcgttccttagccgatgtgaactgtttgacttggctcagctcaccactgacccattctgagtgaaatcttgtttggcacttgtcttacatttgcaccagatcgattaccccagcctaaggttatccatctcgtatgcatgcactgtgatagtggttctgtg

SEQ ID NO: 153871 - DNA, 392 bp, Zea Mays
cgtcttgctaactaggattagtagtagcttcctagctaggaagttgcacgaaccgcacgtactccgtactactcggctagctagctacctagtccgcgtggtctaaacgaaattgttggaataatatatagaaatagtgcttctgagtcatgtccttgggcggtgtccattgccaattttgacatgggatcagtgtatgagcgtacttgttatactagagcgtgcatatagttaaggtcatatacagtagtgctcaggtaacacaaaataaaaagacgtaaggcggcacatgcatgctccgtatccaagaggaatactaggaaggtctagtttttcccccaaaggaaaagaactacagaaggctctagccagtgttttaaatagcgggaaaa

SEQ ID NO: 153872 - DNA, 381 bp, Zea Mays
gcggatttgggggaaatccaaaattggagctcacgggtgcaagattggaggcaatactgggtggtgtggtgcgtgatgatcttgcggagctgacagcgggctcaatttataggcctagtgagcggtggtcgtgaatttgaagaaggacgcgcggcggtcggaggaaggggagttcactggcgcagtggattcgtgtcccacgccgtggcagttactccgatgatcaacggagagtgagagtaggttacggtgatgcggtggaaaggtagagacacgcggcggacggcggtgatggcttaacggcggtgaggaccttatccaaggaatcggtgagcaaggggagaggcacggcgactagccggagtggcgtccagctcaacg

SEQ ID NO: 153873 - DNA, 354 bp, Zea Mays
agataagtgtattttgtgtagtgtggattgattttgagtgcatgtgtcgcaagaaaagaattagtgcacatataggcgatgaatgggtgtgatgaaatggtgacatgcctttgtagtcatcatgtcgtcggttggtgacctaactgaaggtcgtagaaaaaggtcgattatctatgtgttattattgtcaccttgcggttctgcatgaactgcaatgtgaagtagtaggctctctatgtgatgctagatgtctaggtagactttcgtgaattgtggtgctcggaccgtcgagatgaaggttaagtcggtcgatgctgattaagtagttaaaatgattaatggaacaatcatggg

SEQ ID NO: 153874 - DNA, 650 bp, Zea Mays
ggttgcagactttgtttttaagaatattcagccactgaaggatagggcatacccagcttatttgtatagtggtgtcaccgattcaacccgggttaccaacaagaggattcctgctgtggatttggtgagtcgactggaaatgatccttagagcaaagtatcaaacattggtgctcttgttgcatattctgcttggaatctgccaccttccaagtcctttttcgattttgtgtcaaatcctcctgctagtgacagtggtttgggtcttagagtgcgaccctctcttgaagaagttgaggttttggttgcttcgcttggagatcttcccaatgatgagaggcaagttcactttgagatgcctatgagtccgggtgatgcagagataagtgctatgctggacatgttggctggggattcttctgactcggtccctgctgaaacaatggctgttgcaactctcccagagcctgagaaaaccatggatactcaaaggcctgagggtactcgcccgaaacgtctttgccaagtcagtcatccagctgctcctgccgagaggaagaaaaagaaaaagagacggcttcggtgattgtcgtgcttggatcatgatgctggcccttctgctcctgctgctgaagaagtaccaatggaact

SEQ ID NO: 153875 - DNA, 379 bp, Zea Mays
ttttacttttgattgtattctgaaacgatatggtattgcttgacattggatagtatcctgatatgttgtggtaactggtaagctcatcactgccgtgcaggggtgtccacagcaccatgtatgattcatctgtttgaatttgtccatgcaaactagcaaccaaaacgtgccctccttgcatgatgacagcttaggtctaatcaaatccatagctgttcataatgtgtgcattgacgcctccggcaagcccgcttccgcttccaccagcatcgcctgcatcgagttccatggcaacaatgcaaggtgggtgtggatgctacctccgttcaacttacctccattacaaacccaccttttcgccaagcccgccttcggagag

SEQ ID NO: 153876 - DNA, 1556 bp, Zea Mays
ataataatagtaatcgatggggtctcacctcctcttgccgttcctcctgctactgtcctcaccatatgtgcaagctcaacagagaatcaccttgggctcctccttaacaacccaagggcctaacagcttttggctctccccttctggtgactttgcctttggcttccggtccatcgagggcaacacctcctcctacttgctcgctgtctggttcaacaagatcagcgacaagacagtggcatggtatgccaagaccgctgatccagatccagcgctggtacaagtttcatccggttcatgcctcgagctcacgtccagtggagcgctctcgctccaggaccctactggcaaagaggtatggaatccagaagttgtgagtgcaacctatgcttccatgctcgatactggaaacttcgtactggctgctgcagatggctcttccaagtgggggaccttcgataacccagcagacactattctgctcactcaggtgctcacccctgaaaccaagctccacagccggaccattgccacagactactccaatggacggttccaccttaacctgcaaaataatggtgttttcttctatgctactgctgtgcaatccgatcctcaacatgaatataattggtccatgcctgggaacgccacaaatttggtattcaatgcgactggcatgatatacatcaccttggataatggaacacaagtaaaaatcacatctgggaagacaagctccatagcggactactaccatcgtgccacacttgatccagatggcgttttccggcaatatatgtatccaaagaagttcagcaaccacctgtacactcaggcatggtcagttgtcgacttcaaagctccaaatatctatatcccaagaaggtcaatagcagagacacaggtcagcagtggaacatgcggtttcaacagttacagcaaggtggatgtcataaacaaccagactacctgcgtgtgcgtcccacagtacacatttaaaggtggaagtaaaggctgcacgcctgacttccagcaaccaagttgtgacttggatgaagcaggtgccacgaagcagtttcagttagtaacaatgagcaatgtggattggcctcaatgtgactatgaacagcatgacaacatacctaacaaccagtgccagcagctctgcctgacggattgtttatgtgctgtcgctgtgtttcgtgatagtgacaatacatgttggaagaagaagttgcctttaacaaataatgttgtaggggatagtgtgcagaggacagtttacatcaaggtaccaaaaaacaacagtcaacaacctgagcttcttgattccaacagatggaagaaagataagaagcactggatccttggaagttcattgtttctaggaagctctatcttgctgaacattgtcctgatctctgttatactcttcggtacttactgtactataaccataaatgaaagcccgtctgtgcagtcatcaaacaatctaggattgcccctgaaagccttcaattacactgagcttgagaaggcaaccagtggattca

SEQ ID NO: 153877 - DNA, 930 bp, Zea Mays
ggccattcaccgagttggagtaagtaggtcctggtgccttcaactgggggcagttatttttgaagtgactggggtctccgcagtgccaacaagcatttgctggtggttgtttgcttgtgaccgagggggcctgaaaggagctctgactctgctggctgaaacgtgatggagtgggtctagctggtctattgaagcttggtcccttgggtggaaacccgaaggatcgagctctctggtgccggtcttgctgctgagctcggagaacttgaaattttctcttgaggtgacctttttcttcttcctttgccctttccacttgtatggctttattggagaggtgcgagaagctgaggaaatcttggctggcaaggatggtcttgagttctggtcttagcccttttagaaaacgggccatcctcttggcttctgtgctgacatcgtcaggcgcatagcgagctaattttgtgaatttgtgcacgtactcgctgacagatcttccaccttgagttagttcccgaaattcatcttccttgagctgaacgatcccctggggtacatggtgctctcggaaagcagtttcaaattctgcccaagtagcatctctgacggcagtgctgaaggtatcctaccatgctagggccatcccggaaagttgatgagcagccaattgaacacgttgattttctgggcatccgatggcttctaacttcctttttatcgtgcgcagccagtcgtcggcatcgaggggattgctggatccagcgaacgtgggaggcttgagcctcagaaaatctcccatcctgtcctgtggtcttccaccattcgagcgctgattctccagacttctagtgaggacttcaatgagtcgggtttggttggctagaacttgggctaaatctaatggcagctccggaggtgcgaggaggtggg

SEQ ID NO: 153878 - DNA, 560 bp, Zea Mays
ctaaaatatccaggaaagagaggcacctgcttgtgtagcatttgctctgccatttttcaacaccttattttaccatgatcaagtatccagaagtgttttggctctatacacttattcagtactgtagaggctagaacactgttcctttatctaaaaaaaactatccagaagtgttgcactgttgtgattggcttgctcaaacaaatcttttactgcaatcttatccagaatgattacaaaagccccacttgattccatcaaacttaatgcaatgttttgaaattcaaataccaagaacaaatcttaaatctagaggcagctttgtggtagttggagagaactggagtctgttgggcaagggtggaatgcacggatcatgactcccagtaggtggcaatgatgcctgtcagcaagagtcatggcagttttatagcccatgagaggcagtaacaagtgtaggcgcacctcagtctcaggtaggcacacactgaactactagagggacaatcagtggtgggagcatcaggctatctccaaccatcctccctcctaaatccccc

SEQ ID NO: 153879 - DNA, 658 bp, Zea Mays
gcttgctgaccaatataatcaggcacgccggttaaaaacaaatttatggctactcattcagacttgtgaattctgataaagaaaaattcctagtggtccaagaatgcaagagccaatcaagaaatggtgcaagcgattctctatccaaaacattattaattgcaacaagtcaacaacaaagtcttttcgttccaagcaagttggggtatgctagagttgaaacacgataaaagccaagagttaagattcaggcacgtggatagcggttcatgcagtcctatttaaagctaaatctttggggtgtattccatcttttgaagtcttctttagtgcctcttctcatatcaactttgccattttcctatctctcttcatactaatatcatgtcttaggcattggcggatctagagggtggacagggtgagccccagtccaccctctgattttgatcctgttaaagtatatagatggttttgaattgtttgtttcttttgattctcatacaatattgattttcataagattggaccaccctaactttaaatcctagattcgccactggtctttggatcccactacgcattggtgcctctggatgtctttgttggatatacaaaccatctcaaccggtgttgggcaagctttcttcaatcggtg

SEQ ID NO: 153880 - DNA, 781 bp, Zea Mays
ggggtcttaaggagactagaacaaacgtccaaggagcttgaactaacctggagcaagctgaccacggtgaggtctctttcgcggtagcggaaacacggattggggaaactgagcaattcacgggcgttattagacaattgaagacaagacttggcggcttagatgtgtgattaccgtgtggagctcacgacgggctcaatttatagcaggcaagagcggtggccggtgaattgggattgagacgtgcggcggtcggaggaatgggaggtcactggcgcagtggattcgtggagaataccgtggcgggctccccggcgatgatcggatggcttaagcgagtcacggcgatgtggtaaatgtgcccaggcacgtggcgcaaggccgtgaagtggctgtctccggtgaacacatccgaagcatccgtgactagctcggtacggtggtcggagtaatttagtggtcggagtatatccacggcgatgatatttactcaaccccaagcgctatccaactgatccgagcacgaatcacggcggcgaaagcacgaatccgcacgtggctcgtcggcggcgagggacagagctggcgacctgatcgggacactgtaccattggaactgcgattcagagctcctgacagcccaactggtatcgtccaaaacacaaatttctatataagaacttgctaattcgccagtagtaaacttgcagcccttcataccagctgcaattttgttatagcaacaaccaccaaacgagcaatacatctagctcaaaatggc

SEQ ID NO: 153881 - DNA, 701 bp, Zea Mays
gggaaaggcatctaaagaaatctaaagaatcacaaacctgtgtaccttcagtgatgatttagtcacagcagctttcaggtagacaatgtgtattgtcagatccactagcgccgagtgtaatgcgtcaaaatggacagggcaatacgagtgtaagcctaggagtgctctatgtgggatcctaaattcatggacagggatcaaatctgtatcatcacttgaatcttgaacgtcagtcctatgatgcaaaagaaagcagcttatcagagttgatgaatgcgaactgtataattttgggtgcacatgtggtttaacacaataacacacacaccatgcattccccagtgttgggatatatatgagctcgaacttcaatataacagaagaagttgctggaccctagaacggagagagagtacagatcaggctaaaggaaacaaggttcactaacagaaacaaaatttatagtactcaacctcgtcttcgctgttgggtatgtagaaggacaccataactgatagataaatatcttgcctagaatatttaacaagaaacggctgtgtgtagaagctattgtcaacatcgtctattttccaaaagccaaatgagctcttcacaccaatatcaatagctgcataatccacctagcatgtcattatctattagccaaaggtttgagttcaaaagtcatataaatataggaa

SEQ ID NO: 153882 - DNA, 843 bp, Zea Mays
aaacgtgtgacgcgccaattagtcgccatcaaggcatgtactgtgcgcccccgcgtacagagtcaggcgcgccaccactgcgtttgggggccagtcaagcctggtcgtcggatgacctcaataccggactcccagcagtgacctgaatacccagaaggactggacagtacgccataccgggtgtatctctacaacatgctgaaggatcaaggatgacgtagtgctcatgatgacggggaggagtcgcgttttgtacgaccgtgccgtgagactgatccgtgggaccccacacgcactatcatgaagacatcagcaacagactcgctacagggacccgtgtggcggatgaacaggacggagcgtcttaccagaggtacggcaacgcacgaccctacggacgacgtcgggaggtccacgccacccaaaggcagcaagccaaggtccctcccagtagaatatgagatcctactgtaaagttctcccttgaattataaaagggcagggcaaccttccttctacacacaatcacacaagttgtaacatgacatactgcaattccatgatcaacactacactggactagggccccgacctgaaccagtataaccccgtgtcccaagttcatcgttcgagtccgagcgactcaccattcgaagcgagtctgcgctagcacttgccgaacaaaaatctcattgtccttcggtttttgaaaccatgacaagtcccatacctcccctgctgttatagtctgccctctgctgttaccattgatcgccggcccccagccggtgactgtcccttcctacgcagccaagggtcggcgcccaagactctcgttacgtc

SEQ ID NO: 153883 - DNA, 534 bp, Zea Mays
agaagctaaattaagcagactagtgggcacatgattcgtcagcagtgatcattactcaaacagcttgcgcttcacgctcaagaaaattctctgtgcctttgtacattgtgtaatgatttgacacaagaacatcagaagaattggatgagccacctaattattgagaaagccctgtacatctttgcatgcaaataagatgaactaaacatgtcatattttgaataaagagaattgtctcactaacccatgcacattcttttagtttcgttaactagtcagataagagcaactctaaaagaaaatgcagacttaccccaaaacaaatatcaggaaagaactgttttttcttgctccaatagttcccttatcttcttcctaaaaattccacatcctgcatcgacgtcctccactcccgcatatttgtgggtgagcgttcctccccaatatctgttttatcgtgcttgggatggtaaaacagacggcttcagcccggcggccgtttcaacctggcatgcagcacatgcagattgttgc

SEQ ID NO: 153884 - DNA, 448 bp, Zea Mays
cgcaagcctatcaattagtggttgcagctgctccttgcttaacttcctgagagagaggtaacccgagatatttgagaggaagtgtttcaactttgcaaggaaaaatctgggtcaccatttccatgtccaccggagagcagtgaatgggagccacactgcttttctgtgcgttgggttttagccccgaggcgtccccaaacaactccaatatcatggttaccaagtgcagatcactagcagccggtctcaagaacatcaccacatcatcagcataaagcgatatttggtgctgaatggaacgagttgaaaggggttggagcagtccctcatcagcagctttaacaattaggccattgagaacatcaataacaatgatgaaaagaagaggggatagctagtcaccttgccgcaggcccctcttgtgttggatgtattccctaggcactcc

SEQ ID NO: 153885 - DNA, 882 bp, Zea Mays
gcgggttgaatcccttaaaattcgagggctcttctgcaaaacgacccggccgaaggggtatccaacgaccctggccgtccgattcaatttaaacaatccagattagatcacggttcatattgaagtggtatggaatgcgggccctcggatttcaatcgcacggcccacatgaatctacgtcgcaatcaatcgtgaaccctacgatccaaatctaatggccatgatcaccctgagtgaaacggtacgcagattctaatctcaaccgtggggaactgatccaacggtcccggcgcgttcgcccaaacccgacccaagccgcggcggagcgccagctccggcacggcggcgccatagctgcgcagcgttcctagagctcggctacgctattcctcaattcagtaaagcataacgtggaggagggtacggcgaacatgatggggctcgaattaccttggttcacggcgacagcaggtctggccacggagggaggcggacgcgcgacagcgaccctgctccggcgagaaattccccgggctaccgtcaggttcccaccgattaactctccccaaggactccgcagagtcccaccgacgtcctggtacccgcaccggagcacgaaacccgttgccgatgagaaacactggtggcggccggcggggcttgtcaatggggcggatccccggcgaggctaaacaagatgaggaggggatagcgggcgcccgatacttaaattcgcgagcactggtcgtggtcaacagatccgagttttctggggatcgattcccccacggatcggccaaggttgttgccgcggaaggtgggagaatcccctggcaccacgggcccaccgggcggcgagggaaatcacgagcgcgaggcagc

SEQ ID NO: 153886 - DNA, 326 bp, Zea Mays
gtagttgctggaagagacatagaatcagtagagcccgccagctgttttggtggagcacatgacgcatctggctgagcactagctgtccgcatgagagctggcacgccttccaaaaatgaatcaatcacattagtagtttccaaagatgcatcaatcgcattacgggatcgcctgaatttgcatgtggactagccgccacaggtgcctgcacagaaggaaggagctccggatttgctgtattttctgtcgccggagggttagcaggtacagataacacatgatcacttgcaatataattactgtgatttcccaaatgcaacagacgt

SEQ ID NO: 153887 - DNA, 1864 bp, Zea Mays
ctgcatacctaaaaaaccgaaatgatctatactttggaacagggagagtgacatacaaatggccttaggtaactagtatttgtttgggataagcaaatcttcaaagtctcagtcattcttttagattatgtaagtcataaacagtattggaatatataagtataagctaaacacctaaaccatttgaatccattattatgaaagaaagcggaactgtgtaaggtttgcaatgagtttcctaatggctaacttgttgaggatgttactaactagtgcttgaatcacctaagacagaatctgaacaacctgtttaaatactaatagataaaaagcaaaccgacacagcagtaaagcagtagagagtcatgttcccagaatggtttgttcagataacaaccacaagtagtgttttgttgctttatccaacactttgatgttatgcagtgcaagccagcgcatggatcaaactttgctttatctttgcttacataaggatgcccttgtcaggtgtcagcacagatcccattagtactttggaggcaaagtcatggggatgctgtgatgtagctatgtggcagactctataatctttcagtacagtacatgttgtgtataaatatgtgtttgattacttgtacctagacaccctagtgggtggtagctcagcataccaaacatagggcatgtcctctatacaagtaagagaaagggctatttgtttccagttgcagcagacaagacaagaaatgcactagcagttctcattgccattcaaatagttcccgagacaagaaagggatttaaaaacattaattgtcaatattatgacaatacaatagcatttcttcaaaaatgaaagaagtgtaagatgggcagtttaccaccaccatatacaaatctgttgtacttattgtgtataaatagaaagcattgaagcaatcaaacaaatacttaaaaaggaaaaaaaatgcattctcgaacacgcaagggaattgcatatcgctgtattaattaaagaagaaaaaactatatatatgccaacccaataggacacaacctcgacctcaaacacctaagcatctatgaaagggctagttagaaacgaaatctcctattcccttagctcctgccaaactccaatatttcatctcctcagtggccagcaaaagagcacaatgtagatatggtgatccacctgacaatggaattcagcccttgcagcacttggccactgatcatgccatttgtccatgccaccaaccaccaaagaatgtttcttcagattgtgtagataaactccaaatgaacaaaaaaattaaagagaccaaggagaagttgaaactgagtggtcatactatttaccatgaaaatatataaacaataactattcaagtataaaaaaaagggcataataacaattgtatatgcacaaaaaactctatatcaattggccaaacaagaccacttgaaagatgttgatctaccaaaagaagatatgaataaaaaggagcactaccattttcagtgagcgacagacatgtagaagcacacatctattaccatagcaaatccagattgcttatgagtcaggatgcttttacctgctaacaaaacaagctttcacctaaaagcattccttctgagcaccaactaactaaggccaaagtaagttgaaatgacaccaatagaagttgatagtgtgttttattttagggcagcaccatatcaggtcagcagtggtggatcatggaagatcttgtaataaatcatgtgaaagatgtcattgtggtgcaggcatgataccaggtcatgttatgtagatacatttgacattaacaaaaacccaactgagaaggcgtgtatg

SEQ ID NO: 153888 - DNA, 1156 bp, Zea Mays
gggagaccaacttttgtcgctatataatggacaacgttagatttccgaagctagaggctggattgttaatgatgatgttttaagagttctcatactcccttgcttatatgcatttgaaggtatacactcactctttttgtgcttcttgatcttagcaaatcctctagaagctaatctacactttatttcctgtgacacatagggactgatcttaagcaaggaactgaaggtgcgaatgaatgtcgaagctaaaaccacgcgaagaacaattgtggagcttcgatcgaaagtcgctgagcttcagtttgataatactaaaaaggagaaaatgctcaatattgtgaaagaagatttaattgatagccgaagggagctccaaaaaataattgcagggaagaatgcaccttagaagttgagaaggctagaaatgatatgattttggagcttgaaaatacaaacttgcaataggcgagatgctttgaagaactcaaagtcgagataaagcgaaatgttgaaacctataaggccaaagttgaaaaactgaaaagcgagctaactgaggcaagcatgaattttgagatggaaaagtccaagaaagaaattttagcgacaaaaaggatcgcctccaaaaaaattgttgacaatctacaaaactcaaaggaagagtgcctctatagtcgcccaatgttgtcgaaggttgagagatacgtttgcttcggttggggctagttcaagcgagaaaagcaacattcatggcaatgccacttgagccattaagtggatcgatgggggaggtagaagcttttaatgggattctttcagctagagaggattattcggcatggatatgcgctcaaaacatagctttagttctagagaaaactagttgcaaacccgtagagactgctatctgatttttctatttctatggtgaagaagacttcaaccaaatcctccctattaggaaggaaatcctttaccgatatttggaatgctggtggaagcgacttgtctaccaaagtggcaaataaaaaccgggagaaggtacttcttctttttgtaggtgggaaaggctgcgaaggtggtcacaatgattagagaagcacaaagattaaaggagtttgaaggtattagctttgtcttctagccgaagttt

SEQ ID NO: 153889 - DNA, 832 bp, Zea Mays
cgtcccctgaggctctgctggcaatgatgcttgcgtgtctgcagagcaaagaggcagagagcctgaacaattcgtttggcccttttcttgtgcttggcagcctgatcagatgccaatgcgatcccatatctccccatatctgatagggaaaataaaatctctccgcgtctgctgcactaccggctggtggttgtgctcgccagcgcggttgaatcccatctcacctcccctcatctgccgtcgtccggtgactgacaggacgaggctccttttccgcaccagcagcgccctctccacttgatgatggcctggcctgctagctcgagaagaagaaatgggcaagcagtggcaatgagatggatgttcttggtttagcagttcttggtcgttgcctgaatcctgcacattttactactacagttgtgagccagaatcgcacagatctgcctgaattcttcttctgaatatccacagcaatgcgaaattggacctgcggaaaaggaatgggcaactgattggtacagtactcactagacaataataatcctgaccaatatgtaaccatatccgcacagaagatgccagggttagattttttttgttgttgttgcaggccatgaacagtccaagggcgtttgctgtaatctgctcgcgtccaaattaatccaggaggatgagagtgtgagactgacacatgcacagggatcacgccaggtatataaacacgcaagtggcccacccaccggcgacggcttcgatccgagaacaatccgtcgtccgagttggcatctttggccagaccagtatcattgcccaatcacggatctctcgg

SEQ ID NO: 153890 - DNA, 784 bp, Zea Mays
aacagacactacacagctccaaaactgcactaaaaatattgatttcagactttcagttctgaataaactaagtcaccaacaacctgataatccaactttggcaaagtttttctccactttttgtataggatcattccaaacacacttgaagaaagttgttccccaacatatgatcttcaattcctctatataaacctcagtccaaaaccttatagaacaaccacaaaagggctccaaacttggcaccatacaacaaatttcagatttcagaactgaaccaaattcagttacaggaatgcctagcagctgatctttgggggcatttttatccactttttatgtgggaacaagccaaagtcacttaaagaaacttgttcaccatcatatgggcttcaacttctctataaataccatagcacaaaacattatagaacagccacaaataggcttcaaaactgctatcaaaacactgaaattcagtttcagttactgtttccaatctgaaaattcagaaatacagcagcaccacttagaaccactctttttcctgggttccaaatgtttataggggcaagttgcttaataaagtttatactcctatagttcctctacaagtttgatatagtaaccattaaccaaaacctcttggattccaaactacaatagcccaaagtttgctccaattgctgaaattcagaatctgaatttcactaagtctgaaatctacaatttctgacagctctactttggactagtttttctccaagttccatagagtgttagg

SEQ ID NO: 153891 - DNA, 493 bp, Zea Mays
gctactcctcataaatggaagtccttgttagctatggcagaattctggtacaatacttcttatcattcatctctgggttgttcaccttttaaggcactgtatggatatgaagcttctgtgttggctgagcctcatattcagggcatagaatacattgatgtgctgcaatgggtgaatcagagggataatcacagagtgatgcttcaagaacaattgttgaaggctcagcaacgatataagcattttgctgatcttaagaggaggccaagggaatttcaggtaggtgagcaagtgttgcttaagctccaaccttatgcgcagcattcagtggtaaataggtcatgtcctaaattggcttttaagttctttggtccctatactgtcttagagaagattggtgaagtggcctacaagattcagttgcctgaggatgcacagatacaccctggtttccatgtggcacaactcaaaccatttactcccagttatgtgc

SEQ ID NO: 153892 - DNA, 548 bp, Zea Mays
gatggatgcaacctccaaggcttgaaaactcatgactgcaatatcatacttcaacggattttaccagctgctctccaaggattaatgaataatgaaatatatgtagcaattgctgaactaggtaacttcttccagcaactatgcgctaggacccttaaattagatgttctgcaccaaatgaaagagaatatcccaattgtcctatgcaagcttgagaaaatattccccctcattgtttgatgttatgctccacttgtcgatacatttacctgatgaggcaatacttagaggaccagtccaatatggttggatgtaccccgtagaaaggaggttatacactttgaaacattctgtgagaaatatggcacgacctgagggttcaattgcagaagcatatgttgctaacgaatgtttgcatgcatcttcaaggtattttgatgatcttgaaacaagacacaattgtgagggaaggaatagagagcatgttgatatgagtaagggtgatatatctgttttccaacatggagtacaattacttggagccccaa

SEQ ID NO: 153893 - DNA, 433 bp, Zea Mays
tgattggcttctccccctctgacttatgccgttgtgctgctaggaactatgcagggaactatccagaatatccacgccaccagggaattcgatgaagggaagaggagctatggcacacagagacgaagagaagatgagcgagggcgcacagagacaaagggaatagcgacggcgcactgacctccctaagatctgcgacggcgcacaggacctttgcctgactctatgacaatggggaagaaaccacaagcggcgaggaatccaatggggagacgagcagagcgggaagaaggaagatctcaggtggaaccctagcgtacctccggtgtgggacctggatccaccgcgttcagaagatagaataagtaaattataaacactttcctatcacaactcgtcaatagctcatttggttactaaagcacagattatg

SEQ ID NO: 153894 - DNA, 422 bp, Zea Mays
acagctagcatcctcctccctttcgatcacctctcctgctcccccacttctgttccctgagccgagccgaccatctcaacccatggtgcgtttgcgtgcctgcttcatcgggaaagagacagagtacgagagggctgttttctagacaatctagcgatcgatcggcacttcgaggtttgacataccataatttgttgattttagggactggaagggtatagacttctgctacttgcttcaagaagattaagtctttaacgaccagtcaggcaccaatgctaattgtttctaggttcttgaggatggggttgtgtgattttacttatctattgtgttgctttagaagtagatgtgattgtgtttacttcaagaatgttcatacaatgcagtaacttattcttacatgatcaaatgattaccac

SEQ ID NO: 153895 - DNA, 371 bp, Zea Mays
ccaggctggagcacaactgcatcaagcacttcacaaagttccaggaattcagcaatgactctgactgagattgcccctttcgcatcggagatccaatggaaattagggagagcatctttgaccaaccgtttgttggcaagacgtaagggcaccaaatcaaacattgcaggagctatgtccttaatacatctcccctccaaccatctgtccttccagaaaagggtattggctccatcaccgagcttagtaataatggctgcagcaatcagatttttaaccaccttacaaacatgaatggggaagtccgcccaaggcctactggggtctgttttctgcagccatggccagcgagctctcaaagcccaacagag

SEQ ID NO: 153896 - DNA, 400 bp, Zea Mays
ggttcaccaccgacaattcctgttccattgagtttgacccttctggtttttctgtgaaggatctggccaccaggacccctctcgtccgatgtgacagcaccgagccactctacacgcttcgcccttcatccaccagcgcgtccccacctcccgtcctggtctctgccaccacctccaccacttggcatcgtcgtctcggccacccaggacctgacgtcatgaccaagctttccagtagtctagattcttctcatagtaggggacattttgagggcctctgtcatgcttgtcagttaagtcgacatacttgtctcccgtttcctacttcgtcttctcgggctgagcaggcttttgacttggttcattgtgatctttggaccacccctgtaatcagtttttc

SEQ ID NO: 153897 - DNA, 290 bp, Zea Mays
atcaagtacaaaatatattaaataaacatgcatacctgtttcaaagtaaatttcaatattatttgtccggtctgcgcttccttaaagcaaagaatgcctcaattatgtcatcttctttcacttcttcaaaaatgtcacgctcaatgtatgtgaccagacaatcatccaagagattatcacacatcttgtttcttaatttgggtttgattatagtcatcgcagagaatgccctttcaacactagctgttgccactggcagcatcaataccaatttgaggagcaagtaaacc

SEQ ID NO: 153898 - DNA, 1525 bp, Zea Mays
gttgtaacctgaacagatccatattcttcatgtagtttaggtaactggattatcgtcaagcctccagccttccgactcttaccacggccagtagctccccgcaacacattaacagaatatacaaatttgccatctctctcagatattttattatactttggtgcttcccaaccaagtttttgacaaaacttttgtagaacagctttcggcattttaccagaatctccctgtggttgagcaaaagaaaagaacggttagaaaatagtacatagcagaagcacaaatcaaacatgaaacatgtcccatcaatatgaagaaagagtaaaaaggcacttggaccttcttccatatatcatctatgtttccaataagatggccataaccatcatgtgataatttctctatttgttgctgtttcaagatttctggagccactgcttcccaagcagatgagtcttcaaagaacatgttatcaagctctatcacctcttcgtctacctcctttgcacaagttttatcaatatccttaggaatttcctttttcaaatcagatccttcatcaatattgcctagactctcagatctttcctcacttgcctctaaatcattctgaacaccctcaacatttgcagtttcagaatttgaagatacagaattggtaggatagcttatctgttccttcaagtttccatgcttggaattcttttttgcagctgttaagtgcgggagggaatcataagatagttcgcggtaaactatctcaactatgtaaacttccaaaaagttgtcagggccacagggccatgtaactaaaaactagtagacaacatatgtcatagttacaatatgaatgccaataaaacaataagcaaagttacccttgctcttccgcctacttggctttgcttcgacaacttcaaaactttgtaagcagtgatcctcccatgtagaggaatcattggaatttgcatcctcttcctaacatcagtgatatccaaaagaaaaaatgtaccaagaaatatgatattaaaagaaatgaaaaggaataacagttaacagaaagacttgatagaggttgtgaaattgtatgcataggatattcggatgttgggtacatgcaacctcagatacattggtgaaaggtgtcatgttttcataaatttcccattcatgtgtaaaaaaaagattatttagattgaccacaagaaaataacattagtagatgtgtcatctcaaggacttacattctattacttaatgtttactggcatggagttattacaagtaatagtcaaagctacatattagagttatcgctcgctggtgtccctggcttggaacttggaaaaactcatatgttatctttataagcagggtattacctcgttctacaaaaaaactacacattggagaccatgtcaaaatctaaaactgcagtgaggatagttaacgttttgaaacaaaaagataaaccataagcaataaaaataagaagagacttgaattgttgtgaaacatagttccc

SEQ ID NO: 153899 - DNA, 341 bp, Zea Mays
gcaaagattcctaagactcagaatcatccaacgcaggactgtgggttgattccaataaaatccgagggctcttaagaaaaactcccataccgaaagggtatgcttcaatcctagtcatccaatcatggaccaaaggctcaaattagattgggactggtatgaaccggtatccactccccgccatcagatcaagcatcaacggtatggattaaacccgaccctcttcaaactcgcgaacaaccccagccgctagatcacgatccaaccgccagcgcaaccgctggccaatcggttaatctgcttctaatctaggccctccatccaggatccgacggcggcgc

SEQ ID NO: 153900 - DNA, 1790 bp, Zea Mays
actggccaacatactgcaactgcaattcatttgatggccccccatttcacattctagatcataattgacaactgaatcagctttcattcacatgtcaagtgcactgcacacaaccaacctggcaagatagtgaataactcaacctatcctagagtatcctctactggccatggatgccattaaatcataattgttgatctaatcacaatcttggctacaaagcccatctgcccttgactgcctattagacaaaaggcctcccacaggaattagtccggaacttattgttcacatagtaaggttgcagctactcaaagaattcttcgttattcaagtggctgcaataacttatccaagggggtgtgatctgtatgtctgatgagggctattaaaccatccaaagttttatatacctctttccttttcttgtgccttgtgtctttagccaaaaactcatgtacctcatttcctacctgaatcaagctactaccaggtgttttctcaactccgcaatcacgcattgttctgcgagcatccatcacactgtcccaccttccctctagggcactacaatttgaaaccaacacttgataactagaattaaaaggttccatttcaactatctttgtgctgacatactctgacaactctgcatcaccatgcgtaatgcaagaactaagcaaagttacccaaatgacaaccccaggcttaagaggcatgctttcaataaatcgaactgcctcttgtaacttaccagctcgaccaagtaggtccactatgcatccatagtgctccattcttggaacaatgcgacagtactcaaccatttgattaaagatgctccaaccttcttgcaacaaacctccatgagcacaagcaccaagtgcagcaacaaagactgtatcatccagtgtgactccttctctgcacatatcattgtagaccaatagggcttctctaaactgtccattataagcaaaaccagatatcattgttgtccatgtaatggtacatcttgttttcattttattaaaaactaaatgtgctcttcctacatctccacattttgcaaacatatctacgagtgcatttcctaatgcaacggttatatgagtgttgcttttactaatgtaagaactgatccagttgcagtattcaacactgcctagctgagcgcaggctgagacaacacttactaatgttgcttcatcaggcatgaatcttccctcaagcatcatctgctgaaatgtgcacagtgcatcatcatacctcaagttgtggttgtaccctgtaatcattgcattccacgaaaccaaattcttatcaggcatctgatcaaatagcactctagctgaatctagttccccaatctttgcataagcagagaccatagcagtccaggaaactacatccttccgatccataatatcaaaaagtgaccatgcagattcaacattgccacttgttgcataccctgagatcatgagattccaagagatggcatctctgatcggcatcctatcaaacacagcacgtgctgacaccatgtcccccgccctcgtgaatgcagcgacaatagtgttccaggagacaacattcctctctggcatcgcctcgaacaactccatggcccctgctgcgtctccattcgacatgtacacaccaactatggagttccacgaaaccacgtctctattagccatttcatcgaacacctggcgagcgattccaacatcacccgggtcgctgcacttgtagtacacgttcaggagagcgttctgcacgaccac

SEQ ID NO: 153901 - DNA, 324 bp, Zea Mays
aaatcagatgccatgtaactgaacaatttggttcgcagaagttgtaatggcagggtgtgaactgttgaacacaatcacctcgagttatctctctgtttaatcaaaagatgtggtgtagtatacagttaatcctggaaggtctttaattgtttaaccgggaccaggaacaggaacagatcatcaaagatgatggatcttttagtagtgatgtatactgacagtttctatgtgtagcaaaatcgaacttttggtcagcattcatgctacaatacatggaactacttacttgtttcaaggtatagtaggtagcagtcttaaactgaa

SEQ ID NO: 153902 - DNA, 737 bp, Zea Mays
gaaatcaatgctgaccccttcaatgggccacaggaagttgatggaccaccacctcaggtggattaggcccaggatttggaggttgtgccccctcaggtccaggttgatgtgcctaacaacattcaccatcagaatctggagatgaatctcatgctacaccaggactggcagcctgaccccgtctttcagttgattgaggagagaaatagagctgtccagttctctaggctctgggcaaaattctttgctccggctggtccgactgatcactcggtgggtgtccctgagaagtgggcaccctttttcatttcgaatcttcttcagccggaatccttcaactggtcaaagacttttcttctgtcaggtttccctttacagttgcaggagcaagatgtgaattccatcccttttgtggttcctaaggattgcccagttgacccctccctgggggatgtcacctctggggcctccaaggattccactggttctggtgggccgactccaatcattgtggagacagggctcagaagaagcaaaagattgaaggaatcgcgtgacgggttcaggcatggggcatgtccaaaaaggaactgcctcatgtgccagcataacttcgatggcccaccaccgctatcctccaaggtgctgcggaatctgggaaccaggctttgcaacctgtctgaggaggacctgtctgaacagaggctgaagcagaaaaaatcgtctgtgggacctgt

SEQ ID NO: 153903 - DNA, 937 bp, Zea Mays
ctatcatcaatttgctacagctgtgttgttgtcattggcagctttgttaaattatgcacacctaatttgctagtggagttacagaagactgtaaatctctctaggtaaaatttctacatttttttccttttagcaagaatttgaggtttggaattttctgccttgtaccatgcataatgttcatgtttattttttgctttgtatcagcttatttaattgtttgttggcccagaaaaaccaacacgtcttatttgaaacactcaaaatttcaaggatccttgcaaaaaaagatcagcactttttcttggagagctttaccaaggagggtgtaaagcatgcaattgagtatatcgtatcacaatcaaaaaataacagtcaccagaacatgaaagaatattgcctttgcttttacatggaaacttcctcgactgttgaggcatgcagcattgcgaataattctgttacggaactagcaaaagagataaagaaaaacttcttatcggtaaaagggagtaacaaatctccaaataggtttggatttactctcaaaagtgtcagggacttttttgctaggttgaatttatattcctcgacacaccttgctgaaaatcctgatagctgcaagcagttgtctgatctttcaaggagattattgtcagatgaactgccagttacttctaattttgagtttgtgcagagtgggtctatcaaatgtttgtcagtttatctctcaaacggggcatactgcaatgcagaccttaatgatggacctgtacttgagcagcttagtgtggtgcatagtcggttgcataaatttgctaatttggctctcacccccttcaatgaaagttcagcaaatccacttgggattttggtggagaagctgctagacactttgcacatgtgctatggcagttttccggtactgctatcttat

SEQ ID NO: 153904 - DNA, 492 bp, Zea Mays
gtcacccgaaccctagggtcagaccttctttgtcagctcaaatgctcccaagtcagaatccttttaagtggggtagtgttcttggcagacttaaccgtcttgccatcccaagggattgatgtgatcttagggatggattggttgaccaaacataaaggtatcatcagttgcgcaaacaagacagtccttctcatagaccaccaaggaaagtcagtctcttgtcaggctcggccacccgccaatgatccaatgatgtttaatctagcaacagaaaacatatcagtggtagaagaattcatagatgtgttcccagaagagttaccaggaatgccaccggaaagagaagtggaattctacatagatctgattcctggaacggcacccatcgcaaagagaccataccgcatggctcctaccgagttagcagaattgaagctccaaatcgcagatcttcaacaaaaagggtacattcatcccagctcatccccttgg

SEQ ID NO: 153905 - DNA, 297 bp, Zea Mays
tgaggggctactggcctactgaagaaagctatggcgccctcaccttgatgtaagacagccccaaacccaactccagaagcatcactatcaacaataaagtgacgagtgaagtctggcatctgcacaaatggtgttgtgatgagggtttgtttgagcaatgtaaaagcctcggctgcttccggtgtccaatggaaagactcccttttcaataaggcggtgagaggtgctgctattgttccatatccagcaataaacttctgataatatccggttagtcccaaaaatcctctgagagct

SEQ ID NO: 153906 - DNA, 310 bp, Zea Mays
gctgtttgtataggccaagggcagcagctaccttggctgcgtacaagtgcgccccctttggttttttgtagattaggcaaggatctccttgattggtggtgtttctataaacctaggacatccttgcctacttgcctctttttgtccttgtagattaggcaaggatctccttgattgggggtgtttctataaactcaagagtccaggacatcctttcctatatatgtatgtgctatgcaccccaacataatcaatctactacttcccagccatacctttcttcatggtatcacgagaccgtgtcctctcc

SEQ ID NO: 153907 - DNA, 723 bp, Zea Mays
tggaatatagttccaagaagaacgccaaggggaacaaacctagaaaagaaagaaacataatttttgaagctttcagaacgcctagagaagctattgaaggtcagtatttcttttcttgtccaaccaattagtagtaggttctgttatcatattagtccatatgaatttatgaaaaaatccacaacatacatgtgcagctgtttgtcactatctatattagttacatcgttgtgattaagaataaggaccacatggtttctagactgaataaaaatatagacaagttgctgtgatatgtttgttgtgtgcatatattgtaaaatagttatgaaactctgcacatatttacagcacacatacagaacagatctgttttggaatgataaaactacttcaattacttctaaggctgtttagttcaaactgaagattattgttttcccctttcctctctgcaacatggccattttattactccatttgtcattctatttgatctaaagaaaggaggtcagtgcaagatacatatgtgtttcaaacttgcttctgaaactatgttcatttcttcatttagtcatttttagaaattgtatacatttttcattctaatttacaaagcttagacatatcttcaatgaattctgtattttttctgtgcatgtattacctacaccttgtgttgtttgtgaccagcaagcacaattgttggtcacttaatgacca

SEQ ID NO: 153908 - DNA, 338 bp, Zea Mays
catgtacaagagagcagaaaggtgctgagaaggggaggtgcattaacagggagattaacaggggtataatttcgaggtatcatcgccgaccatttggagctctaatcgtcgcatatgcagattggtaacatctaacatgggcatcgtccgccagtatcaccgagcatttaaatctatcgccgacctctaatcctattgagcatcgtcggttagtttgttcgtagtgtttgttcgtagttgacggtctaagtcttcaaaatagcccgccactggtagccattgtaaaactaggtcactctggtagtgtttgttcgtcaaaacaccccaaccagtttttt

SEQ ID NO: 153909 - DNA, 721 bp, Zea Mays
cagttccagagatactggcgtttcatatgcactgcactgtttcgaatattctgttactaatatattgcttccctcgtgaagtttatatgcttaattgcttatgtagctctctgtttgtcattgtaatcgttcagttgaacaactttaatagacaacgttaatacgttatagtttcctcttactacagaaattgagttctaccaaaccagatgatgttaagaaaggatcctatgcttgcctgcgcaatgtgaacacggaacggggttctagcagaaggctggcctctgaacagtttgatcaggcagtatcacttcttcagaagaacacatctcttccttctgtgccagacgttgtatcaacaggttgcagctcacccggcctgtctcaggattgctcggtctccatggaggatgctatgtcaacatgcaactcaacagaaagctctgatgttgagtacctcaataataatgacgacccctcaatgacatcttcttcgcattggtgggccagtgatagacctcatttctctgatagtatggatgttgcaggtttgtttactaatcaaaatgggggcagttctggttagaattttcgtgcgatgctgggtttacaggacctgtttattcttgcagaattcaactggaggaaacatagtcctaatcattacacctataaggatccacgactttctacaactcttgcctgtgaaatttacgagagc

SEQ ID NO: 153910 - DNA, 497 bp, Zea Mays
gcgacaatgaaggcagtatctgctagcaatgtaggaagagcaagagtcacctttgtcgatcaaaatccatcgccctaggtggagatagcccctgtcatccataaccacccaacaagaatgagatcccctcccctcgcaaagagccatcaaacaatccactccctaaagggagtgttcacacaaatagctcgaagaccccccctgttcaatccttagagccacccctacaaagccaaagtttggatcagcttgtcaagaggccaactgtccaagtcccaccgagtcgaggactcatacacatcttcgccccttagacccacaatacaagaacgacacgagaggtcaatgccttgataccagcattaacgaggacctcacaagctaacatggcttagtagtcctatgaaatctttgaccattatatctacaagggtactaggtttccgaccttgctaggtatagggcggaacctcatagcatgagtcatcatgtccaac

SEQ ID NO: 153911 - DNA, 425 bp, Zea Mays
tccatgcacaagtctacaccaagaaactatctgcgcacagaccaactacaggcacagccagaccaacataataaatgcgccagaccaagcgtgcaacgcccctataaacatagccggatacgcgaaggcacagagcctcatcatacaaactatagtacacacttacaacgagggcatcacaccttacatcggttcaaccttcggaatgattctcatctccctatagttaaataacattatcctaagctcctcaccctcaaaaagacttcgcaactccccctcacccacactcgccccagccggcgaggacaacaattcctgcttgccagccctgcccacacgaagccgaccgccatccacctcactcactctacgcttcgccaccgcccttcgccgcctacgcccagcactcggaccaggcacaa

SEQ ID NO: 153912 - DNA, 475 bp, Zea Mays
gaggaggggcttaccagcggcgaggttgctccggtgaggtggtcgagggtgtaggggaggttgtgacggtcacgtcgatgtgcggatcgtcgccggggatggtcggagtaggtcggtccacgtgcacaggcaggggagctcggcggcggtgagggctacggcctatctagggcggtagagttcaattaaatcggtcagtgagcttcactaggtgtcagggaaggcatgggcgcgaggaattgaagaatggttcacctgatagctcggtctacgtgcggtggcgggcggccgaagtccggcgacggtgatctcgttgttccggtgaggcagggcctcaatccttgcttggagaagcttcacggcttctcggggaagctgtccagaggctcgggtgaggctaggggtctatggaaaaggctggttgcggtggtcggcgctcggtggctcgggcgggcggtgcagagctcgccggagc

SEQ ID NO: 153913 - DNA, 631 bp, Zea Mays
caatgtgtttgtgtagtctaagtttggacaaagccatataggctgctgacggtgctactgttaagtacgaactgctaagaccatgccaacattatgtataatgtgtcaatgtgtttctgtagtctaagtttggacaaggccgcataggctgatgacaacggaactattactgttgtgcctgttactgactcaatcctgtgtgccgttcactcaatgcatgccttagtcctctgccattttgcgctattgcaggatgcctgaatcctctatcgttttgcttcataaacattatttgacagcggatcggatgccagatgcatttcgagcttggttaatggataatgcttgttcattgagtttacgttttcacatctgagattcgactatgcgtataaagggctcatgttctgagtaacacttgctactttcttgctcttagttagtaaaatagtaagtgatgttcaagtatgtttctctgatgccctaggtgtgtggtggtctggtggattaaatgtgaatgttgagctgcaactttcaccaattggtttggagaaagtcaatagaggcttgggttcttttagttaagaaaaattgtgctggtgttcagttctaacatgaaattgtttattgt

SEQ ID NO: 153914 - DNA, 696 bp, Zea Mays
cgagacagcgataggagcgacgaggggcagggcgtgagcaagatgccgcacggcgtggcacgtagtgctaccatcgccgatgagcatgatgagcgccatcgtcatgagcaccgtggcggagaagagaaacgaagtgtcacaagtcattgctagccgctaggaaaagtgcttcctcaggagtgaggagctacaaggctgttgcgtgcttgcaacgagtccttggcgagtattttattgtagttccatttaaagctgagcatatactattttgctagagctaggccagttgggaacgagatagagatggttggtggccttccgatgcaaagcatggacgacagatacgtagtggatggatgttgttcgagacatttggttcattagctcatctgtttcttgtagctggatcagaattaaccacccctcgtgcatgacgcaagatgatactggacaccgctcaactcatgcatggtttatgaatgttgcatcatgaatccatgcatgacctctgtttgataattgttgaggcatgttttttctctatcgaattattgtgcaatagccagagacatctttatggttctatctatccatgaattgtgtgtttaatgcgtgtgtctaagagaaaataaaaggacatatgttcagtggaagatgttgtgggtctttaaaatcggcagtcataccgtgtattta

SEQ ID NO: 153915 - DNA, 460 bp, Zea Mays
tatactacgacagaagaaaaaattgtcagcatatttgcgcccatgcaagaccttgcagcttggccctgatttcttcattcctcatgatgctgatgacgacacaactcactcaacccttgttgatgttgatgagcccatgggatcatcggactcggagaatttgagtgtgccgtgcacaaattttgttcggaaaaaacggagtggaccatatatttgtgcacggtctgcaaacagagtgtctgaagaagacatggccacaaatatgagcagaaggaaaggggttcctcagagatcgcctttgtgctaataaattcaatagttaattattttcccttttctttacttctttcatgttctttatctcttggactaaactggtgcaacaatgatagaattttgtctcagtactaccatgtgattaaaatacatcactagaggcaattgtactcaattcttcaag

SEQ ID NO: 153916 - DNA, 410 bp, Zea Mays
tcatcactttcaatttcccaacgatggagaagctctttagcaatttctaattgtgatttgatgctcccaactttcctctggccccacttttgcaggctcctgctgagccgctgcagcttcatgaacatacgctcaacgacacagttagattgcaccggagcctcccgactttgcttaactacatcaaacaaaccaggaaccttcaaccagaagctctcaaaatggaatctgcgcttacccttgttggccacattcaaaccaagcaggagcgaacaatgatcagagaccccagccgccatactttgcaagactgcatcaggaaaaatgccattctagccatcacaacagaaggcacgatccaagctcaccagagtaggagatcgcctttcattggaccaagtatatttccg

SEQ ID NO: 153917 - DNA, 283 bp, Zea Mays
caattaccggccgatatatattccgcctcggcggtagagagagcaacggaattttgctttttagaagaccatgaaacaagagatcttccaagaaattgacaacaaccggaggtgctctttctatcaactttgcaccccgcatagtccgaatccgaatatccaattaattcaaattgagcacctttgggataccatagaccaatattgggagtatacttcaaatatcttaaaattctttttgcggccttcaagtgaatctctctaggtgaagcttgaaatcgag

SEQ ID NO: 153918 - DNA, 296 bp, Zea Mays
aaaatggattcgatcaagggggagtgttaagaattaattcaacggtgatctcatctttatgaaaagacacccgttcaggaaaaggtacaaccgttcgtcgccaggatgcatgaagcaaaggactccgggaaatagagatagttagtgattaggtgtctgttagaaaaggtgtctgttagtgaaaagttgtaactctttctctctctgtaatccacgaaggggtacaaagacaccccttcactgtgtataaatatgtactagatcaatggaaagggactacgagttctcattctctc

SEQ ID NO: 153919 - DNA, 281 bp, Zea Mays
cccaaagtagcccttaaacaaaaatatggtaaacattgaatagtatagctcttgtcaactggatgactgatccttaaacacaagtttgcattccaatggttgatgtatagtttagataaatatagtgcagctggttaataatagttttcatgtgaacttttgttcattaagctggaatgcaagaaactgtcagttgtgaataatacaccacatccgtcaaaccacaccaaaataaaggatatgaactaaaataactcaactctcctcaaatcacattatga

SEQ ID NO: 153920 - DNA, 327 bp, Zea Mays
tgccaacactagtattttcttggctaggttccagttggcccttacaatttgtctgtatcacatcgatacaagttcgcatagtacttgcacttgtctcttccctccccatttgtagtttttaccttggtgacgtgatccaaaacatctgaacttaagaaattgctttccttttcttgttttcctcgtcctcttgatgtttacctccagtctcctcgtcaagctctaccatttcattcacatgatttgcaacggttccatcagtgcccccctatctataaataaaaacatgaaatacgccatcatccaaaagaggatagctgaagtctg

SEQ ID NO: 153921 - DNA, 432 bp, Zea Mays
tcttgcagttgtccacgacgaagtcgtccgcgcgcggctggtcccggctgctgtcgatgatggagcccaggaagtcgcggccgggcgccagcgccgccgctgccgccttgcgctcgctcgccagctgcaggatcagcgaccggatctcgtgcgtgagcttccagatcctccggttcttcctcgtgggcaggtgcctgagcgacgggatggtgaagatgacgctggtctcggacatgaggcccgacagcgccctgagccggaggaagatctcccgccccctggagtagtcgcccccgaagcaggccctggagatgacgtcgaaggagaagctccggatgtcctcgtccacgtcgagctccgcgacgccgcccggcgcggcggcgaccttgtcctcccacgacgtcagcagcggctgcgccgcgtccaccatca

SEQ ID NO: 153922 - DNA, 294 bp, Zea Mays
taattggttcgtcggacttgatgcgctgtccctgctgcaccctgaggtgacttctgcagggatagtgttcgcggcaaattagagttttacgcacttattgcgctagtccggctgcacccttaggcgacttctgcgcggatagtcttcgtggaagacttcgatttttcgcacttgttgtgctaatccggctgcaccctttaggcgacttttgcgcggatagtcttcgtggaagacttcgatttttcgcacttgttgtgctaatccggctacaccctttaggcgacttctgtgcgg

SEQ ID NO: 153923 - DNA, 371 bp, Zea Mays
gttacacagcttctaataagctgccttccacaggtgaaactgtttcaccaactaaacaatcagtactgactgcagcaggatctagtgctcttgaccatttttatcaataaccaaagagaaaaacgtccccatttatgcagatcccagagccaattgttgaggagtttattgaaatctatctgcatcttaacctttagaatcagtttggtatgatggtttcttatttttccttcattcaacggccaatatgtcccatcatttcaaactggcaatgaacttcctttcccttcaaacccagctatctttacaccaattgatgtgaacagagacaaggttcctgttgctccaccttctatacatcatgctattcc

SEQ ID NO: 153924 - DNA, 695 bp, Zea Mays
aaatctcccaagtgaccaaaatgatcagggaattaagaccttttcttagactcttctcaacttttttgatactttggcaccaccagtttgagaaccgagtgcatccaggctgagggacaatggctaggaggcctaaattgtgtagaatggacgtccatatttgtcgagcaaacacgcaggagacaagaatatgctggatggattcctcagcctgatcacacagagggcaagcaactggatggggcaggcctctttttgccagtctatcagttgtccaaaccctgtttttgattgccaaccatacaaagaatttgcatcttaaaggggcccaggtcttccagacacgtcgccaaggggcaaaagagatagagccaacaaagaaagcatcataggccgattttctacaataagtaccttgagcagagaggcgccaaaaatgttggtctgcgatgttaggttgaagaactaccccatcaaccaagttctagagctgcagatactccactagaactgatacagataagcctccccttatatctgacacccatttacgatctgtgagcccctctgttactattcttcgctttaaagcccttttagaaatcatttggatcagggttggacagtgttcaaccacagttttaccaagaagccaacgatcagaccaaaacttcacagattcaccactgcctacc

SEQ ID NO: 153925 - DNA, 531 bp, Zea Mays
ctctcggttcacggccaaaagctctggtgactaagcgcggcgagtgtgcgaagctgaggcgaggttgtgtagggccactggcctttagaggcgcgggtgcgaggagggcgcgcgacgaactcgaccgtgcactggggcgagcgcgcgtgcgggttgggcgaacgccggggtgccgaccagggtcgaacacgtgtgtgcgtttcttctgcccgagttctggcgcgagtagtcactcatccaagcctgctcttgccttggtcagtgcacaaaacctcttctccctataagctaccgattatgtgtgggggtcaaaggatttggcctactcgttccaaagatatggagctctcaagtcgggtttgtctctcaacccgagcccgaggcaaatctttggttttgtcgtgtctagggtccgaatcccaatgccatcttcagatatgtggtagagggattagtttagcacatatttgttaatgggagcttagggttttgagttagggattaaggtgaacgcactcgagtttgggttag

SEQ ID NO: 153926 - DNA, 295 bp, Zea Mays
tggatattatcggcgctttgtaccaaatttttccagcattgctaagcctttgactagactcttggagaagggtattcccttcgtctggtccggcgattgtgagggcagttatcagtcattgaagagcaagttggtggacgcccctatcctagcgttgcctgagagcggtaagcgtatcacaatttatacagatgcttcgcgtattggtcttggttgtgtgttgatgcaggaaggcagagtgattgcttatggctcaaggcagttgaggaggcatgaggggaattacccaactcat

SEQ ID NO: 153927 - DNA, 281 bp, Zea Mays
ggcggagaggttaccagcatggcacaacacgacgttgaagcagttggcatagtcttggactgtagacgtgaatggaaggcgtgcgagctcaaccagcctggtgccacaaagtgccggcccaaaacgcaggtgcacaattctcgaaagcgctcccatgagggcatcccttcgtcctgctcgagtacatagtaccaagtttgtgcgacgccggtgagatgacatgaggtgagccacgtgcgatccgaaactaggttgtgttgcccgcgaaagaattgttcgca

SEQ ID NO: 153928 - DNA, 617 bp, Zea Mays
ctcggtgtgcccaacacgctcaacgtgctcaccgcctacccgcttctactcgtcggggttccgggcctcgtcctctgcctctacgacagcgggtgcttcggcgtcaggtgccccccttagcacttaccctacctttgtttgatgaaatgtctaaagaagttcgtcttatgtcctagtcctagtttagtaatttgcttacacttgagtcaagtgaacagatcgatgatccttacattgaataaattttttggctaaccaatgttttttggcatagtagttgtaaaatagtccgatcttttgagtcatgcttgaaagcttcagaactcagaagaggtcaagaggaggcaataggtgattaattgttttttgctattatgtccgaatgaggttccactaatcctgtggatttttaagttaaacgagatggcactcatgaatcatgttgagaacctttgcttatatgtcttctagccatctgcttgcttgcttgaggaaatgctttgcttcaaaatgtgcaatttaatcttgccatagtatagaatggctgggtaatggggatttgagtcatgggcgttcaattaaaagtaggttgatatgcttcaatgtaagccaataaa

SEQ ID NO: 153929 - DNA, 611 bp, Zea Mays
gtcaatgctaattttgtggtggcttcgaccgtggttgctgaagacaattctgatgattctgtgtctaagtgttttgagtctgatgattctgggagttcgattgtgtggacagaggagtcttcggatgaggatttggattactttgcggcattggatgtggctgcggcggaggcttcaccgcgtgtaatggatgatgagggtcttctgggtgcgagtgttgggcataggcggcgaagggcggtggcgaaatggagggtgagtgagttgccgcgaagtgataggcatcgtcgtggtgaggtggaaggtggtcgccttcatgtggacgggactggcaagcgggaattgttgtcctcgccggctagggcgagtgtggttgagggggagctgcgaagtctgtttgcgggtgaggaattgagggtaatgttgttcaactatagggagatgggtatcatcccgaaggttgagccaatgtaatgtgtgatgccctcgctgtatgtatgtaaccatactcttgtgtgatgaagctgcgcgctttcgttgatcaggtcgctcccgtaggcttccgtacggagttttttagaaaagacttcgattttttcgcactagtattc

SEQ ID NO: 153930 - DNA, 844 bp, Zea Mays
gcctttgtcatgatatctgcaacttgatccttcgtcgagataggacggacctctagctggtgtgaagcaacacgctctcggacgaagtgatagtcgacctccacatgttttgatcggcgatgaaatactggattagcgctcaaatatgtagcaccaatattgtcacaccataggacggcagcgtgggatgaagaaatgccaagttctcgtagcaatactttaagccatatcacctcaaccgttccatctacgatggccttatactctgcttccgtgctcgatcgcgagacagtaggttgtttgcgagacccccaagaaataagattaggtccaatgtaaacaacataaccccctgtacttcgccgatcatcaagattgccagcccaatctgcgtcggaaaaagcacttaggagagatgaattactcttggtgagacagaggcccatggtaatagtgccatgtagatatcgcagaatccgcttaacggccacccagtgatcaacagtgggcgctgtcatgaactgacacacatgattgaccgagaaagcaatatctggtcgtgtgagcaggatatattgtagagccccgacggcactccaatatcgtgtcgcgtcctgagtggtgtaccgcccttcagttgcaatttttcagtgggcaacatcggcgtggaaaccggcttggatgtaatcatattagtccgagttagaagatcttgaatatatttgtgctgacatagtatgagcccatgtgatgtgtggtgacattctatgccgagaaaatatgccaaacgtcccagatccttgattgcaaaatcagcacggagttgactgaggaggttatcaac

SEQ ID NO: 153931 - DNA, 459 bp, Zea Mays
taatcctacaaaggtaccagaccaaattagggctccgtaacactcccccagctgggaaggacccttcatggtaatgggagtaccccgacccaagggcaactgtctagctacgaccgaaggaatgcctcccccagtgtcgaaatatctctataagttttatctatagagcaagtctgaggggtcgaagtttttcccttttgtaactaggtagtgcacatgggtatgccaacccggtagggtctgcccccataagcccagcctgttggcctgcacccatgcatgattagctataaaggaaaactaccctctcaagatatgcctctatgatagcaattttctactgctccacggtctcaccctgcagtttctgatagtgttttatctaacccacctgcccagctcccatcccaccaggcataatgacatctggattgaacagccagggttgcagtttaggac

SEQ ID NO: 153932 - DNA, 426 bp, Zea Mays
aattttttaaaatgaaattggcacttggcaacaccatgatgggaatcggatcgttgagattgaggatggttcaaatgatgatgacatggtggaagctccatttatgggtggtgatgttggtagcaatgaacagatggtagaggattgtgttgttgatgcctctgttgctagtgatgagcatgagcttgacattgcccaacaagttagtctaggaaagaaaaagaaatctatggatgtgaatgaacaacgtgttgtgaaacaacgtaaactagcaccaacaatgataactcctgctatgaacaaggataaaggtccaatgagtatctcaaagccaaaaatgaagaagccaactagtacctctaccaacaagttaatgacatttgcattcaaggtcacatcaagcaaggacaaacttgtggttttaat

SEQ ID NO: 153933 - DNA, 528 bp, Zea Mays
tgatgcttgatcgtaacatcaacttgagctttgctagacgaaatgagtattggctatctaaaaaggacctagcataaaaaacgaaaagtgtaaacaaaaaatgctagttaatactaagaactaagagcatataatccaaggaaccaccaaagtaattctctttctatacacaaaggtccactaatatggtattctatttcagtgtttcgaatgacaatatattataacaagaaaaatataaaacataatacaacatggtgctcagagatgtaattgctaaattcatctttattaacatgagattcaattcaactgttggtatgactaagtgcattatctgctccttatgaggaaagtagatagcttgcaacttgaaaccacatgaacatgtaacactaatacaaatgtagaacataatacaaccgcggtgatacaaccttaacatgagaatacatgtttcacacccataatttaacttatgttaaatgtcaagaaaaatcaatgacacagaaatgagatgcatccatc

SEQ ID NO: 153934 - DNA, 365 bp, Zea Mays
cgcgtctttcgtgcatgttgcgtgtcgacgtttgcgtgtcgtcgtgccgtttgcacatgccgtcgtcgcgatttgtgtgttgttcgcgcgtgctgttcacgtgtcgtcgttcgcgcgagtcacgattcgggcgctttaaggaaattgtttattagccacgaattgttagctattcaatatataatacgccataaactcgtttctattcgcttcagtcgcgtcaactctatagcaacgtcgattttgtagtagtaatgttatctagtcatgtcgcaagtttaattgattaattaattatctatattttcggtattctatagttattcaaaaacaaccttctaattaaaactaggatgtagttttta

SEQ ID NO: 153935 - DNA, 285 bp, Zea Mays
tggttgaggatatgtgtagcagtgttcaaggcttccactcaatagctagcagggagagatgcctaaaagagaagacatcagatcatgttattggtggtgcgaatgaggcgttccagtccggtcattctgagaagtgtaaggacacaatagtcacaactaaacaccatgggagagaaagaaagaacagaaggtggagttgtcgaacttgaggctgttgtcgcgctggagagcatgaatcaggcgatggaactaggtggagacccaagtgaagaagtgtgagagggt

SEQ ID NO: 153936 - DNA, 354 bp, Zea Mays
cttttgataggagcttgcccttccaaccggctagtctagcaccaatcttatcaattagaggctgcacctcaatccgtcgaagttttctagtgtgtaaaggtagacccaagtattttccagggaaggtcgagatcctcccgggaaaaagatgaatgagtgagctgaccgtatctgattgacaacgaattggaaagatttccgtttttgctaggttaaacttgaggcctgagcaattagtgaaaattgtcaagagttgtcgtaaattttgcagctccgtatggtctggattggcaaaaattccagcatcatcagcataaagcgagcaacgcaaacgagctaatctgggtagcaccg

SEQ ID NO: 153937 - DNA, 452 bp, Zea Mays
tcgatgttccacgagtccccgattggtgttccatccatctgagacaatttgtaagatcccggatgagtgagttctgtgacaatgtatggcccttctcaagggggagacaacttgtgccgcccctctcctaatgctaccctacgaagtaccaggcctccgattaaaaacgctatgaaacaaactgctctgttgtggtagcgccgcagagtttgctgatatcgaactgactgaatcactgtgttcaaccgcttttcttctagcgtattgatttcttcaagccgagttgcttcttctgctatatctttgaacattagtcttggtgccccaaatgctaagtccgcaggtagcactgcttgtgagccatataccatgaagaatgggtgttatcctagagtgctcggcttggttgagtcctaagactccagacaacatatggtagctttctgatccac

SEQ ID NO: 153938 - DNA, 1089 bp, Zea Mays
tctgtggatcttctggctctacattcagatcaagaagagaagcttggcaactagcaccaggcctcaacaagttctgtgtgtccacgttgatctggacagttcaaacagttgttaagcacaacttcaaatcagtgcattattagaacaataaactatgagagaacaaatatagctcttattctttataaaatgttagatgaacaggaaactctaccgcatctgaaaaacagctgtgttcactttgcttgccagaaaaacttggaaaaggcattcctgaagttgtacactcagcaagaatcggatctgacaattgattagaatgcctcttgcaattagtttctattgtcagtggcttaaccaagccctcaaagtatgacacagattttttaagaggaacggcagtatcagtgtcaaatgatgacatatcagtgattatccaattactccagtggattggcatgctggcctacaaaaaagtatttcacttcacttgaccttgagtactgataaaacttctgcgaaaatatacaaaacatgcatttgcttggcatacctctgattggtacacaacatgaataggataaaatggtggatccctttcagaatcacaaagcccatgcatgttttcaatattgatgacatcttgatcttggctagcacatttgttcaatttccgagaatgaaagaaagggtgaattttctttccagatgataaccttcgaatttcctagcaattagattaaaatatactttttacattgaaaaaagagcatgagcaacaatattgtaaacctgaagtcaactaaaaagtggggcaactgaaatcacaagtgcttttttccttaaactactagagcacatgtatggagatagacaagctgctattgaacattaaagatcaaggagaggaaaatgaaaaggaagatacagaataggcgctagcattctttctacccatacttgtttcataaggtggcatttaaacagatgtaagcatagacttgcattgattgtgacaatagtaggaagtagagatgccatcaattaatttatcgtgaaagggcctctagcgcaatacttaaggcttcc

SEQ ID NO: 153939 - DNA, 316 bp, Zea Mays
aatgtcacatgtcattgcaaatctcctgggtcagttctaatttctgcagcactaatgctgattagcgtgatttgctgtcacatcacatatctgaaactttcagaatgaacccgctattctttttatttatgctcgtctaaactaaacacagtgtgtaaatttacaaacagaaatgtttaccgctggtgcagaaaaggtctgatgcagagcactggttgtggctgatgatgtttgtagtagctggttcagtcttctggacatgatgcttggattgctctgactgtagtctgtctgaggtttccctcccggatgatcc

SEQ ID NO: 153940 - DNA, 446 bp, Zea Mays
cgagtgttgtatgtactccatatagatacgtatcggcaagtctcaggcaacgtgataatttcctgttgatagcttgctgcacaatggtataagagacggggtatttgtatacgtatcatgcacatccaagtactctatccgtagtcccattataaaggtttgtttaactttttagatatataatatttaacgatttattctgttagacgcaagtttaataaattaattaattgtttgtttgtttatccgttagtcattaaaatagcaatttgattaaaactaaattgtagttttaatttgtgcttgtataaatatacgtgattaatgtatactcaaatgtttttcaactaatactcacttagtataaacatgatatctgctagtgattctcgcgtgtcgcgcatgaggatcgcgcgtgttcgtacgtcgtcatgcatcgttcgcgc

SEQ ID NO: 153941 - DNA, 808 bp, Zea Mays
gctagcagttccccgtcgcacgcgcgtcggataagaattggttttggctcttcgtctccccccatccttgggtccttcccctcccactccctcttcgcctcgtccgcggcagtaggctcaagcttaggaactcgctaccgaggtgtgcacccccaactccgagttccaatctccttgattttttattagcaaaattagctcgagttgctttcgcaggatcataaatttctctagggatttggcatatccgcgagtgagcagaattagttggaggcttcgtgatggcgggcgcgaaggcggatgtagacgcagaaacaggagatggcagcggggtcggcagtggcggcggcggcctctttagcgagcagatgctgattgataagctcaacaggctcaacaactcagccactagcattgagagtatcctttctcccgtgtctactttcctgcacggccgcttgcaaatttggtagcatagggtgttgctgtctgtttcctcttgattaagtctaaagccctaacttgtaaattgcagtgtctatgagtagaactggctaggagatctaagtataaccgtcttgttctgttatgcacagtgcttatcatgttgttagtttggacgcacacacatataagaattacaaatcagcttgtgcagtgtatcagtattacagtatgtttcatatcactctacttcctgacaattctcttgattgttgattctagagtctttcttgtgtagtacattcgagaaaggctctaagtttagccatgtcgttctaacttttaaactggttcgcaattatac

SEQ ID NO: 153942 - DNA, 410 bp, Zea Mays
cacggaggagcacgctgtatatgtacgaggcaccggcaacgatctgctgatcgtcggtgtctatgtggacgacctcgtcgtggtgggagcgaaccaggctgaggttgtcaagttcaagggcgagatggcgaggcttttcaacatgagcgatctcggactgctccactactacctggcgatcgaagtctgtcagagcttgatgggcatcactttgtgccagagcacctacgtaggcaagatcatcgagaaggctgggctctcagggtgaaatccgtgcgacactccaatggagccacgcctgaaatagagcaaggcgagctcaaatcctccggtggacaagaccatgtaccgcagcatcgtcgggagcctaaggtacttggttcacacgcgtcctgacattgcgtttgcag

SEQ ID NO: 153943 - DNA, 465 bp, Zea Mays
ctgccctcatccaccctgcaggcagggctaccttggtcaaatcagttcttatggctatccccatctatcacatcatatctatccagtgccccaagtgggtgatcaaggcaatcgataaaattaggcgagtttttttgtggaaagggagaaaggatataaaaggaggccactgcttggttggatggcagagagtgtgtaggccctatgatcttgggggtcttggcatctacaatattgaaacattgggatgggcaattgggtgttaaacatgagatggttgtggttgcaaaagactcaaccaggtcgtccttgggtaggtcttggtatgcagttcattctagtgcaacagccttatttgcaatctccatccaatctgtggtgggcaatgaaaaaatactcttttttgagttgatttttggctgcaagggaaaactttatccgatttggccccggatttagtttcag

SEQ ID NO: 153944 - DNA, 2452 bp, Zea Mays
ctggatgacttctctcactatttgtggacctttcccctctgttgtaagtctaacacctcccacctttctcacttcttcgcgtgagtgtcgactcaattcggtcgtaccatccaagctcttcagtgcgacaatgaaagggagtttgataactctacgtcttacacctttctctcccacggcgtgcatttaactcaaaattgaatgtcagcccaaaaatgtatttacaaagtttgtggacctaagtgacatctcttaacaagggcccacgatgcattgaactcaaaattgatgtcagcccaacaataacttcatcacaaatataagaatacatgtacaaaaattgaagtttctggcatgcatgatctagttccagcacataattgattgtcatgggtacaataggtgcagcatacaatgaacgaataactcttgaagaaaatgtaaatatatatccaagctataagccaacagcccaacacagacctgaaaagttttcccaaggcccatgttatgcgccaaaatgcacccaagacctttatccctggatttgacctttttaacagattgaataacattttcccacataaaccttattccttcaacctgtgatatcataaactccagtcagactcagatatgggttctctgtactgatattaattgctgttgcaagagtaacagcatagcctttgcaaacagttaaatccccacattaagtcagcatgtgttcaggattaattatgaacatgaataagagagatcttaaccaggcagacctgatgaggcttcagtttagaagacatgctgcttggaatcctaacaggttcctcatcctcctccctggcaaggttgactacatgtccatccccagcatcctgtaaacagatttccagtggagtttcaaagggatttccaacattcttgctccttaacttggtggcagattgctcttgcattgacttcaaatggtcttgccttgcctacaaaataatgtaacagcctagataagacagcttcaaacaacactatacatcaaataaagacacaagactgaaagatcacaaaccttctccattgcaattttacgctttgtttcttcaccaagttctgtatcatccataattcttctaatactcttcttcattttttgcttgctgataacatgttcaaggaatgaccaggagctaactttggcatgctaaatgaattaggggaaaagatcatacctaacaggaccattattctctgatccagaaagctctgcattgctagtctctgaatcggaagattccacaccactgagggccttgtcacattcagaaattaagagctctagttgactgggtacacagcagcaacactgccaaccagtggctttagcttctgataagcattcttcacctaaattccttgacaagcaatttgtacagaaaagaagcttacaagaactacaactttgaatcagttcactttgtgcacaccaagtgcaataactaccagatacaggatcctgcccaaatgtgaacagcatcaagaaattattaatgcccagttcatgacatcaatagtcagacctaatcttgtataaagttcaaatgtatctactattatacttaaggaggtaagcattcacctcaaggcgattcttctctatcacaagaaatctgcatgatccacaaacaacaacatccaagacagggtggcgatgcacatcagaggcattcagcatttcagagcaaatagtacatttgaaagttttatgcaaacttttattagggagcttagggcttgggaagagatcaagatcaatgatatcaaccactttttcaaattctgttgaactaccttcaccatccttttgtaaagcttgtttgctatctatctgcatatcatcatcgctttcaactatcacagttttcaatctcttctcattatcatcatcttcacatgtatgcttcatatctcaatagaaactttgttttcatcagttttgagttttttagatgaaggacagtcacttttagcacctaaaacgccattttctggtagaggaggcttctcgtcacatgatgagaccaaaccaaagttctcctggaaacaggaaaggctggattaaatgaaagcaattcacccaataaatcaaagaccaatcaataatgcatatttataacaaatttagttgacaaaaaaacagagtttgaaaccatttaactttaagtaattaccttacaccagtctctcatcctttttcctttcaaacggcgctgcaggcacttcattatttttgcgtcatcctcttcccttacctatattaagggtagaatttagtttacgattaaaggaactgcacaaaggaatcccctatcaagaaaagcttatcttttgctactaggaagtatgaacccaacagctaaacagaagcagtgagttattggtggtaaattgacgaatg

SEQ ID NO: 153945 - DNA, 771 bp, Zea Mays
cactaaggtagttttatgaagtacataggtttattctgtccaaacagcatatccacattgcttggcaaggtgggctcaaccatctggaatcaggtaccaacttgacacaaaatggtaaagcattacagcatttgagggcatcatgaactttgaaaatgaaatttgtatcagccaagaaggtcaataaccaaggagtatagattgtactgccacaaggtcactgaaaaaagtataattactaatcaatcatgcacaaactcacttcgaattcatcaagatgtgtcaaagcatcaatggagatatttgccacaattgtactcgacgctctcctgaaccatttaagaatctgattctcgattgatgctggacaacagatacattaaaaaatctggttaagttaaaaccacatatttctgaaagattaaattcgtttattgaactctagatcaataatgtatacaataatatcatagaccttgtaacatgtaaaaacaagagcaaacacgaacagaacaaaatgagaacaaaaaagcttgctagctctgaagacccagaatacaaaacaagaaagttcaataattgtttttgggaccatgtcaaggataataatatatataggtatagatatacatatgtatatatgtgtgtacatatatatctctatctctactaatataaagtggcactttcttcctttgtgcgtccacgcgacgctgaaccggtgtggacagtttccttctgacgtgcacagtgcctctcctctccacatac

SEQ ID NO: 153946 - DNA, 486 bp, Zea Mays
ctccatttaaagctttatatggagttgagcctaatttgggatgcattcctgtcactgactctttgaatccttcagaagctcaactcaccttgcagcaaagacaggaattcttggaagtaatcaagacaaatttggcatctgctcaaagcaggatgaagcattatgctgatctgaataggtcttttagacagtttcagattggagatctggtttacttgaagttgcagccttttgcacaagtttcagtggcttatagaccctgtgccaaattatcattcaaatatttcgggccattcaaaatagttgataaagtgggatctgctgcctacaagctattgttgcctgaatctgctaatatacatccagtgtttcatgtgtctcagctcaagacacatgttccagattatactccagtgtttactgagttgccaccaacagctttttctgaaaatgtgactcccaatccagaaaggatattggatagga

SEQ ID NO: 153947 - DNA, 464 bp, Zea Mays
agaagacttggacatccagcctctccaatcatcattagagttttacaagataataacatagctgtaaattcagagatttctccttccttgatttgccatgcttgtcaactaggaaaatctcatcagctaccttttcctcatgctctgcatatgtctactgcacctctggaacttgtacacaccgatgtatggggtcctgcaatttcatcaataaataaatcaaagtattatgtctcttttgttgatgatttcagtagatatgtgtggatatactttgtgaaaaacaaatctgatgttgaacaggttttcctttagtttcaaaaacatgttgagctcatgctaaacactaaaattaaggctattcaatctgattggggaggggagtaccaacgcttacacaaatatttttagtccactgacattaatcatagagtgacatgcccacacacccatcaacaaaatgg

SEQ ID NO: 153948 - DNA, 476 bp, Zea Mays
tataacataagtgactcaacctctatcacgcttgacaactaccacatcacctgatttatctatttggaacatcgcctgtctagcgtactactagtaccccgcattttgactcgacttaaaaacacttcggcatgtcaccacctcactacacaagccaaaattattattatttaaccacacgcctagataagcatgatttcaatttcaacttgcccatattttaaatctcggcataagcttggctattggctaacaaagtgaccattttctaattaccaacatacaccacctttcaccatttgtggacactcgcacgacacatggctattgtaatacatcacaagtacaaatatcttcctttgttgcgactataaccatattacggcatatactcgcacacctcaatcaattatcttacgccaccaccactataatacaccacggaacacacacacatatgtgtccccatattacgc

SEQ ID NO: 153949 - DNA, 624 bp, Zea Mays
cagggatctcccatcgaaacaaggtagctaaagcctttatctgactgacggaaagaggcttatcaaattctctagcgcagcgttccagatcatccgcagaaacaggagcctgcccatttttcaaccctagcttcaaacaaatagtgtgagccgctgagttccccctaaggggaggaagtttggctacacgtcttgatcttcttggcacgaagttgggcgggatagactttctggctttaagctttggagatgaaggaaccgacaacacatttgtgaggggctttacgatcttgttaatgaatgtcatagccacctcctcctctgaagctatacgactttgcttggggtgttttcttcgagaatacacttgcaagaccttgcaaggctgctggaccagggcaggagatggccacataatgtccaaagagctgtgaaggctatcattctgctcaatagacaaatcatcagaatccactgagatctgagtacagactgtgtccagatgagccaagccaccatcctgagcaggttcagacaccataagagcagaagtcacagagtcatgagcttcaccaatctctgacagcactaatgagtcatccacttttgaatctgcaagagatg

SEQ ID NO: 153950 - DNA, 291 bp, Zea Mays
ataggggtaccatctgtggctatctctaattttggttggtgtagcagttgaaggtggcaagatcatttcatttctcagtttaccaatagcatacaatacttccctgaagtatctgttgatggtctcaatagaccttcgaaaggtcatgtgtacaactctaaacctttgattatgacctaccacatgtaaaaacatggcaacctgctcctctactgagttatgaatgctatctctcaatagttgcctagtgtgaaaaaggtcacacaactgcataaaaggggctcttctcat

SEQ ID NO: 153951 - DNA, 432 bp, Zea Mays
cagtgaccggatgaacgaggtcaccgagggcatcagccatgcccttgagacgacgacagtagtcggtgatggaaaggtcgccctggacaaaggtccggaaccgcgcgtcaaggagcgcgcggtgctcccgtttgccaaggaaatgggattcaatggcaagccaggccgagaaggcgttgcaactgtgctccatcactgtgtcgacgaggtcggtggagagtgtcgtagatccacgacttgaccacgcaatccatgcaagtctagttaggggagggtggcgttgaggcagagaggatgtggtcgttgagggagtacttgccaagagtgagcagcatctactcacgacagtgggtgtagttgtcggaatcgatgtagaggacaacgattatgagcgagcggatgtgctggtccgcaaccgactgggcatggagg

SEQ ID NO: 153952 - DNA, 725 bp, Zea Mays
tctatggaaccagattatgaccggttgcaaaacaattggtgatctggtggaagtcttagcttttataaagttcatttctgtagagtttgtttaaaagaataaactctgatagtctgattacaaagttgtcaaatacaattatacaacatatactattatttttcagttggcatgagaactattaacattcttcttgctaaagtttgtgcacgtatttttttaaaataacacaactaacaatagtagagaacatatttttaaaatattaagcaacaggcgtatgaggcactgaagctacaacataatgaaaaatccgtacctctgaaagtgactgaatatatgcagaaagaggttcgccagtacgagaaattatattaacaagcaacccagtgcaatcaacaagaacaatcctttcctttagaagcttctggtcattccatttgaacctttctcccatctcaagacaaatgaaaacctcagtatacgctcattgataatgtcaaactcatctttcttattactgccatttatcttcgaggaacaacccccacagatcttcccctaagcagccagtagtaaaaccgcagactggataagttttacattctcaatgtagttccagagctcttcaagtagattatttgttttttcagcaagaagtctaattgtatccatgaagatcttctgtaaaacaacaagtaacacaaatctaagtgttatgtaga

SEQ ID NO: 153953 - DNA, 317 bp, Zea Mays
gacggagctgataatattaaagatttcaggcctataagtttggtgcacagttttgccaagctggtcaccaaaatccttgctaatagattggccagcaagctcaatgtgatggtgtcaccgaatcagagcacatttataaaagggagattcattcaagacaatttcatgctggttcaacaaacttccaggctgctgcatcaacaaaacaaggccagcttgctgctgaaattagatcttacaaaagcttttgattctgtctcttggcctttcctaatcgaggtaatgaagaagttgggtttcgggcagatttggacgga

SEQ ID NO: 153954 - DNA, 701 bp, Zea Mays
ggggactggtgttttacggtggcggagaccaatttgggggaaaacccgaattgcggagctacggtgagcgagtggagatgagagtaggtgcaatagcttgacgattacatggcgcaactatccctgccctcaatttataggctccaagggcggtggtgatcaattcggctgagccgtgctggcggccggagaggaagaagaagtctggcgtcgtggttacgtgttcccagccgtggcaagctcatcggcgatgatgggacgacagtagggaatcacggcggtgccgtggaaaggctcggacacgtggcgggcacagagatagcacgacggcggcgagcggctttatctacggcggtgagcaaaggggaggggtaccgtggccgatcggggtggcttccagctcaacggcgacgacgatcttttgaccccgcgacgttatcgacttaccccgagcgggaatcccgacgccggcgacgcgaatcgcggcggaggagggatcgacggcgggattcttttgctgtgtccgatctgatccgttggggcactgtaccatcgtgaactcccatcagagcacctgacagtccatatttagggtcgattttctccaatttttgtgtggtgactaagccaaccttctgtaacaaagttgtagagctataaaccgacaataattcggctataggacttgaacccatttgagc

SEQ ID NO: 153955 - DNA, 310 bp, Zea Mays
ttagcctattttcatcttgtatgtttgtgttttcctactattttgggagtcaactatttatccagtttgtttgaacatctcgagcacaagacttgggtccacctaacttccattcaatggcaatatgtttctttattgcattggcaagtgtccttccccttaggatgccatggcaactttaagacacatggagaatatttggagtggaaccttagtcaccgctacaccatctcagcctatgtaataaccatgtgtaaagttcagtttggacataagatgatttgtttgaacttttggggctataaaattc

SEQ ID NO: 153956 - DNA, 577 bp, Zea Mays
ccgctggatatattgaagtagggtacatgcagacaacaatggacgactgaagtttgtggccgcccagccggacacgcgaaacacacttgaaggcgcatatgtagacaaagcttgcgaaggtaatccgtagctgtaggcctctggctgctacctcatgccccaacgagctaacaataactaatgtagtgatacaagtggcagatcgcatcccctgaaacaagcagaagtgtgcacactttccacagacaaagcagatgacaataaacatacctaacatggcaaagttgtttcccacaacaacattccacagctcaagatgactgcagtccagcctcattagggtcatccaatccgcatagggcgaccaaagccttggtggctaggtgggtcagcgggccattgaacaggctgaagtagcgcttgagctcctcgtcagttgcccggttctgcctctgattagagcccgactctggtaggattcccagtcgcttcatgagcacttggcgcgcgcggctctgaatgtctccacgcggccaagcgatggccgctagcctcgcgctcttgcgggtagaagttc

SEQ ID NO: 153957 - DNA, 279 bp, Zea Mays
atccaattctgtcagctccactttagaccaccttttctccaagttccaagtagctttatgggtatgacctttaaccaaactttcacaccaacatatggtcttcaaacttgctacaggaaattcagtccaaaaccatatagattaatcacaacagagctccaaactaagcactaaaatactgatttcagacttgggctaaatccgaaaactcagaattcaaacagctctactttgagccacttttactccaagctgcatatggttttaggggcatcccac

SEQ ID NO: 153958 - DNA, 462 bp, Zea Mays
gggtagcacgagctatgacccagcccccgagggtgttcgagtcggttctccctctcacacttccatggatgttcacgtaggatcttctcctccgcattctggttgcatggcagcagcccaagcttcgggtcaggaagtcgccttagaggccagcactcctgatgacagagttttgacctctgctgatgatactgatctggccctactgatgcattgcgggttgtttcggttggtgatccttcatcgagccatcaactaacttcccacgacttgggagttccttcgttcttttccaacctccaggtaacttggtttttactgatctggctgtaccccaggcgtgatattgttctgatattcatttgtttttaatgtcaggcgttggttgatgaaatggttggttagctgaggtcacagggtgcttctgtcccggaaagggctctatctctagcacattggaat

SEQ ID NO: 153959 - DNA, 580 bp, Zea Mays
ctcagtcttcggcacatactttccaacaatcttaatggcatctgactccacctctcgcacgaaggcagccacaccccgcccacgcaagtcaacagtgaaggttgggctccacgccattttatcccatatcgtctacatccaacgaggtctaatttcacccaaaacccacttgtgcgccaacggccacactccgcaggcgatgaactcttccaccaaatcacggtcgctgctcagccgggccacacagcgaagggccccctcgtcccgacccccttattcaccttaaagtgtggacatgccacatagcaatgagagcacgaaatggacggggcaaggtagacaacccttcgacatcccccgatgccacataaaaccaaaagccccaccagttaccccatttattattgacacaaggaacaatctcaaccacttcagccgaagtcttcccaaccctcaacgtgaaagtataggacccaaactgagcaatcaaaccacctatcttccttttctgccagcgcaaacaatattttttggcgaagacctcagcagacggttctccaccatatgaggatattgccca

SEQ ID NO: 153960 - DNA, 903 bp, Zea Mays
ctccttttgccatgaggcaagttggagtgtaggagtcgtcgtgaaggttggtgaagagttgcgagcttgaagtagattggatggcaacgtttgccaccacttcttcttcttcggagctagaactttcttcatcagaattccattcttcaccaatgtgggcttgaccatatttcttcttcttgaaatatcccttgttcttgcccccctttttgaacttatcctttttgtattctttattggcttcttgttccttctttttaggacaatccgctatgaaatgaccaatttggccacattcataacatgccctcttctttcctttcctttgatacttatcgtttttcctcacaaacttcttgaaggttttgatgaacatagctgtgtcttcatcacttgatgtttcgaccactttctttgtcttgtggtctttgttcttcttgggggaatcttgttcatttgagatcaaggcatgagtgtctcttgtcttgattggggcttcttcagactcatgttgttgaatatttgcaaatagttggtgaggtgtcatttcctcatagtcatcacggtcccttatcatccttgctagacttttgtccttttctttgtatgctctcataaatagtctagtgaccttggagtcactccaatcttcacttccaagcactcttattttgttgaccaacaccattagccgatcaaagagtgattgaagtgactcacccttagtccaatcatattgagcaagctcactctccaaagcttcaattctatgtctcttagctttgtggggtctcattcatgtgacattttgagaatgttccaaatgtcacgagcatcctctctcccttggacttttcggtattcttccgaacaaaggcttccttttattatgctcaccgcttg

SEQ ID NO: 153961 - DNA, 1114 bp, Zea Mays
atattttatggttttggccaagctgttcttcttctgctcattaaatgataaagcaaatccaagtaatgatgtgttctcaggtcactgtgctgccaaatattattcggtagctgcaataatcttctattgacagttcgaataaaatcgtctattgacttatcagtgatatgctgggcagcaaaaggtgtcctctagagattctgacattgacaattaactacttgtcataccaactgtgatccatatttacacctttgtgaatctttctcttagtgcttctttagagaaaagagatttggctactccttaaaccaaaggtcacttagggaatctatattctatatctctgtccaataggtgattcttgacaattttcattagtctgtctgtgggtgaatacttctggattatggtcgaacttatgcagatgcgacaactgaacttcctatttcagaacatcttcaactgcatatgaatatctgctatgtgatttctccttgtgcttgtcattttgtgtagtgagtgagatttagatactaaagatagttccttgcccagaccatttgatatggctatccaagtatgctactttgatcagggcagcacatccactccttcgcaatttgattaatttatggaagcgcttgcatgctttatgtgtaaaatttgactcatcttcaaagaggctggtaaaccttgtgatgcggctaaactgttaaatctacccaacttatcaagaacttctgctggcacgtactatattttttcttatacataggtgtcaagactttgaataactggtgaacatcatgtatacaggagtgaccatttagctttctcttgatgcaaagctagtttatttgttgtagctttgtgatactaggtgatgaagcatgaaagatggtggttaaatagcaaatgggaatcgaacatagccatgagttggaccaattgataggcacagtcagataccattggacaaaagctatcctaaaaaagatagttccactcggtaaagtatctggtttctttctaggtggttgagcctacgttttatcttacctatctttaatccaatagcaccttattgtttgaattgtacctcagttgttgc

SEQ ID NO: 153962 - DNA, 716 bp, Zea Mays
gacgtctctggtgctccctgactccctctcctccctccctacgtctccctgttcctaaccctaaccctaatcccattcggatctggtgattggtgataccctaaccccaatcccattcagatctggtgattgttgatgctcgttcatcgttggtgctcctcgctggtcggctggtgctcctcgcctcctcggatcgagttgtagcttcacagctggacggctggtgctccgtgcggtgctggtgcgtgtgcgtgattcccttcctgattcttctctgtctccggtccggtggtccgtggctctgcgccttgtatggtcactggctcactcctcactgcctcactggtgcggtagtgcccctgctggctgcttggacatctataattttgttctgttttcattttcctcccattctcgtcctccttctaacctgtctggttgcccgactttctttggtgctcggctggtccttgcttgctgttgctggtcgatctgcgcctctgctcggctgctcctcggaccttggctccgttccgtcgtctctggtgctccggcttggaaaggtatgtttaattttagcatttaattcttgtaatcgtgtggatagttgctttgaaccttgtcactggctcactcctcactgcctccattttgttgctttgaaccttgtagccgttgaggtagccggagccgactgtacgttgtagccgttaaac

SEQ ID NO: 153963 - DNA, 518 bp, Zea Mays
aattaagagaaataagatagtaacaccaaaatttgtggataaaggttcaacaggcgataagccgataaatgggtggcttaaatgctaaaattatgcggataaatcccaccagttcttgatggatcggtagttctgaacaagaaaaaaaatgtcacttcatacctacatggctacatatgcaggtctagaacaggtggcacctaatttccggtctgctcacttcaactacttatggttgtttgcgctatagctgtgctgcggctgctgctgcggcagcttcagtccagcactaccaagagcgtccttcattatccaaactgtaaacaatgttatggaagaaagaaaaatgtatatgaagtagttgctttgtaggttgatatcaccccactttgtagaggaacttatgagtgcatcacataaaagataatagatcatctgtacgatactcttaaccttgggttgtagaagaacttatgagcagatcacataaaagacatcagatcatatgtattccttcc

SEQ ID NO: 153964 - DNA, 528 bp, Zea Mays
gtcggccagccatggtaatcgcacgctatcttctacctctagttcggcggcaataacaccgcacctgccctaggtcgcgacaaacccgagccccagaaaccccgcccaaggagtagcatcggtatggagtagttacttggaaaggagaaggtagttctcaccagaaatcctatgcgccggagttgaagctcttagccccgcgaccacatcaccaacggacaacagcacggaccggagcacacgcggtaggtcttacctttggtggggatgcaggcaaacacaaccacgacgcgacacgacagggcggctccgaggcgacatcaagggcatacaagcgattcgtcacgctcctggccgcgagttcgcaagaactggccacgagcggcatcaaagccatcttgcaacgcccctagagctgcttacaaaaactctagcgccgagttcccctggatccacgccgtgacggagccagagctcggtgaggtgcggcaccactgcggagttggattccggcgagcccaatccacc

SEQ ID NO: 153965 - DNA, 701 bp, Zea Mays
cccaatcatacatccatacggctacgagcgacggagcgagcgagggaagttgatgttgtagatgccatccttcctctcctccttccggatcgtagtcgtggcttgactcagcgtagcggccagggcagcggccatgtcgtcgtcggtccggcacggctcgtcgaggggccaggcatggtgagttaagtagtgagcgccgctggctgtactatttgaattgcggccggtgtttcgattccatgcaggattccgttgctttcccctcgcgtgtccgtcgtgttgacgatgcgttccgtatctcgcgccaggttctgcaccacgggcctgcccagcgacgtcgtcttcgaggtgcacgacatgaccttccacctccacaaggtgagttcttgggctgctctagtcgtcgggggctgcgtcttgctcgatgaaattccgctgaggcgtttcccgcgcagttcccgctcatgtccaagagcctcaagatccaccgcatgctcagcgagcaggaggaccagcgtccgacgcggggacggcggcagcggaggagacaggtgaggagcagtgacggagacgatgacggtgctgcggaaacagagatcgaggaggaagaagccgagcctgagcagcagcaggttaggacggagggggagggcgacgggcagccgtactgcattgcgttccccgacttcccgggcgggccg

SEQ ID NO: 153966 - DNA, 685 bp, Zea Mays
cgacactatttgtttcagtcgctgacgtttgcaaatattcccttgcgcttttatctcttcacaacccgaggtccacgacggcgagcggcgccagaccgaactccggcgaacctgtactggccaaactacgcaacggctagcccgcccctttgcgggacactgaattcaaccttttgcgaatatttcccctcaatcaatttcactagcgaagctctaaatcatcgagtccacggggacaacgcagacaacaagtgaacaagcgtgttcccggtgatctagggcagtctagctcaatcaaatgagtcgagcagcattaggagaacctaaggacactaaaacgaacgatcagagagtatgaacagacctggaacaagctggccacggtgagggctctttcacggtggcggaaaacagatttggggagaaagagaaattggagagctgtggtggctaatcggaggcaggagcgggtgctctggtttcgtgattatctaacggagctagcagtatgcttaatttatagtgttcaagagtggtggcctccaattttggattggcgcgctggcggtcggagaggaagaggggcactggtgcacacgattggtggccataaccgtggcaacctcaccggcaatcactggataggttactatgagtcacggcagcgtggttaaagtgccgaggc

SEQ ID NO: 153967 - DNA, 364 bp, Zea Mays
tcaagtgaggtgaacatccttgggttgccagtcatatgttgagtgcatccactgtcaattacccaatggctcccaccggtcttctaattcacctaataaacaaataaatcaagcttcaattttgagggccctattttgcataggaccagtaactttctcaatcaaggactttgcaacccaaatttgtctaggtctactcttgcttggtggacctaggaatgttactttgactttcccatttgctacttttcttagaacataatgcgcattgaaagcaaatggtcttgagtgctttggtaagggagttggtggtgtggctttgcaattgtgggcaaaatgtccttctgattagcttaggagtctg

SEQ ID NO: 153968 - DNA, 1099 bp, Zea Mays
acggctagggttcccgagcggcggacatcaaattggaccaagcccgagcatttcccctccattaatttcaccaagggggcactggatcaatcggttcatggtgtccgagcggacgggcaaggggatgaacgtgttccgatcaaacagcgatgaggatggccaaattggggctgggtaaagcttcacgggttcaccagggtctacggacacattttggtttgggcagaacaaggcccgaggagtgggtcgacggtgagggggccacgacggtgttcttcagagcaagcacgcgttctggtgatgggcttcaaccaaattctaattgttgatacagggggtaataggagatcaaatacaaccgagaacaaggagcaattagatacttaccgactcgaggggcgctggccacgatgaggttgggtttcgggtatgcttgaaccgatttggggcgaatgcgaaattagagctcgtagggaatcggttaggagcaatacttggtgtgggggtgcacaatgatattgcgaagctagtcacgagctcaatttataggcaacttcgtcggtggcacttgaattgaggatggcgcggtggcggccggagaggaaaaaggtctctggcgcatgacacagtggcctttcaccgtggcaggtgctccggtgatcaccggacatgcaccgcatgattcaccgtgacgagagccagcgctaaggcacgtggtgcgcgacggtgacagcacgacggaggtgagaaccctatccgaaagatcagtgtgcaggggaggggcacggcggctagccggagtggagtccagctcaccgacggtgatgcactttcaccccgcgatgttatctacttgccacccgcacgaacccaaacaccagcgacacgaatcacggcggaggtatcgtcggcggtgagagttccgcgctggcagcctgatccaatccaggctactgtaccatcgcgagtttcagtcagatgaacctgtcagccaatgttgaactcgaatttcctccaaatttactgtggtgactgatttaagtctctatactaaagttatagacctatagttcatcttcaactttgccacggagctcac

SEQ ID NO: 153969 - DNA, 288 bp, Zea Mays
tttgcgaccctgattggcgcctgctgcccccctttggtcctccctcatctctgttgattgattcacggtttcttccctttctcttcatacagtcacagggcaggcacataagcatttcttcctctccttttggcttccctcctcttgggtgtgcactgcccctgctcttgacttggatgtgcactgcctctactcgacttggatatgctctgcagttcgcatctcctctgcagctctgtttccctcctcttctgtttctttccccgtctttcctctgcttgtgctttg

SEQ ID NO: 153970 - DNA, 351 bp, Zea Mays
gcaaccctcacaaagctgaacccggacaaatgcatttttggcattttcgctgggaagttgctgggattcctggtttcgtaccggggcattgaagcgaacccggagaagatcagagcgattgaggcaatgacgcccccggcccgagtcaaggacgtccagaagcttacgggatcattagccacccttagccgcttcattttgaggctggctgagagagcgctgcccttcttcaagctgctacgaaagtccgggcccttctcttggaccgaagaggcggagcaagccttccaggagttgaagcagcacttggtgtccctaccaatattggtagctctggaaccagaggagccg

SEQ ID NO: 153971 - DNA, 476 bp, Zea Mays
aaaaatgatcaccgcaacaactgcaaacaacaaacaaggcagtcctcaggaatcaggttctttatatgatggtgagaatgttgaggattctggtgaagaggatgttagcatggtactgattactctcttagcttcctcacattatctatcattacttttgggttcgcaaataatttgatatgaatatgcttattgtgttgtacatatatttaggaattccaagctcgtaagggtgtccctacccacatcatcaatgatggtgaacatatgtcaacaaaagtaacaagaggaaataaaagaattatggcacctgtgcaggaacgactagttagagtcactagacaaagagttgctgaagtaaaccaaatgtctacccatagcctaaatatttctacacaacccagttcaagtgccgccacaaaccatgatttgacccacaaccttattgttcctacacatcctagttccaataccgc

SEQ ID NO: 153972 - DNA, 1017 bp, Zea Mays
acattgcaaggacaatcaacaattggtataaggcaagtcgtttaaaggtatgtatattcaagtgcatacataatctgtgacttgtacatccgaaatgaaaaaacagcacctaagatccctcaagctacaaaacaaggcatctgaaggcatgcttgttcgcacagcaaaaatgaactgctctatgcactagcaaataaaacatatactttatctgaaatacccaaactatgagctcataaacaagtaactcagagtaatcctgttcagaaacaaaatagaagctatgatatccatgcaaagccatagcaagcctagttatgtgcataaactgtccacattttcacttttttgtttccctaattgttctgaatgaatatcacaacatgtgttcttgcaagctcatataagatgacttcagttcaactaatagttagcttgtcatctgatgtgtttgacatctgcttcggaagatggtaatcagattagaagagctaaattagatgctatgacttttcacagatgttcaaactagaggatgtagcaatgggcatatgggtaaatgaaatgaagaaaggtggattaccagtgaaatatgaaacagacaagagaattaacatcgacggctgccatgatgggtacattattgctcactaccaagaaccaagacatctgctatgcctgtgggagaagctcctaacgacacatcaagcagaatgctgtagcactaagtaatagaaaaggaacttcaatgcttagatcttggcccggtttatgtatcaggtcacttgctaaccttgcgatgacaattgacaacaaagaagcctctaacatcttctttttctggtgcacagcactaatgtaaactaaattcaatgaattacatagataaagttagttcacctcatcccagcctacctatgttttcagagaatgtatttaggaggtactaaaagtcaggagaaaattgtattgctatattttgttgcatctaacattatggggatataagcactcaag

SEQ ID NO: 153973 - DNA, 843 bp, Zea Mays
gttctatgatcctaatgaaggtaacaaaacacatcttcttagagaccgttgatttgcttccttcaaatttattgctccttttaaatcattggctaactttgtttgcattgcaggccaggttttgctagacaatgttgacataaagacactccagctgaggtggtttagagaacagattggtttggtaaaccaagaacctgctctttttgcaacaacaatcctcgagaatatactgtatggaaagccagatgcaactattgcagaagttgaggctgcagcgactgcatccagatccaatgcacatagtttcatatctcttcttccgaatggttacaacacaatggtatgtctatattttttcgacatacatctaagtctggtctaataaattaaatactaatttcttcattttttccatccgcaggcaggtgagagaggcatccagctctctggtggtcagaaacaacgtatagcaatagctcgtgctatgctgaaaaccccaaagatcctgctcctggatgaggctaccagtgcattagattcagactcggaaagcattgtgcaagaagctttagaccgtttgatggttgggaggatgactgtaattgttgcccaccgtctgtcgacgataagaaacgtgaacatgatcgctgtgatccaacaaggccaagttgttgagactaggaaaataaaatgtttgcatgtcatatttacttgatatgagacaatggatatgaacgggggttgtggcgataataacttgagtttgaattacatcacatgatgatgccttgtatggctttttagcttgcagttcacattgcatacttcattcatgttcat

SEQ ID NO: 153974 - DNA, 1228 bp, Zea Mays
acattgtggaggcagtcctcgtggttccgcgaagacgtcggcgtaggagtcgagtaacgcgggtagcaagtcctgcgtcccgacgatggcgttgcaccggggtgtagggcctcccacccctgtccatgtcacggtgcggccgtgacgccagagcgtcatggttagggcgttgaagttccagagtagggagcgaagccattggacccccagaaccacgtcgaagccggcgagaggtagaacgtagcaggtgtggtcgaagtcctctgcatcaatggagacgcgtagcatggggcagacaccttggctggtgactctttcgccattggccaccttgacggtgaggcccgggcgtggttccacgcggaggggcccaaccgggacgccgtggtctcatggatgaaggtgtgggtcgacccagagtccactagggccagcaaggttgtatccccgatacggacgtgtagcttcatggtcccgcccacgtcgatgctggtgagggcgtggagcgacacacccaaatcgtcggcaagtgtgtcggcctccgcgtcgtcgtccagctcgatcaagaataccccgcgggcattgcacttgtggtcagcagtgtacttttcggcgtagtggtagcactcgccgttggcacgcttggctgccatctcctcagcagtcaggcgcttgaagcgcggtctggtgaccatcgtcggccgatgttgggccagtgatgcgtcagtcttggttgttggtgcgcgatacataccccgcaacgcgttgttgacctccgtgtcgcgccgctcataggcccgggtcaggttcatggctgtttgtagatgggacggggcctgcagctccacgtccgtgcgtaaaggctcgcccagacctgctgtgaataaattcacttggtgctgcatagatagatcagcacaatgacataatgccaaggaaaattgacgtatgtagtcatccactgtgctcgtgcgacgcagatccttcagctcagcgagaccgtttgtcctcaacggcggtccgaaccgcatgttgacgaaatcggcgaagcgagaccaggtgaggatgccataatcccgctccagagcgtagtaccactctgcagcaatgccttcgaggtgcatcattgccatccaaaccttctcctcctccatggtacgcatgccacgaaaataggccacacactttgtcagccacggaagagggtctgatgtaccgtcgaaggagg

SEQ ID NO: 153975 - DNA, 427 bp, Zea Mays
gtgatgcggtagataggcagagacacgcggcggacaacggcgacggcttaacggcggtgagaatccttatccgagggtggtgagtaaggggagaggtaccgcggctagccggagtggcctccagctcaccgacggcgatgatctttcctaccccgatgttatctacttgccccgagcacgaatcccgacgccggtgtcacgaatcacggcggaggattggtcgtcggcggtgagagttccgcactggcagtctgatcttgttcagagtactgtgccatcggacccttcttcagttcatctgacagagcattttcaaagcaacttttcttcagattttgcatgagaacttcatcaaccctctgtaccaaagttatagccccatgttccagctacaattttgttatgggaatcatgcccaaactttcac

SEQ ID NO: 153976 - DNA, 579 bp, Zea Mays
tcctcttctgcggcacaccaaggatagaatcgacgggctttgacatcctatcagcgaagcactaataaagcacatgaagaaaaaatcatctaaattgtgttgtcaaattggatccctcccggtctgagctcatctcaacagaccatgaagtttagatttgcacatataaccatatacatgacacaacttctagacaatgatttcacatacagaaaagagcatgcttacatccagtcagattttgactactgtgttgtacgttaatctctctgtttgagtaaagggcactgtttagataatctttgttaaaagaaaaggcgttcaccaagagcacatgaggattcataagtcgaacatgtttactcaatctttatttctttgtttcaatctcactaattcgtggatttatgcatgatcatattgcacatatatatatatctggtcccgtcctcgtgagccagcaaagactgatcgttcgctttcgacccggccgagtccactacgtgatgcttgacgccgcaccgggacaatcctcgtcgtggaccacggaacaccacgttttgtagcgttctggatctt

SEQ ID NO: 153977 - DNA, 1130 bp, Zea Mays
cagggacgacgggttgattctaaacaaactgagggtccctttaataaaactatcatgcgaaggggtatcgggcgattcaaactgttggatcagaaaccgacagtcgagattagatttgcggccgagggcacgcgtgcacgagcgggcgagcgctgacaggcgggccagggggtgtcagcgaccgagggggagagcgcactgaccgatcggccccagcgccaggggacacgggcactgacaggtgcgcgaagcggtatcccacgatctcggtcgtgtgatcaagatcggacgggggagatcagaccgggggagggtgaacagctgcgggcggtgccgctcctcctcgcgacggtgaagtcaccggagttggggcaggcgcgtgctagggtggttccggggtcgccgggattgagcagagagggagagaatgacatggcgaactcagtggcggggaaaaggccacgaatccgaggtcagagagggagaaatggtgggggaaaagcctcgggcggaccggaggaactctggtgagggaaaaagcccattgcgacgtggtcggaccgttggtgtcgccgtggaaactcttgtgacctcggttgtgccacgacgtggcttgttaatgtgtggtagtgaccgtggcgcacttaagagtacaatcgtggagccattgcgccggtgaacgccacgaattctttgcaccggtgctcttccccctctccggccgccacgcgtctccttcaaattagcagccactgctcatgaatcctataaattgagcgtgccatcatctccgctaggtattcaagcttccagcgcacccactcgtgtctcggattgttcactagagagctccaatttgggtttcccccaaatcgaccaaagaacaccatgtgagtgagctcgttgtggccaacgctctacaggtccattcaccccctctgtttcctcgtttcagtacccttatgtgcccttgatgcttctcgacctggccgattaagctagaacccgtaggatcaccgggaacacttcaagttgtctgttgatcgcactgtcaccgtgggtagagagattaggggctagaatcttgcaattgatcgaggggaaatggttgttaggggttaaattaagtg

SEQ ID NO: 153978 - DNA, 377 bp, Zea Mays
tagaacaagcagcagagggacttgagctcacctaaatcgagctagccacggtgaggtaccctttgcggtggcggagaaccgaattggggggaattcaaaatttgtgctcgctagtgggggatttgggatgcaggtgggtgcggtagctgcttgggtacatggcggagctgggggcacggtcaatttatagagcccgcgagcggtggccgtggatttgggcgacgacgcgcgacggccggaggtagaagaaggtattggcgcacgtgaattcgtggcatctaccgtggcagttactccgacgagccacaaagaggcacaagggttcacggtgatgcagtggaggggcagagccacgcggcgcaaggccgggaggcggc

SEQ ID NO: 153979 - DNA, 629 bp, Zea Mays
gctaggtaatacccaagggagtaggtgttgccattaacattgaactcaacaggtggtgctattccattagccaaatcatcaaatacattggagcggtgtaaaacattaatgtcattgtgggagcctgggaaaccaaaattagcatgccaaattctaagatcctctgtcgccacggcctcaagtatcatagttggcttccctttgtggcctaagtacataccggccaatgcggtagggcagttagcccactcccaatgcatgcaatctatgctaccgatcattcccggaaatcctctttcttcattccgtttcaatatacgttctatctcagcacttgtgggtgggcgaagaaattcatcgccaaagacatcaaccacagccaaagcaaattccttcaaagtctcaaggacagtgctctctcccattttaaggtattcatccattgaatcagcaggtcctccgtatgctagcatcttgatacctacagcacacttgtggtcaggactgaaacttaatactcctgcagcatcacgtgacagttggaagtattttttcttggcagcaatcttcctcacaatgtcatggaacagttccggcctcatgcgaaatctgcagacgacaaataaaat

SEQ ID NO: 153980 - DNA, 510 bp, Zea Mays
gttgttggccagggagacaactagatactgagattatagatataaaaaaattccatatacgtatgccaaacgatacatgtcgcctgtacatatgaatatgatggcctgttcgtatcaaagtatacgatgacaaatctttcagcatacataattgcattcttgaaaagatcacgaacattatagctcaaaaaggcaatcagctggtagggcttcaaatttcatcagtccccgcaaggttacacgtatggcgcataacacatgatctctgattccatagtatacttttataaattacatcatagtcataggcaatgctggatcatgtgattccagaacataatatatacagcaatatggacaggctgtttccagttacacgcattggtacgtcaatggagagtgcaatagagtaatttcttgtgcctgataacaacacataaaaagctaatacggattcatgacatgttatttatcgcataactgtagaaggaaatggagagtgcaatagag

SEQ ID NO: 153981 - DNA, 748 bp, Zea Mays
gtgttcaccatggtacagtgtacagctgaaacagataagatcgccagcaaacccaccgctgacgaccaattctgccgtgatttgtgtcgttgccggcccaacttgggctcgggatgggcgggtaaggacacacggtaaaggatcctcgccgacggtgagctggagatcactccggtgactccccgtggctctctcttcctctttgcggctgagcggatttactcaccggtgaccgccgcctcccggccgtgcgccgcgtggcttagcctttccaccgcaccgccatgacaccttaaggctgtcccatcgtcgccggggagattgccacgccgttagccacggatttacttgtgccagtgctttcttccacctccggccgtcaggcgtcttactcaaaattcgcggccaccgcccgctagtactataaattgagtgcaccatcagcttcgttatgtattcgagcatctagcgcacccttctgcacctcaaatcctccaccagaaagcttcaatttgggatttcccccaaaacactcaggaactccgcacagctagacctcatcgtggtcagcccgattcaggtccaatctcaccctcggtttccttgtttcaacatccttgcttgctcttgatgctcaccgacccgttaaatcgaactagaccacccccaatccgcgggaacgtgtgctcccatgctcggtttccgccgtgcacgtggaccggccgttctcggggtgttcgggtcaaat

SEQ ID NO: 153982 - DNA, 401 bp, Zea Mays
caaaatctggaaagtcactgacagtatcattagcaacaaaaacccctatttcttggagctgactttccagaagttttctcccaatcatgctctatcaatatcacagcaaatatcagagttctcgtaagcaagatgttaaagggatataataatggactgcaaggaaatgatatatgtcagcatgaaagcgcaaatatttttagtttgatccagtcgatattgtgtacataaacttcttggagacagccttatgcaaggtgaggcatgtaatgactgcatcaaaagtatgctttgctcaagcacagagaatcagaagactttttcattgctaaaccaaaaccagaacaaaactgtagactatgctagcgtttaaagctttgaagttaatagcaggctagctg

SEQ ID NO: 153983 - DNA, 567 bp, Zea Mays
aaaattgagctcatatatttcttcgattcgtccaaaataatcgacattgtcaaggccgggcgtaaagactccagaacacattgttttctgattgggccgacttttgtcgtagtgtgttgtgcgaaaacggtatccattgacatcatacccagaatatttcttgaccctataagcaaagtcgttggctacttgtctcaactcggtactcatagacgaatctctttggccctgcaagtattcgcaagttaaaagacgctaaattgagttcaaagacgtatctcttttacaaactaatcacataccttacatttgaactaggaaatgaaatcgggcaacacatttctcgcaccctttctaagaagagcgtcatattccagtggagtggggtcccttgatcgacgccagaattcatgaagaaattgttccatgtatggcgtcacctcttcaaggttggtcaatagtatagcatgatatgctgccactcttcatgtgtcagggtcttggtggtcgagccacttgcgcttccgagttggcctcgaaatatgctaaggttcgatatgttcatca

SEQ ID NO: 153984 - DNA, 1015 bp, Zea Mays
ggaatttggcatttaatgaacccctcatactcttgttgtttagtttgcactgtggtaggtacaatggtaccaaaagaagcttctatgttcatcacacttgaaactagggaaatccattccttctttttaactctttgcatgctgaatcaaattttgaaatttatttcgcaccatggctatttttttcattttctctgcttcattagcatctatgggcttctcatccaataggttgccgccgttctcatcatacactctctctctaaaggaaaaaggcaagtaattatggttaggtatcacataaaaacaattaccatagcaatcgtgttatctttttttacctcttgcatctttattgaaatatctttagaatatgaactaattctggtagttcatctatcttttcacctcgcaacactaaaatgatatggtgacaaggaattccgatcccatcgtctcaaataattaattagcaccattttgatactatcaaagtgtataacgcttacgacaaagcgttggtctctactctctagcagcttgcacttgtgtttgaaactttgtttctccacgagccatagtgtgtatcacatgactatacagtacgtgtgtgtacacaccatactactttgtttctccacgagccatatatagtgtgttcaatagtggtgtggtatgtgatcctccggccgctggcattccaaggctatcaaacctaagccaaaactcaacagatcgataataatttgtggtggataaagcggttgaaggagtttgtgctttcagatctcgaggtggtcctaattaaggagcgctgcaagaggcacgcatttcatacctatatatatattagccgtccacgcaattttctccagaccatgcttaattatgaaagcattccaccgcatgtcgaattcatctccagtctctgaaccccacaaacaagctagcattcaacatggcccaaaattcttctcctggccaccgacaattggaaacatgatatttgggtcac

SEQ ID NO: 153985 - DNA, 365 bp, Zea Mays
agccgctgcaagatgggacttttgaaattttaaaaacgcacactgaactgaaacaacgctgaagcaaacggagcactactgattctgctaacaaaagaagagaaaaaattactaattctagccatgcacggtcagactcgagaccactcatgagaagaaaagatgcatggagaaattaacagctggcttcatcaacattcagggacagatccaggttactagaactccagaagagaaacaaaccgcaagaagacgagctcttttgtgctcgacaagcacgaaccatgtttacattctcacaacagggacaggaaggaggccgcggcggccaggaacagcagagcgggcagcgagctccatccggc

SEQ ID NO: 153986 - DNA, 434 bp, Zea Mays
gggagtcaagaaacgagtcttccatgtcttactcaccccaccattacgatcaagagggttcaagtgctagatctgggattccgtgacgttgtcgttgctaaacacactgcccctaactcaacgtgcatctaatatgcaccaactctcatttcaaccaatagatcatccaccttaccaaactatcctatgttacagactttgtcttcgtctactgaatgaaaagtcacgatatgccattcttggtcccctctaaacacaaagtttagtagatctatccaacctgaattaaatttttgttgttagatgcatgctttagatcaaatccgtacgaccaggtgcatgttctagattaaattctcacgattatattgattttcgtggtcgtgcgccaccgcaaaccgcgtccatcacgtggcgtcatgccgccgccaacc

SEQ ID NO: 153987 - DNA, 451 bp, Zea Mays
cttccgcctcagcagggtgtgcaggtgcactagggtgtaattgcgagtatagtacatggacttcctcatgcaacgtattgcaatagacctgcaggtcgtcgacagttgagctaagttccttaattcgggcatgagcccttgcttccttagcacatgccagcaaacgagactgtactgcccagtcaagtgctaagtcccgatcagcaagctgatcctgcaggtgacggatgtcccttcttagttcatttattctatctccgtctgcgacccaagcatcggtcctgtgttgcagcgctgcttgaagtcgactcactcgggcttcaagatctcctatggggtcattactcccactgatactgctttcatgtcgaggggccagttgatgccggggcacaccaattggtccagttgacttgcgtgccgttagccttgtgcgtggcggcatctttct

SEQ ID NO: 153988 - DNA, 483 bp, Zea Mays
agctcatgcatattgcagaagcactttgcacttggctccagtccttggcttttcacagcccaaataaaaaccccatcctaatgatggcttcgggggtaatctgatgaagaaaattttcaaaagtcttcagcacttcaaccagaaatttacttaacgggaaccggagtcctgccttcatgaagctcctatacacaaccacttcatcagcttcgggtgcaggggcagtgttatcacctccagccctcacaatagaaatatcgcgaaaatatcttcccttcatcgcatcaatatgactttgtttgatggttgatttcttgaagacagtgtggcttggtcgccatgggcgattttcagcatcttcgtcctcactctctacatcaaaactcccttcgtcattggagctctcagatatcccaggcaaagtttcatgggcaatctttttcgcattagtcctctccatagcttcgtaaaacccagctagag

SEQ ID NO: 153989 - DNA, 572 bp, Zea Mays
cttgaatcattctgaatcctgagctctccctttgctgctttatcagatttgacttggcgttgctctgaccttgaagagaagtattcacagagccaagccaacttaaatcaaacttcttcttttctgggcggtgctcgttccctgaactccactttgaatgcacagctcgattccgagaagatggctcacgaggtaaatttccttaactgctcttgctttgctcgccttgctttgatgcttattgttgttcttgcttagaggaggagaaacaagcactcactgcttcccgtgataatctagacaggctatatcatgatgctagtacctctttggccatcctggagagaagccatcgctttaccatgtttgatctagaccatcaccaagacgagctacgagcgtctcaggatgaagtctctcgacttggccagctgctgtctaccaaggactctactatcaaggaactgcgtacctctaagaagcttatcatgcaggagctggaggctgcacaacttgctatcaagaccttggaggacaattgtgtcgtcctaaaggctcagcatgatagggcc

SEQ ID NO: 153990 - DNA, 789 bp, Zea Mays
gcacatgacatgaggactgaggtgaccggttttggagccagggttttggcgcataagataactaccaaaaatttcttgttgggcctatactaatctcctcgggccgcctgtctccttcggccctagagaaatgtcttagcgtccagttgatgatattaccccacctgctttaactaggtactataccaccatgaccacgtctatttaatttgcattttccccacaactctaatcggcgtccatcctaccaacgaattggtgttatcactagctggcttgcctcccccgaacaactttttagggcaaaagattgtacaagtgaaactctctcaatctagcccccacttgaactagtctgcatgcatgtagcaaagctgtactggaggtaataataatcggtacgtcgtaagcaatagaaaagacaagcacaaaaacgaatgttatgtggaatttcatgctcgatccgagcaacatcaggaaaaagtaagcataaagtaatgtaatttgacaagtttatttgtattgcaagagaaatgaacgaacctaaagttgggaacgaatctcgtgggccatccatgaaccctatgttctactcaaacaagatttaagtttatacgaagatatacattggttcatttggtcagtggccaacttagattgatcgtattcttccctgatcccaactaaaatcaattggattggcataagcacacaacaaggtctttgcttgagatattagattgttgccgttaccaaacttcaaggatattgatatgagttttgcaaaac

SEQ ID NO: 153991 - DNA, 576 bp, Zea Mays
catcatcagaaacaatacaatcctccttagaattatcaccattactcctaacagattgggccactaaatttttcctagacaattctaaagatttaatcaggtttaaattttcaactgcatcattaaaagaagaacctaaatcaacacctattttgctagccacttccattaaaacatcattatcagtattcaaaaccgagaaaggattataggacgaacctttattgatgaaagcatctttagccatagctcttgcagcagccttatcagcaattttcacttcctcagatgattccaatctgctgctccttctcactccttccgtagctacgccttccataggaccaccttttttaccaccagcaatcatgctagcatcctcaacattgctcagatgcaatttctttttatcttggacgggtgaaggaataaattcatcatccttgatgaattcatccaactcctgtgaatccaacagatcatcctcactatcattgaattcctcatcctcatttccctgactatcaaggtaacctttagggtcttcagaacctttttccattttcatgctgtcgg

SEQ ID NO: 153992 - DNA, 712 bp, Zea Mays
ccagacctcacgccgtggttgctcaccaacggccaaggggaacgacgaacgtgacaagtggtatcagaggctctccgatcctcggcggggcgcgtgagggtcgcgtcctctttggcggcgattccgttccagcgacctagcttactcgtctacctcggtgtcgacatcatcccatgacgcagttgtgcttctcgacacggaactcctcctgccgtcgggatcggaacaggaccgggacggtccttgacgggaggtgtgcgaggtacaaacaaccaactcgattcattctgttcgcgatggaagagtggaggaaggaggatgcagggcattgggatagggtgatgaaccggttgaatcgtttgattcagaagttggaagtggtggatgacgtccagtaaacaatcccgattcagtcgaggttagcaacagaggtggcaacagaatggactgtgttggcacgccaaatgaaggaaaccaaggctagggatatggagatgtggcctgaggaacagggttggttggatccacggcctagtgaacgaggatgtcagtgtgggcttgctgcatcgggtgttggaggtatggccccctttggtgttcgatgaaatgcctcacaacagcagcgagactgtggttgtcctgttccctgaagattcagattccttggtgttcagtgaagtgggcctaaaagtggtatgggatgaggagatgc

SEQ ID NO: 153993 - DNA, 765 bp, Zea Mays
tttaaaagtgaatataaaaattcaacatagaaaagaaaaagaaaagaaaaaaataaaagagcctatcaccttctcgggcctaaaatatttgtgagccattattgcgcacccgctggtgaaacccgctcgcacatgaccttgctctatcactgacaacccgaaccgcttcgtcagcctcccaagccgcgtccgcgtctcacctcagtcgcgatgatgatttgcctctggtttgtgggctcgctcggccagcatcgcgctcacgtgcgtagtttcttcccagggccactggggtgtgggccccttccgtcagctctatcgtctagctcaagtttgttgcggcaaactcgccgtgacccagttcaagtccctgccgtccaagatcctcctttcccccatttttctcgggccgttttaagatcctcttgggtttaagtaccaagccgaagcccctcatctatactctacctcgccgtgtgtcaactcgactgggggtgtgtaggcggtgcggaggagggaagaaatgaccgctactatcgatccaccactgggatgaccctccggcctcgacaggtgatactggggcatcgagggatcccgccgcgcatgtatgtggcctcgtcgggcgagaactacggtcggggaccagaaatttcacgccgatgctcaccccatccaccaattcgcagaatgtcatgggcaggcatactcgttggtgtattcgtggtaatatgctgtcgatcgaatttgttaccttccgatcttcgc

SEQ ID NO: 153994 - DNA, 757 bp, Zea Mays
gccgaattatggttggtttgtagctctacaattctgctgcagagcttgggaggagctgccatatgaaattgaagggaaattcctctgcaaaatgttatgtcgggctgtctgaaacgagctctgatggtacagtagttaaaatggatcaggatgccagcatcgcgtgcttgccgccggtgaccctccctcgcgcaaggattcgcgccgctgcgttaagattaacgttcgctggtaaccggataacgctgcgaggtaaaaagatcgtcgtcgccgtcgagctggaagccaccccggtcagccacaatactcctccccttgctcaccgccgtgaataaagctgctccccgtcgccgtgccctcgccgttgtccaccacgtgtcccaacctcgccaccgcatcgtcgtgacctctcctagctccccattgatcaccggagcaattgccacgacacgggacacgcaaccaccgcgccatggtttttacttatctctgaccgccacacatcgccgttaaaattcccggccaccgttgaagctgcctataaattgagccctcccctagctgcataacatcatcatccacccagccactgttaatcgctggcagtccttcgctagaactcgcgaattttggattcgccccaaatccactctccgccaccctgaactcacctcaccgtggccagccttccccaggtctgctcattcccttctcgttcttgttctagcacccttacatgttagtgatgctccccgac

SEQ ID NO: 153995 - DNA, 785 bp, Zea Mays
ccttactcccgaaccgataaccctcttctaatccgggccatcgacgctggatccgaaggacagcagttcatcttccccgcacgaacactggccccagacgacgactaacccgcaaatggcgcggctcgccagagtaatgctagggtggtgcatcaatggataaaaacctgccgcacgcaggcacaaacgctaaagggaccaatggcgaggaagaacataggggtagtttacggttgcccggtgcagggacgagcagttcacgctccgcggtagcctggtccggtcttctacgtacgacgatgaagtcctgttctccagtcaccaaacacgcaagggaagcccccaagcgtccagcgcgcgaccctgccgaacccccagcttgacgccaagattcaagggcagcggcagcggccatttccaatgcgttctctctccgtgggtctattcccagcggctatggctctcagtactggttatgggcgcatgatgcagagagatcaaccgagagtgtgcgatctggtatttattcagggagtccaggttctgctggggagggagatattagctggcagactccaggcttgttgcaacggccaagtggagttgtgagtttgttgtgtcggggcctcagcgaaggcgaaggtgctgacaagcggtccccacggtgcagtgtgtgtggttgagcgcggcgtggtgcgggagccgtgcaatgcggatccggattaggccggtgttgggctgaacgagcagcaaggagattcaggttgggttctgtttcattttta

SEQ ID NO: 153996 - DNA, 415 bp, Zea Mays
gatgaactggctagataagtattaggcagttatcagttgtgataagaggacaatcaagttgatgtccccactaggagaggaagtggtgaccgagttagtcccacctgagccaaagaaaggaagttgttatcagatggctgttgatagcagtgaagcagatccacttgagattatcaaggttgtgtccgagttcccagatgtgtttccaaaggacttaccaggtttgccaccagaacgaaaagttgagtttgctatagagcttcttcctggcaccgcccccatctttaagagagcttatagagtatctagaccagagttggttgagcttaagaagtagatcgatgatctatcagagaaaggttacatccggccaagcaccttgccttgggccgcccctgttctattcgtggagaag

SEQ ID NO: 153997 - DNA, 328 bp, Zea Mays
aacatacacttggcatgcatggttatgagatgcgggttaactggtgggatgattagctcagcaccagccagaagaggcagcgatagggtcgtaggagcagtagtcggtgaggggcatcacgagtagatgaatgtggcatgaatgttcgcggagggatcagcactaccactggcgcatctcttatgggcgcactggagaggagaacgctagggcaaccatggttgctgagaaagctaggttctcttgtcgtgtgtttgcctaaagtggagccacacgtgacacaatatacgacattagaggtacaccagggagtggcacaaaacttgga

SEQ ID NO: 153998 - DNA, 950 bp, Zea Mays
atgaatggtccttcccatagtggtgacaatttgtgtcgtccttcccccgttagaattcagtggaggacaagatctcccaccgcaaaggatcgatgtcgtatggccttatcatgatagcgcctcagagtttgctggtacctggctgactgaatcactgtattcaatcgttcttcttctagtatatcaacatcctccagtctagtggcctcagcttcagctatgttttcgaagatcaatcttggtgccccaaacttgagatcagcaggtagcactgcctctgaaccatagaccataaagaagggagtgcttccatgcaaagctcggctaggttgagttcttaggctcccgaccacatacggcaactctctgatccactttcctttgaacttttcattcttgtcaaagactttcttcctgactgcttccaatatcattctgttggctctttttacctgcccgttggctcttgggtgtgccactgatgcatatttgatctggatgcttttttgtttgcagaaatcaaagaactttgaactagtgaaattggatcccaggtcagttatgatgctattcggtattccgaacctgaatattatgtcttgtatgaattccactgccttagctgaatgaagcaatgggtttgcactctatccatttagtgaatttgtcaatagcaaccagtacatgagtgtatcctccttgagctttcttgaagggtccaatcatatccagtcccccaacacgcgaatggccatgttacaggtatggtttgcaattgctgtgctggtaaatgttgctattttgataagtattggcaagcttcacatctctggactaactcggctgcgtcacttttttccattggccagtagaaaccagacctgaagaccttcccaaccagagtcctggatgttgcgtgtatcccgcattgcccagcgtggatttcatct

SEQ ID NO: 153999 - DNA, 354 bp, Zea Mays
gaaagggggagagaaccccattacaacacacacaccccaacactagagactaactaaggatcaccgactaacatggagaaacacgacccacaacgctgttttaagccagcaactcatcgacttggaggaaagacagggccttggctccagtcaaggaccaaagcaccgcctcttccctagccaccctaagggctgtgaccaagctaggattacatccatcaaagacacatctattcctatgcttccaaatggtccaagcacctaggattactaaagaattgaagccctttcttataagatcagatgcccgagagctgctagacttccaccacgactcaaaggaatcctcgtgag

SEQ ID NO: 154000 - DNA, 358 bp, Zea Mays
actcatcaaagggagatgaaaagcgttggacaccaaacgatgaatccaccttatcaacaggtttgtcttccactcgtaataaatgtcttattgctgacaatgatggtggagacgaaagcgatgatgaggaagaatatgaggatgaggaatccacatcatcacaaggtacattttcctgttttgcttccactgataataatgacagggaaaatgagaccaacgatgtggaagaagaggagattcgccagttctatatccatctcaacaaagaggacaaagcaatcttggttaagttattgagaaggaacaaggaacaaggcgagacgattctcaggctagaagagactctcatcaaaac

SEQ ID NO: 154001 - DNA, 706 bp, Zea Mays
attttgggagcaatcaggctcaatcaactgctcctgctcgattcgcaattcccaatctggcgcgcgcacggggcactggttggcgccatttcgccgctacaagcttcttcccataacaaacgaaaacaaaaaaatttccccgcaaatcgcagtccgccgatgccccgcggcagaaacactacgcccatttcaaaatttcaaccccaaaacgaaagttgccgtcgcctcgccttccgatttcgtcttcccaccaagccaaaatgttgctcagattcctccgccgccgcgcttaccccggaaaactttcgagctcgcgcgatctgtaaaaccccgtctttctctcggctgggaactcccgcgcccagaaaaattcttctcccctagcttagctcatccatctcgctgcccgccatccatggagatcgccaagaacagcattgcgagcggccgcgtccgcgacctgccgccatcgaagcgattcaggcacgtcggctcccacctcggatcgactcccagcgtgccgctgccggccaagaagcgcatgctgccgtcgcacacgccggaggaagcagccgtcgctctctgcctcccggtgaagaagagggtcatcgcggcgccgcgggtggaggtggccggcgccacattctgcctcccggcgaagaaacgagccatcgtgccgtcgccgccggaggacgcggcgcccgcg

SEQ ID NO: 154002 - DNA, 342 bp, Zea Mays
aaaagttgaaggatgtccgaaaccataatcatgtcctccgccacaggattgatgaagagaaccaaatcatcagcataaagagaaacccggtgttgcagctgcctagtagaaagaggttgtaacaaacctccttcctcatctgctttagagaaaagttgaccaagcacatccatgacaagcacaaacagcatcggagaaagaggatccccctgtcgcagacctcttttatgtgaaattaggcttcccgggtgaccattaactaacacccgagtagaggaagtgaggagcagccctgaaatgatatctctccagatctgcccaaaacctagattttgtataacc

SEQ ID NO: 154003 - DNA, 310 bp, Zea Mays
gggaactgggcgacgaccaccggataaggaccctgtgcgcataggagataaggaggacgagggaacggcggcctgatttttctttcttcagaagcagagcggcggcgggataaggctggagaagatgagctcgagcgctagaagaagcaagcagagaagaagcaagcagggacacgctgcgcaggaaaaatcttaccaacggtgcggcatacagaggataaaggataagaaagccgtaaacggtggaagctaaagagaggacaagacatctgctaaaaatctggaatttggaagctggtggaagtgacgt

SEQ ID NO: 154004 - DNA, 499 bp, Zea Mays
gtagaacttagtgaagtgtcctatttgtccacagttgtagcatggcccttaacttgggtagtatttccagttgagcttccctgtctaatctttgtacatggaagagccactttgaaaaccttctgacctttgaatccctgtggttgggtcttcttctgaggaggagggcgaaatcacacaccaggtaacactagcctgaaatttggtagagccatcaatgtggttctatgctacgacgatctagactccaagattctcttaagcccctttgacatggtgtagagattgttgttgttctcctgagtcaaacagtcactcatgaaatcattgaaggaggtacgagaggagattcacgtgctcttcatcatctttgggctcaaacccctcttgaaaatggcaatctttttggcttccatgtccacatagtcaggcgtgtagcgagaaaagttgttgaaagcatgcagatactctatcacttacttggtaccttgagtcaatc

SEQ ID NO: 154005 - DNA, 699 bp, Zea Mays
atagatcctagcccctatttaagtttggttctggtgtttaatgatcaacatgatcacttataaggttggaagcaccgacagacgtatgtccgttgtacatcatgtgtagcattggaatgttacaaactccaagaatcggtaacaactatgaatcaatggctatcttacgtacctaagaagatagcagttgtgcagtcaacgactacatttagagtttggggggggggtgctatatatacccctgagccagccatttgatggtttgtgaagctcaaggaagagttatgtaagttgaggcttatctttaatagctctagccactaaagtgtttggtgaaatactcatattaggtgctttgcgaagtgcttgtattacttagaccaccattctagtgtttgctctagttttagacatagtgtttacttacgtttgtacacctcttaccatttggtacttatgaaccattattgtactcggagaggcttgtagtcttgttagaccacactcattgtgcttatggtgtagctgtcaccgtgtattgcagggaatgaggtacgcgacggtttggtaagaagcgctgtcggagagtaaatctccggccgggtggcggagtgcacccgccctaaatcctgagatgaggaggggcttaggcgttttgcttgatcgttggaatgaacgggaagaactcaagaacacgca

SEQ ID NO: 154006 - DNA, 603 bp, Zea Mays
tgtcaatccgatatttaattgttgtttgggtctcagttagatccaaacaggttgtgattgacatatggacccccaacatgtgagcatgtgtatctcttttgtctctcttttccgcatgtacggtgagagagaaccaagaaagagagataaaatagatacataggctaaaatgtggggttcatatgtcaaccacgacgcgtttcgacctaactaagaccggaacaacaattaaggaccagactgacacactttaaaagtttatggaccgagttaacatataacgtcatataagttgaagtaatgaaaatgtattttactcttaggatatatcatcacaggagcggtacaccgtcgggttttttttttggaggatgggggacaactatcacgagggatacaatacaacttagtaaggccgcgaggtaacaaactaacaagtggcccatcgaaacagtaaattgtttcccggcccgctcggccgaacaagtgacgtccccattctaaatctaagcccacttctgactaaccacaacgcaacgaacaaagcgacaacatgagaggcagacgaaggccgccttccacttttcgatggcgccatggaac

SEQ ID NO: 154007 - DNA, 656 bp, Zea Mays
ggagagaaaaaattgcaaatggttgaattgttcaatggaaggcaagcgtgccgaaagaggatatggtaatccaaaagtgcgaaatacaatttccatgcgaacacaatgcaaagctggaatgaaacttaaaaaaatctatgacgatgccaaagagaatataatttcagtgcagattgatcttattcatttggaacataatcatgagttcttcagaaaggatacataaaagaatcagttacagtgcaacaagacacatgatccagaatacatggagttccttagtgcgatgcaagaaagcaggattccgcgacattttattatggattttgtttcagaaatgcatggtggaccagagaatgtaccgttaactacacaagacatgattaacctataagtgatattgttatttacactgacataatgacataatgacgttgtgtacatattgacgtatggcatattgtttaatgttcacaggaagaaagcacgacaaagagaaagaaatgctaatgatgtctctaagctcctttctttttttgcattgtgtaaaaaagataacccacaatttttctctgacttccaactagaccaagaaggaaagattttgagcattttttggtcccatgctagccagcaagcagattacattgactttg

SEQ ID NO: 154008 - DNA, 667 bp, Zea Mays
caagtgtgtgttcctccatcgtgagcgtggtgtctgggagtgggactcgctgcgtcaccagaagggcctgcttgcccaagcaaacgagcagcttgctcagaagagcactgaagcagcggatctctgggcactttactcgaagctgaaggaagaggctgcctcggtacggggagaagtggctcctctggccgagagggtaagcgagatggaggaggatcttagcaggatattcggtaagcgggagaaattctagaaccaggccgtggaaaccttttcccaagctgagacccttgctaaggaactcgaggcgtagcggactatgtgcatccagaaggaaagtgctctagctgaggccgcagcggcagccgaggcgtcccggatcgaggcttcgcagtggaaggctcaggcggaaggtttgttttgtttacgtgtgttttgcctgataggactacttcggctgcttacttgtttatttggttggttttagaatttgagcggggttttcatgtgtctatcgagacgtccaagacgctcactcgagccgtcgacgagaagagtgctgagtacgacgccctgtccgacgtaggttgaagcctagaggcttgcggacattgtcgagggccgggtgcgacgctggccaaacactttgatgaggaggtgattccgc

SEQ ID NO: 154009 - DNA, 398 bp, Zea Mays
gatcaagtatgcttctgtagcacacccgagagccaacgggcaagttgagcgagccaacgggatgatactggaggcactcaggaaaaaggtcttcgataagaatgaaaaattcgcaggaaaatggataagggaattgccctatgtcgtctggagtctaagaacccaacctagccgagctctgcatggaaacactcctttcttcatggtctatgggtcggaggcagtgttacccgccgatctcaaattcggggcgccaaggttgatcttcgaaaacatagcagaagtcgaagccaccaggctagaagacattgatatactcgaggaagaacggctgaatgcggtaatccaatcagcaaggtaccaacagactctaaggcgctatcacgacaaggtcgtgc

SEQ ID NO: 154010 - DNA, 507 bp, Zea Mays
gccgccgagccccccctcgccaacatgggcagacataaagagtcaacaaagtcctcgaggatctattaagagcatgtgtgctagcatttgacagaagttgggaatccagtctaccctacgcagagttctcatacaacaatagctatcaggccagcatcaagatgtcgccattcgaagcactgtatggacggaaatgccagacccctctcaagtggtccaacgtagggaaaaaagcactagaaggacctgcctttgtcaaagaggcggaagagaaggttgcactgatccgcagaaggttactcgaagctcagagtccgcagaagagttatgcagacaacaggtggagggaactcagatttgaggaaggagacttcgtctacctcaaggtttctccaatgcgtggtgtcaggaggttccaagtaaaaggaaagctagccccgcgattcataggtccctatcccatcattgacaggataggacccgcagcataccatatggaattaccgg

SEQ ID NO: 154011 - DNA, 868 bp, Zea Mays
aagttagtgaagcaaacagaagctatctgaaaggatgaacaatattgcaaataaaaaagatagacaaacagaaaagaaaccagtagttcaagagtatgcaagaagtaaatatgtattagcaaccaattcagttacctagagaagaaatgaatctcttccccatttttgtggatttgaatacggtcaccatcaaatttgcactcagcaactacttgttttccatgaagctggaaaaggagaagggtgtgatgaccaagcaaatccaagcaatgtagaacaagtgtaaagcagcctttcacttaacaatgactatatatttagaaggaaactggtgggtggaggcaggcaccttcttccaagcaactgaagaatcacgaactctcaaagctagctgaggcctgacagccttcccaatttctatatcctgatcaaacagcataaagggataaacacaaaatccctaaaataaataaataaataaatcatatctatgagtaccacagctgcaatagagtgtaatacatggcagggtcggctctggggctagggcccatgacagagaggggtcatcagtccatatattagacctatataggctttaccatgttacagaggaaaaaacatgaaactatagggtccatagtgtcgtgttcgtcccagggtcctcaaaactgtagagacacgagacgccctttaacaagggtcatcagaaaatgttagactatcttcaaccatatcctctatatccctcctttacgagcactaaaagatcatctcctctatatatcattcctctccaatagcgccctctatatcttgtcctctatgcgttaaatacacatattaggttgtctccagcagaccgtgc

SEQ ID NO: 154012 - DNA, 456 bp, Zea Mays
tgacaattatgccaaaactacaacaaggaggtttttgaaacccccctttgttacttcccacctagcaacaaaaatacccccacctagaggaaaagacttcaggccctgtcaggaagagatcctaccgaagatgaccccaccatcgtctacatggtcggatatctccgcgctctcgataaccactatgatgaccttccctcccactgcacccacctaaactcccgggtggaaagcttagagcagcaggtcaaggaacttaaaaaggagaaggcatcccttcaagagtgtctcgatatggcagaaggcgaagaggccaacactcgtgaagcttaccgaaccctgaagatggattacgataagaagctgaagaagctcgcccccacgaagaaaatccaaaagaagaccaagagccaaggatgccagactgagcggaagaagaaagcccctccagctcca

SEQ ID NO: 154013 - DNA, 530 bp, Zea Mays
gcgcacgcggtggtagcaaccagtgggtctgggggtcatcggatcggggcaattcgtcgtcgttgcccgctctcggccacgaattcgcgcggaacgtgggcagccacaaccgatgtctaatcaccgatgagtgagcttccaaccgactcgctttcgtcttgcgaacgtgtagaacctctaattgcagtataacatagtaatgagctcgattggcatcgtcgaagacatcggtccatcggcggcgtggtgtgacatcgaggggggaaagagcggggcattagagaagaaggtgtttgtgccgtctgatcggagtcggatggcgtagattagaccaggggatatctttcgtattttaaatcggaaccattgatccatcatccgaccgtcgtgggcgcgtaccggttcggtcgttggtacgtccaattcgagccgttcactttagatctagcggtcggaatgtttgggcggattaaatctaatatgtagcgtagagtttagatcggatggctgagattctcgcgtaccctttc

SEQ ID NO: 154014 - DNA, 730 bp, Zea Mays
gaaagttcagctacagtaaaagtaataagttgttaatatgaagccagaaaaatactaaagctttgaaaaagttaaaatatctttgcaccttgcacgctcggcagcgtcttcggctcgcttggcttcttctcgagcctcatgagttactttctcattcttctttatcgcctcgtcggctagttctcgaccgcctttcatccaaattttggagtaaaatttttcgtccattagagttgcttcagccgaaggatccttcgtgttttccacagtaaagacagcctccgtctgggttgcagctttaacgtgttcacaaccagatttttccaaaattgctgcaacccctctggcaccggcaaaggcgcagaaattaccacgatcactaaggatctcttcaaaagctttagcttcttcaccgatccattcgatgattccttcgggatcgcctctaataaatttttgctcggatgagtaggcacccaccttcgcaaaactgtcctttagcttcttggcacaatccaaggatttttcgtaatatctttcttttgattcccgaagctcatctacattcttttgcaaccttgcgctagtccattcgcttatttcctgcttcgccttagccacttcgaaatcttcattcttctcggcaagttttttctttaaattttcaatttcggctctatgagttttggactgcgcggcaagattggcttcactagccttgactttgtct

SEQ ID NO: 154015 - DNA, 1108 bp, Zea Mays
cccagatagagtcattccctttttgcgtccggggtagtccggttacaaatccatgcctatttcttcccacttccattcaggcactaggaggggttgcaatacgcctgcaggcttctggtgctcggccttcgttctttggcaggtgtcacaccgggccacatactgtgctatctctttcttcatccctctccaccagtatatggttttgaggtctaggtacatcttggtagtccctgggtggatggagtaggctgagttgtgagcttcctcgagcaggacttctcgtgcctccccttttgatacacacagacgattttttgaaccaaagggctccttgttcatctgtcctgaggtccggaagttgttccttgcgagcttttttcacaaatcttgctgtctctgagtctaggcgttgagctttgcatatgaggtcttctagcattggtttgactttgagactgccgttgtttcccaaacatgcattcagttgagctaattccttcttccaatcttctaaaaagttggttccctttatcccaaaaggttttcggctgagggcgtctgctaccacgttggcctttccggggtgataatgaatctcaaggtcataatctttgatcagttccagccatcttctttgacggaggttgagatctggctgagtgaagatatacctcagactcttgtgatcggtgaagatgtgacatttgttcccaattaggtagtgcctccatatcttcaaagcatgcactgtggctgccaattccaaatcatgggtgggataattctgctcatgcgacttgagtaggcgtgatgcataagcaatgactttcccgttttgcatcagcacacaccctaagccttgccttgaggcatcacagaagacgaaatcctgatctatatccggtagtgtcaaaacgggtgcggtcgtgagcttcttctttatgatctggaaacttccttcacatttcggggtccacacaaacttatggtctttcttgagaagttcggtcataggccttgctatgctggagaatcccttgataaagcggcggtaatatcctgccattcccagaaagcttcgaacttcactaacgttggatggctg

SEQ ID NO: 154016 - DNA, 821 bp, Zea Mays
tgggagttttctcaggcaaactttgttctttagcctcttcctctgctgctttctcttcgaattccgaaggttgttcattagcgggctttgaaggctcagcttcggcactggcctggcttgcggcagcttcgactggtcttgtttcagcttcgatttgcaatttcgaagcctcgacgattttccctggaggagtagaccttaaagccgtcactgtttctagcacatctaatacatttaccatccttttcctcttcggagttgccgcaagacctttttgtgccgtcggcaccgttatttccgtcgaaggacttaaaatctctaacctttttgcttcttcagtttttggttcttcggctttatctctatcagcctttggttcagttatctcgactaagggcgccttcggtatggtagccggttcttcagccttctgtgtaagaggagtaggctcctttggagcagcagctgaagaagtttccccgccaaaatcaggcaccgcgaccggctcaatgtagcgtggccgataagtaagaaccttcaaccttttcctcttcggcgcaggctcgcttggagcagccgaagtagcaacttttccagaggttgtaccttttcttttctgtccccgtggcgggtagcggtaatcagggtacacaaatccaatagcatcaaaaactctattcaatcttttcttttttcggcccccgaaggccgcagataatgcattatcttcggacttggaatatgtttcaagtagctcatcgctagtactttcaacacacttcagccattcatcatctggttcgacaaactggtctccaaac

SEQ ID NO: 154017 - DNA, 598 bp, Zea Mays
ggagtatgttgcttgtttgtagctggggtgctggaattccccaccagacaagcatttgcatagtgcctaacctgactacacttgaagcatgtagggcatgtcctctgtcatgtaggcctcgccggggtgctagtgggggcatcctaatgagtgtgggtgtctgtggagtcccttgtggagcatactgagctgggtgcggtcctcttctaggacaagttggtgtaccctggggcggaacacagcgagggtgaatactgttgttaccctgccctaggtaatggccttcctcttcatgtctcccagttgaacacgcttgtgttcaatacctagagctttatcaagaagcctctgaaaatgatgggaaggtatgagcaaccagtgcatattgtagtggcccattgggtccttcaatgaagtgctcttgctttctctcaacatcagccacctcatcaggagcataccgtgatagctgaatgaatttgtcacggtactcactaactcacatgtcgccctgttttattgacagaaattccttctttttaatcttcatcagtccagtagggatgtggtaatttctgaactgtgtggtgaattccgc

SEQ ID NO: 154018 - DNA, 489 bp, Zea Mays
atcgaattctctggtgcctgtcttgctgctgagctcggaggacttagaatttcctcttgaggtgacctttttcttcttcccttgccctttccacttgtatggccttgtttgagaggtgtgagaagctgaggaaatcttggctggcaaggatagtcttgagttctggtcttagccctttcaaaaagtgggccatcttcttggcttctatgctgacgtcctcaagcgcgtagcgagccagttctgtgaatttatgcacgtactcactgacagatcttccgccttgagttaattcccggaattcatcttccttgagctgaacgatcccttggggcacaagatgttctcagaaagcagcttcaaattctgcccaggtagcatctctgacggcagtgctgaaggtatcccaccaggatagggccatcccggaaagttgatgagcagccagatggacacgctggttctcagggcatccgatggcttctaacttcc

SEQ ID NO: 154019 - DNA, 742 bp, Zea Mays
tgccctgtcagctccgccctccctgcgcccatcgtggaccggtgagtgcgcactcgcgcacgtcgccggatttcttggccacaacgcccacacatgcgcccagctcccttcttagagccccaccagcgccccgcactcgacccccccgccacatttcacgcagctccgccctctctcacgctctgcccacgccgccagcagccgccggagacccgcgcccgcgttcccaaccatccagctcgtcggagaccgcgctaagcctccccgagctccgccctgaggtgagacacctgtcccctgcccaatttttcctgttgcactctgtgctcggccaattttggcttcgccggtgctcggccgcgatggaccaccgtgctcgcgcggtggccggtcgatttaccccggtcgagttccccggcgttagtccctaaggtgcctctgctgaagctagcccaaacattagcgcgccttaagccccctccccatgaccggaatgcctcaccagaattactccagcccgcccaagaccttccctccgctgttctcccccctctgcaggcggattcgtggcctcttccccgccattgagttcaccgtggtgttctctccctctctgcccaactccggtgaccccagagccaccctagctcgcgccttcttcaactccggagacctcaccgccgcggagaagagtagcaccgcccgcagtcgttcacccctccacgatctgatcccctccgtc

SEQ ID NO: 154020 - DNA, 363 bp, Zea Mays
gactatggtctctccaaaacaaagtgctttcatgtatttaggataacttcatgcttgttcaacacaacccgtttccttcatcaacaaaaaggcctagagtgcctcttaagttagatttaacaaaggcctttgatatggtttcttggccttttctgttggaagtgctgcaagtgctaggctttgggaaaatttggcatgacattataagtggtttgttgggctcttcttccacttaagtcctcttgaatggagttccaggagaaaccatcttccataaaagggggttacgacaaggtgatcccctgtccccgatactctttatattggtcatggatgtgcttggtggcatgatttccaaagctg

SEQ ID NO: 154021 - DNA, 668 bp, Zea Mays
gacttaagggaggctagaacatcaagccaagaagcttgaactgacctgtagagggttggccatggcgaggtgttcacggtggcgtggaaaacgaatttgggggaaacgtgaaattgagaggctctggtggatgatcagaggtgagagttggtgtgctgggtgcgtaataacctagtggacctagttgatcacttaatttataacatcgatcggcggtggcgtccaattttgagagagcgcgctggcagccagagagaggggaagtcactagcgcaagcgctatcgtggctttcactgaagtaatgacttagacgatggactgactatctacggcggtctatggcgacgtggtgaaacggctgacggtgttgcagggccacgaggaacggcggcacgacagcgatggtcgcgtggccacgttgcggcgcaactggacatggtgacagagcactacagtgtcccatcttcatctcttgcccaagatctttcaccacgcgaagttatccgcacattactgggcgcgaatcacagcgccggcacgaatgcgagcgcgtggttgccggcggcaaggtacactgcacctaggatcttattcaggttactgtaccatcgcgaacactctttagtgcgcctgacagagaattatagggctttgatcttcgatttct

SEQ ID NO: 154022 - DNA, 798 bp, Zea Mays
gtccatgcgcttataccaccgcttggctacgggaacctctggtccggctgcgtccaaatgtggccacatggctacagtgtgttcccaggccacatgccacgcccgccactcgaccagcagcctcagccgggcctgcacatgatgccaacctcaactcctggtttcagctatggtggtgcctccacccctgggtttggctatggttgtgggccacctacaacactgcctctttcggccggcatgcttctgcacgccccctggaatcccatggccggcgagtcttgggaccaggcgtccctcaccagcaacttcaacatgacgccgccgaactccgtcgagtggtatgccgactctagtgctggttcgcacatgaccgcacactctggtatactctcatcccctcgaccaccctccctgtctggtccttcctcgattatcgtcggtaatggttccttgttacccattacctccattggctcatactcatttactactccacgtcgttctcttgttcttaatgatgttctcgtgtcccctagcattattaagaacttgattttcgttcgtcgttttaccattgataataattgttctatcgagtttgatccctttggtccttctatgaaggatcttcaaactcggaacgtgatcgccaggtgcaatagcacgggtgacctctacccgttcttcctgcccatcaccagcagcacacacgcccttgctgtgacatctaccctatggcatcgtcgtctcggtcatatcagttttgatgctttgtccaagctcattagctcccag

SEQ ID NO: 154023 - DNA, 649 bp, Zea Mays
cggggggaggaagaggtcaaagatcatggcatgctcacctatggctcaaatcgacggtgagggcttgtcctctggtttgaagagtaaggcacgcgttgttcggatgtgagggtgacaatgagatggtggctggactgtgaggttctgcggcaagggcatcgatatttataggcagaggaacgacagtttataatggagggagtctcgaccggcgtactgtgattggcgacgttgccacagtgcagtcgcaacatcccgaggttggtagggtaacttggctcatggtggggcattcatttagttgtgattatgacaagtgactggcgtgtgctcagacgggtgcacgaggtcttgtcgtagtgactttctgcactgaggtatcacttcaaggtctgcaacccggccctttaatatagcagtttggcgtgcatgacaaggctgtctcagggcagagggtgtaggtggggcttgccaggacgcacaaatgccaaggcagctagaggcaggcttatgatttatttacgcatgtgttttgccataggtggttgtgggctccctctgtctattgtgggcgagcattatacattttcaagaatttacctcggtgaaagacaagcttagcctataatttagaaggatatcgaggaat

SEQ ID NO: 154024 - DNA, 493 bp, Zea Mays
acgggacctgccattaattcaaccaataatttacaaaattaaaggttacatgtgcacgattcataccacagcaaggcacaaatatctacctggattttcagatatgcctatgtttgcatcattgaacagctctaaatccacaatgctctatccactgcaaacaaaaaccgagctagatcttgtcagttctgttcaatttgtagtacatcatggggggaggagacacgaatggggggagagaagttgaatcaatcaagaacaacagagacaaactcacggtgtcggacaggcgtgtggggaagaagcggggaccttcattcggcccctaaacggtgtcggctgcaggggttgtagctcggtcagacaggcgtcaccggcgcccttcaatctcttcaatcggcggctcttcgtcggaggctgctgcgcccggctaatggaggaggaagacgattgaaggacgcgacggcaatggaggacaactcacgggctcgac

SEQ ID NO: 154025 - DNA, 917 bp, Zea Mays
gttatgaagaaatgggagagaaacacactcaaagtcgagctgtcaggctattggagtctgaaattcagactaacagtggtactgggtcatctttggagctctacagatcaagaacttcaaggaatttgccccaagtcgatatagcaaagttgtagatcttttgtagtagaacaactttgctatagatgtttgggcttggtaccatagaagatttggagaaatctggacctgaacttgctctgtcaggtcggctgatggtgactcccatggtacagtgcctgaacaagatcagaacaccaacgcatctcaccgtcgacgatcccccaccgtgattcgtgccctcgtcagcgtgattcgcgattggatcaactggataacacttgaagtcatgtaaagatcatcaccgtggataagttccggccagtaaagtattccggccaccgtacagagctcgccgcggtggaacccgataagcacgccggtgactgccgccttccggccttgtgccacgtgtctaggcatttccaccacatcgccgtgacctgctctcgctctccgttgatcaccggagtgactgccatggtaataggacaccaatccagtgcgccagtaagctcccctcctccgaccgccacgcgtctttgctaaattcaccagccaccttacttctctcttataaattgagtgtgtcatcggctccgcaaggtagtcaagcaacccacacaccaacttgtgccttgaattgtcccctagagaacttcaatttgggattacccccaaatcggtcaagaacaccgtagaaccaaggttgctgtggtcagcgcgatacaggtcctctcatcttctctactctcttgtttgagtgttctcgtgaacccgtgatgctcgtcgattaacctgattgaactagaccgccg

SEQ ID NO: 154026 - DNA, 821 bp, Zea Mays
gtgggttcgagtgctcgttctgcactactttttgcggacgctgggtgtggggagggtgaagtcgtggtagcaccaggtgcccacattaggttcttaatagagtagaatatagatttgttcctgtcaccataagaaaatatcaacagaaaagagtacaaaggaggatttacaaacagatctcaaatgagttaaacctacagaacaatcaaatgcatcctttgtcaatccaacaaaaccaataagaaaaggaagaccttcaatgtaagtaaagattaaatagttttactgccattgtgtattatatcacaagatgaactttgtgactacaagaaacaatacaaaaatagacttgggattatatcaatcgttttcagtgccttgtactccctccaataaaacataaatgatgcttttgacattagcagttcagcacggtctctaaaaaacacacaaaaacactttcttacaaaatatttattaaacatggaaaaagtatttttatgaaactgcattttgattcaaatatctacttgtatcattaccaaatatctaaagttgacatatggaaagcaattaacaaaaatttagaatggttggtttcaggcaaccccaaaacaccccactatttttgtgtgcaacactgctgagatagtatgcaacaagaatgacacactgatctaaccattatgtaaacatcatcaagacgaatggtattataaggcattctgagtttttgagaccatgtgtttgatgctggtacacaattggcacactagtactcaagaacgaagatacttgcagacaaactcaagattattaag

SEQ ID NO: 154027 - DNA, 490 bp, Zea Mays
cagccctccgccgccgccgcctcctcctccaccacaccacctgattcgatccgggccgcggtcccggccgggcgcggcggcgggacggatgcgtgcgcccaccgggatgcttgattggtttcgtccccatgccaatcccattcccattgccattgccatgtggtcactgcccgggttttgtgcgggtccgggagctattgatgacgaagcttcggcaatgatcgcgagttcattcatggcgccggtggttaaggtcgttcctgcagatctgcacccacgtccacgcatcagatcttctcctccccccgctcgtcgtttagctacgttgcatttattaattcctcttcttgctcttcgttgatcaagccgcgccgcgtgcgtactcggtggcaatgggaccgtgcgcattgcacaagctaatccaaaaccaactcattgctctgcacatttgaacagtacatatcgagtctagattaagataaattctcgt

SEQ ID NO: 154028 - DNA, 547 bp, Zea Mays
ccagcggcttatgcatgtgcatttccctaatggtggattgcacataaaggaaattatcatggatgcttctcttcttgacgaaagcactctgacagttggaaaccaaagcatttaggtgggggcgtgttcgttggccagcaacttggcaaaggctttagcaatgctgtgaataaggttgataggcctgaaatctatgatcttgggagcaacagttttctttgggagcaggacaatattagctgagtttaaaagctcgaaaccttgggagttgcctttggtatgaatgtatgtttacttagggttttgagttttgactctcttctttaatacaatgatatgcaactcccctgcatgttcgaggcgagaaaaaaggaggtccaaaagaaaagaagttaaaggctttctaccctgcattaaacaagagggagaaacagataaagttaagcttcagttcatcttcgttgccattttcgaaaaaaaaatcatcttcactggttagagattacagaaaatactactttttgtgctattttattttatatctaag

SEQ ID NO: 154029 - DNA, 682 bp, Zea Mays
tccctcgtcgcacacaaatctctagccacgagaacaaaccgaagcgagcgcagcgccgcgaccagctcaaaccgaggaagtgccgccgccggctaaatccgtcctgcgggaaaatccggccatggcaaagcgtccagcgtggtcgggggcaactaccgaagccgtccgtgggcgtatcagggagagctgatcgagggagcggcctaaattcctcaccggacttcattcctccgccgatgtccgcctcacgtcgcgaccggcatcaccgaggcatcgatcaccggtaaccagcccatccttgtcttcgttatgcaatacgcaatgtgtagctgcgatgaattggaaaacggggggggggggggggaatgcacgattggcgtccaccggagatgggtccgccgtcgtccgctcgggcggcgccgccgcgggttagttggttttggcacgcgaaggcgtgggggtgctcgcgaccgtcgatccagtcagtaacggctctgattagatcttcgcgtaccgcttcgcggagttgctcgtggtcgttggatgttgatcaggcggatccgatcgaccgcgcccgtataaaatcctggccgctggtttgggatccatcggctgcgatccagtaccggttcgttttaattgaagatctaatcctggcggctgattttcgatcggacggcca

SEQ ID NO: 154030 - DNA, 844 bp, Zea Mays
ctggactccgacgagctcatagaccggccaaatggggcaaggactggtgccctgcttcggccgaaaccgaattcaagacctaacgaatgtttcccccaacctaattccaaaaatggctaactggttgactctggccacgtcgaccgtgagcagagcgaatagttgagcgcgttcccgacgatcagtgggttcttggttcaattgggtgggtcggcaagcaacacggacgcatgagaatgcttaaacgagagagcagacaacatgaactaactggaattgcgttggccgcagtgaggtagttttcacggtgttcttgagcagattagggggaagtttaaaattggagctcactggtgattgactgggagcaatactgggtggctgggtgtgtgatgaccttgcggagctcacggcggtctcaatttataggcctagtgagcggtggccgggaattcgagcggtgacgcgtggcggtcggaggaggggaagtttcactggcgcagtgaatttgtgtcctacgtcgtggcagtcactccggcgatcaacggggagcgagagtaggtcacggcgatgcggtggaagtgcctggacacacggcgcaaggctggaaagcggcggtcaccggcgtacttatcggattccaccgcggtgagcttggtacggcggccggaattgtttactggccggggcttatccacgacgacgtgctccgagtatttatctaatcaccccgagtacgagtcgagatgcatggcagcggcacgaatcgcgatggcgatcgtcggcggtgaactgaactgagctcgcagcctaatccattcagagcactgtaccatggcaattg

SEQ ID NO: 154031 - DNA, 750 bp, Zea Mays
cgaccatgatgaagccaaaagaggcaacatgcttgaggagctgctcgtagtagcggttctggaggaagaagccgtgcagtagcatggcgacggggtaggttccggcatccttgggagcagcgatcaggatcgggatcggcggtgttggctgtgcatcgtgatccactgtgatcacctcgaccgcaagcttccctggctggaacaccgacgtgactaccgcagcagcagggacctgaggcgtcgtggctgtcgtctgcaccggtgctgccatctttctatctctctctctctctctctcgctctcgctctcgctctcggtgttgctggtaatgacgcagggctttgtgttgcttggttgctgatgagaatagaagatgaagctaggcggcaaatttatagagtcggcaggccggcctgcggcgggcgtgcgatcctacgaggagaggtgggcaaagtgactttgagtagctctgctctgctctgctctgcgaattgttggcgctagcttcttccttggaccgccttgcaaattgcctagaaattcctgaatgacaagtgtcaagactcaagaacacgtttgggcaagggcaacaaagtagggcacgtttttgtcatgactgcatgtacgatgcaacgatacatcctccagttcaacggtcgcaatattggtcagggttcgtctgctgtcattttcttcggaactattcaaaacgactaacatcactgtctttactcattatatatcctcgc

SEQ ID NO: 154032 - DNA, 611 bp, Zea Mays
gtgactttttgtgggagcacattgtagcaaagttatagatggattgtagcactacaactttgatgcagagacttgggtaagttgccaagtgaaatttggagaaaatcgaccctcaactctggctgtcaggtgctctgaatggtgttcaccatggtacagtgtacaactgaaacagataagatcgccagcaaacccaccgccgacgaccaattccaccgtgattcgtgtcgttgccggcccgacttgtgctcgggatgggcagataaggacacacggtaaaagatcctcgccgacggtgagctggagatcactctggtgcctccccgtggctctctcttcctctttgcggctgagccgataaactcgccggtgaacgccgcctcccggctgtgcgccgcatggcttagcctttctaccgcgctgtcgtgactcccttgggccatcccatcgtcgccggggaggttgccacgccgttagccacgaattcacgtgcaccagtgctttcttccacctccggccgccgcgcgtccatcgtaaaattcccggccaccgcttgcgacgcctataaattgagccccccaccagttccgcaaagtcatcagctagccagc

SEQ ID NO: 154033 - DNA, 591 bp, Zea Mays
gtgcttgcctcgctagcctaggcggcgatgcgctgggccccagcgcgttgctcagcccggaggtcatcgagtgtcttcctcatcacctccaccgcctagggggccgaggccgtctgcgtcgcctgtgcagcttgcgctgcctggaactggcggacctgctcctccagtgcccacactttcccctccaaacgcttccctttctcctctgcctcgagctcaagctcatccagcagcttgttccgccttgcccacatctcctccctgaaggcgaggtcctcctcctgccaggtgagatcagttgcccgtttcactagggaagcttccctcgccttgaggctttcctcggcgcgagcaatgtcgctggccttgttggcaagttcctgttgcagcttctgcaacttcgcctcaaccgcagcctgcttgtcccgctgtttcttcagcaccgtattataagctttcagcttatcatggagcactgtgacggcctcctccctttggtctaagtgttcctccttcttgaccaagtttttctccttccgggtcacctcctcctctcagtcagacaccttccggatgtcctccttgaagtcc

SEQ ID NO: 154034 - DNA, 331 bp, Zea Mays
gacttccgcctcttccatccatctccgctccttcaatctgcgaactttggagcccctattgaagagccattgctttcccgtgaagttccaggttatcgctccaacttgaaacacatcgaggtttccgtcgccgtttgaggtatttttgtcgatttgaagtcgttttgcatatttcccttagttaaaagttgtgtgtgatttgaattcgtttctacatttctccaatcgggtgcgttatcttacaaaaaaacctctcattgcatatctctttgattctggagccccgattgaagagcctctgcagttcgtttagatccgcggtatcgctcgg

SEQ ID NO: 154035 - DNA, 603 bp, Zea Mays
cacatgtcactttctgattggtttctgtcgttttgacaatttgaagttttaaaaaatctataaattccaaaaaaaaatcatagatccgtctataagtaaagaggatgtttgcattcattcaaactcatcactatccaattcgcttgtcttcctttatattgtagccccacattctccattctaatatggatccaaagtggagtccaaaatttggaaccttcaccgacttgctcaatgatcaatctccataacatctcgacaccccctatgagtgtaggataggtctttttcgaggacctttttgtcatacatcatcattgtgagaggatgtttctgcccgtccccattccttgagttcacaacctctatttccatacccatatcctccttcatcgcatcctatcgaccttccatggatgttcctccttctaataaaaatcctaccaccaatgatcctcctatcaccaaatctcctaccatcgatactcctcttcctacacctttcatttatccataccctcctccatactcatatgggtatccaaatgatgatcctccttatctggtgctccttcccatatggtgctcgtcctctatttcttt

SEQ ID NO: 154036 - DNA, 1083 bp, Zea Mays
ttagttctgcagggaaggggtaaaccctgttgttgccatgaaaggttaggtaatgtaaaacaaacgcatgttggtccattggttcgtcctgcatttgtcataatagttctattaatggttagaaattgtattaatactgattttatgcagtaacaaagaagcaatttagtaatgtaccggtacaacaatttctgatacatcaccatcatcaaagtcgtatcatcgtatgaagctagtgacaaaaaagccacaatcattggagcctggctgcatgtttggacagttgggaagaagcgcaattttgaagttgccaaattttagtatacaagaatctggtcaagcttcttgtaacgccatgctaaccatgggagtttcattccatttatcattacttgatcattgtggatatctttccaggtagtaccgccaagggctggaccatatgaatttgaatctaaaatgtctatgcaacgaagctggaaattgattgcatatagagtccagtgactacgacagagcatatgaaccatgatctgttaacataaattgataggatatgacttaagaatgatatgaatgtgaaaaaagaaagtaaatataaaaaactgaatatactgtgagcaagataacagtgtttggtatcaaaaaggaaacttataaaaaagaaacattaatataatcttacaaacaagaatggttgggactcaccagtttaactttgtttagagcttcaactggaggaaggctacggacaagtaaatctgtaagaacggaggttgagaaaggttgcggatttgaactatgttgttcgagctcctccatattcagaacaacctgcataataaatatattgataaataagatatgtttatacaccaaaatacgaaacatgataaatgcttgaagagtacaatacaaaaacattaccccaacattgacatttactataagtgtgttgcttatgttatctggattgcataattgatcatcatcacgaatacaatcaatgaatccctgcatgaaaaggttgtcaaggcatttatgaggcccaaaagattcaacaacatccaacatagaaccacc

SEQ ID NO: 154037 - DNA, 631 bp, Zea Mays
ctttcttcttcttatagatccatttgcactctatgggtctaacaccttcaggcgggtccaccaagttccaaacttgattttctcccatggaatctatctcggatctcatgtcgacttgccatttctcataatatgggtccatcatcgcttctgcatatgttgcaggttcatcattgtctaacaataacacttccccatagcccaacaatagcacttctctacatgcttcgcgaagccttgctgaccttcatggttgtggtggtgtttctcttgccacagacgtctcaacttgttctgctacattagcatcacttgttggatcatgtgacactggctcatcctgaacttcttcaatatacaccttttgtttacttttctctcttttgagaaattatttctctaagaacacaccattccgggcaacaaacactttgccctctgaccggtggtaaaagtaatatcccaaagtttcctttggatatcccacaaacatgcacttgtccgattttggagtgagtttatccgactaaagtcgcttgacgtaaacctcacaaccccaaatcttcagaaaagacaaactgggagtcttcccagtccacatctcatctggtgtcttaactatgtacttaga

SEQ ID NO: 154038 - DNA, 1452 bp, Zea Mays
gtggaaggagttggactactgtatgcggagggtgctccggaagattgccctgcagcaaaaccttggtattgttataaggtagcagcatccacttgttcttccagtgtatctccatggggctgaaattttcaagccaatccatacccacaatgatgtcataatattgaaggggaataactttgaagtctgtttggaaggtgacgccctgtgtggaccaaatgcagtcggccaactgagtggaacaatgtagagaattgccgttagcaacaacaaccttgagtgcattgggtagtggggatagtccctgtaatgactcggcgagggtagaactgatgaaagagtgagtactgccactgtcaaccaatattcgggcctgctgagactgcattgtgcccaaaaatttcatggtctttggagcaattgatcctgtgtaagctgttgaggatagtgtcatataaagttgagaaaaagagtcctcgtccacttgggctgaatctgtgtcctcaggctggtagatatcccaaagctcttgcacggcgtgtaactgaactgcagctgaacatttatgccctttgtgccattttttctgtgtagactttacaagtaagctcggacagcctccattttatcagcagctgattgattgtatttgttggtcggcaagggagtcttgtcatctgttgcttggggtggtgacggcaatggaagggcacctcagaatgttggcttcatagcattgggggattctagtcgagctgctgaataataggggcgtttgaactccgatcttcgagctgcttcagtttccatttcctcttcctgcagagaagcaagcacgcaggcagtatcgaaatcgggagggcgctgaagaagaacagcagagcggatcagacccttaagtccgtcaatgaaacgagtggtgtaatataggggatctggggccgactcataagcgtggaggttatcaaccagtttagaaaattcagctatgtactctgctactaattgggtttgacgaatgtggaatagtttgtggatcataatggcgtgctcatcgcggccaaaacgatcgtcaaggagggcacaaaatccggaccaggagagatggatgagtttccgctcaatggattggaaccagcgagcagcgggaccttgtaagtacattttggcgaccttaacccaaatggtagagtctacggagtacatctcaaagtacgactcacaacgggatcgtcatagtttagggttctcgccattgaaatgagggaacgacattttgggaaggttgtcgcgagcatctagagctcccggatggggtgtaactgactcgcctcggaattgattgggtggggggtcaaaatttgcagtgaatcgagggagtggggtatcgtgcttacccttgaccgggtgatgagtatgggtgaaaacctacccgcactcatcgacccggtg

SEQ ID NO: 154039 - DNA, 869 bp, Zea Mays
aaagtgtcaagaatcttgataggatattccgcatatgtcagatcatcttgaacactaaggtcctccattggtagttgttcctcaggtaccctaaggcacttcttcagttgggatacatggaatacatcatgtacattcgccagatgaccgggcagttctagttgatatgcaacttcacccactcgctttaagatcaagaaaggtccaatgaagcgaggggacaattttcctttaactttaaatcttctcataccccggattggtgacaccttcagatacacgtgatcaccctccttaaactccagtagtcttctcctattatcatcatagctcttttgccttgattgtgcaattctcaaattctcccttatgattcgcacttgttggtctgcctcttgtataagttcaggcccaaagaattgcctttctctagtctgatcccaatacagtggagtcctgcattttctgccatatagagcctcaaacgttgacatcttcaaactggcctggtagctattattgtaagagaactccgcatatggtaagctcttatcccaactcccaccatgcttaagagcacaagctcttaacatatcctccagcacttggttagtcctctctgtctgtccatcagtttgaggatggtaggccgaactaaaattcaactgtgtatccaagctctcatgcaacttcttccaaaaccgagaagtaaacagtgatcctcggtcagacacgatcttcttaggcactctatgtagacaaactatccgagtcatatacaattctactaacttggctcccatgtaattagtcctcaccggtatgaagtgagccacttttgtcaacctgtccacaatcacccaagtcat

SEQ ID NO: 154040 - DNA, 309 bp, Zea Mays
gaagaagttgtgttttgcaagctagcatcagatatttgacatgatgctcttgttctccgtccgtgttgaacacaagatgcggacgaggcgccattctttattgacccggagtcatagctcctcctcccgctctgatgaccggtggaccaattcaatcctaggcatgcatacggcagacttcccagcaatgggattttgacgtactaccaggttattaaacctcaggtgcataccgaccaggcaaccatcgcaattcgcaaaataacctttgaccagaataccagatatcccatgcagtgtagcatcaca

SEQ ID NO: 154041 - DNA, 700 bp, Zea Mays
ggctgggaaggcttaagtatctctagccacggtggtcgtgcgccgggaagaactgcgggtgatggctcgagtgattccatcgatcaccgacgacgatcacataggcatggttgtggaggctcaggtggcgttggtcaaaggccatggggtggcttttatatgcgtgtgggagggcgtggcgctcggtcgagccgtcaacgcacggtggcacgcgcgagctggctagtgctcgctctcacatgtcattcgcgagcgaacacctaacaccgaggcatgagcccgtcttattttgcatgtagagcttcaaccattgctgatcttggaaaaatctttgtataaggtatattcattacacctttaggtagagtatttgtgtgggggtcaagagatatggagctatggtttaggagatatgacgtgggaaagtggtgtttgtctcacagagcaaatccgagagaaaatcactgtgttgtcttgtcaagcagtggagtctcaatttcaaacttaactagggcatggctaagttaattgggcacatttttcataactggggttaagagatttgagttttgtagcttaatgaacatgtggggtctttgctatagggttgattttggattagcaaaaaatctgaattttattttcttctcccacacttgtgacatgattagggcttttgccataactttttggtgcataa

SEQ ID NO: 154042 - DNA, 564 bp, Zea Mays
gtcacatttctctttcagctttctggtccaccgatcagtcagtacgcgcgtttcgacggttcgccttcttcacttgcagggcctatataaacaaacgagttggtgagaagttaccacaatattcattgctattgtgtcgttgtgctgttgaaaaaatttactgaagccgaagctttctgctttttgtgaacttgctgcgtaagcttcggaaaaacgtccaattagctgagtttagcttcatcacataaaactaaaatggctagagtcaggtctactaccaaagtagcacacaaaggagaagaagctagagctacggagaaggcccctatctcaaaaatgatgaaacgtcctgggttagttgtacgagaggaagaagagtctgttccgacaaaagatgttgttgttgccgaagttgaaccaactattgccaaagctgacattgacaacgaagaagatgatggcattctaagcctaagcaaaccaagccatattgagtttagaaaatccacagttaaggaggaggatttggctttaatgaaaaagatgggatattttggaaaaaat

SEQ ID NO: 154043 - DNA, 420 bp, Zea Mays
agttgagcttgctgaatccatcaataccaacatcacctgattttggacaagggccctgacccccatacaatcgtcagacacagccccactgatagcatgtaaagagagccaaaattcctcctcctcaacttgctcctctttctcaatatggcttagagtttcatcggacagcatcatgcccaactcctcggtggtcagagcatttagttgcatctgaattttctttgggcatctacactggtggcctcgttcatacttctccccacacgagaaacacaaaccattttgccgtctatattccttgaccaacctctccttggataattctattgctggggcttgtggtctaccttctgtcctaccagctggaccagtgaattttggttgagataccatcttcagagatttttgtcgctgctt

SEQ ID NO: 154044 - DNA, 522 bp, Zea Mays
ctagaactatgtttgagagccattttgagctagatctgttgctcgtttggtggttgttgctacaacaaaatttctgctggtatgaagggctgcaagtttactactggcgaattagcaagttcttatatagaaatttgtgttctgggtgttacaagttggactgtcaggagctctgaatcgcagttccgatggtacaatgtctcgatcaggtcgtcagctctatccctcgccgccgacgagccgcgcgcggattcgtgctttcgccgccgtgattcatgctcggatcggttggatagcgcttggggttgagtaaatatcatcgccgtggatatactccagccactaaactactccgaccaccgtaccgagctagtcacggatgcttcggatgtgttcgccggagacagccgcttcacggccttgcaccacgtgcctaggcacatttaccgcatcgccgtgactcgcttaagccatcggatcatcgcaggggagcccgccacggtattctccacgaatccactg

SEQ ID NO: 154045 - DNA, 496 bp, Zea Mays
cgtcggtagaaggtacagtgagggagaactacgacatgagcgccaccgcggtggaattcactaagccacgacagccgccggtgagtaactccggctgggcctgggagatggcgccacgtacgggttatccctccccgacgttatccactccataccacccacgaatcaggacggcgactgcactaattttggcgcagagaggtcgccggcggtgagatttttctaccgtggctgatctgatccgtttgggacactgtaccatcgcgagctcccatcagagcacctgacagccaatctttggtctgatttttctctcaaatcttcatggcaactcataccaagttatgtggcaaagttgttcctgtatagtagctctacaactttgttatagcaaccctaggtagattcccactggatcttagtcgaaatggctctcaaacttggaccaaagtcactgtccatctgaagttcagactgtatcagcctgacagtccaa

SEQ ID NO: 154046 - DNA, 340 bp, Zea Mays
gcagaagcccctctccaagcttgcccatggtgcttggttggccatggcatccttttttttgtagcttgtctccctgccgggtctcttcttggtgaccgcgacgagctcccctcctccatgcacctgccacgcagggacttcctctggtccgagctcgagcaggtgagcttgtcatcgcccatggccgaccatcttccatagagatcggcgcccccttgttcctgggtgaccggtgctctgtacggtttcttccccctccttcagtccttggagctcagcactcccatctcctaggcaagctcctctagcacttagcaccctctaccccagtagatcccga

SEQ ID NO: 154047 - DNA, 336 bp, Zea Mays
aaggaacaccaatttctgagcaaaaacatctactccatctagtcaagacaaatataaaagctactgtgtgcgtcgatctagatagaattaattttatcacctcaatctgaatccatttccattttcaggcacgaagcatccagcgtcaaaaccatcaagttactagaaccctccactcctacccttattacgattctcatgctgttttcagcgaacggcctgaccatgatgagctagggaagaagatcaagagggagtagtcaccggcggagcgcatggcggcggcggcacggaggagctgcagctcgccggcgggggctggtgctgttgcagggg

SEQ ID NO: 154048 - DNA, 808 bp, Zea Mays
aaatagaaataaaataaaataaaataaaaaaaacggacttctccacgcctgggccgcactctggacacagcccaatgcggcccctccatctcgcgcccgcgtgggccacaagtcggcccattccccgccgtgcgcgcgcatttgtccgcggtcaccgatgccatggggacccacctggtcagccaccctttccctgcgtggactcttttcctatcaccggtacgtgggcccgcctcatcagattcaccttgctccgctagtcgatccgagttctgctctgaatcacaacaaacccaccgtattcctgggcgattcgctcgggtgtcgtcgatccaagccttccgaactcgtcccatgactccccaggccgctggcgggtgggtccgcctatgtcagctccttcccctcgggcgtaacaaacgccgcgcgtgatctccgactccgtccgtagctaccggggttagttcaccggccgagctcgcacgtgctaggcgcttgccctgtccctataaatcaacgcgaccctcgtcctccatggcatagactccatacggtggtaaagggaatgtggccgtcggagaatccatcactagagcactgatgaacgccgtcgccgccttgaactcagatgatgccgcggcttgggatcttggtgatcgggtgagggtgctctctagcgaatacccggatgtggggtcgtcgcacgctggcgcgaaagggccatggcggcgtggcaattgctcgtcggagcaacaccaccgcgccggacccgctgggttccatgggcaggaagtcctgctatccaaat

SEQ ID NO: 154049 - DNA, 384 bp, Zea Mays
gaactgtccaaacataggttaaggttgtaaggcaacttttttccaccaaacagttgctaaaaagttggaatataaagaattcaaaacaatatatcaccttttaaacctcaaatgacgtttctatgatattgtgggcattgtattcacactagagggtattagagtacaactagtggatgaagacgttattgggctagctaatgaccttttgtgatacctggtttccaccatactgttgctaaaaagttggaatataaagaattcaaaacaatagatcaccttttaaacctcaaatgacgtttctatgatattgtgggcattgtattcacactagagggtattagagtataactagtggatgaagacgttattgggctagctaat

SEQ ID NO: 154050 - DNA, 628 bp, Zea Mays
gagaagtgggaaatgccgaaggagactgttactaaaactggcgaaggagagctggttcgactgaaatacagcttcaaatatggagataaatttgatgagccaaatgatgactggctgaaatgtatcgaagctacaagtgatgaacagcttgggccgtactccaaagcggaagataatgcgttatctgcggccttcggaagccgaaagaagaaaaggctaaatagagtttttgatgctattgggttcatgtatcctgattaccgctacccgccacgggggcagaagagaaagagtgcaactttcgggaaggatgctgcttcagctgctccaagcgagcccgcgccgaagaggaaaaaggtgaaggttcttactcaccggccgcgatatattgaaccggccgtagtgcccaaatttggcggtgagacctcttcggctactgaagccaaggaagctgcgcctacgcagaagattgaagagtcggctacaatgccgaagacatcctcagccaaattagctgagccaaaggccgataatataggggtcaaagaaacaaagatatcagaaattacaagcccttcggcagaagtgacagtgccgaaggcacaaaaaggtcttacaacgaccccca

SEQ ID NO: 154051 - DNA, 484 bp, Zea Mays
caggtgactaaataaaccaaacaagtccttaggatatgtttagttgcctaacaagtaaatttgtttgtgcgcgttctagatctagatgatgtgctcagtgggcacaagatttatactgcttcgggcaatgtccctacatccagtcttcggtggcttgtgctacaaacaccttgttgctcaatgcttattgtagggggttataagcggggcgagagagggaggggctcctaagtatcttatgcgtggttggacctaagaactacgaatctggtgttctctactaagtcttgggggttatggcggtgcattccttggctttggcctccgtagtcctccgtgtgtcctctcttccgcgtctcgtcagaccctccttttatagaccaggagtgtttacaggtagcttcttggggaaggagttactttgccctggtagaatgaagcattctaccgccggtagaaacctgtttgtcggtatttgccttag

SEQ ID NO: 154052 - DNA, 513 bp, Zea Mays
tattatatatataaggagtttgaacatagcacaatatcacaacagactttcagtgaacttccaagttttgtctgagcaccatgcacatcaattcttgctgtttagtgtcactaaatagttaaattctgcacattttcatttttcaatgcatgaattattgttggattgatgcttatgcattactatatactagtaatatatttcgtttatcggatctgaaaatggacagcattttatacccttgttggaggataatgtaaacctatttagttatgctcgtagcagttgtaaaattaagcatcatggggtgattgttttgcttgcacctgattatgcccgtagcccgtaggccgcatgaggtgattgttttgcttgcctaacttcaggcaatcaggctcatttatactatctcctaagaatcataatcaggcacgcctgcttgtggcaactgacaatcgacccagactattcattaccctcgagcttgacgcctgaggattttgaatcgatgcc

SEQ ID NO: 154053 - DNA, 968 bp, Zea Mays
cgacgaccacctaggcggtggcacggcatgacacatgacagaggctcaccggcgcgcatccaacctagcacagtagtggtcaaacgccaacgtaggaacatgatacatgaagtggaaagggtactgaatataggggtgggtatctcaccacaattccccgagtagaacgccctgcactcgacgcggtgtgggtccacgacggagggagagcttcaacgataaatttcgggcatgtcaaggattctcactttcaattgacgcggccgaataatcccacacgtgatgggtacccaccatgccccatcccgatcgcctagcagtggtgaagacatgcgtctacggtggcggcttgacctccatctctctgcttgcttaggttatggtggctcagggatgtggcttgggttccaaggaggtcgtagggcttatgttttatagcacatcagtggagtctgaaccggttgcgagagaccgaagcgggtacgatttggtcgttgttagatcccagcaaacgcggtgagttcacacggaattctgttacgatctgacaaaagggagatgggacctctgcgtgctggggaccacatgggagtgacgacgacgtaagcgtgaaacgggggagacaggtgcgtggggcccacgatgccagcgacccggtgtggcgcgtggctgcacggtttgggcatggatgaacatagatctggcaatagggtcccacccggcagtggccaatgcgatgtgtgagcatggctatgattcggtgtccaaccccagcccacatggcggcataatggtgacgaagcacgcggatgagaaggcctaacgacgaggcaacactgtcagcgtgcaaggatgtggagtcgggctggcggggtgagagaagagtgggccaaggagtggagatttgggtccagtacatgtaaatccttccttttttcattttctatttacatttcccaatttcaaat

SEQ ID NO: 154054 - DNA, 768 bp, Zea Mays
ctggggtctccgcagtgccaacaggcattagctggcagttggttgcttgcaacggagggtgcctgaagggagctctgactctgctgactgtagcgtgatggagtgggtccagatgatttattgaagcttggtcccctgggtggaagcccaaaggatcgagctctctggtgacgttcttgttgttgagctcggagaacttggaattttctcttgagatgccctttttcttcctctttcgccctttccacttggatagccttgttggagaggtgagagaagctgaggaagtcttggctggcgaggatggtcttaagctcgagtcttagtcctttcagaaaatgggccatctttccagactcggtgctgacatcctcaggcgcgtaacgggccagctctgtgaacttgtgcacatactcactgactgtcctcccgccttgagttagctcccggaattcatcctccttgagttgaactatcccctggggtacatggtgctcacggaaggcggtttcgaattctgcccaggtagcatctctgacggcctcactgaaagtgtcccaccatgctaaagccattcctgaaagttgatgagctgccagttggatacgctgattttcggggcatccgatggcttccagcttcctcttgatcgtgcgaagccagtcatctgcatcgaggggattactggaccccgcgaacgtgggaggcttgagtctcaaaaattctcccatcctgtcctgtggccttccaccgcctgggcgctggttt

SEQ ID NO: 154055 - DNA, 513 bp, Zea Mays
ataagatcatgtacctcaacatcagatgaaccattatgagagaaagtgttgccaagtttggtgcaacactcttctagttcagtatcattcaatgacttcaggatagttgatatcaataaaaaaccaaatatatctttgaacaccatgagttcttcaaatctggttttcaaagaagtgattgccatatcaactacaaccaaaaaatatttcactttaaaaaccctttcggtctctagaatttcttcttgatcattactttcatcaaattgtttcttcctcaaggcactacgttttactggaaacgatgcctctagacccatttcatctgcaatgcctttggagatgatcagactagaaggaaacccctcatttctgtatgcctcaaagtattgcaccataccttgtatttgattcaaagcagagtcaatgcacatatctggcgattgcaatttcttactcactttgtttacagaatataaaatatcatgccagataaccataccaagcaaaaac

SEQ ID NO: 154056 - DNA, 367 bp, Zea Mays
cagcacgcgaacgaccaggttatgggtatagtctgcagctgttgtgctggtagatgctgctgttttgacaggtactagcaagctttgcacttcaggactaactcggctgcgtcactcttcgctgttggccagtagaaacctgacctgaaaaccttcccaactagggtcctggatgttgcgtgtactccacattgcccagcatggacctcatccagaagttgctttccagtggctgagagaatgcatttcatgaggactcctgatgcaccccttctgtatagtgtttccccaatgagtgtatagtgagctgattgtcttgcgatgcgctcggctgtattcttgtcatctggttcttcctcatttttta

SEQ ID NO: 154057 - DNA, 1191 bp, Zea Mays
tttggatgaagcgtaggaaacttataggaataggaattcataattcttcttagattagattagcagtcacaaaacgatgctttggatgaatcataggaaagtatagcagcaacaaagtactgatttgcctcgatcctacgcgacaggaattgaaaaaagaggtccaagccaatgttttatttcctgcgttttccctacaaaatcagccatatgggaaactttccttcacttttcctttgcttcgttcctgcaatccaaagacatgagtaggattttttcctacgggaattggaatcctacacttttcctccaaaattccttcaatccaaaggggcccataatggtttgcctagacacccaagggttttagatgtctattcctcactttactcactaggaaaaacctagagctataggaatagactctcaactttctagtaacgtttctaagctcccacacctctcaaatagctagtttgggtggtatataaagtctccaagtccaaattaaaaccaatcgttggaaggaaaacagaatctctgcatatctgccagactccccggtgcatccaccagatatgctagtccatgttagttagccattggaactaatcgttgctaagggcatccggtgcgatgactagtgtaacattggacacgtctgatgagttatatccttctcgggttactatacatcctctcaaattatcctgtctagtggggtgtccgctgctatacataacatgtccggtgccttatatatttctccaaacatgttgtagacctctctgagtgtcatatccagtgccccattcagtgtgacatctgatgcacacctgcgtgtttgatgtactatgtttctgtagccctttcttcaacacagtgctacttttattcaatgacttatccggtgcctcactggacacgttcggtgctgctgaatagcctgttttctttgtttcttcgtgtctcttcatatgagcttcttccatcttgtctcttaaactcttgcatgatctttgtaggtcttcaatgagtcttctattgtcttgcttgaggtgttgatcttctgatcatcacttttcctgtgcccaggtccatgttgcatcctttgagttatattcacaaacacttgcaaataatattagtcaaatgattatgttgatcattaaacaccaagatctataatta

SEQ ID NO: 154058 - DNA, 628 bp, Zea Mays
gggaaccgttcctatagttttgtgacgacttcaacatatgggtcgattgggcgacggtggctcacccaaagttgaatggccacgtcgagcaggtgaatgacctgatccttcagggccttacgccgcggattttcgacaagttggaaaaaattcgccaaggcggtgggcagccgagctacccacaatactctggagcctacgaaccacgccatctagagtaaccagttgcacgccttttcttcctaacacttggcacagaagctgtcctacccatggagttagaatatggctccccaaggactgaaggctacaacaacaacaagcaacggttgacacgtggctcactatcagcctgatcaatgaagcacacgacgtggtcgtgctctgctccgccaagtaccaacaagacttacgccgctaccataaccaataggtgcgtggtaggtcgttcaacatcggagacttgatgttgcgaagggtgatgacaaacaaagacaagcataagctcgccaccatgagaggtaccttacatcatcgcccagaccctacgcccgggagcatactagcttaaggacaacaacgacaacctatcaaccaacacatgggacatcgagaacctaagaagatt

SEQ ID NO: 154059 - DNA, 729 bp, Zea Mays
ggagcttagaataatgctatttaactatagggagatgggaatcattctgaaagttgaaccaatgtaaggtgtgatgccctcgctgtacgtgtgttactatagtttgtatgatgaggttgtgcgccttcgcgcatccggctatgtccataggggcgttgcacgcttggtctggcacatttattatgttggtccggctacgcctgtagttggtctgtgcgtggatagtttcttggtgtagacttttgcatggatgtaatgcgcttgcgttttggcgcgcttgttgaattagtccggctgcactcttaggcgacttttgcacggatagtcttttgaggaagacttcgattttgcgcacttgttgtgctagtccggctgcacccttaggtggcttttgcacggatagtcttttgaagaagacttcgattttgcgcacttgttgtgctagtccggctgcacccttaggcgacttttgctcggattctcgcacgcgagggtagctagcgctgcccctcacggtgactttgtattggtcgaatgtcgaagaccgtcgatgcggtcttttttcgacgtagatttttgcgggggatttttcgctggtatattacatggctccgcctcgttaaaaacctcacccactgggaggaaaagagtgtgggccagaataaaattgttttgcgaattacaagggcgagctggccctgaggagtcaaacaaaaaatttgtggagat

SEQ ID NO: 154060 - DNA, 521 bp, Zea Mays
aaaatacccattagaagtagtagcagcagatgctgccttttttctgaaaaagagatgcaatatccgatctggcatcgggcagagcggagggtggcaggatcaccatcacgccatcatcgcgtcaggtcattaggcgatgtgttctgtcttccctctttcttttttttgcacgaacacacaggagagtcttccagccttcccacttccttgttatctccctttgactccaatcgagtagattagattagaaaaagctggaaaggaaacatcatggtgtaggtgtacgtattgccgtattgaacacctagacttactagctttgctgcgcggatggtgggccgtatctgcgcgtcatgggcctgacgggtgtctgtgttctgtgatagcgtgagcatgatctggtaagtttcttcttttttcaaatacagatgtatatattacgtatatgtactatgcttgccagtcttgcagggtatgccagggcatatccggcataccctgtggctctgccactacatgca

SEQ ID NO: 154061 - DNA, 508 bp, Zea Mays
tacaatcagtagtggaagtaaaacttgtgttgattcaggagttggtaaactcatatgttatagatgaggaggctcaggtgttgttgggcaagttgtctgtccatagtcccaatgaagggggttttcattacatcaaggtgtcataaggaagggagatcagatatgggtggctaacaattctgccttgaggactaaaatcattgatgtcttacataatagtattgtgggaggtcattctgggggtctggccagctatcacaaagtaagaaggttgttttggtggaaaggcatgaagtctgatgtggtgtgctttattaagcagtgtgcagtgtgtcagcaggctaaggcagaaaagattcacaccccaggtcttcttcagcccttgccaattcctcaaggtgcatggcaagatctaacaatggattttattgaaggattacccaaatcagaagggtataactctattttggttgtggtggacagattttctaaatatccacattttttc

SEQ ID NO: 154062 - DNA, 343 bp, Zea Mays
ctggaacagaacatggagtagatcttgaaagatatgtctcagaaacattgcacctactaccagttctccttcaaagaaaagccatataggaaagtcaaccggtagtacttggcttgtgctgcctgttgctcgcctgtgctctggtcctgaaccacagccccagattacaaagatctcaagaacagccatacgaatcttgacgtgccccaaactgccaacccacaacatctcatcaccacattgctgcagtcttcagtgcttgctcgtaataatcatactaggccttcgatctgcatcttcctagcaaaggaactgggatatgtttacagctcatatatccccc

SEQ ID NO: 154063 - DNA, 872 bp, Zea Mays
ttgaggtaattcatggtgggagccaaggaagggccatataaaataaagtggtccagccaaaggttcaggaaagcagtatgtttacgttgtcgacaagacccttacttttggcatatacatattgatacattgactctagttcttggtggtagccttgtcaattatctttgagtgcacctggcgagggtgaaagccaaaaggcatagggagctaatgtctagccaattaccatggtcacatcaattagggttggcattatcgaagcatgaccaaaaaggaaacaattaaaggcatcaaatcaaaaatagtttatggttcccattatattctcatgtttttcaatgggggatagggaaagagagagagcatcaggaatcctatatcctaccaggatgggccatgagttcaggataccctctcattctatgcaatctatccttccatggggttgggctaggctctaagctagtcaaaccattgtctcaagtcaaggttttgggcaatgaagggatttgattgacttcggtatacattattttagatagatcttctagcgattggggtcccatgctaaaaacttttgggttctttgaacaagggagtaggttgtcgatggcctatttgaaccaaaggaatattaacagacaaccaactaaagctagttcagatgagtagtgtgatcgtatagtccaatgctccggctgctttgcgtccagtgcctaggtccaatgcttttgttcactaacccatatgatttggtgcctcaattttacgtgcttcaaactcttaccttgcttggttttgtcatgatctcttcattcgacttggttccatattatgttttggattctatatgatcttgtcggtcttca

SEQ ID NO: 154064 - DNA, 275 bp, Zea Mays
atgttttgaaccatctgcagccgctacggtaatgatctttcccagctctcctgcacgctaggcgactgggcactcgacttcccgcacaactggcttggacatgattggagcgaggcagccgatgtttatactcagcagggagacgagtccgcgccctgtggagctatctcgagattgcggcagagattgcggagattcagttgtaacggacttgattggagctcggactctgaagaagaaatcggccacagtgccccatatgctagcgatcagga

SEQ ID NO: 154065 - DNA, 297 bp, Zea Mays
cggaggaagcagtcatcggtgcggcaaatgacaaagaaggtttggctgcaacagcaggagatgggccgtgtcgggccaaaaggctgaggaagtgcaacccaaaggtctttgggccggcgtggctaaacagcacaaagtaatccagccgattattaaataagggttcggcggcgcgtagggtttttaggctgtaacagaactctagactctagttcttcttcctttccaagtactatctcaactactctgttctccgtctctgcattctccagatattgtgtgcgtgtgtgttccaac

SEQ ID NO: 154066 - DNA, 459 bp, Zea Mays
gccacctgcgtgggccctgccacggccgtggggtcttcggcagccggttcgaccatcgtcttcggggcgttctcgcccgttggcgcgggggctggcgcggggtcttcgccatctccagtcggtgcgggggtcgacgaggggccctttcccgcatcagacggcggcgccagctccaccccgaggcttccggcagcgaggccttgggcagcgtgctgtctaggtcaccaaggtcttcaacctcctcgtcacgcgccatctgcagcaatagctcactcattcagcaaaaccacacatacctacacatataaccacataaaatgatcccttacctgatccattgcccggtcggacctctcccagaccgtctctcgaccgtgaggaccccacatcctatcgaagagagccctcgccgaccgcttaagcaccaggtccttgacctggaagattttgcgttcgaag

SEQ ID NO: 154067 - DNA, 1063 bp, Zea Mays
cgcgatggtacagtaaccagatcagatcgccagctcagtaaactcaccgccagtgacccctgcgcgtggattcacgctgctacagtgattcgtgctcagtgcagttggataacacagagggagtaagaaatatcacgagtggatgaactccggccactgttcattccggccgctgtgtctgcttagctcacggtcacttcagatctcccctcgccggagttagacacctcgcagccttgcaccacatgcctcagcactttaaccacaccgccgtgactcgtgttagcccatccagtgatcgtcagtgaggttgccacggtaatggccaccaatcacgtgcgccagtgcacctcctcctctccgacctccatcgtgcgagttcaaattcaccggtaaccgctcaagagccctataaattgagcacaccctcggctccgttaggtattccagcatccaatccactcgctcgtgcctccaattactcaccagagcccacaaattgctcaattcccccaaatctgttttctgccaccgtgaacaagctctcaccatggacagtgcaatttaggtccggtcttgtttcagcactcttatataccactgatgctcctcgacccattcaattaaactagaacgtgctagatcgtcgggaacacccgtgctcacccgtggtttgcactgcctccgtggacagagtgatttagagctcgaactgtgaaattgatcgaggggaaatgctcgttaggtgttgaattagggttcagccaagttagggcaccagccattgcttatcttggccggtacaggttcgccggagctcggttcttcgccgtcgaggacctcggattgtgaagaaataaagcgcgagggtttatttgcaaacatcagcgactgaaacaaatagtgtcgcggactctttcgggttgtttaaaaggttggggtcttctttgcaaagtcagcacgcgggtgcgcgcgctggcgtgttctgccgatgctgggccggctcgggccagattcagcccaaccctgttcatgtttttcctttttctttttctgccaggat

SEQ ID NO: 154068 - DNA, 544 bp, Zea Mays
ttttttgctaaattagttgtatgaggatgcctttatatttctgattgatactgagatgtcactgaaagtgttgtctaatatcttccctttgtaaactttttatgctttgatgtcatcctacgtgcttgtaagcaagtcggggaatgcaaaaaccttgcaatagcttctgtggacaacccattggtagttaaactttagacatcactgttgttgctataaatagtgttggaaatacagtgcaactttggcttggttggctgtgaaatattttcatttagcctgtgcagtgaacacagtgaacaccgttaaacttatgatctatttcatatttcagtttatttatactaaggcaatttgcactcacctccaaggtgcatatgtagtatcctatgttcaaaatttacctaatgactttgttaaagcttgcgtgtaacatatgatatattttttttctctgtatgatataaccacttgtccatttggctgtaaaggggctgttcctttggtactaagcccgagtttggtttgagggactaaagattag

SEQ ID NO: 154069 - DNA, 721 bp, Zea Mays
gagtttgtattggagtactttgttaggttccatgccttcgtaagatgtcttattctgtcaggtttcttgcaaatacaaactctccccccccctctgtgatgtagtatgctgaagacagaggccttgtgtattttctgtaattggtaaaagtaattgggattgttggtgagatctgaaaacccagttgaaatgcttttaggaagtatagttatttttatgtacacaatgacatgccagttatctattagtccagaatctgagtgaaacccaaaacaaaactagctgaatatgaggttgtaaccagtccctttttatggcttacctatatacaataaattgtaaagtcacaagtgaatgaggtaacatgaaaatgactaattcatggctaaaatgcatcggtttcacttgctatattcaaggagttagtgttatgaatctgatcaatcagagcttgaaagttgttttcaagtctctaaatcaccaacaattttagcatgtccttctactctaagtggaaggcgacctggccatatacttgttttttccggttggccaatgcggcgaaagttgatatctgatgtaggtgtgcaatctggagagttggtgggcattgatgcttttatgtttctggttgctagcagtaattcataggctctgccttatttatctaatgtatttgttgctttacactgtaaatcttctttcccgtggaattatctta

SEQ ID NO: 154070 - DNA, 592 bp, Zea Mays
gtcgggagcatgtagctagcgcaagtggataagcatgtgcattgcatccaccggttgaccatttgcttcagttcagttcagttcagcgcttctggcgaacggccacgagaaccaaacgcatttaatttcggtcaacaaaagggcacaacaatccattggtttccttgtctgtcatctcttccctgcatatagatagagggtacaatacaagcacaagaaccatcaacagcgaacagaactggtactaatcaacgcgacaaatttctacacttgggtcgtctgtgcatgtctctcctgtgactgaaaaacattcccggtcgtgatgaccaccacaagcagcatcaacctgttccaagcaaatgacggggttagtgaagaaccagcaaccagccatttttgtaatataggagcgcgcgggactctggttagtgcttaccccagcatgttgctatatagacaagtccatcatttctctttcctccctatctaccacagatgttcacaatcacttggtttcagacacctgctgtatagctcgaccgcagaatctcctgttgctgcggtgggagttagagaatacatttctttcctt

SEQ ID NO: 154071 - DNA, 636 bp, Zea Mays
ggactcattaccatgctcatgagcttctccctcttcttctcatcagtcttcacataaaacaaatcattcgtccacccggtcagccatttagtgtggtagccaatcacggggtccttggtatccttttggtatgcaaaattgtagcatctggagttcttgtgtagaccatcggctctagcattcatctgataatgaagttcgtgtactcgacaaaacccttcggtattggcactttttccttggctccgaagagcctaaatatacacgctaagtctaacaatggcattgggagtcagttgatgtaggtaaatttcgaacttcttcaagacctcatcgatcatctcataaagggggaactgaagtcctgccctgaagaagcttttgaagactacaacttcatcctcttttggctctggaatcacctcatctccagcgaaatgaagcagctcgtcatcattttgtccaaagtaccctagtttcttcattaaaactagatcctctaccttaactgtggatctcccgaattcgatatgactgggtttgctcgggcttaggatgttgtcatcatcctcactttcattgtcgctttcaacttcggcagcagtctattcaccttcggcatcagcagcaccttcg

SEQ ID NO: 154072 - DNA, 631 bp, Zea Mays
caagttaattaacaattatattgataaaggcacgaattaaagctaaagtctcattctaattaaatcgttattttagataaccggcaactaaaccagaattgactaaataacgcgagcaatcataatggaaacaattaaataatgcgcggatagcgcgcgagacacacgtgagcagcaagagacgacacacgcggcagaggaaccgatgcgatcgacgcaatggtcgagagatatcgcatgcatgctacacagatatgaattacaatattttaactcaacctagtcatactaacagacaactatcacatgcaaagataaaatcgacgcttagctttgatgggtttgctactcggttactcgctgtttaattacgtaaattaattaacgtgagtgattctaggcgaaacagtttattgtcgtacgacacggcgcatgacccactaaacaaggccgcggaacggcgcacgcaacaacgcgcatcgacacgtgtgaacgacacgcacggtgcgcgcgaacggcacgcgataatcgctaacaaataacgtgtttataataaacaagtattaaataaaaagtgtttaagttgatattaatgtcattaatgtatatttacaaaagtgcaacctaaact

SEQ ID NO: 154073 - DNA, 503 bp, Zea Mays
tcatcctaggccacgacctatgtcgactaaaacacagaatgagaaaggcatcaaccgcacgtccgtagcatccaaccccctgtttagcacgtcctagcattgtgcccaatgtccaatcgccatccaacagtcaactcatcattgttggcctaccgctcagccgcccacccaaccgtcactgccagccgtcaggacatcgtcgctagcttgtggctcgcctgccatcgctgccaacccatcgtctagccgatagcccatcatggtcggcccgcctccactcggccactgtcccgcactagagtgcaagctgccacgacaccataagattgatggtttaatggtgttttcgatgttttttctatatagttttgttcttttacttacattgatgcttactttcatgctatcgattggagtttctatcgatgatttaccgtcgttaaaaggatttttgatatccatattattttgtaatagtcatgatattacaacttaacttccat

SEQ ID NO: 154074 - DNA, 383 bp, Zea Mays
gctgctccacatcagcggtggaggagcaccactatctccttcggggcatccgactgctccgaaaacatggcgggggccggtaaactaccgctcatcaccgcccctccattgccaacatgcggctgcaccatgttctgattgacggtggggctgggctcaacgtcattagccatgctgcattcaagcagctgcagatcccagggtcccgactgggaccctctcgtccattctctggagtgggcccacaaccggtgtatcctcttgggagcatcgcactcccggttacattcaggaccgaggaaaacttccgcacagaaaacgtccagtttgacgtcgcggaggttaacctccccttcaatgccatcattggcaggccagtcctg

SEQ ID NO: 154075 - DNA, 523 bp, Zea Mays
ggccaatcgatcaaggatcatgcggtatagcaacccatgcaaggatcattaggggaataggggaggtgaagataacccaattataagtgtctgaataagcccgagtttaggtaggtcaactagtgggtagcagacaaagcccaactcctcattcaaccaccccaacctagcatggggagtggtcttcgacattgttccacctagggcatgtcaagcatgtaggtcagagcttgttattgtgaagagtcatgacccttgtcactctacaacctcctcgacatgtcttctagcgatggctcctcaataaatccataggacactgccaacgggtcacccctccatgattgcttcatgaccgagaggaagaacacatcaacgctaataggagtactcccaattgaggatcagcactatcccgaacaagaagttgagtacttttagtgctaggccaaacaacacctaagatgacagaaggcatcataggagaagccgacactgtcgatgcagcaagtctcgactaccc

SEQ ID NO: 154076 - DNA, 292 bp, Zea Mays
gtgctattgccgtgattcacgccgaattaaacgcggataatgatcacggggtgaaagatcttgccgcgagtgagctaggatgtactgtgttcttgatggttcatcagtgcaccccggcgacgtggccaagcagctatcaccgacgtgttcgccattcaccgtgagggcgccatgccttaggaagtttatcgcatcggtatgagctgtagtgaccatccagtgaccgccgtagttcagtcgctctgcggttgccacggtagatcgccgccgtgactcattcccctctcggccg

SEQ ID NO: 154077 - DNA, 1054 bp, Zea Mays
cgaagttgagagtgataacgaaagtgaagtggacgatagtattctatgcccaactaagcctagtcatgttgagtttggaaaatccacagtaaagcagaggatctggttgcaatgaagaaactaggttattttgaagagaatgacaatgaattgatttgctttgctggagaataaatagttcagagctgaaggaagatgaagttgtggtattcaagagcttcttcagggtggggcttcggttccccctttacgagatggtaggggaagttttaaagaaatttgagatctatctccatcagctaaccccgaacgctatcgtcaggcttaccatttacatctgggttcttcgaagccaaagaaagagtgctatgtcgaagggttctgccgggttcacgaacttcattatcagacaaaggcaagagctgacggtcttcacaagaattttggatgctacaattttgcataccggaaggatacgaaggcccccgtgataggctaccataccaagtggcccactggttggacgagtgaatggttttacgtcaaggcagacaagaagaagagggaaaagcttatgagcatggcgatgagtccactgcgactgaacttcggcatgactcgacctctatgcaacatgcagctggggtctccttgccaactagctgaagtggaatttagggtcgtggctgagcatatcagcacgagagatttggtacaagaatacctggcaaacaggacattcccaacttttgtcaactggggaatgccgaagaagaaagaagaggggaagaaatacgagcttgttcgtctattgtatcgtttcaaatttcagaaaagatttaaagaccatgcactgaatggttagaatttatagaaaccatgagcaatgaaattcttggaaactatatgaagaaagaagatcagctaatgattgctgccttcggcacccggccaaagcgaaggctgaaccgtgtaatggatgctcttaactttgagtatcttgactatgcaaggcttgatgaaggggccgaaggagtcaagaggaagaggattg

SEQ ID NO: 154078 - DNA, 825 bp, Zea Mays
gcttgattggttacccggctgatcgtgtccaggtttagcgcatgcgttgactgagcatgagactatgattggttacttgtatggtatgaatccaacttgtttgcgtggatgcagtctagaagatttttcagctatttgcctgcatgcttgcatgcgagcatacatgagacgggcgcgtttccaccgaaccaggctggcgcaagcccaaggccgataaccaatcaagcgaaatgagtgctgcaagacggagtcccgcgacggtgacttggcatgctggcgcagggaaggatcgaggtgagcagcgacacgaggactgttggagagttcggtcatggctattgagtgccggtggaatgaacacgttcagcagcttagggacgatgccggagctgagagggacagggagaggcgctgggagctgctgccgacaaggagcagcagaggagcgcacgacaaagagaagacagggccgagcttctgacggcgtacgacatggtgtcctgcagcacggcatggccgagcgcagcaaggagccaaggcgaggtcgcggatgggatgcaagacgacggccatcgaagggagctgggcacaacagcgccgccggcatgggaagagcagagaacgacggtcagctggcgagcgccggcgagggaggagaggcggctcggaaaaggagatcaggtgctgcgcacgaacaccagcctggggcagaggttgagagctggacaagctccacggcagctagagagagtgagctgagagaggcgagcaggagcgagctccacggcggggtcggcggagaccagcgcgcgacgtggagggaag

SEQ ID NO: 154079 - DNA, 458 bp, Zea Mays
ctgcaatctacgttagtttttgaaagttacctagaagggggtgaataggcaagcggaaatgttttcaacaaaaactagaaacaaactgggtaaaaccggttcaaccggtctgcacgagctcaactaaagaatgagatataaaactgaattgatctcgaaattcaccagttaactttgcaaatgggatgtcctagatgatccacaaggttcaaagtagtagatctaaggacacttctcaaaatccacacaccaaaacgatatgaacaattcttccatgaaatggtgagagaacgaagaatagaaacaaacacaatgagcaagaacacaagagacacaagatttatcccattgattggtcacaccataaaggtgctctacttcctcgttgaggcacccacaaagagtcgggtctctttcaaccctaatcctcccttcgccgaccataaaggtcaagccca

SEQ ID NO: 154080 - DNA, 670 bp, Zea Mays
atggatcttggattcacatcttgtgtgtagagcaataatattcgtcacccactctataataacttaacaatcgttagattatctgtgatttttctaatccattttttaatcattctagcgtgggcgatcatgatctaggatgagcaattgcattctatacctgtggcggcggaatggttctacgcactggaacacgacaacaacgttcgttgacttcaccaaccttcgattcgactcaccaattcgctccagccccttggccgaattaaatgatctctagcgcattggcactgtcgaggaataccagcgacagttctcacttcttctgtgccggtgcaatgaccttactaccatgcagtaggtcagcatgttcacggcaggtctagggaacccctgcacacggatgtcaaattataagctcccaggaatttgcagtgcgccatgaacctgacaagggcctatgaaaaaagggaattggaggcaggaaaaagaggaggatacagagctgctaggaatagtttggtagtcaaggaagccggcaacaacacagcatccaaggtagttgttcgcctcgacctcgattcaaacggctatcaccggaagagttagcgacgaagcgtgcaaaggggaaatgctatcattgcacagagaagtactcaatgggtgttgc

SEQ ID NO: 154081 - DNA, 1233 bp, Zea Mays
ggacggtctaagttgagtctcggacattccgactgtgtatgagtcagtcgcgcgccaggcggtggctatggtggtgctatgaacgtattcctggcatatcatataatggttgggtacaagatgacccaattgtagccgatgtgttaggtgcgggtggctctgtattaggctcatgcgagggaaaactaggggtagtagatttttcatacaaacgtgtccatcctttaacagattcatctatatattgttttagttgatccctcgctgctctatgaaagccttaaaagattgatctggaatacttacgatgggagcctaaggtgaaagtaggagagattccatatcgatttccctttcatggatgatcttctaatgacaatccaccgtgaagtatgataagtattttttcatcgcattttcacttcatttggcgagttgtcatagcacctcttcctatttgcgcctcgcaaggtcatcaaagggctattggtcatgagccgagagtttctccaggattggcttgatgatgttggtggtggagacgtcgatgtgaactatagaaccgactatctgaggccgatttttagtagatctaaacacctttgtccctagcgaagtcgcaaaaagtgtgttggcattggtctagtaccaaacactagaatgaatcacctagcggtgctctctgcgggaacgcagatgattcgcggcctagggccggacggtacccgaccttgctgtaggagcagctctttccctgcattcttccagacggttcgagatggagcagggtcttctccttcgcgggaacctgaatctcgcctcttaggagggacctcctcagggagaagagatcctaggatttgttaggatcggtaggccacccaagacacctctatacgacgtcgagacgaagagaggtgaaaaaataggtcgagaaagactactagagctaaactaaggctagattacccctacttccaaggaattgaaagaacagtgcaaataaaataaaattggtaaataggtttgattggatcgattatggggcgtcaatcggtcgtaccccttcgttatataaaggggagtctgaacctgttacaagtcgactcttaaacaaatcttgcaagaaatcaggaaccttaattgattttgttcacgcgcgaactgtccacgtcggcagcgtggaccatttggctgcccaattcagtgctcaacaatactctagttatctgc

SEQ ID NO: 154082 - DNA, 688 bp, Zea Mays
cttgtatgggttttggttacaactgcataacaatactggacttgggtggatgcaaccttaggaacatattctccatttggtgagtactggaataggttgacaaaggtacgcaccattttcttacttatttttaatgttttcttattgagttcagtttaactaaccattcttttacatacatgtagggccattcaaactggaaacaaataaaggtccaccagagcatgaagaattgttacatgaaatgtttggtgccattgttgtggatggatctagtgcatgcacacccggtgaagtgtttggagggaatgatgaagaagaggttgctatggatgttatggtggagatgattgtgatagatttgcatcacctgctactagttcctatactctaaaaggaagtttctcccgaaaccgagcaactactagtactactacaagtccattgaagcccaagaaccaaatggtcaaagtgatatagaatattcatgccactctgatggaaaattataaaattgcaaacaaagtcatgctaggtgagcatctagatgaagttatcaaggaagttcaactatggcagttcgatgtggggcaaaggaaggattaggtaaacacttcatggcaactgaactttttaacagagctgagaatcgatcctcctttaaggcattcgagacatatgaaggaag

SEQ ID NO: 154083 - DNA, 478 bp, Zea Mays
cgccgcctggaaccagcggacccgctcctccagcgtccactccttctccacctcgagctcatgctcggccaacgacttctcctgcctctcaagcatttcctccttgaaggcaagatccttctcccgcctggcgagacccgtctcccgcctgtccaatgattctcctttcgctttaagcttctcctcggcaagggcggcatcgtgggccttgccatcgagctcccgctgtagcttttgcaggctctccacagccgtggtttgctggacccgctgctcctccaggatttcattgaaggcattcagcttggcctggagctctgtgacaacctcctccctctggttcaagtgctcctccttcttggccaacctcttctccttccggctcgcctccagctccctggcgtacaccttctggaggtccttcttgtagtccttgcggtcccacgccagttcggaccgctcaaaggcgaactggtgg

SEQ ID NO: 154084 - DNA, 495 bp, Zea Mays
ccgttcctgcgctgacggttggcgatggaaccggatgttggcgatggtgcctcccccatccgccgcttggtggggacagtgagttggcttgggcgtcgcttaagggcagcgggccagcggcatgctttctacggtgtttgttcctgagcctgctcctggtggagcacccgggcgccacacttgcgacggtttgtgcgttgggattagcgagatagaggtctccaacagagtttgtgaggaagttgagggagccaaacttgatgctgttataggaggatatgatgagttgtctttggataatgagctactatagcatactgggatctgactagtcactttgcgtctagggactcataaaataaagttaaaagtctaaaatggtaataaaaactaaataaaaagagggaaaaaatagcttcacaacttgtaaggtcttgctagatttacaatcaatgagagccttgctcgaaagcacaatacatgcactagttagaa

SEQ ID NO: 154085 - DNA, 428 bp, Zea Mays
gaggaggatccgccgcgtctggctgcctcggaggatccgcgctcgcagatccggtcgcttttggcaacttgcagtcaaggaacgagggagggaatggcgtgcctcctggggctagagagcagcgccgagaggcgtaggaccgtgtgaggtggaggtgagggtcgtggagccaccgcaccaaatcgccgagcaatggcgagcaggagtgggatctgacgacactgttgatgtggagcgacgacagaagagtgcacgaagatgagaaatggcagatggatgaggcaataccgtgcgacgatgttgggggaccgagacgccacgcatggagacggcggtgtggcaggggcggcggcgcttggagatggcgattgtgggagcacacgacggcgagagcgacgaggaaatcaattagggttgctagatgttcg

SEQ ID NO: 154086 - DNA, 753 bp, Zea Mays
tctaccgtttccaggccggggttgcgtctactctcgtgtggatattccgaggagcagtcgacattcctcagtctcctccacaaacaatctgacactcctactccactgtgcagtgtcactggtaacgagtaaacacattaaacagcggagtatctcaagaggaacagtgatacaggatgtggtcctcccgggacgtcacgtacccatcatcctccgtgccggtgcggcggtgcctggtccatccggtttgttgccgagccctacattttggcctctgcgtccacaattgagttgatggatctctcccctctgaccctctcccataggggtggggctcctcacccgccttcaatgactgataattgtccaggcaaagcatagctatagcagtcacaacacaaactacaattgattcccatagctgaccctcactaaaaaatcactgatagaaactataagtttcatcgctattttttgttgtagtgtcgtaataaatatggatgtaacagtgtggctagtaaactgtgaactctgatggaaactggatgctcatcccaacggtaaaacaatgatttcttgtgtcttcgtcgcatgtgtagacctaatttctcatggaatttcctcatctttcttattaattttcttaccatgtcaccaaattgcttatgtggtagctaaattaatgttataaaaattaaatgatatagagggttagacctgctcttatagctaagttctattcccagccctcac

SEQ ID NO: 154087 - DNA, 1090 bp, Zea Mays
taccttggtgaatggaatgccacctaagaatgtgcagcaactagtgaaacccatgcccatttggatgtcatttttgaaatacgaaataggtcatccaatctttggattctgaaatgaatcaacagttcgccaaaaactagtgttcttttctgtcttccacaaagctgttgtttcggaatttgaagccacaaactggtgctgcattatctgttttatgtctctacaccaagcactacgcctggagactggagtaatgttatgagcactaaacaagaaattgctgtattaacatcttgagggacaatgcacaatattagagtgaaacctgagacctatcaaggggaaatcctgatggattctacagactacatgtatctgccattcccattatgtatccgtatatcgactcctcgccaggtgggatctcagagtccagctcctccttggacacaccctcattccagtcatcagtataatgcagacatggagactgtttggatgataccaacatggcaggcacaggccacctgcagttcagtgtagtacgtattagtttatccaaaacacattaactagcttaatagcatgtctcaggatgcctacttgtttaaccgagctctgcgatctgtgtccattttccaacttccccagcctcgatgtcaaacaccgcaaatagatctatcacacaacattatgcttgactcttaacgattggaatcacctcattactgcccaatggatgtggtgcagcatggactcaggatcatcaacagctccccattgccccaggacggaacccgagagcttacctctgtcttgtagctcttggttgtctgggaacacaccactagttgcagccacaaaacggtcaagcaaaaccctcataaatggcataggcgccagtgccacagccagctttgccacgattgtgtttgcacagctccattgacagtcatcgatcctcacgctgaaggtaccatcattttgttctccttgacgacccaatgctgaactgagagagcagtctttcaatccaggtgttcgccttcctgacataggcacaccgatcactcgcatcattgaccaaatc

SEQ ID NO: 154088 - DNA, 492 bp, Zea Mays
agaggatcgactctagtggaatacttgaccctggtcttcgacaggctgcgggcaacccgcacaaagctgaatccaaacaagtgcgtctttggcgtcttcgcagggaagttgctggggttcctggtttcgtaccggggcattgaagcaaacccggagaagatcaaggcgattgaggcaatgaggcctccggcccatatcaaagacgtccagaagcttgcagggtcattagccgcccttagccgcttcatttcaaggctagctgagagggcgctgtccttcttcaagctgttgcggaagtccagtccattctcttggaccgaagaggcagaacaagccttccaagagttgaagcagcacctggtgtccctaccaatactggtagccccagagcctggggagccattatatttatacatcgcggcagctgcggaagcggtaagcatggtgctggtcgtcgagaggacagcacaagaagaccaggaacctaagggc

SEQ ID NO: 154089 - DNA, 476 bp, Zea Mays
atcgagcacaaattccgtggctaggagaacagagggcgagttcgcagtggccgaagaagcttcaaggtgatgtggccatggcctcgccggtgacgtgcccatccgagcttcaagggccggatccgagcgttaccgagagcagacgagggtgaaatgtggggcgcgaacatgaagggagcataccagtgcatagcgtggcgataccccatccgcggatcggtgcggtcccccgacgaagcatcttcaccggcgagcaattgaccccaggccccatcggcattgtggacgatgaacgactgaggcggcttcccccagtccctctctcctcgctttctctcactgttgtccgcgacaagcacacagcgctttactggtgtggctcagggtcggatttggtgtggccaagggatgcgaggtgcgcgcgacttggggaagaaccaggggcccgtccgcttttgaagctgcgatgaggtgga

SEQ ID NO: 154090 - DNA, 883 bp, Zea Mays
tgccaacatttcggaagagatggcctagaacttggatggaagaatggttttatgtgaagaacgacttgacagcgagggaggacatcaaggaggttatcatgcgttccatatggtcccgcttcggtctccgaaagccgaaggttgaaattgatgaagacactgaagcgtgtcagaaggcgtttggtactgtctgcttcttcattggtacaagagatttaattcaagagcatatagcattcagagtatggccgcttgtagagagctgggaaatgccgaaggataccatcaccaagtctagcgaaggtgaattggtccggctgaaatatacattcaggtatggggataaattcgatgagccaaacgatgactggcttaaatgcatcaaagttacaagtgatgaactgcttggatcatattccaaggcagaagataatgcattatccacagccttcggaagttggggaaagaagagattgaacaaagtttttgatgctattggcttcatctaccccgattaccgctacccgctgcggggacaggggaagaagagaaaagctaatgctttggccgccccagctgagcctgtgccgaaggctgcgggcaaaaagatgaaggtacttacccatcgaccgcgttacattgaaccggctgtggtgcctgagtttggcgcggaggcctcttcagctgctgaatcaagagaaactgttcctctcatgcagaggactgaagagtcggctataataccgaaggtaccttcggttgagctagttgaaacgaaggttgacaaagataacgctgaaaagtcaaaaactgaagaattaacaaagatgccaaagattttaagcccttcaacagaagcaataatgccgaagacacaaaaagg

SEQ ID NO: 154091 - DNA, 498 bp, Zea Mays
gcagagctcactggggcggcaatttataggttccatcggcggtggcggctaatttttgagaagacgagcggtggccggagagaggggaggtcactggtgcaagggatgcgtggctttcaccgtggcaagcttaccagcgacgaaccagctatctaaagcggcttactgcgacgtggtaaagcttcaaggcatgtggccatcgcgcggcaggcggccaactccggcgaggctatctggaccggccgtgaggcaagtggatacagtggccagcccttggtctcatccgcggtgaagatctttttaccccaaggagttatccgggcaccagtgggcacgaattgcattgctggcacaaatcgcatcgtgggggtcgccggtggcaaggtgcactgcacctgtgatcttgttcagttcactgtaccatcagaaactctatcaggacgcctgacagagcggtttgcagtgcccagatctccaattttcatgtaataacttgtg

SEQ ID NO: 154092 - DNA, 396 bp, Zea Mays
ccggggcaggatcgggtcgggaagcaagctcgcagatagaagtgcactttccaatgcagttagacagagaaggcatggctgtgatgttataatgctgaacgaccccaagaagagattaagccctgtagtctaccacctcccgttatttgtgggcttcaccgagggcgggaaacatttggtgacatcaaacgaccttcgggctggggacgtctgcgagcttaatttgctaaattgtactactgtgctcgtagcccaaaccgtccatgtcaccatttttccattagtcgtctgatcctttatcaatggctttcgactatgtttgttttttgttgtgtcccttcatgtattgttcatattgttttgaaggagcacatttgctctttttgttgtgcctta

SEQ ID NO: 154093 - DNA, 306 bp, Zea Mays
tatgagaacgatcataatgagatattagactgatccacatttgatacatgagaacaggttatagcagataaccagataacggagcagaatcattaagggatccggagattcagatgataagccacaacataattcacaaaggaaaagattactagatcgaggcaaaaagagaggtagtcgcatgagatcgattaggatgagcaccagaaaggttatgaagattcgggacaggatctatggaaagaaacatggccttgatagggtttgagcaactagacacgaagcaaaaaaaatttggacacaaca

SEQ ID NO: 154094 - DNA, 307 bp, Zea Mays
ctcacatggagcgactttctcaaactcatctgcacgtctattttcattttgcagtgtgaaacatgtggcacaaggctagatcgagccacgttattttcaggtaacacagcccaccaggtattcattcatatctagcttaacttttttggttctcatctacttatccataggagagagggaatcatagcgactaaattgaaaatccatattgtgacatccatccggcataaggataattgcccgttgtagctaggacgtgcgcttcattttcccactttcctttcgcctcctatttccaatgcatcat

SEQ ID NO: 154095 - DNA, 699 bp, Zea Mays
ggctaattttgctcatgagccctgagtgctctggatgcgtaggcaataactctgttgtcttgcatcagaacacaacccagtccagtgcctgaagcatcgcaatatacatcaaaagatttagtgttgttcggttgtgctagcacgggtgctatcgtcagatgctgcattagagcatgaaacgcatcctcacacttctgactccattcaaattttactcccttcttcaacaattccgtcattggtttagcaatcctagagaaatccggaatgaatcgctgataatatcctgccaatcccagaaaactctgaatctgtcgtacggtggtaggaggcttccaatccatcacctcttatactttctcaggatcaactgatatcccattctgagaaatggtgtgacccaagaacttaatctcccttagccagaaatcacatttggacaatttagcatataagtgatgatcccgcagtcgctgaagtacgatgtgcaaatgctcggtatgctcatcttcattcttcgaatagaccaagatatcatcaatgaagaccactacatatttttccagctctggcatttttccagctctagcataaacactaaattcattaaatacatgaaatatgcaggggcgttggtcagcccgaacgacattaccaagtactcataaagtccgtatctggtagagaaagccgtcttcg

SEQ ID NO: 154096 - DNA, 519 bp, Zea Mays
ttataatttttccgttccctatacttttcaatgggaagccaacttcatatgcatacctactataaaattgatatgcttcatccacaccactgaatgtcataccaactttaggtaccaacctgggatcaattgtaacttcctgtgcaaataaataaaatatatatgtatgtacaaataacaataacatgtacgctgtatggtttccgacctaattttccatcgtatgcacaatataacatgtcataccatctagctgcataatattaccctcgattcaatttttctatcatatgcaatctaatatacactaatgaaaatccaaaacagttataaagtacttacgtgtctctgcagaatcactagtgtgtcctgttcatgctcaccaatagtttgcatagtactcagctggtgtcctccttgatttatggccatcctcgacgcttctgatgtgttgtgatcatcaacccccggcaccctcaatgctgctggtggagtaattgcccctccggtagtttctgt

SEQ ID NO: 154097 - DNA, 1679 bp, Zea Mays
ctgctgactaatcacatgccccaggaaagccacttcgaacagccaaaaggcgcacttcttcaatttgccatacaattgattcttcctaagagcactcagaacgagacggagatgccgctcatgctcttcctcggtctttgaatagattagaatatcatccaggaacacaaacacaaagtcatccaagaactcatgcaacatcctattcattgcttccataaaagcagcaggggcattagttaagccaaaaaacatgactatgaactcgtaatgcccatacctggtgcaaaaggctatcttctcaatgtactcctcacaaatcctcaattgatgataaccagagttcaaatcaattttggagaacacctgggcacccctcaattgttcaaagcgaacctcaatacggggtagcggatatttattcttgattgtcacttgattcaaagcccgataatccacacataacctaatgcttttatccttcttctcaacaaacagtactggggaagcccaaggcgacctgctaggcctaatgaaacccttagccagcagatcatccaattgccgcttcaattccacctgctcctttggagccttccgatacggggccttatgaataggctgcgtacccggaatcagtttgatttcgaaagctgcatcgcgatccggtgaaaggcctagaagctctgctggaaatacgtcggcaaagtcacacaccacccggatgtcctgcacccgcaaggcagcctcaccctccaccaccatggagaaaaagattcctgactgacttgaccggcgatccggaagcaattgtgccaacaaggataacatgaactttggggaacttcccaaaaataccacctccctacccaacggtgcctgcaataacaatgtcttccaaaaacaggatataactgcgcgatactgagataaccaatccatacccaagataacatcgaatgcccccaatgaaatcacaacaagattggccgaaaatacctcgctagcaagaatgacggaacacccctgaccaactgaacagctactaatggagccattggcagaactaaccaaaattgggtgacccaacctctgcaccgaaagaccagcccgcgacacaaaatcctccgaaacaaatgaatagctagcgccagagtcaaaaagggcatgagccacaaacgaatcaactgagatcgtacctgtcaccacgtgtccttgctccctgccatccgccgagggtagcacataagcttcggaaatacccgcagaagaggaagctcctatagtgaatttaacagaagaaccccactgagccgtcgggtgaggcagacgcggagctccaaactaagacgacacaggagtagtcggtgaaggagtaggcacagccagatactgaggaaacccctgcatcgccacgaactgagaagtctcaggcacatagaactgctgcggagggagtggaactgcaaattgctgctcagtgcttgacatcatgttgacagtgccctgagaagaggaggaagtcactggctcccatctgagcttcccattgggattcctcctacacaccacatccttgtggtcttgactgcagatggagcacctgccactccactgacactcagcacggtgatgcgcatcaccacaacggaaacacaccagccccagcccgggcttag

SEQ ID NO: 154098 - DNA, 659 bp, Zea Mays
gccgggacaaccaatccattcctaggattacatcaattccgtgggatggtagtacagctaagtctgccaggaatactaccccacttaaaaggattctgaattgggagcacttgaggtggtagagaaggtctggccctggggttcaggtgaacagagggacttctaatggtgcagtggggatgccatgcctttccacaaaactagcggcgatgaaagaatgagatgctctagaatcaaaaagtaatgtggtagcggtaaattcgattaggaactcaccgagtactactccacgggcctgctgagcttcctgggcgtcgacgtgtttcactcgggcccagttgtggaactacgtcatgcttatctgactgttggaggagggtgccttggaggtgggtactgcgacattcttggggccattcgccgagttagagtaggcaggtgtggtcggtttcagctgtggacaattgttcttgaagtgagtggggtcaccatagtgccaacaagcattggttgaaggttgactacttgcaacggactgagtgtggaaggaactctaactaggctggttaaaacgcggcagagcagatcctactggcttgctgaaatttgaccctttgggagggaaccaaaaagattggatcttctggtgcctgtcttgc

SEQ ID NO: 154099 - DNA, 707 bp, Zea Mays
ggcccttctgctcctgtttgtgaagaagtaccagcagaggtctttactgaagttgatcccaatggttgtgtacctgttgaagctgaccccaatgggtgtgaccgtgcactaactgaccccaacgagtgtatccgtgcatcagctgaccccaatgggtgtgatcctgttgaaactgaccccaatgggtgtaaccttgttgaagctgaccccaatgggtgtgatcctattgaaactgaccccaatgggtgtaaccttgttgaagctgaccccaatgggtgtgatcgtgcaccatctattatttgtatttttgatgaggacgaagaagaggaagaagaagttactcttattcgtaagaatagctggcgttacagagatagtaggggggatagtgatattccttctctagctatgtctgctcttgttagccttcaagaattatccataacagattttgatcagacccttgaggatgtcattcctgaagatatgctgttggaactgattgctggtgatatgatggatgtttgctctgacattccagatgtggcattagaggtatcccgggcagtatctcgtgcatcgtcgactttggaaggcagtcttggtgtcaagaagttggtcaggattgcccgactcccatggaggtgactgaggatccttcagcctcagaggtggctgttgtagaaaacctagcccccaagggtggt

SEQ ID NO: 154100 - DNA, 1236 bp, Zea Mays
gccagttcggtattatggacgaaaccctcactccattttggtacagttaatgtcccggcctctgtaaccttttcttacctacggtaaaagtcatcgttgcccctcgctgtaaccacggcgcccctcggtgaaaacctaactctcattccctttccacggcgccgccactacccgtcgagctcgatcctccgatagtgctcttcctccgatggcggctccgtcgagggggaagaaacgcctggtggtcgacgtcgatgtcgagttggacagtgaggccaaagttgcttcagctttcagtcgtctgtctgtgtcgatcgttgccaagccttcaggcgagtacgttcgcgccaaggagcactcctccacgagcgtgaactgcgcggccacatcaggtactaaacactcagcaaacttaccaacaatacaaccagtgctctgaactcttctgttgtcatcaggtacgtggtacacccagcagcagaccccttctgtcgtgaaacagtgctctgaaccacgttcagtgtcggtaaggtttccttgcagtagtattattaatttccgagttcaattccaactgcatagtatgtggtttcgcagataaccagatttgaaacggttcgtagtgacctggcactagccattgcaaagatgcatgtagttgggaacgagttgaaagatttggccggaaatgagataatggattcgccagatacggccaaagaggtgtcagtgaacttctcaatgtggcgcgtgtatgagcttgctcagtcactgctggacgaagcacaacgtttagaagatcttgaagctggtccttcgccaccattatctgaatgtttcaataaccattttgctgaagatgaagatatgggtggcggggaatgggcactggatgatgtggattctgaagagcttgtggatcgtcagatgaagtagagtagtatgtgtggtgtggaatgacactggatgttagctgtgtaaggttatttgtgtaagagttatctgtgttaccagtgtaaggttagtatgtgtggtgtggcagtgtaagagttatttgtgttagcagtgtaagagttatctgttcatggtatctgtgttagtatgtgttaactgaacttggaggttatctgtgtaactgaacttggaggttagtatgtgtggctgtgtaacttctcgcatttgttcaaacagccattcagctgtgttatctgtgttagtatgtgtgaattatttcag

SEQ ID NO: 154101 - DNA, 504 bp, Zea Mays
ctcatatccttggaatcttgcatactcttatattcttatgtacgcttattttcataccccaatgactgttcaaaacatttcagcttacatgctcttgaccacccttgtttctcaatgatccatgagcattcatcttatttcgcacatccttggtgatcccgtcaattcctcgtaacttccttcggtaatgaattttttacttcaactcttttgtcggaacctcacttatcttatccttgattgttttcttcaccttaccatttggtgagtcttgccttgactctgtccatggattatgcttttcatccttatcacatttacccttatcacctctatatcttaccttgatgtttatcttatactggccctttaaaatatcctcttttccttctcaatctgagcgttgtactttacctacttttcccttggtcgtatcctcttcctcagcgcttgtgagtcttcaactccatcctttgttgtgcctctgtttagcgttgccttgac

SEQ ID NO: 154102 - DNA, 444 bp, Zea Mays
gcaggcagcgcaagcaaacaaaacaaacacggcgccatgtggagtgtgagctaatatagcagcgctgctcttgcaagttgcgagagtggtcgcctggcttgtcgcttcaccccttcatcatatcagcattgggcgactgctggtggataaaatttgctgtggaaggattcttcagggtaaatggtgatagtagtactcgctactcgggggatctgtaaattctttcgtctgtttctggtcagggtgcagtgacgcctgtctcgctcgtgtcctctctctgtctgaggtacccttcccttccctcccatcagtcagagacagcacgggcctaaatagagtgggcctgcctgccggcccgacgctgtaacccgtaggtggtccaaaactgaggcacgaaccatttttaaaaagcctttcgtggcacgtgagaagcccatatccttc

SEQ ID NO: 154103 - DNA, 455 bp, Zea Mays
gtcaccctgagttaagtaagcgtgagcatgtcgcaccgtcttaagtcattgccgacttaagccgattgctccgttcgtagggtatagtggtcaccttgagttaagtaagcgtgagcatgtcacaccgtcttaagtcattgctgacttaagccgattgctccgtttgttgggtatagtggtcaccctgagttaagtaaacgcgcagaaaacaattcgagtgcctttgagaatgaagtcattttattgatggtgtatctcccaattacagaatacaatgtcgtcccaatagcttttgaaatctagctaggggtaaaacttcctgagatgctctatattccacaagttccctatttccgtgccatccatttgagtaaggtgatatgatccgggccgggtgacttctgttactatgaatggtccttcccatagtggtgacaatttgtgtcgcccttccc

SEQ ID NO: 154104 - DNA, 684 bp, Zea Mays
cgccggtgagcttgccacggtaattgccaccaatcgcgtgcgccagtgcccctcctcttctccggccgccgcgcgtctccttcaaattcactggccactgctctagggacctataaattgagcacgccatgagctccgtagggtaattacccatccaaagcactagcacttgcctccaattgttcaccagagaccacgaattgctcatctcccccaaatcgggtttccgccaccgtgaaaaggtcctcgccgtggctagctcgattcaggtccaatcttgtcctctgctctcttgtttcagcactcttgcatgccactgctgctcctcgacccattcgattaagctagactgccctagatccccgggaacacccgtgctcatccgttgtttgcactatctccgtggacagaatgatttagagctcgaactgtgaaattgatcgaggggaaacgctctttaggtgttgaattaggtcttagccaagttagggcaccggccattgcttatcttggccagtacaggttcaccggagcttggttcttcgccgtgcgacgtcgtggacctcgggttgtgaagaaataaaagcgtgcgggtttatttgcaaacgtcagcgactgaaacaattagtgacacggactctttcgagttgtttaaaaggtcggggtcttctttgcaaagtcggc

SEQ ID NO: 154105 - DNA, 902 bp, Zea Mays
ccgattcaaggtggggcgtttatgcatacggaatttgaatgaaaaagcttcataaatggtagcatggggccggggctcgggtggggagacgtgagccgcgcgttatgcttgcgtattttgccgttattggctgcgtaaatgcggcgcgggtcgacgtggcagttggtgggtctacccacgcatgcatcgattctaggtggggcgattatgcatacggaatttgaatgaaaaagatgcataaatggtaacgaggggccgggggtcgggtgtgtagacgtgggacgcgcgttatggttgcgtattttgccgttattggctgcgtaaattcgcatctgacgggacgagagtggtcagatcgggtagtggggtgacgcgcgcgtcgatcgggaacgtggggacggtcgcacgatggcgtgatgcatgtttatggaaatgtaacacaatgatcatgtaatcgtaacggatagctcacgtaaatcttgcgacatgcaaactgcgcagcaaatcgcgcaggagattggatcatgccatgaatataggccaggacggtttaggcgagtataggaggtgaaaaaaaaacgacctacgcacagcccccgcagcttttgttcatagctatcgaaaagttagggcatacacaaaggagacggcgatgacgacaccctgtacgagcgatggccggaatgctgtaactccaccggctgcgttaccggcgccaggaattgttgaagaaggcaacacagttcatcaaagtttgatgggaacaagtcagcggatacccatgcggacaattggtgaacatgagcaggacacaccacacattctccaaagccatgtaagttcaaaggaatacccatgtattatgttatacaattttcgtgcaagttatgatttcaccgaat

SEQ ID NO: 154106 - DNA, 453 bp, Zea Mays
gtgcacttttaccttcacgtgaacaatttatccacttactgaatatattctccatgtatttcttcaatggaaatccaacttcatatgcataccttttataaaatttatatgcatcatcaatatccttgaaagtcatccctactgttggcactatattcagatcaatgtttttttgctgcaattcattgacaatgttgtttgtaccacagattatgatcataacaatctaatcaatcaagaatcaaaaacaacaattggacttacatgtgaatgcaatatttgaggcgtatccatctctctagagctaatattagacatcggaggtcgaatccgttgttctccttcctcccctatgcttatctcgtcgattacaggccccagtagagcaggaggtggtgtaaccattaagttaccatcaactactccctcagtgtctggaccaagacgaacgcc

SEQ ID NO: 154107 - DNA, 814 bp, Zea Mays
gggacctgcacgtcggccatacctcccgactgctacgctcggcgcaacggcggcgcgaagatggcgggggcgcggagaccgaatcccatggcggccatccgtaatgtgaggactataatactgggtccttagggttcctccttgctgttccaacgccgtgacccagtaaaccaatcgtgtgcgtgtgctgcggagagccgggggacgaaggtgaatccagggaccgccgccgcgacaccactcgactccggcgcgtcggttacccgattggcggctgcagtaacccaaggggggggacctggggagcacgcgcgtggatctgccggcagcagggtcggctggcaactcaccggtatgagatcacttcgcaccttctcggcgttccgccattgtcgaagcttgcatcgccgccataggaaatcgtgtgctagctggtcgtagcggggcgaggcacaccatcgccccggagttgcttatagatcaatagcgaatgatgatcggggcacgtccgtcgccgtcggtgtctgcgttgctccgtggagcgcactggcgtaatattccatcgaggaagaagaggctttagcctttgatccggccctagacggttaggattagaagtatgtcgcgggagccagggaccgtgggattttaagcagagggtttagatcagtttggcttttttttccctccgctcgattaaatcttatccgttgatgcgggatccggtggcgcgaaatggtgctgtgagtcgttaaatccgaaccgtagaagtttaatccgttggccaggatagacccatgccccttcaccgtgc

SEQ ID NO: 154108 - DNA, 514 bp, Zea Mays
cacgcctgccactcgctctctctctctctcatcacagttccacacccactgacccaccctcgagccgtccgaccgaattaacaacgtactgcgctcgatgcgaaggcgctgatcgaggtcttggccagccagcctccgagcaagttgcggcttggtaggaccagcagtagctgctggctccatatgtatgagatgggaagaaacaaaagaaaaacgcagcgagatggccgaaaggcaaccgccggcaagttgcatgcgagcaggactaggacctgcggcgtgcgtgatgagcgcgccaggtacgtggtgggaggcgccaacgaccgaggagcgaggatacgtacgatgcagaggtgagctgggggggggggggggggggggggtgaagggccgggagagagagggtggctccggggggccggggccggtttgaggtggcggcgatggcaacgccagccagcgagcgacctcagcccttggaggcagccaaggggcggcggccccatcttattca

SEQ ID NO: 154109 - DNA, 582 bp, Zea Mays
ctggtctttcggtgcagaggatgggtcatccaatcgtggttagttctgctaatggctccatttgtagttgtttagtttgccagggttgtttagtcattcttgcggatgaggtcttttcagcgaatctggtgctgatttccttggggacgtttgatgttatcttgggtatggattggttaactcagtatcgcacagttatatcctatttttggaagacagtgtcattgtaggcgccgtcgggtagggaggtggtattcttggggagttctccgaagttcactctctccctattgattcaattacttccggatcgttggtcaaggaagtcgggaattttgttctccatggtggtggagagtgggactgccttgcgggtgcaggacatccgtgtggtgtgtgattatgccaacgtgtttctagcgaagcttccagacattccaccggagcgtggtgcggcttttggaatcaaacttattctgggtacgcagcctattcataaggccccatatcggatggctccaaaggagcaggtggaattgaagcggcaattggatgatctgctggctaagggtttcattaggc

SEQ ID NO: 154110 - DNA, 734 bp, Zea Mays
ggggtagtggcaggacgaatgaaaacaggctgtttgaacgggtaggagggtggacgaggcgaagaacgattctgattaaaaggtcggattaccaacctgatttgcttcttaggtccctgattagacctatcacctccaaatccctttgattttccttggcctgcgttcttggcttctattgccagtgctatgctgacagctctgctgtaagtaagatccaaacaggtggccattttcctttggtgccggtcgttgagtcccctcatgaagcaattctttttcttcaggttagtgtttacttggtcaatagcatattgggataaatggttaaacttattgagatactgcattacagtatctcccccttgttttagtcgaatgaactcctcttgtttcatgtgaagcactccctctggaacatagtgttcacagaatgctagcttgaattcatcccaagtgacctgatgtccggctggttgaactgctacaaaattcgcccaccaggtactgacagggcctctcaattgttgggcagcaaataacggcttatgtgtttctgtgcaacggaccaatctgaacttttgctccattacccctatccactcatcagcttcaagagggtcttctgctttaacaaagagtggaggacatatttcagagaattctagatacgaggtttcacgtggtccttgtggaggaactctcccgccatgctgctggaattgattacccgc

SEQ ID NO: 154111 - DNA, 437 bp, Zea Mays
cgtggtgacaggtacgatttcagttgattcgtttgtggcccatgctctttttgactctggcgctagctattcgtttgtttcggaggactttgtgtcgtgggctggtctttcggtgcagaggttgggtcacccaattttggttagttctactaatggctccattagtagctgttcagtttgtcaggggtgttccgtcattcttgctgatgaggtcttttcggccaatctggttgtgatttccttgggggcattcgatgttatcttgggtatggattggttatcccagtatcgcgcagttatatcatgtttttggaagacagtgttattgcaggcgccatcgggtaggaaggtggtattcttgggaagttcccctaagttcacgttatccttgttggtgcaattgcttccggatcaccggtcaaggaagtcgggaatct

SEQ ID NO: 154112 - DNA, 374 bp, Zea Mays
attcgagtttccgccacccgaaaccgacctcaacgcggctagctcccttcccggtcagtccaaccctccctctccctcgtttaagctttctcacatgtctacgatgcttgctgacccatccaattggactaggggtccactgaccgtcgggaacgcgtggttctttagttcatccgcgcgctcaccgtggccagaccaaattagatcgccattcttgaaattaagttgggggaatggctcgggatgggttcaatccggtgtatgtcgctcgagagcaccagacgtaacgtaaatccgccagtacaatctcaccggagttcgttcctcgcactgccgccgtcgtggacttcaagccgagaatagatggaagtgca

SEQ ID NO: 154113 - DNA, 1310 bp, Zea Mays
atttttaacaattttctaaagcttcactgaaaaagaaaaggaaaaactctaaacagtactgggctcaaacaagcctgcgtcggcccagttagggcagaagtgcgctcatgcgcgcgtccgcgctgctctggcggttttgcgaaaaggcccctgctacttctaataattcagaaaacgctcccgggatcatttgccgagtcactgacattatacaatcatgcccttctaattctatttcttctccgaagaggtccaaatcgacggcgcgctcataagcgatgatcctgctgcgcggaccggccaagatcggtagtggatgcctgatttaactactgggtgagtgttacgggcgtgagacaaccctagaacgggtttcaattacgtagttacagccttggtttagactgaccacgatggcggaagaataccgacgcaaattcctgtgttccggttgattgattgtgactaagcaaaaagggtcgggccgataagcatcactagcgtatctagatactggaacatgaattaaacgagcaggagcagacctgggacgaactgtccacggggcgcggaggatcctggctcgcgggtaacagaaaaggggaaaatcaaagccgcagcggtctcggttggaattgggaggcaagtttaaggctacacgtccgtaaagaagtatagcctcaccatgcactgtcaattttgggaacggtggagggaatttcacgaatttgggacttctactgagctttactggtgtagacgaaaacaccctgccgtggaccaccatgctatttatagccacggcgacccacagtcgacctccggccacggataacatcgcaagcgcatgcataacacgttggtaggaggcacagtgaggaaatcacggcatgcgtgacagcgcggcgaactgcgctgagtcacggcggccgccggtgagtaactccggctgggcccgggagagggtgccacgtatgagtcatccttttcccggcgttatccatccctcaccgtgcatgaattcgggcggcgatcaacgacggcgagcttagctagcgatctgatccatctgaccccatccaaatctacagtgccactgatcttcaccgttccactgaaccgacctcctttctttccccctttctcttgattcttgttaagaacaggttaatctctattaacaagagttatttaccagataagggtcttcaactttactataggatttatggatcaaaactgcctggattctaagatacggtgctcgcaatctggccatatttcactgtgaccatttcgttttggaattc

SEQ ID NO: 154114 - DNA, 928 bp, Zea Mays
agtggaatggcagatgttcaatctgtagtcaagaccacaaggatgtggtgtgtaggaggaatcccaatgggagctagtgacttcctcctcttctcagggcactgtcaacatgatgtcaagcgttgagcagcaattttcagttccacttcctccgcagcagttttatgtgcttgggacctctcagttcgtgccggtgcaggattttcctcagtatctggctgcgcctactcctgcaccgactactcctatgtcgtctcagtttggagctccgcgtctgcctcacccgacgacttagtggggttcttctgttaatttcacttcgggagcttcctcttctgcgggtattttcggagcctatgtgctacccactgtggatgccagagagcaaggagacgtggtgacaggtacggtttcagttgattcgtttggggcccatgctctttttgactccggcgctagctattcgtttgtttcggagaattttgtgtcgcgggctggtctttcggtgcagaggttgggtcaccccaattttggttagttctgctaatggctccattagtagttgttcagtttgttaggggtgttccgttattcttgctgatgaggtcttttcggccaatcttgttgtgatttccttgggggcattcgatgttatcttgggtatggattggttatctcagtatcacgcagttatatcctgttttttggaagacggtgttattgcaagcaccatcgggtagggagggtggtattcttgggaagttccccaaagtactcgttatccttgttggcgcaattgcttcaggatcgccggtcaaggaagtcaggaacctttttctccatggtggtggagggtgaggctgccttgcgggtacaggacatccgtgtggtgtgcgactttgctgacgtgtttccggcagagcttcca

SEQ ID NO: 154115 - DNA, 992 bp, Zea Mays
ttgccttccactctactcagttcaaagaattctggtaataaggccatggatttagtatcgcagcaagtagtgagatccaaagaattctggtaataaggactacagatcctatttggaaaggcagtgagatccaaatcccatggatttagtatcgcagcaagtattctggtaataaggccaaatgaaactgtttaaggtcatcttcacttttcgagtagttgaagcctagtaaccaataattgaagataagtgagaattcatcaagtgaaaagctactatgcataaaacatggattccgttcacacggaaatgccccaggagtttaccttttagatagcagaaatatttgtcttgtgggctcatgcgttcagtttcagcttggacatatgtctatgctcaatgatgtcatttataatgttgggttccaatgaggataccttattgagagtacctataagcaacactgattccacaaaacagacaacctcattctacaatcatgtgtcataattgtaacaaatcaagaataaaagaatgcaacggacttccaagcatctatgcagaatgttgcctctactctgcaatgtaacttgtggatagacttccaaaattaattagatagtaaatgtagaagctgaacgcctgaacccaatccattcactgttcttattaggtaggcgtactatttttgccagataaaaactctcagttacaaggctagaagcaaaaaaacgaacatttaaaaacatcaccaattaggggttctgtcgttacctccagtaaacaaaatgaacaaactactgataggcgacatcgtgcacaaaaaaacgaacatttaaaaactattgtggtcattgtgcgcaatataggcgacatccaccaagctcggccgaccagcttagttggttaggggacgaaggtaatcaggattataggagttcatttttaagtttgttagaagtgcaccaaagtatatggggcacttaccttgc

SEQ ID NO: 154116 - DNA, 408 bp, Zea Mays
caagaagtaccgcgtgcacgtgaggctcgtgcctggtgaaaccgctgggtgcgaggagttgtggtggcgcctgatgtgcttgtcatcgatcatccgctgcctcaatgccgctgtcatcatcatgggtcgccgcacccggacctcgccatgaccgggcctctgctctcgttgggtggtcgtggggattcgttgatgcacgtggaggctggtcgtggtatcgtcgaagagaagggccttctgtgcggctgctattgctcgttggagacactcatccgccgagatgtagttgcgcgccgtggacaacacaggcatggtagtctaattgcctgtgagtgcccctgtaacttcacctatctcccctctgtttcacgcaccctagaacctaggatatggaagtatggcgccgag

SEQ ID NO: 154117 - DNA, 1007 bp, Zea Mays
ccttagctgaagtcagagaagcgatgagtttgtactctatccatttagtgaatttgtcgatggcaaccagcacgtgagtgtatcctccttgagcttccttgaatggtccaatcatgtccagtccctagcacgcaaatggccatgttacgggtatggtctgcagttgctgtgctggtaaatgctactgctttgataagtattggcaagcttcacacctctggactagctcgattgcatcactctttgctgttggcagtagaaaccagacctgaagaccttcccaactagagtcctagatgctgcgtgtatcccgcattgtccggcgtggatctcatctagtagttgcttcccggtagccgaaagaatgcactttatgaggactcctgtcacgccccttctgtacagtgcttccccaatgagagtgtagtgggttgactgccttgcgatgctttctgccacagttttgtcatccggctcttcttcattctttatatatctgatgattggctccctctagtcatctgaatctgactctggctggctaagaacattgcactcttctgcctgatctaaggaaatactcgggcgtggcacttcttggacgaaaaccccaggtgggacctgggtccgactggatcccagtttcgacaacgcatcttctgccgcgttgcgatatctctctacatgatgaaattccagcccttcgaatttgtcctccatcttttggatggctgtgcaatacttgcccatagagtcattcgagcaatcccattcttcatttatctgacttatgaccactagtgaatctccgtataccatcagtctcttaatgcccagtgatatggcaatgttcagtccatgaatcaaagcttcatactctgccgcattattggacgctgagaataacaactgaagagcatatttaagttattcacctccaggcgcgatgaagaggattcctgcgcctgccccctgtagcttcaacgagccatcgaaatacatccacc

SEQ ID NO: 154118 - DNA, 1262 bp, Zea Mays
ttgaggccgtgtgcacggaggcgaacttgctcgcaagcgtgccgccgacaaggattcgaagctgaagggcgtccgcagctattgcgagaagacggaggcctccatccgtgccgaagttgagcgggcgcacacgctttttgtggaagcgtaccgtgagctcggcgcatagactgctccatttgataaatctagggaggaggtgggtctccgcttccttgggtggctgcaggaggagctggagtcacacccatccattgtgacattcctcatgtcctacgcatctcttgttacctgcgagggggcggtgaatgccttgtcccgagaaggatgtaggcacttcgaagtcttcgactgggtgaacgaggacttcgatctcggaattttacaggttgaagatggtgtgctaaagtggtccactggggtgctttatgatagaatgtggggtcctcatggtcgtggcatcgtccgggagagggccgaccgagcgctggcccatgtattttttttatttttttacttagttgtaaaatgttgtgttgtctttgcagatgatgaatgaagaagaagttgatgacctcgtcggtcttgaaagctcgatgacccggatggatggcacagtggaggctggagttgaagggctctcagcacctctgggcggcttcgacaaagaccctgcgacagcgtctgctctggcgcacattgaagagatgcattaggggtttggggttgatggttttgatttttgtgatactgaaggtcggttgctgtgcaggttccaacgtccaggcttgcgcaagcaaaccctgatgatgttgatattaacgatgtttcgatggatgcaaatgcggcgtttcttagtggaaatgtgtctgaggggtctgagtttgggtcatggtcttcagatgaaggggaatttgggagccctttctcgtgggttgtcaaatcttctgaggacgacctagattattttgctacgtcggagtctccactgcgatctgtcccttgcaaggcgctggcaacctcgaccgatgcgagagttgaagactcgcgaaggcaaagaatgggtgtgtcgaaacagagcatcggtgagtcatcactaagtggaagaagacgtcgccgaatgggtatggaaaggtcccgtcttcggggtggttcgcgattggatcagggtactcagcgcgagctgctttcatcgacatctgggacgtgcattggagaaggggacctacgggacgtatttgagggggaaagagttgaggttg

SEQ ID NO: 154119 - DNA, 742 bp, Zea Mays
atccgctcgtaccgccaaaacgccggtatctaaccaaccaggctcaggccagcctgcagccacggacacacttaaccaatcagccggtatttgcacacgttgaatatggttaatgggaacctggctgattggagccatgcaggctaggttggtaagacaaccaatcagccccaaggtcccaattcagcttcaaccttcaacatagcatcgccgccacctacccaccggtacgaatattgctgggtggcggaaagataatgcaaggctttgttcagagggggatcccatttttgtcatcgatgacgttgccacatcactctcaccggagctccacgcacttctgagcgcgagcgcgacccgtcatcgtccccgcagcgcagctagccattatttcggcggaggagctccgtaaaattaacgctccagaccactctacaaatgtatttatgtactactccatttttttcatttttcacgctttagttcaaaagtgaactagcgggcgataaatatttaataacgggtagtaacattttaaacaatccagtaaaactatggcaggtagggaaagaggatcattcgggaacaattactcacaaatatgagagaatcatgggcacatgacagcagacattcagcactcagcacacgacgctcaccgctcaggtggtcgttgcccattggacaggaagacgcttcgccctcgcctatgaatataaaaagaaagggaatttgaggaagt

SEQ ID NO: 154120 - DNA, 422 bp, Zea Mays
cgtcggtgtgctcaatttatagtgtgcttgagcggtggtgcttaatttggacgaattgcgctggcggccgagaggggaatgagtcacggtggcgatctaccgtgccaattgcagagcaactgaactacgacggtcactagatggtcactacggctcataccgacgcgttaaacttcctaaggcatgtcaccctcacagtgaatggcgaacacgccggtgttagccgctcggccacgtcgccagtgcgaatgaccgagggacaacgcggccatagtgtcccggacctatctgtggcgtgatcttttcaccggcgagctcaatccacagaccaaaagcacgaatcgtggcgagcagcaccaatcacggcgaagggtcaccggcggcgagatactctgagctggcgatctgatcagtatactgta

SEQ ID NO: 154121 - DNA, 663 bp, Zea Mays
aaaatccacttcagcatagaaccattatttggtacagtcgccatgccatttggttcggtatgcaagtaccggggcaattatgtccttccgataagcaaaggtgtagcacctgaagttgtagtgtagcccatccaaagctatgtctttgatctgatagtgcaaatcatgcactctgcaaaaagcatcagcctcggtacgtacttgttggctttgtgcggcctggatgaaaacacttagcctaactatggcgttcagcattagctgatgtatgtaaatctgacacttctacaaaaccttttctatcatctaatacattggcagccgaaggctggctcggaagaagcttatgaaaacaacaacatccttgctctttggcttcggggttgtcccatcaccattaagcatcactttgaccttgtccttgaagtagccaagctctttcatcttctttaagtcctccttcagaatagactgccccatgtcgagatagctcgacttcgatggccgatcttcctgcccttcccctgtagccttcgagctacttttggattttggtgctgacaaagccttcatgacttcagaaattggcgtcgtggaaatcggcatagtatctgaggcattctcatccctctagcaggcttccgaagtagtgggagtgcctat

SEQ ID NO: 154122 - DNA, 375 bp, Zea Mays
ttatgatatacttgacaaagaggccgggggagtgaaaaagaaaagagttgtaagcatcctaaaaagacaagattagagatctatcgagaaggataaaaagaaaaggctatcaaaaagaccgaagacgtcgccggaaccttcaatgtctaagaaacggaagattgcagaatcgagccatgatgaagaggaaaagccttctccggcgaagcactctatcgaaaccccttcgataacttctattggcataacagaaatattgggggtaatgaccgaacccttacctttcgccatgctaagccctctaggatcagagctaacaagcttattacagccaaagaagaaagatgctagggaaactaccgaagcagagacaga

SEQ ID NO: 154123 - DNA, 822 bp, Zea Mays
gtcctctgtcgagcaagtgtgcaaggtagaatggacaaccaagtcctctaccaagcaagtctgcaaggcagaattgacaaccaagtcctcgtcaagctagccggctgggcagagcggccaaccacgacaggacacgtctccaagagcccacacggtagctatgggtacgactacacgcccctttcttataacaataatatcatgttgtctaatgggacaaggcagcctcggttagaggagacctcagcaccagaccctccatagtagtcggtatcttagaagagacaaaacgaggtgccataccgaataggagaatccatgcgcacagaaggatagtacatggcccacaatgatagaagaaattcgtgtcacattcataaagctccaatactaaaccatgtgacccaccgcacatcatcgcagggacgtcagccatgaacctaccacacggatgggagtgacgaacgacaccatactgggagcactactttgcatgaccacaggaggggtgtgccacgacaccaaaggactttctctccctcactttctctcccactctctctcatttgtagaaaacagatctcctctgtaaggactggcccttgagctataaaagggcaggttctctttcttcttaggacccaagcacacctgttgtaacacgcccaaagcaatactacaatcaacactacactggagtagggtgcaaacacaaactagtataaatcatttgggcaaggattctattggccaactgccatggccgacggtgagcaggttgttcgtacctgtgagggctaccactactacgcacgacaaaca

SEQ ID NO: 154124 - DNA, 375 bp, Zea Mays
gcctgtcagtgctcgcccaaaacgcccttgccgagccaatcaacttgattctcatgttgatgagcagaaaaagaaaaagagacgccttcggcgagtatctagcttggatcgggatgttggtccttcggtttctgttgttgaggaagtgcctatgcctgaatttaccgacgctgaccccaatgggtgtgatccatctgtcgctgatcccagtgggtgtgctccatctgtcgctgaccccaatgggggtgctccaactgtcgctgaacccaatgttggtgctgcctgtgctgctgatgaaaacgagggggaggaagaagatgaagtccctttgactgggaagaacagtcggcaatatgtagctagtggggaaagtag

SEQ ID NO: 154125 - DNA, 809 bp, Zea Mays
ctgttgtggactatattattaaacttgctcttagcttgattggtcgcctctagctcgtggttagtctcacctcatggatggggagaagagagatggatagacgactctgcctgcgtgggtggtgacaccgaggtcgacgccgagattcgtggcgccgaggatgctatcatgtgggtgccacctcggcgcgtggatccgagacctcagtgccaactaaattaatgctgagacttgtaacttttgtgtcaatgataacaccatcgagctgagggtctatttactaaaatgaaatcgaaaagaacgtatttatgaaaaactttcacaaaaagggccaaaataaaaaagatagaccctcctccctcccgatagagcaccataagctagtgcttcccaaaattttaagagatagttagtcttcatgaaggcgtacaaattttagtgcctcctaaatttttggtgcccaacatacctcttttcacaagaataaagttatgggggagatatcccctgggttgccgtgacctagatttagtttgtgggccattaaaggacctcaatcggccgaacaaatggacatcatgggctgatcaattggccccaaccagaaggtgatacataactcaaagacatggacgtgaatgcttcgtaaccaactcctgcgcatatagaagcgaagataagccaacgaagaatcacacacttacatgttagtcggagacggttccacaaatgtaggagtagcaatagtgatctgcttaaccatgtaaccataatcccatcgaatatataatgcgggttagggaccccta

SEQ ID NO: 154126 - DNA, 510 bp, Zea Mays
tagttgatatatagaacaacaactttgttacagaaggattatcaggttgtcacacaaaaattggagaaccaaggcctttaatctactctgtcaggcgatctgatgaacggttccaatggtacagtgactggataggatcagattcggtgaacttcgccgccggtgaccttcgtgcaaggattcgtgctgatcgcagtgattcatgtaggaacccgggcaggatagtaccgggaggatgaaaagatcataaagggagtggatttgatcgcggattgaagcttatcaaccgcacctatagccacgcaacgtggccggatcactggtatcgccgtggtacgccgaagaccccaaatatgccatgtcgtagtcctttaccatgctgtagtaatcatggcgcatctggatttaccacctcaagagctattgcaccggcaagcgccatgactgagcaaccagaaactcttccccctctccggccgccgcgcatcttcccaaattagccgccaccgc

SEQ ID NO: 154127 - DNA, 486 bp, Zea Mays
accctcgtcctctttcggcgactctgcaatccagcgcggcccaaggatgacgaggtcgacgagatcttcctccatgcagcgctgcttgctcttcctctgaggcctgcccctggccctgtcccggtcttgtccgtctggatttcgctcaggcggggcctttcctctccttgggagtttctgcgacgactgctgctgctgctgcctctgctagctctcgtcgtaacgtaaccgccgctcctgctcctggtgctcggtcgatgcacgcagcgtagcaaccggcggcgagaagaattgcctgcttccctccctcgcggcgctcgcggccgttcatgccctgcaggaaaagagccgcctccttcccggatcccgccgcctctcgccggagatgggaggctcccgctggctgctccacttcctgctcgtctccgtgctgctgcacgtcgtccggtccctggagtcccaggcgtgccaccccgccgacctgag

SEQ ID NO: 154128 - DNA, 1381 bp, Zea Mays
gcaacaaggctggtagtcctaattaggaggctaaactggcttaggtgcttagcagcgctaagtgggctgttagcagggccctttaacagtagaataaagacgctaaaggccttttagggtaatatgtaataggaggttatttatactttaattggaatgaaatgagaggaggttgtgatcaacattatgttgatcagccgccgtccctgccctagttattctcctctcctgtcgtctttccctaggccgtgagaaccacaaccacctttcatcgccaaccgctcagggagcggccacccgccacacacagctacaacctaaggagaagagggcataccaatctggtatcaaagatgccgggcaacaatgacaacactgccagcgaagtcgcatctgctgtgacaacaaaccccccactagtgcagtcctagagcagaagattgacaccatgacgaaggccattgtcaatctcgccaccagggtgtccaatctagagatgcacgtgacataaatcgatgggcacacactcccatagtgtccgccaccagcaaccatccagggtttccttacggtctcccaagttatggcagcattccagagacacaggcgccatcgacctccaccatgctagagccagctacagctccaccaccatccaacccattaccaatccaccaaatccccatgccccactcgctgtcacctcttccatcctttccaccatacataccacagcagccattacaccacatcccaacccatcccaccctgtagtattttgacgcaggagctccgcgacactacaagatgaggtttccgacatttgatgggaaggaagatcccctcgaatggctgaaccaccacgagcagtatttcagaggctagcgcacgctcgaggatgacaaagtgtggctcgcctcctatcacctgaagggagcagcacatacttggtatttcatggtggaacaggactgtgcaacggtgatatggcctcaattcaaagagctctgcaatgagcaccttggtccagcactacgcaccaacccattaggcgcattggcccgtctttgtttcctaacaaccgcagatgattaccaagagcacttctcgtcactgttgtgccacacctctgcgttggcacctgaccaacaagtgcagctcttcacggcgggattgccagagcagattaaaatcaacgttgagctgatgaacccacagaatttgtagcaggcttctcgaccagcaagagcatatgaacatcgttcttaggtcattaatggtgctccatagcagcagcaggctgacagggccccaagaccatctggtcgaccactggtgctcacacacatgaccgacaatgccacaaagaatgcatcccaac

SEQ ID NO: 154129 - DNA, 447 bp, Zea Mays
gaaacctctaaaaaatcatgcttatgtcagtgtttctctagcccttgagtgttttacccttgaagttgcacctgcacaactggtagacccccatagcttgaccgctagaccaaccaaagtctccttgtgcacttgttgtggcaaaaaatattgttgcttggcatctagtttcacaaaccctatatatcccattagtaaggccatgtttctttccatagatcctgtcccgaatcttcataacctttctggtgctcgtcctaagcgacctcatgcgactccctctcttttcacatggatctggtaatcttttccttgtgaatcatgttgtggccttatcatccaaatttccgtatcccttaatgattctgccccgttatctggttttctgctataaccattctcaagtatcggatgttgatccacctgatctctcatttctagtctttt

SEQ ID NO: 154130 - DNA, 602 bp, Zea Mays
cctaattccctttcagttgtaacagccaaaattctcatgaagcccatcttctctggccttcgtctgataatgtagctcatgcactcggcagaaagcttcagcatttgggtccattccctggcttcgaagggcccaaatgaagatgttgagcctaacgatagcgttaggagtcagctgatgaagataaatttcataattatccaaaacttctccaatcatctcatgaagcagaaaccgcaattcagctttgaaaaatcttttgaaaactactacttcgtcattttttggctctagggtggtttcttcgctggcaaaacgaagaagcttcttctctgtctccctgaagtaaccgagcttcatcatcatgggcacatcggcctcagagacagtagatttttcaaaatctaagtcgctgggctttgctgggattagagtgttatagtcttccatttcatcagcattttcttcctcaatatcagcttcttcagcctcagcagtacgtgcatcttcgtcaatagccccctctgtcacaaccaatcctgattgcttcataacttcggaaatcggggctgtttctgtggcttcggcctcctctccgtcac

SEQ ID NO: 154131 - DNA, 329 bp, Zea Mays
gctggagtttatacccctgctcaccgaagttcgtcgatgccccagctcacacctcttcgctaatactcagtccccctgcaccaaagaccaacactgtgcagccatctcaccgtcgtcttcctaccgcgttgctgggattcctccgcatctacgacgtgctgctacaccgccgtgtccaccgctctgctcacgccgagcactgtcaaccctcgccagatttcgtagtttgccagcgctgtaccgatctcctacgccagcatcagtcatgctgttgctcgcttggccgtcattctttgcctcgtcgaaatctgccatgcctcgtcgtcacc

SEQ ID NO: 154132 - DNA, 623 bp, Zea Mays
gtttgatgtctgaaattcagactaacagtggtactgagtcatcttgggagctctgcagatcaagaacttcaaagaatttgtctcgagtcaatatagcaaagttatagagccattgtagaggaacaactttgctataggtgtttgggcttggtaccatatgaaatttggagaaatctagacctgaaaatggactgtcagacgctctgaagatccttcgccatggtatagtgatctaaaatggatcagaccgccagctcagttttttcttgccgccgacgatctctccgccgcgattcgtgccgctgccgtatcgattcgtgctcgggttgatcagataacgctcggagtcacgctgttgtggataagctccggctagtaaattatttcggccaccgtaccgagctcgccgcggtggattaggatgaattcgccgatgaccgccaccttccggccttgtgccgcgtgtctaggcatctccaccgcatcgccgtgacctgctttaactcttcgttgatcaccggagtgaatgtcacggtataggacaccaatccactacgccagtgaaactccccctcctccgaccgccgcgcgtcatcgtttcaatttctggccatctctctcgc

SEQ ID NO: 154133 - DNA, 985 bp, Zea Mays
ttcaatgattggactggggacactattctgtgaaagaccaggggctatttcgtatatttctccaagactcatacccaccccgcgcgtggatggcgggttgaataagaaaaacaacaggggctctttagaaattatccaccgccgaaggggtaccttcagatatgagccattcgattgatatctgatggcccagattagactagaactgagacacatcggcaaccctcaaatcttgatccatcggttcagatcatacattgacctttatgcactgatgaccggacatcatcagatctgtggtcccaatgcattgagcgcatgcatacaagttgacccaatcctagccgttggtggctagatcgacggacaagggttgtcttcctcctcaccatctctccccaacctccagtcaggcgcgctggccgcacggcggcgcccaccactggcgttcggaccacagacgccctgtgccccactcaccaccaaccgcttcgagatcgatactcctaatttcatgtatcctggtccgctcgattaccatcgttcggccctcctggttcgtccaccttcgaggctgaccgagctacgatgcatcatgaccatggccaacgtccagccgaaatgatgagcagagcactgacagaccaaaccaactcgaggaataggggagggagctctccgggattggccctgggaggcaaggaatcatggccgcccgccacgaagtggtcccacggcaatgagcaaacaggtgccccaacgccaaccacgattcccaccgatgttacgcgagctagagatgaaggtgagcagtttgagggaagacttaccgtgtagcgagtaggtccacacatggcgaatgccgtgctccggtgagcgattgaagcagcactgaggacgccatcgacccatcgatgccatgcatcgcctcgaaagatgcccgaaattaacctcatgccccgccataggcctaacgccgacttgg

SEQ ID NO: 154134 - DNA, 595 bp, Zea Mays
tagcgctcaaagtagcagccatgcatattaattctcatctgctcatgcttacccaggaactactatagatgtgccaacagtaaagaccaagggtgtcctgcaaccaagacagtccagcagaaggaaacagacgggagcggcgcagtgaagttgttcgacgttgactactacggccagcacacttgcaacaaggacggcgtcatccatccgtacgttgttgacacagcacatgacagcgtgccgaccgtcgaccacaaccaaagctgcagcaccccaacgtcgtctgctcacaacaacggtgttcatggaattcttcaggatgacgaaagcttcgagaacctgttcatggtgccaagcataccagaacatctgacggatgaaagcttcgaaaacctagtcatggtgtcaagcataccagagtattatctggcagacttcacagatgttgaaatggccgaaggggcacttgaggttgcctctatgatgatctctgaagatatatgggcgtgaggggagactcaaggctcgctcgcatgcagacagccattacatcactgaggtgtgacaagaaagtgacacacgtacgttagcccat

SEQ ID NO: 154135 - DNA, 526 bp, Zea Mays
gaagtccccgacgacggcagcgcgttgaggagctccggcgagcacctgtaccggccaactgaggcgatgaccggcgctcccaagcgacagacaccaaattggaactaccctaagcctttcccccaactcaattgcatacaagatcaattatggagctctggccacggtggccgagaatcaggcggcaagatcatcgggttcccggcgatcagaggcggtttggttcgattaaaggggtcggagagcatcaccaacacgcaaggatgctagaacagggatgaaaaaggaatgagcagacctggggacggctggccgcggtgaggtgaactttgcggtggcggaaaccagttttggggagaactaggaattctcgagctccggtgagggactgctagcaattggcggtggctgagtgcgtgaggatgtggtgaagctcactgcggggtcaatttatagatccccggggcggtggcgctcaattcgagcggatagcggaggcggccgaagaggaggaagaaccctggcg

SEQ ID NO: 154136 - DNA, 306 bp, Zea Mays
gccgacataacatatggcaggacctacccaatcctgccaaatgactcttgtacaacagatctatttcacacggtaggatagacatagaagacttcacgaacatgacccactttcttttctttctccctctcccctttcttccctagagcgctcacgcatgagagaaacagggtgtcgtcaccgtccactgtcgtctttgccgccataggcgacgccaacaagccctacaccgaccactcacctccacgattcaagtataacatctcccccttgatttgttgatttcattggtccttagtttgatga

SEQ ID NO: 154137 - DNA, 943 bp, Zea Mays
atggcttatgatgacaggtgagaagtgggaagctactaaagcgggttgcccatatctttggtgcttttaccttgcattttccctcttgtgtgctttggaaactttgaagacggaattttctcctgggcccaggccggcctggcgaagagctttggatactgtgacatgatgcttcttttctttttccccctctgtatctctcttactctctcaaaggaaggcctattgatgtatgtagtatggttccctcctgtatatggctagttttggcacttggatggatgatggtggttgaagtggaaccctagtggtcatgcctcatgcatgcattgtgtagtgcgtccctgcttgccagctatatacatactcctatgcctgcgtttgcgacgactggctttgttgctaaacatggtgtccacattttgtctggaaactgaaatgtgcattccacccagtgcatgaacacgatgacagattccctgattattggtgtaagtcatgatccaatatgctcgttattaattcagaaagactgtcctggcaccaacctccaaccattccgccgatcttgatagcacatgaacaagatccagggcccagctttccactgttcactgttgctagtgcgatctttggacacctactacgcacgtatggtatggcaggtcaagaacgtttcctgtacatcaggaccgaccctgaagtttgtagaatggtgaataggtgagtttcatagtgtcatacaggcaatttcctgaacataacaccgtgtttaagaagttcttcagcgcagccgttgatacgtatggttgggcaagtaaaagtttagcctccatttgccattgttttttggcagcatttgtggatctacttgacctgatctgccattggctggtccttccttcttcacgtgcacatgccctgctctgccactggatttctc

SEQ ID NO: 154138 - DNA, 434 bp, Zea Mays
cttgggaaacgggtgtgacagtcgagcacgaggtagcgtagagagaggtcaagttcaagcgcagattgactccaaatcttcacgattatggccatgatcccattgagagatctcttcccctgacattcctttgtcgtttgtgtgtggaggcttatgggttttgctgaatggatcaaaagatatggagggatgaagtttggtttgtctcactgctgaactccgagaggaaatcctagatttgacgtgtctagggcacgaatctcgatgccatcttcacacacgttgcagaggggttagtttagaacaaatttgtcaatagggacttaaggatttgagctagggatcaaggtgaacgtgctcaagttctaggtgagggctgaaattcagcaatctgaattttagattttccctagagagcttccacttggatggcc

SEQ ID NO: 154139 - DNA, 595 bp, Zea Mays
taggattatgtggggacaatagatggaacccatattctttctagggtgccacagagaatgcaagttgcattcagggaaggaggcatcaaccaactcaaaataaactagctgcagttgatccaccttttgtgcaggtagcaagtgatggctgcaggacccctacttagctctagggccccattttgtgcaggatcctagtggtgacttattctgtgcagtgaatctgaccatgcattattttgtgcagttgagcttgtctttgcattctattatgcagctgatctggtcctgcgttaactaggtagagactcttatatagtaacaagtctctaccagtatacatcttatgtatcacctattctatctaggcaatctattgtgacatgttgtggttgagaaagcccaaggaactatattggatcaaccataagactattatattattattcacatgttctgagcatatatccattaccatttctgctgttgtgatgcattttgactaatctgagctgatgatttttttttttgccaatgatatgcttgttttttgatgctgcacaatatgagcatatgttcattgccaataatgtac

SEQ ID NO: 154140 - DNA, 368 bp, Zea Mays
ctaatcttcaacgcacgactcaatcaattacacaaaaattaagtacacaacacaccacccatcatccacatagccagtaaaacacctctcgcaacaacccattatatccacacgttgacccaaacacttctcgccactgctgcactttaaacccacgcttcgcatacataggaacaagttaaccacaattgacatactcaactatcaaacttgaccttagcttaaacaatatttatactcagcaatcacacatgcgactatatcactgcaagtgactcagacattccacaaaccatacacttacaaccctaacgcacctgttgtcaataataaaaacaacacaatgaacatgcttaactagaccgtcc

SEQ ID NO: 154141 - DNA, 540 bp, Zea Mays
ttctggacttagatgcgctgcgcacgtgggcgtcgggttggtttgacatgtgcgacaaccttggcctggtagcggatgcgaggagggtgttcgacgaaatggctaccacaagcgtggtgctggggaataccatggtggcgtgctacgtcaggtcaggggatatgtaagctagctgctcggatgtgtttcacatgatggcgaaagggacccaatctcttggaacacactgatgatggggtacttgcggcatggggaagcatgtatggcaagggagtcgtttgaagagatgccggagagggatgccgaatgccaatagctagagaatggtgattgttgcatgctcgcagcgttcaatcggatgcgcctcgcaaggttccaacctgatcccgcgatgatggatgtgctgatgtccgcggtccgcctgtgcacaactttgttctttgtccgttccaagacaggtgcatgggattttgagcaaaaactgtgtcaaaatgaattttcatgtgccgaattcattgatcgacattctttactagtttt

SEQ ID NO: 154142 - DNA, 716 bp, Zea Mays
ggttaaaaaaaggtgctgaagaagaaaagaagactgcctcggcaaacggagggaacaagggtggtcagaagaaacgatgtatgatggctatgatgagggtcatgcacaagacccccctcctgttgcgacagaaaaactgctgctcctactgatgtcgaagctggtgaaacagaaactaaagctaaaaacagtggaggccttctcggaacaacattgtcaggaatttatagaattataactgatgtggttcccgagagggaaatggatgaagttactgctggcaaggctgcaaccttaaaagtgaaggaaatagaaggagcttctttggagggtgaagatttgggcctacaacacttgggtggccagcaattctccaaataagatatttctaaattgaaagaattcgttactgcaggtggctatcagcctgggtccgtgcttttgggtggcattgacgaagaaattctagggtgcatccctgatcgcgtcggggcaaaaattgtcaacactttatcaaagagcatcgtttcccgaagcttgaacgagacctcagcaatttcagaaggcaacatattactggaagtttgttgtactcaaattttaaggtacaaaatttattgtttacttttgccatccattggtttttaaattttaagagtttcaagctaaaatagcttcgacttttgcaacagagccttcttctaagcaaagctttg

SEQ ID NO: 154143 - DNA, 996 bp, Zea Mays
gctgtgcgtcatcttcccaacttctacaacttctcacatcggtggaggcgcaccgccggtcacgagaggccggtgtaccgggatctcatcgtcctcaacacagcggccgtcacacgtggtaccaaagctttccttcctcggtgtgggtgtgtgtagtagtgaagagtgaagttagttgtgaagaaggggagcaccacgtcgtcgttagtaaaaccatctgcacagtctcgtttggtgttagaagcaatggcagtggaagcaaagcagggtgaagtgagatgggaaaagatgatgaacacagtagagacattgatggaaaaggtggaagttatagacaaggttcgtcatcagttgttgggacaatctgaattaacggctgaactagtgaagcaggtggcggatgaaaggacgattctgtctaggagggtggaggagaatgggaaggccttagcgaagatgagattggaagccatggcccgggagatggagaattttggggagaggccagaatcatcagagttggggaaggggcttgatggccaaactcacaggcaacgcagagaaagaggggagtcatcaggaggtgaaaatggaaactatgaatcaggagctggtggaagggagttgcaatcacaccttcccaagtttctgtttccaaagtttggtggggaggatcccgcgctatgggtgatcaggtgtgaggactattttcgtatgtaccaggtgcctaagtgcatgagggttctttcagcttccatgcacatggaaggaaatgctgctagatggatgcaaattcaaaggctaaaaggggatttgggaaattggacgcacttctcgaagactgtgattgacaagtttgggatagatgagtttccccgagtcatgaacagattattgtatttacagcagaagggaagtgtggaggactatgttcaggagtttgaggaactcagatatgcagtttcagtgcataatccaggcctgagtgaagtattt

SEQ ID NO: 154144 - DNA, 2294 bp, Zea Mays
atacttgtggcgacaagtttgaacctggccatcaagctcgctgtcccaaaaaaatccaaatgcagttacatgccctcactaccgaggatttggggatgacactatctgagcacacgttgacacaaattgagcaggaggaaaaaggggaagaggagaattttatgttgtcccttaatgctcttagtggtactacaaatgatgaatgtatggctgtgagagccttattgcacaatcaagtgatgttggtgctggttgattcgggaagctccactagtttcattaacaagcagttggtcgatcgaatggggctgcaagtgcatccgtgtgcttcagctaaagtgagagtggcaaatggggaaattttgcatagtgacacgatggtgcgatcattggaatggtgggccaatgggcatacatatcaatgtgatatgagggtgttggggttgggagcatatgatgctattttgggctatgattggttgcgtcgccatagtcctatgcattgtgattgggatgataaggttattagctttgtggacaatggagtggaagttcagttggtgggcaatactgatcagcagcaggttgtgaaggaagtttctactatacaggtggcgaaatggctgcgagggaatgatatctgggtgtttgcattgttggaggaggtgattgaggagaacagcaatggggtccatccagaattgcaggtgttgttgggggaattcagtgacatttttgttacaccaactgaactgccgccatctcgaccgtttgaccatcatattcctttgctccctgggtccattccggtcaatgctcgaccctacaaatattctcctcatcataagacggagattgagaagcaagtggctgcgttgttgaaatctggtttgatcacccccagtgtgagtccatttgcttctccggtccttttagtgcaaaagaaggatggtacttggcggttctgtgtggattaccgtaagctcaacgatatgaccatcaagaatcggtttccgatgccggtggttgaggagattttggatgagcttgccggcactaaatttttttccagtctggacatgacgtcagggtatcatcaggtgcgtatgggcgcctccgaggagtttaagactgcatttaaaactcaccagggccactaccagtttcgagtcatgcccttcgaacttactaacgctccagctacattccagtgtgcgatgaacttggtgctagctccttttctccgaaaatttgttatggtctttattgatgatatattgatttatagtcccacttggcactctcatttggagcacctgcggttggtctttgctgctttaagggaccacaagttctatctcaaagagaggaaatgtgtctttggaaaaaaggagccgatttatttgggccatgttatatctggtgagggtgtggctactgatcctcagaaaaccgaagctatgctcaagtggccgacaccaatgactgtcactgatttgcgcggttttcttgggttgaccgggtattacaggcgatttgtgcaagcgtacgggataattgctcgaccactaacgaagttgctgcagaaaggggccttcaagtggacaccagaagctgaggttgcttttcagcgtctgaagcaggccatggtttccacgccggtcttggcattacctgattttaatataccctttgctgttgaaactgacgcctgtgatgacggggtaggagcggtgttgatgcagcagggcagacctatcgctttcttgagcaaggcgttgggagtttccaatcagaagctttcaatctatgagaaggagttcatcgccctgattatggctgtggatcgttggcgtcattatctccaacggagcgagtttgaaatccggacggatcacaaggctctcagtttcttgggcagtcaggagctgcattctgagttgcaacgtaaagccatggcaaagcttatggggatgcagtttaaagtaatctacaagccgggcaaggagaacaaagtcgctgatgctctttctcgggtgggctgtgtgatggcgttgacagcagtcagtgaagttcaacctcgctggattcaagaagttaccaattcttatgtgactaattctgatgcgcagtcgctgttgactcggttgtgtgtccacagcccggatgagtatggttactctctttctcagggagtcatcaggaagggcactttaatttgggttggccacaattcagctctccggacgaagttggtggcagcattgcatgacagtgccacaggtggtcactcg

SEQ ID NO: 154145 - DNA, 549 bp, Zea Mays
gtcatggcaaagcgagttgcagaaatgtgtttcattgtccacgagagtgaagctaaattcattgcagcgatagaggcaaacaaagaactgaaaaggtttgttagtgaactttggtaacaggagctttcttgggtttgatcaagacaataataatgtgcgatcggctgctttcttggatgtcttcgggcagggagcttgtgataacgcccatacggtgttcgattgagatggaatttggtcagtgattaggggacttaaaaggttgcgtttgtagttgaggccaaagatttacgctggtcgctgcaacagctaaactgttcggcgtcaacgacaattagtagtagtattaaatttgggttgagtcgagaaggattctgtctcggtctcctttccatccgtgatctgttgctgatcgatcgagagaagaagcctcgcagtttttcgataggttgagttgacccagcatcgggtgatcgaactttgaccatcgaggcatcgaccatcagctcagcagctggttgcggtttgtttgttttttcattttgcata

SEQ ID NO: 154146 - DNA, 347 bp, Zea Mays
ggggacactctcactgagagaggctaggagccagaagagaaaggctaccagcccaacacctcaggaggaagagttggaccaggagatcagggatttagaagctatacatcaccaggtgcagaggaaaagagaaaagatgcttcggttaaccgaacttcaaaggaagatcgacgaagcagctgaagaaatgtgccacctcgcgcaggacgatcaaggacgagggcctcaacatagagagctccatcaagaaactccagtcaacgatgatggatggtatgatgatctgtaccatggtaatttttcttttgatgatgcttctcccctagcagcagagttgcaggctaccc

SEQ ID NO: 154147 - DNA, 885 bp, Zea Mays
gtgctgaaatctagcttggtgcccatagcttgctgaaggctcatctaaaattttgaggtgaattgtgttcccctttgacactattcttcgtggaatgcaatgaagtctgactatttctttgagatatatccgggcaagggtggctccttcgaaggtagtttttactggaatgaagtgagctaccttggtaagatgggcgattataacccagatagaatcgttccctttttgggtcaggggcagtccgattacgaaatccatgcctatttcttcccattttcatttgggcactgggaggggttgcagtaggcctgcaggcctctgatgttctgccttagttcgttgacaagtatcacaccaggccacatactgagctatgtcctttttcattcctctccaccaatatctggtcttgaggtctaggtacatcttggtagaccctgggtggatagaataggctgagttgtgggcctcatctagcaggatttctcgtgcctctcccttcggtacacacagacggtttctgaactgaagggccaccctttcatctgtcctgagatctggaagttgttccttgctagccttttctgcaagtcctgccatctcaatgtccaaacgctgagctttgcgaatgagatcttccagcatcggtttaacttctatgttgccattttctcctaaacaagcatttagttgagctgattctctcttccagtcttccaagaagtttgttgctttctccccaaaaggtttccggccgagggcgtctgctactacgttagcctttccagggtggtagtggatctcgatgtcataatccttaatcagctctagccatcttcgctgatgaaggttgagatctggttgggtaaagatgtacttcag

SEQ ID NO: 154148 - DNA, 415 bp, Zea Mays
gtaccctagaaccatcaacgacgagctcgttgagttagggcagcttcccgatgacgtcgacgacatgggagatgctgctgctgccttattcgatgtcggtagcagtcatggtgccggtgacctggaggggacaggtgccgggccggttgtagttagtgatgctgctggctctaacgaacttgattcattgacttcttccagcattggtaagcgttgatctgctatttaggatgacttcactgaagtcactgaaaaccgtaatggtaagaaggtgcgcattgctggcatttgcaaattttgcaaggctcggttgagtgctaattctaatgctggcactggacatttgcttaggcaccagaaatcatgtaaaaagaagtctgatcatgctgctatggttcaaactagactagctttg

SEQ ID NO: 154149 - DNA, 388 bp, Zea Mays
tggaaacactcctttcttcatggtttatgggtcggaggcagtgctacctgctgatctcaaatttggggcgccaaggttgatcttcgaaagcatagcagaagccgaggccaccaggctggaggacgttgatgtacttgaggaagaacggctgaatgcggtaatccaatcagcacggtaccagcagactctaaggcgctatcacgacaaggctgtgcggcaacggttcttttcagtaggagacctcgtcctccgccgaattctaacgggggagggacggcacaagttatcacccttatgggaaggacccttcatagtagtagaagtcactcggcctgaatcgtatcgcctcactcagatggatggcacagaagttggaaactcctggaac

SEQ ID NO: 154150 - DNA, 650 bp, Zea Mays
atctgatacggtttatgcatataactgaactggtttacgtctttttatatacttatttactgtatgcgcctatttctccactactaatgcgctgcctttctatgttcaattatgtacaatattttcagttcttctctgtattgattatgcaaaaatctacatattggtttacgcttattcattcagttttttcgtttggcgccagtacatacatattgacttcagccagtacatacatattgacttcagttcgccggctttgtgattttttcaacataaatactgtatgagatgcagtgaatatatgattatatagccaaacaaacccaacagtagcatagctcataagaaataattacgttgcattaataaatataatccatacagtgagcttttaaagtaaatattcatattcatcaaatagtatcatgatcataacatttcaatatcatccattatttatgtataaatgttttacaatcatgtcaaattatcgtcatccgaaccatgttcttcagaatcagtatgtttatgtttttttgatgtggatgtctcattccactgcggggccattgttgaatttttgtttctagacccaggcagtcgtcctctgtttctatcagcaaggctagccaattttaccctatttt

SEQ ID NO: 154151 - DNA, 360 bp, Zea Mays
gaaaagaagaaaaactaaaaagggagccttcgatcaaaaagggaagtaaacacccaattcccctcacaaatgtgcaaatgtagcctaatcaaggggtttggtcaaaatgttagcaagctacttgtgggtatcaacgtggcgcaaattgatgtcacctttctcataatgaccgagaagaaagtgaagacaaacttcaatgtgcttggtctttgaatgtagcacaagattcttggcaacacttatggcacttgtgctatcgcaaagcagagacacatgagaaaactcaagacaatatcccgtaaagtagccatcatccaaagcaactgcgagcaacaaccaacggctgcgacatactcaggc

SEQ ID NO: 154152 - DNA, 347 bp, Zea Mays
tgggaagacttcaaacttcattttagagatgcattcattcctacatactatgctgatcatttgctttctaaattagacaccttaaagcagggtgctaggactgtgaaagattattatcatgattttaaaatttgtaccatgtttgctggtttagatgaatgcatggaagatgtaatgactaggttcatgaaaggactcaattctgaaattcaaactatagtcatgcatgaagcatacacacacatttctcacttgtttttgcttgcatgtaaagctgaaaatgagattctattatacaattatacaagcactgaacatgtgagccatagttcctcttttgcgtctgc

SEQ ID NO: 154153 - DNA, 272 bp, Zea Mays
gctgccgtagcgcatggcactatatttcctatctacggcacgctgatttccactgcgataaaggtgttctatgaaccgccacaagagctactgaagggctccagattctgggcaggcatgtttgctctgctaggcgcttgcgcgtttgttctgattccagtgcagtacttcctgttcggactagcaggcgggaagctcgtggagcgcgtacgctcgatgacgttccgaagtatcatgcgccaagaaatcagttggtttgataaaccagaaca

SEQ ID NO: 154154 - DNA, 420 bp, Zea Mays
gataatccacacataacctcttgcttttatccttcttctcaacaaacaatactggggaagcccatggtgacctgctacgcctaatgaaacccttagccatcaaatcatctaattgctgcttcaattcaacctgctcctttggagccatccgatacggggccttatgaataggctgcgtacccggaatcagtttgatttcaaaagccgcatcgcgctctggtggaatgcttgcaagctctgctggaaacacgtcggcataatcacacaccacacagatgtcttgcacccgcaaggcagtctcactctccaccaccatggagaacaagattcccgacttccttgaccgacgatccggaagcaattgcgacaacaaggataacatgaactttggagaacttcccaagaataccacctccctac

SEQ ID NO: 154155 - DNA, 1186 bp, Zea Mays
aattactagaagtggaattaaaaccctaaatttgaaaatagggttttgaaaataagaagaagaggaatgatacaaaaatataaataatataaatatccttaaacttattacttttaactgcacaaatatagtgtaaatgatgagccataaagtttgaatttaaacttgaattcaaattggatttgaaaatagagaaagagggaatcagaaaaagaaaaaagaaaaaaacagaaaaagaaagccacatgggccgactacctcctttccagcccaattcacgttttcacccacgcggcccaactcctaatcctccacgcgtgcgcactggacacccactgacatctggaccccgcgcccagcctcacatggtatagtcattcagcgccagtgttgagtcactagcaggtgggacccacttgtcgggttcatctccttcgcgtaacagaacccgcgcgggagcttctgctgccgttgcggacctcgccgaccgagctcgactggggtataaaacccaaatcacgtctcgcctcctcctcaacccaccgcgctgcactcctctgcccttttgcattacctagaccatcctgggcgacacgagaagggcgccgccatcgacgtctgggacgaccgctgccgcaactgtgctctcccctgtgatccttgacggtaactccctcctctcgcttgcggaatcttctctggatgataggagtttataccgcgccatgttcgaaccataggaccatagtaattgctcgtcgtcgcgtgtgtccccaccgtggattggactgcgccatgggtcgggggtctacgctgttttgcggctgaaattgatgggcaacataggttcgggccgtcgtaaatctcacgagggctgagcgaattaaagtttggggctcggggtggcaggaatttgtgcgctccggcgaagctccgccgtgggggtgctgtgcggcgccgacggcgcagtgtttgtttgggggaaaggagaaattgggtcctggccgtaggatttggatggacggtggagattagtttggggtgtaccgctttaggcgattggatccgtgccgtcggatcggtatcctgcggattagaacagaacgtgtttcattaagttgtagccgtcgatctccgatctagcggccaccagcgtataccggttcatgtaacattaggaatggtc

SEQ ID NO: 154156 - DNA, 611 bp, Zea Mays
accgaaggggttcaccgacggcgcaacggattcttcctggcggcgtcaattacttcccccggctctctcactctccgcaacggtggggttcacgaggttctaccacggagtactgggggaatagggaggcacctaggggggttcttatccaaggtcaatgccaccttaacgtccccgatccatgcgcgagctgaacggcgcggccgaagaacgaggaagacgagcggcagtcactgccccgggggtcccacgtgtaagctaacacgggcagagcgaggcgtgggccccagtgttcggccgcacaggaggtttgtcgcatcgagcgcgcgcggaagaagcggtggtgtccaagtgagtcgtgggtctgacgcgcggggcccacggtgtcagcgtcacagagcgagagagcaggttgggctgcgcgcgcactgaatgagccgcaccaggaaaaaggagggtgggccggattccagtgtttaggcccatttagttgggtttgcttttattcttttcattttctattccttttcatttttctctattttcaaatccaaatttgaattcaagtttaaattcagactttatgtctcatcatttacactatatttgtg

SEQ ID NO: 154157 - DNA, 364 bp, Zea Mays
tatgacatgtcgatgaactcatctatcgagcaatgacaacctcctccactaatttgggataaacccatagtttcacacatagccggaccatacgagcctgatcttggactgtctggtccatcgacagatggtcacatcctttacgacgaaccactcagagccgcaccaaggctgatgtatacttcacaagggctaacagaaacactcggaccgtccagctatacgtgtggacccgagtacaccaaaccgtccaacaatgagtacacagaatagggtgcagactatcacccataatccttccatctgccacaacaaatttctccataccacttatggctcctcaatgtcgtaatatggctccacc

SEQ ID NO: 154158 - DNA, 799 bp, Zea Mays
cagccgcgctctggacattccggtgcttgcctgtgcgcgcggcgtgaagcggaccaggtcacctcgccgatcgttgaagacttgtgcggggctgccacggcgggctggtcgatccggcgcttgagcttctggtgagacccatcaatccttaaaacccttttaatttactaagtcatgtcggtagagcatcgtagactaagatgttgggggcgggtcatcctcaccggtgtgtcggaggtggaagagggcctatggccgtaggatagtacattggcgggagagattagtgctcgtatggtgagctcggggtggctcgctactgctgttatggcgttcggtcgtggaatatcaactgaggcaggagaaaaagaagagagagagggagccaggggttgaagacgatgtgcgcgtccgttgatttgatttgaacggctgggattaaaccatagatacccccttttagcactttagatcttgaccgtgggtcgcccatccgaggggtgggatgggcactggcgtggttggatttcgggcgttggctttggatccaacgatttcggttgattaccggttcacttaaagcgccatctgatcgagatcctcggagtgagatccagcggccagaaaccgtgcctaccccttcgcgtggccaacttgcataagcgcccctgtacttctggggaatcaacccgcagtcctcccctcggggttctctgtgtctgtggggtttttgcgagcaggcccctgtactttttagaaaatgaggctcagtccagagattagaaaaccagggaaataa

SEQ ID NO: 154159 - DNA, 859 bp, Zea Mays
gattagggttgggcggacaagatgtgtgccaggggactttatctccaccgggaagccaagggcggcacttcacgtgggcacgacggcgccgtcaccggaggcgaggcagactgggtctcctagggcacgagaggtcggtccgggtagctggagaggttggggagggtctggcgaacactatggaggggtcaggtttgtgtgaatgggattgagatgaccagacggtggagagggaaatcctcggcggaccgaggcactccggcgagcaatcgcgggcaaggaagcgcatggcaggggaaaataaggatggggattggacggttacctcaagtggagactcaggggctcaccaacgaaggctggggtgcggtgaggacgtgggtcgacgacgccggttctccggctgcgcaagaaatgctccggtgagcgcggaccggacggaccagagggggagaaggcgaaccaaggggcgttccaagtggcgagtgatagggcggagctcaccggggcaacagacacggtggggagttccacagtgatagtagaacgggtggtggacgtcgttgagcggcgacggagctgtgtggtgcacgtgcggggtgagaggggggcgagagagctcggctgagggcgcaagtgagcagggggaggtgggcgagcggggcgcgggctctaaaggggcgagggcgtgcggaggtggccgaggaacgcacgaacgtgggtgcgtccacggcggggacgcgggagggaggttagggacgggctgacaggtgggatccacggggcagcgagaggggatccacgaacgagcggtcaacactgacggaaagcgtccaccgggcagcgggggagagtgggc

SEQ ID NO: 154160 - DNA, 587 bp, Zea Mays
ctcggcggagagctgccaccgtcgacctgtggctgcaacatcgaatgaaggaggatgttgggccgccatttcacgtagccgctgactttcatcactgcctcgatcactggtaatctggtgcccatcgaattcgccccattctctagctttgattacaccaagtcttgtctagggcgggtcactagggtgtcagggtgtgtgtctgtgagggtgcttgctgctacaggtcaggggctaccgctgtaggtgttgaggtggggaagagacgtccctgatcgttgatccagggatagacgagtaagattagaaggggcataatggttcagcaagagtgaatccaatacggagatcagcagatgaacgactttgagtggtcaaccttatacgttcatctaggttttgctaaagagtcatggtagaattttgtaaggcccaaaatttgggttgtgagttgctactctaggcacaactgtcaatataaagtgtattattttttactagtagagagtacccgccaaaaagatacgattatttttggcagctacggagccgccatagaaaataaacatatttttggtgcctactct

SEQ ID NO: 154161 - DNA, 364 bp, Zea Mays
gcggtatggagtggataacgtcggggaggggtaactcgtacgtggcaccatctcctgagctcggccggagttactcaccggcggccgccgtgactcagtgaaattccgccgcggtggcgcgcatgccgtagttctccctcactgtaccttttaccgacgtaggcgacgtgcgcttgtgatgctatcctcggccgcgaggtgaccaccgggtcggcgcggctataaatagcccatgctccgcggcgaggtttgagcatcgcgcacaccgtaggttgaaccgaagcagaaattcgtgctgcctctgccccctcctcccaaattggttgtgcgcagcaaaactagagccccttatagccgtatagcc

SEQ ID NO: 154162 - DNA, 537 bp, Zea Mays
gacagagcaacaaatactaaaaagtccgaggttagtatcgcagaagtcccacagactcaggttactgcttctgtggatggcgggttgatttatccaaacccagggactctttaagaaaatatgctgcgaaggggtatcgatggagatgagccattggattagatctgtacggtctcggtttactgatcatgtaacctaatcgtggccaccgattacacatcccacggcgcgaattcagatcagtcaaagaggtatcctggagccgatcaaagccacccatacccaatctgacgaccacaagagccccggccgaagcgttatccacccatcaatctaggtcgatccctactcgatcaacggcctagaagttgcccacgcatccaacaagctcgagcccccctttgatctagattctacgacctagattaaccctggtcgaaagggtaccccacttcaaatcgtggtcgcacatctggcaacagacgatcggtgccccatcttcctcctcacgcgcgcatagcgcgacggagagctctc

SEQ ID NO: 154163 - DNA, 648 bp, Zea Mays
gcgacccctgcgcctggattcacgccggcgaggtgattcatgctcaccggtgctcggataacgtctcgtggtcaaaagatctccaccgcggatgagctcgaagccactattctaccctatgtcgtgcccacttgagtcggcgacatggcgcagcggccgtcgtcgaggcatacgccgcctgccgtgatcgcgacatgccctgaccctttaactgcgtcgcagtgagtcaccgtaatccacccgttcatcgccggtgagcctgcccactattccaccctatgtcgtgcccacttgcgttggcgacgtggcgcagcggccgtcgtcgaggcatacgccgcctgccgtgatcgcgacacgccctgaccatttaaccgtgtcgcagtgagtcaccgtaacccacccgttcatcgccggtgagcctgcctcggtgaacgccacgaattgctagcgccagtaacctcttccctctccggccgccacgcatcttcttcaaattcactgcccaccgctcaagcacgctataaattgaatgcaccctcggctccgctaggtagtcaagcacctaatccagcaactcgtgcctcaaatcatccaccagagctcgccaattcgagatttcccccaaatcggtttccgccaccgtgaaag

SEQ ID NO: 154164 - DNA, 986 bp, Zea Mays
catggatcatcacagtgtcaaactgtcaatggctgatgagacgaataaacaaagcaaacaggcggcgatgacacgtgaaaccatgtccggcagctacctgtttcgagcttggagtccctttccaattttcaaatgaatgattaggagtaaaaataattgtggttagagtggtcattacgctgagctccccctccacctccatcgccgtctataaatacacgctccgtcaatgccaccttcacttcacccctctcaatctcgctcatcactctctccctcctcacgtcgccattagcgtacctgctctctctgttctccagctagctcatcagggggaggaaccagcacctgccttgccatgtcgtcctccatggtgtccaagaacgcgccgccgccggccgggtacggcgacggcgaaggcagcgtcgtcgaggccgcgccggtgacgagctgcctgtacctgcgccccggggcgggggcgctggacagggacgccgtgctgcgccgcatccgccaccggaggcgccacgaccgcctccacgacacgctgcgctccatggtgcaggcgccgccgcggtccgctgagccggacggcatggacggcaccgaacggcacctcccgtggccgctcgacgacgccttctcggcgccgtagcttttgtaatatagaattagtctcttgtgcagattaagcaaatgcacatggaacatgatccagttcgcctcttcttgtgtagactgtcaagaacagatgcaagttaaataatctcgccgatgtagtgctagtgcagtagatgtatgtatgcaagttactgcaaggatggagccatggatatatgcaaggattgttttgggagctagcatttctgcataattgcttacctgcttgtgcttggtgtcttaatgtttttatggatcatgctctagctagtaattagacaaagtatgtttgtattaaatgttccatttgtgttctgggttcaggc

SEQ ID NO: 154165 - DNA, 768 bp, Zea Mays
atttggttaaagtattctaattccttttgtagaatgaaaaggttaactgataacatgggatgaataatagcgccgggattgctaaggtatttaattggccccataaaaactctatatcttccatgaatagagacatcaagtttgagctaataggttaggagacatcagtgtgttagatgtacatatataaatttggtgagggagagcttgggattttggtgaggaggacaagcaaaaaaggcagcaaatatgacatggctgggtcaaactgagtagtgtgctctagcaaaaatgttaatattcatgaatcatttcacattgaagcttccctaactcaatcagattttcttttgaagttgttgcaatcagatatatagtaataaacatggctgtgttttactgagattgatcttttacaatcacaaaaaaccaacatgtgtgtgatgttatgtccagtggccaccccggcaggtcgtgagctctttaatccttatccctcggctgactgaatgattacaggaattatgatgtttggtgttgttactatttgtggatggcaacactcaagtactgcaataggatgttagatgctactcaatttcgtccaggccctcgcattgcataggatctgaattctgcttggcttatgtgttccaatccaactaaacacaacataggaatgtttcattcatttactttatattaacatgttacattttgtttgcttcttttttcagtttcgaacctggatcaacttcttgatactac

SEQ ID NO: 154166 - DNA, 595 bp, Zea Mays
tgttactgtgggactgttgagttcccgaggcgccactccgggcctataaaaagctgggctcgagctaaggcttttcacctgctcaagcgcacactgtcgaaaccctagctttttcatctgcttgcttgacctctctgctcttgctctgccggagatctggcccccatcaattagactacccgccaccaccgacagtacatgaccatgccatcctcttcgtcgttgtcgttcgctgcgagcgcttcaccggccaagccgtcatctgagaagacgattagcgattcggcggcggtagacctgcaccccagtcatatggttgagtttggtacctctatgatctactcgggccgcatgctagagatgcaacgactgggttactttggaaagggagttaggcgggctccaggggctaaagatgtccctgagccggagggggagttggttgtgtttgaggctttctttgatgctggtcttctcttgctagcacatcggttcgtagttgaggtcccgcggtggtttgaggtacaagacgagcaggcccttcgctacgcagcccgcctgagcaacgggcgtgaaggtactaggcttattgatt

SEQ ID NO: 154167 - DNA, 368 bp, Zea Mays
cggggatcgtcgtggggagcctgggtctgcacgacgtgatcgtgcacgtcgacgtggagaacgcggaggacacctacggccgctacgtgtcggaggcgagaatcttctacatgttctacgtcggcctggaggcggacgtcgccgcgctgtggaacgacatgcgccgggccaccatcttcacgtacgcgagcgtcgccacctgcctgctcctcgcggccttcgtctctggcggcatgtatggcagcatgatgcacaccccggtgaggtcgcccgagctgctggccgcggtgctcatgctgtccatcgccgacagcgcatcggttgacgtcacgcggatggccagcgagatggggctcgcggccacgccc

SEQ ID NO: 154168 - DNA, 1366 bp, Zea Mays
cggctgcacccttaggcgacttttgcgcggagtgtcgcacgcgagggtagctagcgctgcccctcgtggtgactttggtgtggtcgaatgctgaagaccgtcgatgcagtctttttcgacatattgtgtcttagtttttgcgggggatttttgcaggtatattacatggctctgcctcatttaaaacctcacccctcgggaggaaaagagtgcgggtcagaatgatactgtttggtgaataacaagggggtgttggccctgaggattcaaacaaaaaaattgcggagattatcgatattccaggaatgctctaggtcctcgctagatgtcgttgttagcctgtacgcgctgggggacgccttcgtcttgacgatgaatggaccctcccactttggctccaacttgccctgtgactctgtccgggttgttcggacgagtacgaggtcccctttgtcgaattctcttgggacgactgtgtggtcgcactaggccttcgtttgagcttggtatctgttgagggactgcatggcgaagacgcggtctccgtcgatgaggtctttggaggttggttcgtctacgtcggggacggctgaagtgcttgtccgtggtgacccatgttttatttcctacggggtcatggcctccgatccgtatagcaggcgaaagggagtgaatccagtcgcccggcactcgatcgtgttcagcgcctagactgcttcaggtagtaggtcggcccatttacccttcttgtcgtcgagaagcattttcttgatggcaatgaaaatcttgtcgttggcgcgctccacgacgtcgttagattgtgggtgatatactgaggcgaaggcaagcttggtgccaatggagaagcagaagtccctgaagtcctggctgtcaaactgtttgccattgtcgactgtgagctcggacgggactctgaattggcaaacaatgttttgctagaagaatatttgggcaatcttagacgttattgtggatactgccctagcctcgatccacttggtaaaatactcgatggcaacgaaggtgaacttgaggttcccttgggccgtgagtagtgggccgataatgtctagcccccagcgttgaagtggccatgtgtgggcgatcagtttcgtgaattgcgaagggttgcccgtacggggggaaaacttctggcaggctttgcacgacctcgtgactcgattcgcagcgcagattatagcgggccagtagaaaccttgacggatcaccttggcagcgagggccctaggccccgagtaagaaccgcaagttccgctgtggacttcacgcaggatctggaggccttcggtctctgtgacacatttgagcatgggttgactgatcc

SEQ ID NO: 154169 - DNA, 736 bp, Zea Mays
gttgtggcagcggtgcataaacatcgtcgtcatcgtcgtcgtcgtccacaggagagtgagatggggctagagttgatagtgggggacgagcctccagtacgtccatacgtgtagcaagttcatcaactcgtcgatcaagctgctcataggatgtcgccgcagagtcctggtactttttaaaagcttcagtcatcgcgcgcatcatctccttcaattccagctgagagacacactcatcgtcgttaagcttaggccccttgtccttgtccatttgattctttggtcctgtcattgttagcagaaaacagagacaaaaggcaacaaacaatatgaaccctacaactatctcccagggtgggtgtggaggtggaatacaaattatggagcgtcttaccccgctcttacaacgttcttaccagcactgcaggtggcaaacggtgaccggtgtgaccatccaacgagcgtgggtgtgattgcaaaggagtacctgttctgctcgagagaaagctggagttttgggaaggctgactaaatatatatatgtggcacacaagtcagtaacagatagcaatgctgaataagtgttccaagtactcgtcctagttgctggcctagaaaatgtaatagaacagttggaccaaggcacaagaaaggaggtacaagtatctagtagaaatgaaagttctgtaaatataggagatttttcagcactagtagaaatcaaaggcacgtttcc

SEQ ID NO: 154170 - DNA, 429 bp, Zea Mays
gttcatgcaaaccatatctagcctcaaattcttttttggaaaccttgtccaaaatcctcattaaattctcctctgcccaacccagaagccatctaggttgatgacctctcttttcacgtagatctagtaaatccttacctttgtgaatcatgttgtggttgtatcatgcgaatctctggatccttcatcgattctgccccgttatctggttatctgctataactcgttctcaagcatcggatgttgatttgcctaaatctctcatttttggtcattctcatacccccttctccgaggatcatgacgcttgttttatcaacttatctctaaacggcatatccatgtggatttaatggatgttgttgttatctttggatctctcatgtctctaaaagcttatcaatctcgatctcatggttggttcctcct

SEQ ID NO: 154171 - DNA, 297 bp, Zea Mays
ctcaggcaccacgaccggttcaatgtaacgcggccggtgggtaagaaccttcatctttttgcccttcggcacaggctcaactggggtggccaaagcagcagttttcctctttttcccttgtccccgcagcggatagcggtagtcggggtatatgaagccaatggcatcaaaaaccctgttcagtcttttcttccctcgtcttccgaaggctgcggatagagcattatcttcggccttggaataagctccaagcaattcatcacttgtagcttcgatacacttcagccagtcgtcttt

SEQ ID NO: 154172 - DNA, 348 bp, Zea Mays
gataaaatgagggtgtgtgtaggtggtgcttttggtggcggctatgggttttgtggcaggggctcactgatgaaggctagaccaagtgatagagagctcaacttgggctgaggttggccgccaagccattatgggctacgacgaacacagtgagaatggttggggtgcgaaagccattgggagagctcagacggcagcgagggagattgcggcgatctagagcaactatggtgagcaatctaacatgatataagggtgactgaggatagggaggggagcaggagtttcgttaccctcaggcagtactcctggtggcgcaaagagggacgatgcaggactagaggcact

SEQ ID NO: 154173 - DNA, 582 bp, Zea Mays
ctaggaagaaggaaataaaacccaaggcaacatctataacgtaattctattaatgaatcttcggctgtttttcacgaacaccttcatagcggctgactcaatcttcctacaacccatctttatcatttggcgatccttctccttctgaagtagggactaaagtattgtcgtgacttaaaatctgaccattggcagaaaggggtatttctttcccctctcttcgtccccaacggtcatcccgaccattctcttcccaactacgaccaatagctctctcttcctgtctcactccattggagcacctcaagcttcttcacttgattcctttgcaaatccttgagagattgagccgccaaactgcattacggagcaaccccaactgttctataacgttcaagtcggtggtggattatgtctgttaatcttggagctttgctcctagccagctaggcgtcgctcgtttgtgacagctctggggcgtttgttatcaccctctacagctagtaagaaacccctcatgtcaaaaaatttgctctcttgacttgagaatgaggataaggttgaaagagaccaaagcctttg

SEQ ID NO: 154174 - DNA, 604 bp, Zea Mays
gccaaatctagcttaattggccgggtggctaagcatctacaacacacagagacgctgaaacgagctagccacggtgagcttaccctcacggtgtttttgattgatttgggggaatcccaaattggagttctctggtgaatgatttgagacacgagtgggtgcgctgggtgcttggatacctatcggagctgagggcacgctcaatttataggattcatgagcggtggtggctaatttggggaaagacgagcggcggccggagaggaggaagagtttctggttgctcagtcgtggcgattggcggtgcaatagctcttgaggtggtaaatccagatgcgccacgattactaaagcatggtaaaggactacgacgtggcatatttggggtcgtcggcgttccacggcgacaccggtgatccggccacgttgtgtggctgtagatgcggttgataagcttcaacccatgatcaaatccactcccttgctgatcttttcaccctcccggtactatcctgcccgagttctacacgaatcactgcgatcaatgcgaatccttgcgcggaggtcgccggcggcgaggttcactgaatctgatcgtatccag

SEQ ID NO: 154175 - DNA, 920 bp, Zea Mays
gcttggtaactgttgttgtaagagaactctgcatgtggtaagctggactcccaatctttgccaaaggtcatagcataagctcttaatagatcttcaaggaccttattgactctttctgtcttcccatctgactgagggtggtaagcagtgctgaaatctaacttcatagcttgttattgactcatccagaactttgaggtaaattgcgttcctctatctcacactattattcatggaatgccatgtagtctgactatttccttgagatacaaacgagcaagtgtggctccttcgtaggtagtctttttactgaaatgaaatgagctactttggtaagacggtcaattacgacccagatggagtcatttccccttagagattgaggtagtccgaccacaaagtccattcctatttcttcccatttccacttcggtattggtagaggttgcaacaatcctcctggtttatgatgttccaccttggttcgttgacatgtgtcacattgcgccacatgctgagctatgtcctttttcattcctttccaccattatctgttcttgaggtctaggtacatcttggtggatcttggatgaatataacaagttgaattgtgggcctcagttagcagaatttctcaggttccccctttggtacatacaggcgatctttaaaccaaagggttcctttttcatccatccggaagtctgaaggttgttctttactggtcctttccacgagcccctttctttctgcatctaggagctgagccttacggatatggtcttctagcgagggctcaacttctaggttgctgctttttcctaggcatgcattgagatgagcagatttttgcttccagtcttcaaggaatcaagtagcatttttacttaagggttttcggctaagagcgtcggccacca

SEQ ID NO: 154176 - DNA, 426 bp, Zea Mays
gcaaaataaataaaagataattacaaaataacataatattacattgattagaaataatcttcatgatcaggattagttggatcataagtatcatcatcactatcaaccatgtcataatcaacactatctgaagaatcaatgttgtcattgtcattgtctaaatgtaattactcaagaatttgtaagtccttcacattttgcacctcatctccctcctcatccacagccatttcaatgtctacttcaatttcgatcgctccagttaagtctatctcaaacctcccttctagcccctcttcttgaaagaactctctgtcatatgtgtttgggtctaagttataatcttcatcatttgggacaggtagtttaccgtgcggcaataccttgtgcacaacataccaatccttaagatgctctttggtttgg

SEQ ID NO: 154177 - DNA, 319 bp, Zea Mays
tgcggcgatctttgatccagaatttcttgatcatcttccttgtatgtgctcctttgttacgtggttgccatgcactaacgtcgagccttgtgaccgcggatagctagctaggttgccacccctttaaattgcgccatgaaccaccgtgaagtcttcactgtcttctggtgtgatcagtagaagccaaaattcgtggtgtctccccttcctcgccccaaattggtagtgcatggtaaattagtagtaccttacggccgtatagccccagcgtgactgtccatttccaccagaattcatcgcgacgcccatttcccctcat

SEQ ID NO: 154178 - DNA, 281 bp, Zea Mays
ataaaatacccttgttgtcctgacgaaagcatttatacttatccacgttttggttgagcatttccttaatgatttgaacacccttgtcactaagttgtgccacgattatctgctcctgtaaggtcggctcaactgagatataatccagagtacctggcgaaaccacttccatgttcagcttgcgcaactcgtcgcataaagcggtgacctgagagtctatggttagacagttgcactgggccttacgactcaaggcatccgccactacatttgccttgccc

SEQ ID NO: 154179 - DNA, 458 bp, Zea Mays
aatggaatttctatgaattttacaagtttctagaattgtttttgtattaaaaactaaattctataatcattttctcggtttttaatatcccctggactaggcctcgaattccagaaaactcaggggtctctacgcaagaggtacgagacccagtgcacagtcagataggatggcgggttgatttgttatttttccaggggctctgacaaaaagtacccacgaaggggtatcaacggtttctgaccgcccgatcgcaagtgaacggccccgattagatccacacgtggctgaaacgatacatactctacaccgtcggatctgagttcaacgatcgcgatataattatgctagatctaacctcgtccattagatctagatcgacggtctgattttaacgtggtgaaggggtatccctgaatctaatctcagccgcccacgcgatgatcaacggacgcgac

SEQ ID NO: 154180 - DNA, 766 bp, Zea Mays
taatattcgggcaccaaggctgactttcgaaagcatagccgaggcggaggccaccagactagaagacatcgatgtgctagacgaagaatgattgggcacagtaattcagtcggctagataccagcagaccctgaggcgctatcatgataaagctgtgagacaccggtcctttgcagtgggagacttggtccttcaccgaattctaacgggggaaggatggcacaagttatcaccactatgggaaggaccattcaccgtatcagaggtcactcggccaggctcatacgagcttactcaaacggatggcacggaagtggggaattcgtggaacatagagcatcttagaaagttttatccttagcaaggcctcaaaagctctcgaaggaacgttgtactctgtaatcgggggacttcatcatcaataaagttttcatttccaaaggaattcagactcttaacttccagctgaccttgatttgattggatttgaaatcagcacgcttacttgaatgagggtgaccactataccctactgacggagcaatcggcttaagtcggcgatgacttaagacggtgcaacatgctcacgctacctcggcttagagtgaccactataccctactgacggagcaatcagcttaagtcggcgatgacttaagacggtgcaacatactcacgcttacttgactcggggtgaccactataccctactaacagagcaatcggcttaagtcggcgatgacttaagtcggtgcaacatgctcac

SEQ ID NO: 154181 - DNA, 819 bp, Zea Mays
gcacagagcaaatagtgactgatagaattagcaaagagtgagatgtctacctggaaagcgcacactggaggtgacgatccaggcagaacggaagacggcacacacaaagtcactgaaatgacagaagaggtgagcacgtattagtcacatagtcataagcatatgaaatgtgaacaaatacatacacaaagagatatggcacgagacggaacgatcgataagtcaaaaaccgtgaaaacgacgtttgacggacaaatagagacatgggatgattggaattcaaaatgaggcacaaaacgatatgggattgagccgatacttcacgaataggtttatataggtcaatatgagtgaagtgtgtgcttggtttgaatttaggcgaagaaatagggttttgggcactcggctcggaaacgatcgtgcaaaacgagaattttggttaaatttaagcttgggatctcggattggtgtgaaatttggcaagtaggttactggaagtgtggtgaaggtgcctgaaaaatttgggttcaattggagcaagtttggctggtttgggcatttcaccgaacacttgttgggcgaggatttagggttttaggtatatggccatttgaggtgggaatgccctcccgaagaagctaagagtttgcagggatacacaacagagacaatagagcacaaatcaccaattggattcacaggatttctcagagattggaaggattggcaaaagggtggagttactgcctaaacaacagagaaacgagagagagagagggaggacagtgggttgctcaccgagggggagcagagggagac

SEQ ID NO: 154182 - DNA, 813 bp, Zea Mays
gtggcagccgtaacctgcacatgaatatatacctattaataagataagcagaggcatcgaagaggagagaactctgttcccggctgcgtccggtggctggcgctgcgtcgccgtgtaagaaccgcagacattcgtaaaccccagagttcttcgagagaggaccttgagcaccgggagcggtgctcaaccatcgaaatcccgctggtgcttacatttggtattcggagctaagctggagcccatgcacgagtacgcgacccgattccaggcaagaggtggaggtatggcgccgccgcggaatgaagatccgatggcgcagctgcttgccaagatcgaggagggcaacaaggagacacatcggcgcatggagacgatccagtcgtccatggcgagcgtggaggcaacagtgaaagggatgatgaaggaacaaggtgaatttcgcaagtggcgtccagaagtggaggcgaaggtggcggaggtggcagaggccttgaagacaattcaatctaaggtggatcaattcggtccacagccgctggagggcgatccttctggcgtgagcaaagcgaagggaactgcgtcgaccaccgcccaactgggggttccaccgatcgacgcgacgcaagggcaaaatcgccaccgcttcactgaaaatcaccggagatcgggtgttgggatggaaaccatccacacaccccctccggtcggaggtatgcaccctcctcctgaacgtacaccaatgtttatggattggggttcaatgggaagggattccagcgcaaattggtctcatctgtcgggatcgggtatgcc

SEQ ID NO: 154183 - DNA, 653 bp, Zea Mays
ggagttgttaccggggcatattgtggagtttgggacatcgaggatctactcgagccgtgtgtaagagatgtaatgtttgaggtattttagggacgatgtggggggggggtgcgctccgggagccgaagaggtccccgagccagagggggatttggttgtctttgaggcgtttttcactgtcagactttgctttcctgcacatcggtttgtcgtcgaagtgttgtgacgcttcgaagttcagattcatcagcttacgccgaacgctatggtggcactggcgaagtttgtgtaggaaactacttcgtatgatggggagccctcagtcgaggtcttcgccaagaactattgtctccattggatgaagaaggtttttggtggcaagattgcatagtttggtacatgcactttcacgccaaggactgggaaggcttcaggtgaggctatggagctcgtgccatgcaccaagaataaatgggggaactagtgggattttttgttttacgtgatgttggtggacattgaggggtttcttggactgcctccgtctattttgtgcttgcactgctatatcgcgttcccgcagtttaagctggaaaaagggggataaaagagaggacgccctttggcgcgaggctaagacgagcaacggtcac

SEQ ID NO: 154184 - DNA, 730 bp, Zea Mays
gaatccagcccggattcgtctacccatgacgacgacaagatccgaggagaaactatggtgttctgggcaattcaacgtggtctagttcaatcaactgagcctacaagcaataggagacctaagggacaatagaacatccaacagagaagcatgaaccaacctgaggagggctggccacagtgagagaccctcagctacgcggaaaatagatttggaggcaatgtgaaattgggaggctctggtggacgatcagaggcgagagctagtgcactaggtgcgtaataacctagcgaagctcactggggcagcaatttatagaatccatcggtggtggcgtccaatttgaaaaaggcgcgctggcggtcggagagaggggaagttcactggcacgagcgctatcgtgggtttcatcgtggcaaagcctctggcgatggacggactccctactacggttcactgtgatgtggtaatgttcctaagcacatggcacgggcggagaacggtgatcttcggtaatgccagcgcgaccgaccgaggcgggacacgacggccggtccggccagcgaccagattcaccccacattggatattttcaccccgccccaatgttatctactcttcccatggcacgaatctctagacgggcgcgaattgtggcgatagatcacaagcgtcgagctcatggcaccggagatctttatggtcactgtaccatggtgatcttcatcag

SEQ ID NO: 154185 - DNA, 648 bp, Zea Mays
atggctccaggctaaaatagtgatgcgccatgatcctggccgtcggttatcggatcaggggcccatgtgtcatcaccttcctccacatgcctgagcgcggcgacgctcgaggccgcggttgtgcccccccccccgccgccggagctagccatttggcgaccagagacccgatcccgacgctcgactagcacaatgcaaacaggaggacatagcgaaccaattgaggtacatcataccggtgttgaagtaggcgatgaccactggccgcggtgcaggcaaatctgcggcaaaggtcgtactccggcgagaaatttgcccgagcaaacagtcagaagtccacccgaagatggtgctcgcgccttccccgatcgacggcgacactccacagccacacgcggacaccgtagatactgccggagtttacgcccacagcttccccttaccgccgacccgttcacccccagatattctctcactcggtcgtgattgtacgccagggattgcggagatggaagagaaggcaagccggaaccccgttgcatcatatagggatggcacggtcgagatggatcaacggactctcgcgttttgttcacgcggtgacatcggcacgagctccacagatctcggccaggttcggaatgccgc

SEQ ID NO: 154186 - DNA, 484 bp, Zea Mays
gcccatctgtctgttggtttggaagctcgagctgtgtatctctattgcgttgacaacgtgggctcagtggtcggtcaccctgggatcagtaacagctcacgcgtaatccatggcggggagcgcgcatcgattgtgcgaagctcgggccacgtccaaccacccaagccctcggtccaatcccggtcgaccacataaagcacctcctcctacccgtccgcgcaactcgtggtgcataccgtgagccaccattaccgtgagaagagaggaaaggaagaagagaggcggctgcacgatcatctgggcgtctgggccatgggtgagctgaagtttgggtcggtgatcgtcgctggttcgcggtggagctgtccgcgggcgagccaagtagagtcggacggggaagtggtccgaattgcttgccggatcttgtgtgaacctggagaaccaccgtcgccatggattggccttcctcactgcgacaactcgg

SEQ ID NO: 154187 - DNA, 807 bp, Zea Mays
gtgattatatcgggaatatatttagtaatgtgacgagtagtttagaaaatgctagtttgcgtggaggatgtgttattaagacgtgagtgtcggagttcatatattagtggtcgcgccacattgatcgaagtgtctcgagtgcacgccaccatatggttgcatgcgagacgaggttatgcgcatgatgagttttgtaaaaatccactggtgttaatgttaagttgaggtttatttgtgcgtggaaagtaataatgtgttaaatacttagaactcttagtcgatagtagaaattgtcctggcttatatagagaggtggtgacaggccaaagtagtcatcgcttcctctatatcttgagtcgggtcaatacgcgttatgagttcatgatttagaaagtaagcgcatgatggtttcgagttagaggttagtggtttacgattcatatgagttggtcggtgtgcgaaaatacttgtgagtatgcgtgtttataaaaatgtggcagtgcatgttgtgtctcggattgcgataataataggtaagccgacgtgtatgttatttagcgggctatgtcgttgctctagttaaccgaattgttagatggttgggttaagctcgtggtcacggtgaattgctcgttgtggtctaaatgtgtatggttatgatcgcgggtaaaaggtagtagtgctcatgtgatgtctaatttaaaatgcaaattattgtgtgaagagcgcattaataaacatatatgtatcgggtaaggttattgtgataaatgtgttgtcgattgtgtatggcaattctaatgcgcg

SEQ ID NO: 154188 - DNA, 622 bp, Zea Mays
tattttcctttcacaatcgccaagtcccagagcgcccaaccgtcctgattctcgatgcacacacactcgagatccctgccgcactcctagacgcagtatcgggggcggagcaatgtcgagaggcgcaatggtgcggcgacgacgcaccttcttctgcccaccgaggtgtctctcactaaccggtggctagacctccccttttttcgctccaataatccgtacggtcgcgggcgccgatacttattcacccggaccccatcccgcgcaccgagctggttcacaatattgtgcctgctttccctggtgatctcgcggaaacccggtcaccgttgttgaggatgacgacctgaccgacgtggcccacacgtcagtgaagccagacaccgcgccgcgcgccacccgggtccactgaatagcgagcatcccccattacacacggattcgcggggatgccgacctcatgagcccaccaaccattggctcatccgggcacaatacacttgcatggaccacgcgggcgagagtggaaatgggcagaataggtggcggccggcccattttgcacacaattttgtttttctttttcttttctcttctatttcctttccttttgatttgaaac

SEQ ID NO: 154189 - DNA, 442 bp, Zea Mays
caacgtttgggttattttggtagcggcatagggcgtgctttgagtgctaaagaggtccctaagccaaagggagagctggtggtctttgaggcatttttcatagctagtcttcgattgcctgcgcaccgctttgttaccgaagtcttggcttgctttgaagtctagctccatcagctcacacctaatgccatggtggccttgacgaagtttatttgggtggaggctacgtatgggggtgagccgtcagtggatgtttttgcgaagaattactaccttcattggcagaagaaagtcactagtggcaagattgcatagtttgggacgtgcacgttcacgccgaggactaggaagactttgggtgaggttgtggaaattgtgccatgcgcgaaaaacaagagggggagttggtgaaatttttggttttaaatggcgatgaaggacg

SEQ ID NO: 154190 - DNA, 647 bp, Zea Mays
gtgaacgcgtaagacacaacctccaccttcgcaccacccactccctcggtcgaggcccccgcaggtaaccaaaatttgatgtgggacctcttagccttcacatcttcttcttccaactttcacttgtctccaatggccccactacttttgcccttgatgcacactacgtccatgccataggggaccttcatcaatccaaaaactcaattaacccaaacgcttccttttcgattttccaagctcttagccaccttgtggcccatcataggaccaacaagcttgatgaccttgagctaaatctatttaataaactttgcccctatcatccccttcaaatcagctacaaaaggaggccttcacacttgtctgggcaaactaggaaaatcaaggcagttcacctcaccgacaaactagcctcgactcaggggccatattccaacgaccatatactcttcaatcaaatcctagcctccactgaccatgaggcaaatctaaaggccttgtcatccaggtcatccttctccacattgaagtgagggaaggcaccataatcatacgagatcattgtactcacacacagccaccgctcatcttcctcatcccgcacatcgaactaaacgtttgtctagctgccccaccaatttttg

SEQ ID NO: 154191 - DNA, 632 bp, Zea Mays
cgctgacctcgtcgggcgtgaccttggcagggtatgattagatcattctatcgccgaccgatttagcgtttataatgaatatcctgtgaaataagttgttaagaaggagatctgtcaatgcatgcttgtgacttagttctgattagcgctcgtctaattagtctttttgctggttagtttatctcgtctatgatgcaccttttaactgtttccagttcctctgatggacacacccctgattgttttcagatagcatttactgttctgattagtacatgtaagaagtaagatacacctgtctcatgatgtcttgatagccgtgtcttaatggtcaactgccttcagttatactccgtatttcactatttgccttttagctgtaagatgtttaccatgtgttcttatccggccaatttaaataggatgtatgtgaatagaatctgctatccttagttgtcgtgatcgtttttatgctgagttatgcaaattttgcaatgatattggtgggatcataatacccgattttagtttagcgagcttgaagtttcatgtatagggtataacatatgtttgtttgggacttcatgtctgccccgatggcaggtctgtagtgcctgtgggatgaaaatgtc

SEQ ID NO: 154192 - DNA, 824 bp, Zea Mays
gtcgccgtggttattttgatgcacttgcgattggtcggggcacggagtcttgtggcgttcgcgggctccgccagggcttgtggaagccggatagggcgttcgcaagcgcggacgatcgagcggtgcagagggatttgtcgccggagatcgctcgcgctgtcgaaccgcactctgccgtggccagcaccgctcgggcatggatgtttggtgaggatgctttcccctatttcgcttttagccgcgcaatgtttaggtgcgttcgatgtggaattcggtcaccggtaggctgggcggtctcatccggcgggattcgggggtggagctctgcctcgccgtcgtgcgcagactgcctgtggtgagggaggaaagccgggaccgttgactcctcaatctacggtggagattggtctggggtaccgcttctggttgcggtgatctttaccgtcgatcgaccgatggagggattagggccgatcgtggtatggcttatcgtgggccatgggatcttgggtgtgtggccaagattgggagtgggcaatgtagatcgtggttgttggatcgcttatgtgctgtgcagatgagatcctagtgtaaccctgcatctcttctaatcggcgccatcggatccgtatcgtgcggtcctgattagaagccacatagtgtgtcctcctctgttgatctcggccataaatctagcatcgggtggctgatatggaataccggttcatttaaaggccaaacagatctgtgccatccggatctaatctaacgaccagaacggatcgataccccttcgctacgtcacatttgctaaagagtccctg

SEQ ID NO: 154193 - DNA, 318 bp, Zea Mays
ggagtattatcttgtaagatcgagacggtttgtctcttcaacttgttcgaaccttactattcatcaaatttgatgatttcacgttgtgctcaacggtcactgtagtgtgctcctatgtgaactggaccgaacgtgtatggtaagggatcgtgacacacactgcgacaaaacagcagatcatgcaccaaaagataagatttctgaacagtgtggatacctatgtgatttgtacatatgtaaggccggtccattctgtttctggcgtatcagtgtcacgtatgaaacctactcgcagacctagcggatcgatggccatgg

SEQ ID NO: 154194 - DNA, 514 bp, Zea Mays
gtttcggtcaacatctaatatcggaatatatgtagacaaggttggattgctattttgctctactaggtggtagtaatggaggatgaagacatcaccacgtctcaccctcaccaatgccatgtagagggcaccatgaggtcatgagccaccgcactgtcacagtgatatccaccatttggactcagctcctcatgatcacatgcaccaactactaggagtagacgatgttgatgcaagtgaacttagagactatagggtggtggtacattgccgtgctagaggaagacgatgatattgtctacctccacgactgtctagtggtcgccgcaatcctacgctctagccacctggcatactgaccagtctttgagagaggagaacgccatcaataatgtcactagcgattaagtagatccgtgttggggtccagcgagtgcgcaaggctaatgcacaacaacttcgtcagcgcgtgcgcaagaccaacacacatcaacttcggtatgagttcaaagcc

SEQ ID NO: 154195 - DNA, 398 bp, Zea Mays
caccatcgtctacatggctggataccttcacacccttgataaccaatagatgaccttgcctcccactgcactcacctaaactcccgggtggaaagcctggagcaaaaagtcagggaacttacaagggaaaaggcgtcccttcaagagagcctcgagatagcagaaggcgaggaaaccgatacccgtgaggcctaccgcactctgaagatggattacgacaagaaactgaagaagctcgcccccgcaagaaaaatccgcaagaagaccaaaagccaaggatgtcagactgagtagaaggaagaagcccctccagccctacctcctaccaggataagaaactcgtccgacactgaggaaatgtccctagccagccttgatgaccttctcaaggaatttgg

SEQ ID NO: 154196 - DNA, 1485 bp, Zea Mays
ttagtatctgccacctgaaagtatccagatatatcatggagaacactgtcaaatttacaacagaccaggtaaacaaaaaacaagctaagaaaagtaaaagtctgaagactaatgtcagtgtaaaaagcacaactgaaattatggatggccaaccctttccaagatgctaaaaatttcattcaacttttgcatcctcttaaccacttctgaaagaggaggtaagggccttcagagccgcaagtctccatgcatgaatatcaactggatttgcatgactacgtcagcatccctttctttgacttctgcaggtggtagatctctgatgagcaacatgcttgtctatttggtgggagatctccaatgtgccaccggactggccgtggcagggctgcagggtagagattggggcacaatgagccagtgacttggggagagggagccagagaggggcagcactgagagattcagagggagtggcagcggggggcagcaagcactagaggctggttagggttcggctgggggcgcattggaggccatgtaggtgggctggggtgttgggtgcctgtgactggtgggttgctcagctggaggagctaaaggccctgtttgtttcggtttctggccatcggaatcggcttttggcagtcaaaaaagtttctttctcagtccgcttatgtgagaatcacttctgtgaaaatcgtccaaatcaacgtgaatgcagaatccgccaagttgtcgtgatgggaggaatctatcgcttcctaaactctaaaccatgcagtccccttcatcttcctccatatgtaagccccacaatatctagattctcgtgacagctagattatccagtatccagattctcagaaaagctcttcaaaaaagctgtcccaaacaggcccccgttaggaaacttctgctgagacctgagagtacaggaaccaacaaaatggtcagtaaaacagctctcccgattttatcctgtatgctggattttttttcctgtttctgtttttcccgagaatatgagatacagacagtttatgcagtacactgtgccgttcagtacgagatttttccttcctgttttcatccctacacgcacaggccgtggtcgtagttgttgctactactggtttgctgctctcctaatgctatctcccgctcacctctttacctaatttccattagcttgtgcattgatcggatggggctgtgaagatgcggagggccccatttatgtgattaagtaggtcatgtgtgcagaagatgtgtatgtgtaggaaaattcttttctactcctagtagtagctactcccgcgtgtatatctcaatacatgtttgaagtgtttctgatatgatgttaattttgtaccaattgataatatagtgtcaggatttttttctcaaacatgcagtagagttgagtatcattatgttgagaagaagaagacggggataagaaccccaaagaacaacactcgc

SEQ ID NO: 154197 - DNA, 847 bp, Zea Mays
tgtcaagtgtgattcttcggactcaagcggtgttctcaagtgtgaggagtgaagagatagcaaccaaggtcggtcgatgggtttatttttagcgccgagttgaaattcaatcgtaacctcttggtggcctaaagttggggggcacagggcacgagtgcaccctcggttcctacacttgatacatttagtgccttttcaacagctataatcccaatatccataaaatagtttttaacatttctcaagtatcgaatgcactcatcggacacagcactactagacatatttgattcatgttgtgtcgaagtgtataaatagcatggtctttgagtgttctattcaatatggtactcgtgcaacatggaacaagtctagtgcactatagagatgaagtgcataatgatttacatgctctttgagtgcccatttcgctaggtcatccaatgcatcataggacacatccaatgacatattcggtagacactggactcgactccacagtggtcagctaaagattatgcatcatgtacgagcccaccacatatttagtgcacgtgtccggttccttctgaaaattaaaactgcactgagagcgctttctcatctcttctaagcatgtgtaactcacaaatactgtgtgtcgaatataacagagcatttttcaaagtgtttttaataaactttattttttttgcttgctttccattttcgcttcgtcctgactcatgagaggtgaagaatggctagtgcaaaatttgcagctaatcaagccctctcggtttggctcccctcatcccctggcagaattaatacaaccgtcagaatcagaagaacactgctactccgc

SEQ ID NO: 154198 - DNA, 877 bp, Zea Mays
cacagactactagcagatcttattatgctagtagcggatcttttttgtccacaaatttaaatactgggtagttaacactattatgctagcagctaaagtagaatggagtaagctaaaccatagtttaaattttcaaatcgatctgctattagtctactgcttgtctgtgcacatgtcaggaccaaagggggcggcatctgaactgagagcattcacaactctgaactttagcctcctggacagaggaaagttgatgattaaatacaaatgcgctcgattactaatgaacaaacttgactagtgcaatggtaaccactttctactgtgaaccttggcatcttgggtttgagctatgggagaggtagtttttttgtgtttgttgacatttttcaatcatttttgtatttttcttttttatttagatgtatagcaccagtttctctaaatcatttcaaaaaaattttgggggtgttgattgaggtgtaccatgatgttgtgtgtcggtgcaatttttagaactagtttaactattaatgtaattatttgttattttactaaagaataagtggtaaaaaaaccttaagtagctagaaaaatctaaaaacttgcatgtacacttcattttggtgtacaatgttgacaaaaaaattcaatttattatgacaaagtggtgacatacatcctccgaaaatgcatacatctatcacatagagcctagttactgagtgagagatgttcatgcttgtgatggatctatactaccactttctccaaattattttaaactttaatgggatgtttattgaaccaacctatgatgttgtgtgcatttatgcatttttcagacctagtttaccaattactgtaattatttgat

SEQ ID NO: 154199 - DNA, 737 bp, Zea Mays
tcaattaaatcatgcatcatgttggatttcatgttgtgtgcattttgtgacaacaatgtaaaaaaaaatatgttaatacccaaattagaatttaaatcctaaaggaaaattctagaattgaaacaagagaagaaaatgcttacatataagaacaaacaaatgtaaaataatccaaccaggttcctattggtatttgaaattatacagtggatttaagtatgaacttcacatttataaattcaaatttgggatttaatttcgaatttaaaagagaaaagaaaagggaaaagtaaaaatataaaagagaaaatgaatagaacccctaactgggcctcagcaccccatttcggcccaccaagaaatattaccgtgcagcccactccacttccgctgcgctgttactgtcgctgacatggcgggccccgattgtcagcctcgtctccacactgcaccagccgaatgcccaccacacgcgcctcctgcgtccagcgttggatgtgtcgctgtttgactgggccacttcccgggtcaactcctctctcgtgccgttctcttacacgtgggacccatctagccagccccttagtccgcgtgccacgctccttctctccgcggaagacccgtgcctggctggtggaccccggcgctcggatccgtcttcttcgcgtcaccagccgcgcggacttggcaaacgccacgctggaacctcgccgcgcatctcggaggcccaaccgaat

SEQ ID NO: 154200 - DNA, 1034 bp, Zea Mays
acggcggtgagcgtgctctccagcgagcttgtatcggccaggatgcgcaacgactgacgccctaactcgatcgacacctattcctacccgtggcgatcataatccctccattaattgcataaatccgggccagaatttgtctgctcacgatggcggtgagagccagagacaaaccgaggtgttcttggtgattcagtgaggtctagctcaatcaaacgggtctacgagcaacaggagacttaagggaggctagaacatgaagtagaaaagcttgaactaacctgtagagggctggccacgatgagatgtctcacggcggcgttccgaccgatttgggggaaatttgaaatttgcgagctacagtggctaatcggaggcgagggctggtgcactgggcgcgtaacaacataatggagctagttgaacgctcaatttatagtgatcatcagtggtggcgctcaatttggggaagacacgcgggccaccggagagagggggaggtcattggcatgagttaccgtggcattcactagagcaacgactcagatgatagacatgccatctattgcgacctacggcgatgtggtaacaaggtagtagcatggcgtgctcgggttaacggtgatcatcactgtgacggccacgcggccacgtcgcggtgcaactggatgcggtgatagagcggccatagtgccccaacttcatcccgtgccaaagatctttcaccccgagtcgttatccgaacgcccaggggcgcgaatcacaacgccagcgtgaatccaggcacggggtcaccggcagcgaggtccaatgcacttgagatcttcttcagtactgtaccatgggaaacgtcttcagtgcgcctgacggagcagatttgagagcttggttctccgatttttgtgtgacaacgtgttaatccatctacaacaaagttgttgatctataatccagctttgattttgctatagcaactatactcaaacaatcactggatcctactcaagttcgatctcaagttcacctgatttcac

SEQ ID NO: 154201 - DNA, 598 bp, Zea Mays
tcaccggtgcaaatcctcaccctcaaatccgccgtacgccgtggccaattcagggaggtacagcagtcgtggtgaccccaattgctcgccggagctcggcggatgtctctggatcgcaccgtgtcgtggatggggtctccgcgctgttcaaaccatcggtaagattgtccctgtcacgctcatcatgaccccctgctacaattgtactcgtcggatcagggtttggggcactaacgcagctgattggtcgggccacccattgccgccaccatggttgggggcgcctcgtcgcttggtggtcgtcgttagtgtgggtgatgtgcggcgaatcgtgcgccgtccgatccactttggatgggcgagattagatgtagggatcgtttttggcgagtaagttagaaccgttgagatcttgtatcgggcggatgtggttagtttgagtcttataaaatccagaccatgggatcttgatctcgcggctgatggcgcgtaccggttcagagtggtgctcgatttaatctgggcgtccatctctgatcgaacagtagatattcatccataccccttcgccatgtcggtttcaataaagagcccctgc

SEQ ID NO: 154202 - DNA, 1002 bp, Zea Mays
caacagaccgacatcttcagtatcatcgtcatcaaaatctacactggcctcttctgataaatattgtgcattatcctcttctatgttagtcttgccttttacattcttcagctacaaattaaaaacaagtagtaagtaacccaaaataggaaaaaataattatgaattaaataattaccctttctgggcatgttctagcattatggtctcctttcttgctgccacaaatgccacatgttcgtggtttcttcgcatttgaacgtggctctgaaggtggtttaaatctttgtggttgctttctcttccccttgcattgtgacatcggtggatcaaatatcacttttgaaagacctgttgtgcaagcgagaccttcacatgtttgtgtttcatgatcaatatccatcgattcaatttgttgctcagcaccatctaagaattcctgaaaataggtaaaagctccgcgggactttgatgccatcttaagtaacttcatcactctaggctttagtgtagcaaaccttatggtttgttgctcttcacttcccctgagctccatgctcctctctatttttgatctttttgccaatgcattagcatctttgcaccaccgtttcattatatatgtagttggcaagtgaaccatatttacatgatgcataaccttaatggcatgtgaacacaacaatccctcaaactcatatcctttgcagctgcaagaaattagttcctcaaatttgttgacatttactgtatatgttttcgggatcatattatcaatcattgggtggtaactaattctaacctcatatagggtatcattctgaatctctgtaatttctccaagttgggaattttttaaatgtaacttgaactctttcagcactttggttgtgtagcattgagaggcatctttctcaattcgatgtagtgatgataaatttggtacagcattgagacaagcaatatcctcatcactttctctttgccaaataccattaatca

SEQ ID NO: 154203 - DNA, 789 bp, Zea Mays
gttttagggttcaggatttagggagatgccctcgagacttgttgcagggatgtgctcgtgtcatgtagcggcatagacatgcgttgacttgtgccaggctcacgttgcacatggagctctctgtctgtctgctgcatcacagcgtgctcaggaagcgcgcagacctcttcacgagctctacattcctcggacgtagccggctacgagagcccccgaagtagggctgccgcggtagcaacgttgtggcttacgcgtgataagagtgggggctttgcgtgtcctttatgatccgctgattgacgtcacaggcgatggtgcgtgcgtgccctccgtctcggcaatgcttgagctcacgctcgagtttcacgcgctattgctcaatttggcagcgcgcgtcatcgagctccctttgtcgctcctgcatccggttcagctgcagctaggatccgtccgtgggagtgacattgccatctcgtgattcggtcataaagcattcgcgtgaggagtgatggatcctttcacttgagttcgtgttagaggatcccaattcttccataagaaggttgaggatcgactccgacacatagttggccgctgacacgaactcgatgttcgtgggagttggcataccgtgcggtagcgctgggacgcttcccgtaaggaccttcgaggagagcggtgctcagtcggagagttgtgctcacgcattggcgagcgagacttggatgaggcacatgtcctcctaggacagtcggggtcccataaaagcgtgaacttggcgccacatgc

SEQ ID NO: 154204 - DNA, 476 bp, Zea Mays
ataagaagccaagggatagagccaagcgcgaagtgtttctacagcatgcacgaacttctgtatgagacgaaggccatgggtaaagaacagtatcacaacaacttcggttgttatggatttatcgcccatcccaacgcaagccacctagtgccaacatttcgaaagagatggctcggaactttaatggaagaatggttttatgtgaagaacgacttgacagcgagggaggacatcaaggaggttagcatgcaccccatatggtcccgcttcggtctccgaaagccgaatgttgaaattgatgacgccgccgaagcgtgtcagaaggcgtttggtactgtctgcttgttcattgctacaagagatttaattcaagagcatatagcattcagagtatggccgcttgtagagagttgggaaatgccgaaggagaccatcaccaagtctaccgaaggtgaactggtccggctgaagtatac

SEQ ID NO: 154205 - DNA, 751 bp, Zea Mays
ccacaatccaacggagtagtcgagcgcgccaacggcaagatttttagtgcaattaagaaaaggctactcgacgacaagaaaggcaaatgggcagaccaactttccgaagttgtatgggcactgaacacaacagaatccagagcgatcgagttcacacctttccgcttgaggtacgaatctgaagaaacgaagccgcaagagctaaagaacggatccccacgagcaagccccacagccactcctgacgtcgatgagccaacctccaaggacctcatcaatggagaccgtgtcctcgccctagaggcattgaacaaataccaagtgcagacgaaggcatggcgcgacaacactgtcatccccagagagttccaaaaacgagacttagtcctcaccagaactaccagaacagagtctcgggacaagcttgaacccaaatgggaggggccctacatcgtcaagaccaaaacatccccaaacgcctaaaggctcacttcaccatccggtgaagacttagagcactcgtggaatgtggataagctacgtaaattctttgtctagtctcaaggcctcagcgcctttgtaatttttgcaaacaataccctagtcaggcccgcactcttttcctcctagggggtgaggtttttaacgaggcgaagccatgtaataagtccccccataaaaaatgtccaaaacagcattgcggccgtggatgtccaaagagaccgcaaaattggtcttcgacattcgacgc

SEQ ID NO: 154206 - DNA, 427 bp, Zea Mays
gcttgaagtatatctttacccagtcagagctgaatatgaggcagaggagatggcttgagctgattaaagattatgaattggaaattcattatcacccaagcaaggctaatgtagtggtagatgcgttaagttgcaaggctttctgtcattgtcttacaatgaatacttctgacattacgttatgccaagaaatggagaagttgaacctgggaatgattcaacatggaacttcaaatcacttgaagcttgagtctgtcctcctgcaaaggataattgatgcacaaagagagggtgagggtatgaaacacattcatgggaaaatggaggttggtaaagccaactgcttcagaagagatgatcaaggtgttgtatggtttaacaaccgcatagttgtgcctaagaatgatgagatccgccagcaaatttt

SEQ ID NO: 154207 - DNA, 663 bp, Zea Mays
ttctggaaaggttgctgcttcggccatcacagctgagccgaagggcaagaagatgaaggttctgactcaccggccgtgatacctgaatttggtgaaggggcttcttcagctgccgagacaaaagaaactgttccgtttgtgcagagcactaaagagccggctgtaatgccgaagttactttcagtcaagctagttgagacgaaggctgataaggctgaaaggccaaaaattggagaaataaccaaaatgccagagattttgagccctccaacggaggcaacagtgccaaaggtacaaaagggttctgccacaactcctaagaggagaaggatgccgaatgtgctagatgttgtgttagaaacaacaaaaaccttgagtcctgctcctacaaggaaagttgtcgaagcttccaaggcgcaacccgaagctgattctaagcaggcagaaatcgaagctgcaacaattcaagctgaaaccaaagctgggccttcagtgcccaccgagatggagcatgttgaccctaaggaaaaatcaacagagcggattgtaactaaaaaaatcgaagctcctggtcccaaagcgtcgaacaaaagtattgactacattattcgtcatgcttcgggaaaggtactatcccaagaagagatgttagaagcgcaacac

SEQ ID NO: 154208 - DNA, 742 bp, Zea Mays
caggagcccaaccagtgcaagttcggccatatcgctatgcaccagcactcaaaacagagatcgagactcagattgcataaatgctccaaaccggcatcacacagcctagcaccagtgccttctcattaccggttatattggtcaagagaaaggacaacacctatcggtttgtgtcgactataggcacttaaatgctatgactgtcaaacccaagtttcctgtgcctgtgatcgacgagtttttggacaaactccacggggctgcatggttctctaccttggacctgcgagcaggctttcatcaaatccgcatgtcttctgctgaccaacacaaaacagctttccaaacccaccaaggccattatgaattcaaggtgatgccctttggcctttctggtgctcctgctacttttcaaggggcgatgaaccaaactctagcacctctgttgcggaaatcaatcctggtgttctttgatgatatcttaatatatagccctacatggtctcaccatttatctcacctggaatcagtctttcagctgctcaggcaggacaagtggcagattaaactatcaaagtgttcctttgccaaacaagaaattgcttacctcagacacgtaatttctatacatggagtgtccatggaccctgccaaggtttcaatggtctccacttggccaacacccattaattgtaaacagctttgcagcttcctgggtttggcaggatactacagaaaattt

SEQ ID NO: 154209 - DNA, 602 bp, Zea Mays
gtaagttccaatgggagatatgccctagctcgtgagatatgctggtgccaagtcaagtatgtcggcattgttcaccagtgacaaaaccgatgtcaaaccatgtcaaacgacctcgatttgaattcaaatttttcagagaggtgccttgggtgatttgggtacttttttatatttggtccaagtggttttggtgccagcacaaaggtgaacatctttgatctttggtctagggtggttttggggacttagagaaatttttgatggctctagtgtgcttcccacttgatgtactaatttgaggtttttgttgggcctttttgcaatatttttcttactagatttttgtagctttactaatacacttcatctttagtcaaggttcctttttatgttttgatcatttgcccactctttcacctttaatcccatggttagggtttaagggcttaagaaggagttagagttttggaatcttgtttgtgggtgaacattatatgaaggatagggttttctctcttatcatggtaaatgcttatcttgaccatgcttctacaactttgagttccttccctccccattttatcatatagtttgagcaggac

SEQ ID NO: 154210 - DNA, 1023 bp, Zea Mays
acctgaaagccttttctaccaaagtccttgatgctgcatgtacaccacactgcctggcatgaatcccatctaacagttgctttccaatagccgagtgaatgcacttcatgaggacacctcctgcacctcttctgtacagtagaccccctataatggtatagtgggccgactgtcttgcaatatgttctgccgtagctttgttatctggctcttccttgttttttatgtatatgatgattagctctctccactcattgggatctgcctcttcctgactcagaacgtggcattcctcattctgatctatggagacgctcagttgttgtatttcttggacaaaaaccccaggtggaacttgagcccgactggaccccagttttgacagtgcgtcagccgctgcattgcgatccttttccacatggtggaattctagtccctcgaatttgttctccagcatccgcaacgctgcacaatatttgttcattgagccagtcgagcaatcccagtctttgtttacttgacttatgaccaccagtgagtcgccgtacaccattaatttcttgatgccaagtgaaacagcgatgctcagcccagcctgtggaccagtgcttcgtactctgctgcattattggatgctggaaataagagctagagtgcatacttgagttgttcacctccgggagcaataaagagaatccctgcccctgctccttgcagtctctgtgagccatcgaagtacatcttccatatttcagtgacctcagggctttccaggacctggtgctcagtccactctgatatgaagtcgaccagtgcttgagtttttatcgccgtgcgaggtccaaactctatatcatgagctccgagctcacacacccacttggctattctcccaacagcttccttgttgtgaagaatatcgcctattggaaatcctgtgactactatgactttgtggtcgtcaaagtagtgccggagcttgcgagcggttagaagtaccgcgtataacaaattctaaacttg

SEQ ID NO: 154211 - DNA, 1038 bp, Zea Mays
gattcgatgtacaaattcactagttgacaccaaaccccatggcagcgctcgcgaagtacgtctgggctgtttcctcatatgacgagtagcatctatacaggtcttcgcgaagaattactatctacactggcagaaaaggaaaataggtgataagattccacagtttggatcatgcaccttaacgccgaggactaggaagacctcggctgaattatcgagattgtcccatgtgccataaataagtggggcagttggtgggaattttggttttatgtggctcccggggaagtcgaagggttgccaagtttgccccctgtcatcctgtgctcgcatggttatgtggcatttccacgttttgaggtggcagaagaagacgaagacgagggggccctttgatatgcagcccgcttgagtagtggacgtgatttggtcgacgagtttatcgcctctggggtgtggccactggcgcatggttgggcattgggcgagattaccccctttgaatgccgacattgggtggccagctggtgcaaagtcctaccttcgccgtggacctgcgcggccgagatgcggctgcgtttgtgcgtgaagtcgaggccgaagcaatcaagattgttggtaaatacgcgccgaagacagaaacattgaggagttgggatatccgcggttccaatgttaggttgaaccatgtgtttgagctgaataatttgtcgtatgattcttacccggagggagactccggcgacactgctgatcactgagggaagcaggtaaagtcctcggtcgatgaaggtccctcaagggatagggctccgggtgcggctttcagaaagagaaaattaggtacggcgggtgaacagtcagggcggagggcaactggttgttttggttgaggaattgctagaaacgtgcgtggctcccagggaattgatgtcttcgcctgaactccgggaaacctctttgcgaatgctgaagattacagggggttgatggcctaggaatgatccgataccctgggcagctagcgaagattttttt

SEQ ID NO: 154212 - DNA, 517 bp, Zea Mays
gtcagccttcccagagctctagctttctctcgagcagaacaggtactcctttgcaatcacacacacgctcgttggacagtcacaccggtcaccgtttgccacctgcagtgctggtaagaaccttgtaagagcggggtaagacacttcataatttgtattccaccaccaccaccctgagagatagttgtagggttcacattgtttgttgcctttttgtctctattttgtgcatacaatgacaagaccaaagaattaaatggacaagccaaggggcctaagcttaacgacgatgagtgtgtctctcagctggaattgaaggagatgatgcgcgcgatgactgaggcttttaaaaaataccaggactctacggtgacatcctatgagaagcttgatcgacaagttgctgaacttgttacacgcatggacgtactggaggctcgtccccccccacctactccagccccagctcactctcctgtggacgatgacgacgatgtttatgcaccactgcgacaac

SEQ ID NO: 154213 - DNA, 502 bp, Zea Mays
tattacagcatcatgggtagaagcacataatcttccaatcactaccatgtcaacccccatccaaattgactcagccggtggtagaattcgagccgatagcatttgcttgaatgtaagtgtggaaataagggggataacatttcccgctaatctcatagtaatgggtactcagggaatagatgtcatcctagggatgaattggctagataaatatcaagcgattatcagttgtgataagaggataattaagttgatgtccccactaggagaagaagtggtagccgagttaatctcccctgagccaaggaaaggaagttgtcatcagatggctattgatagcaaggagccagattcactcgagattatcaaggttgtgtcagaatttctagatgtgtttccggaagacttaccaggcatgccaccagagcggaaagttgagtttgctatagagcttcttcctggcaccgcccccatttctaaaagagcctacaaagtttctgga

SEQ ID NO: 154214 - DNA, 918 bp, Zea Mays
ttggtggttcctgggtggatggagtaggatgagttgtgagcttcctcgagcaggacttctcgtgcctccccttttggtacacatagatgattcttgaaccaaagggctccttgtccatttgtcatgaggtccgaaagttattctttgcgagctttttccacaagtctcattgtctctgagtccaggcgttgagctttgcatatgaggtcttctagcattggtttgacttcgaggctgccattgttccccaaacatgcattcagttgagctgattccttcttccaatcttctaaaaagttggttccctttatcccgaaaggttttcggctgagggcgtctgctaccacgttggcctttccggggtgataatgaatctcaaggtcaaaatctttgatccgttccagccatcttctctgacggaggttgagatctggctgagtgaagatatacgtcagactcttgtgatcgaggaagatgtgacatttgttcccaattaggtagtgcctccatattttcagggcatgcactatggctgccaattccaaatcatgggtgggataattctactcatgcggcttgagtaggcgtgatgcataagcaatgactttctcgttttgcatcagcacacaccctaagccttgccttgaggcatcacagaagatgacgaaatcctggtgtatatcctgtagtgtcaaaacgggagcgattgtgagcttctcctttatgatctggaaactttcttcgcacttcggggtccacacaaacttattgtccttcctgaggagttcggtcataggtcttgctatgctggagaatcccttgataaagcggcggtaatatcctgccattcccagaaagcttcgaacttcactgacgttggatggctgcctccattttgatactgcttctaccttggaa

SEQ ID NO: 154215 - DNA, 699 bp, Zea Mays
gatgaaaattgaagaagcatcggggaagtctcttgccaagtcggaactcaagaaagtttgggttcagttcattggaattcctcctgatatgttgcagttcaagttgatttgggcggtaggttcagttcttggggtgaccaaagcggtggatatgagttttacaaacaaatataatgttggtcgtcttcaggtttgcgtgcttgatcctagcatcattccacaatttgtggatgttgtgattggtgattttctatacgaactgcagttccgggtggaagagaaaacgttggaggataatcctgtgccgatggatatggatgattatgatagtggagaaaataatgcgaactcatcaaataataatgccccagataatcataaagggggagctgctcctaatgtcattgggtcagctagcaacattgaaggggaaccaaagaacaaggatgtgaacgaaaagaaagtggggctgctaggagggcaagagacagaggtactcatggacagtgagatggagggatccgatctggtaccaggctcaggtgctccagatttgtcttttggtgatggggccgtaattagcaagatttcaagattgttaactcctgaaggcttagcacttgcggcagtaccggaggcagtggttggctcctctgtcatgaagagaagtaagaggagagcagcatcaagcgcaggtga

SEQ ID NO: 154216 - DNA, 942 bp, Zea Mays
ccttccacgtgctcgccttcgcctgcttcctcttctccagcctcgtcgcgctctgcctcaagcagctcgtccgcacctaccccgcgccccaccgccgccgcgccgcctccgcctccgcctccgcctccgccgccggcggccgcaccgcgcggatcaaccgcgcggcgctccgcgtcgggatcctcgcgtccgccgtggggtccgtcgccggatgcggcttcctgatgatggccctcgtcaacgtggtgcaggtgaagctcgggcgactcgggtgcggcgccggcggggccgccgcctgggccgccgtcgtgccgctcgtcaccctcgtcccttccgccatgctcatctacatcggcaccgtcttctacgccttcacacgctagtcggtggcggatcaaggaacactctgaccaaagcacccgtttttcgatcagatctttatctgtgtgatccctcctcagtctttcttgtgtgtgattggtggtgatggcgtgagagaacttccaggggggaacaatgcagctgacttttgtagatttaagatatgtaaaatccatgcgatattatgattgtgttttggagttttggagcaaagtgaatctgctgtggttttatctgcaattggcctttgtatttgcacttgagaagttggtcagatgtgcctagaatctttaggtccgaagcaatggtgagatggagctcagctgctggttggtctctcaacttgatatgaaacaattgtcccagatctcaactactgactctgtagcaccctcaggtaggtttttcaggtctgagtttgtcatgtactatctgtattgtgagcgtggaaggtcgcagcatccgcatttgtcaagcgaaacttcgtcatttttttttcggtttctccaaatgcacttcccccattctactaggccaatgggccaacaagtcattgaagac

SEQ ID NO: 154217 - DNA, 320 bp, Zea Mays
ctcaagctcgtcagaagagttatgcagacaagcgacgacaacccttgtactttctagttggagattatgtctacctgaaagtttcaccgatgaagggtgtatcacgtttcgggattaaagggaagcttgcaccccggtatattggtccatttcctggtcttgaacaatatggaccagtagcataccgacttcagttacccaaaaccttgtctgcagtacataatgtgttacatgtgtctcaattgaagaagtgtcttcgggttcctgatcgaaccgttgacgtaacggatgttgccctagaaccagacttgacatattct

SEQ ID NO: 154218 - DNA, 437 bp, Zea Mays
ctcggtgagcagcctcctttcctccctgtcttctctctctctctgttctctaagttgtgcactcccctatttccaccctttgtgcaatttttccaatcctgtgaatcccagtgaatccaagttgtgaaatgtgtttcccttgtggccattgagtgtccttgcaggttcctagctccttcgggagggttttcccacctcaaatagccgtttcaccgaaaccctaattcctcgcacgccacgtgctcggtgaaatgcccaaaccagccaaaaatgctccaattgaacccaaatttttcaggcatcttcacaacacttctagtaacacttttgccaaatttcacgccaatccgagattccaggcctcaatttcactcaattcctcgttttgcgcgatcgttttcgagccgagtgcccaaatctctttttcttcacctaaa

SEQ ID NO: 154219 - DNA, 411 bp, Zea Mays
attagtgttgctaatgcgccgggcggaattactggtcatggcgccgccgtggaagaactcaactccggtgactggccaggtcggggagcgcgacgggagattgtgtgctgtcggatccagagcgacggttaggatcagttcgtagcataccctttcgtgttacgtaatctgggccatcgatctgatgttgtgcggcccagatcaaccttatagttattgaatcacaggaacggatcgtgtccgtagatccgtagatgtgcgcttgggatcttgtgtagacgtggcttgatctcggacgatgatcccggatccaagggcctgggttgcgtacaggtataggcgctggcagatctaatcgtggacgtaggtcttaatccaacggctgatcgcggctgataccccttcggcctg

SEQ ID NO: 154220 - DNA, 344 bp, Zea Mays
ataaaactgataattcctgagagcacccagaacgagacggagatgtcgctcgtgctctgcctcggtctttgaataaatcagaatatcgtccagaaacacgaccacaaagtcgtccaagaactcatgcaacatcctattcattgcttccataaatcggcaggggcattagttaagccaaaagacatgactatgaactcgtaatgcccatacctggtgcaaaaagttgtcttctcaatatcctcctcacgaatcctcaattgatgataaccagagttcaaatcaattttggagaacacctgggcacccctcaactgttcaaagagaacctcaatacggggtagcgg

SEQ ID NO: 154221 - DNA, 1260 bp, Zea Mays
attaaatgataaactaattttctaactgttttcaagtcaaaacagagacacaaaatgatagataatattgttacaagattttagaaattggaatggctcaatttggagctagaatgaattttctatgcaataaacaagttttaggaattctttttatattaaaaatcaatttctgtatctatttacctattttatatgctctctggactgggcctcgaaatccagaaaggtcagggggctcggggtaataattctaaggcacagggaacagcaccaacggatggcgggttgatttatataaattccagggactccttagcaaagttgcagcgccgaaagggtatgatgccatctcggccgtcagattagagatagacgcgttggatcagatccgctcactatgcgaacaggtatgcatcgctgaccattagatcaaagatctacggccatattctaaataatcgtgctccacccgagaccgatcgatcacaatcgaacggcttcggtctcacgcgtgaagcggtactctgggtcttcatcgctagcgctcattttagatcgggcggacagggttcctttactgaagcccgattgaggatgcggcggcgccgccaccattcatggcggaggatcgcccggacttgtgcgattcggccacacgacgctcccattctattgtggctcggcttaaacggggtacggggtgatgcggaatttacaggtagggaacttaccgcaaatggacgacgggttggggtcggtcacggtgaagtgcggatctgagctcgccacggtcgtcggtgagcaatcgcggtctccctagtcaccgggctcacccaatctcgccacggacgcccgactggggtactagcaaaacacccccgccccgtgctgagtccctaatggagttaggtccgggaatccacagcggcgacggacacggcactaggctccccgaagcagctggatttgtgtgcaacgagaggagggtgaggattagggttaggcgtatggtcttatacccacctgagatttggtcaaggcactagcttcactcctggaacacggcggattcgtcggaggtcgttgcagcgtgaaggttgcgcatgccgccaggcgtggggaattcgttgaggagagagaactgacatgcctggaccacctgccagagagcggaagaaggagcgagcgcgagtgagtgactggacagtggggcccttatgtcggcgctaggttgccaaaccacgcgcacgagctgag

SEQ ID NO: 154222 - DNA, 668 bp, Zea Mays
ggcaaagctatactgtacaaaagagaaaatgggcaaaggaagatgcacaagcattaactgagggtaaatctattccatttcaagacatgccagatggtcgtcataaggattgggcaagggtgaggaatccttctggtgacgtgaacataacagagtcgcatccaatcataaagaaaattgtaatgttcctctccacacataacttgtccatttaattttcttaccctatttgattcacacataaaactgttttttcaggtagatgtaaatgaaaagtcagtagctagtacctttacaccattttataatatggacatacttgcaacagcaatagggagtaatcatccagggaggacaacaggggtgagtgcttatgtgggtttagggatgggtcttgctcaaggtgatgggcactagtaagaagaaacgtaaaacaacaaaagaatatgtcaagaggattgtggatgagtatgaggtcaagtttgagaaactgacagccatgtgtcagagtatggagcgtcgattaaacaattctaagagttgctcatcatcaaaatttgttgatacaccagaccatgcaacacatcattcagttgactcattacaagtaacttcatctacttgtagcacatatttgtggtgatacaatgatgttactctggtgtctg

SEQ ID NO: 154223 - DNA, 555 bp, Zea Mays
aaaaaattaaactatgtaaaatggcatgaggaactttccttcaggtattagtcgaaatatcgttgcagtgtcaatgttatgtgaaatgtttatagcatatcacaagaagcactccaacactaaaattatcatcaatctaccttgggcaaacaacaaattcccccataactagataactaagtacctcactgttataaagagacttgatatcggaacaatagttctgagataatgaggcatttgaactttccttgaatagccttttgtctctaaaggattgaggccagcataactgagcaaagatggtgacaaaaagaaaaatacaggtcccagccaaaaaagtgaaaaggttgttcaagtaaccctgcataaaataaaatatcatgaagagtttgataaatatttaaatgagtaaattttgaccaggaaggtatcagcttacattgttctttttaatctttgacagatctggattccaataaggatggaatgttttgcctggtaatgtgaattgatcttcaaagtacatgtctagaacgttccctagttccacct

SEQ ID NO: 154224 - DNA, 821 bp, Zea Mays
ggcggggcgaacctgatggacattagcgactgaactatgtaaaagaatgtggggaactcgaaagaatgagaggggaaacgaaccaggggaggagaacgacggcggtgaatcgatgaagcgcggagattacggtgggtggaagcggtgggggcggtcgtcgatggcgatcgcaggagcgaatgacgacgatggggaggagctgatttttttagggtttgggtggacccgagctgaattaattgaaaggggtttgatgggtctggctcgttgaccatattggctcggtcggcccgcgggggagcggcgagggactgtgggtccactagtcagcgcacagtcagttggaaggtttggttactgcgtgttcataataagaataaatagctgtgcaaagtatcgtaaacagtttacaaaaaagaattaatcaagacccacgccaaagtacgtaatataataaatcccaattgatacgcagttgttaacatcgaattatacaaacataaatcccaaatactacaccacaccaaccaggccgcatcgctgtgtcaatttatgtaaccgttggagtcataatatgcatgtataaacgcggtcaattcccacgcgggacgacaccacgactccggagaacccacgcggaacgagcggactcaccgtggcagttacacgtttatgcatacggaattcgaatgaaacagatgcataaatggtaatagtgggtgcgcacgtacgacccaccttgactcagtgcatgcgcgcggtactccgaccacctgccacgtcgacccacgcccggcacacctagcctggcaggggctccc

SEQ ID NO: 154225 - DNA, 1046 bp, Zea Mays
caggtggggctactcggtcagccagttgcgtggaactgtcacgcgggcccatcggtcagcctcgcccggtactcgctcacgcggccgcctccttcgctccatcaatgacacgcgggaccgcgctgtcaggtccttcccttcccgctgaaatcacgcgcgcaacaaactccgcgcgagtcgaccgggaccgttgacgcacgaacccacctcgcgccggcttcaaatgcggacccaagccccttgaccctctcctcgccctccttttctccccagctcccctcgtctcggccgtagagtacgcagtgaggttgcagacgagcgtctccgccgccgctatcgaatcaacgtagacgccgcgccgagattggcgcgcctgggcggggaacttcgccgtgcctccatggtgctgtctgctacctccatagagggagataaccactgggtggacgacgatttctcgccgaagctctgggctccgccgcgctccatgggtagatttctgcgtcgcgctaattgaggtaacgatgcctaccccgagtttgccatgtcctcctccacgtgtatacccattgaatcgaagtttagggctcgattgcatgtgatcagaccgggcggcaatggcgccgccgtgccatagctctgcgccgccgcgctcaccgtcggggttggggggagaactttgccgccgtcggttcggcgatgaacggctaggattagatgttaacgtaccccttcgctgcgattcgtcatggcccttagatcgggatcggacggtgcgtatagggctttcggttgaggatcggccgcaccattgatttcggatccaagggccacgatggaatacctgttctgggtagcagtgatctaatcggcaccgtatagttttgatccaacggcccacatctaaggataccccttcgcggtgtatcttttgcaaaagagcccctctgctttccagaaaccaacccgccgtcctcattaacagtagactgagtctagggaattttctacgctagcccctggactttttgaaaaatgaggcccag

SEQ ID NO: 154226 - DNA, 342 bp, Zea Mays
ttggtaaatcgtgggattgaaggaggtgaacagggagatatcagagttcaacaggtactgggagttgctacaaaaatctgaagaaagatcttcacattcctgctgtcctccacttatgtgcacaaactgagatagacttggggtgggcagtaggggctcgaggttcagtccccctctacagaaaaatatcagttttgcacctgtttaagcctaccacagtagagtttttgtctgtcttcacttctgtctgtattcagtggattggttggatatttgtggacagtgagcccttatctgctctactctctatttgaataactgtacaaagtagatatttgagct

SEQ ID NO: 154227 - DNA, 684 bp, Zea Mays
actcaagacaatatatggaaatattttgcacaagaaagagttctacaactagtgatccttttctaagtcattgttagcatatatcaagtagatcacaaattgcataaatatatcatgaattctccttttaacatagtgcatatcaagagagatattgattggaattatatgaggcactaagaaacataagcgttaattgaagttattcaatgatcaaacaaacaacagatgccatcaaaagaacaacataggcattagatcattaagcaagcttaaaacgggagaatccagtaaatatgctactttaacattgaaggctacaatccttgataaaggtgacattaatttaccaagaaggattgatatgaagtagcatacttcatgagaaaattgttcttatacatgagaatatatgagattactaagataaagtgttagtctcaatgtaatcaagatatagcaatatgctccccctaaagacatgcatcaagttttgaacgaattggactcacttttaaagacaaatagggagaagcgttattcatcttgatcaaggcttacaaaatttgcaataaacaatttatgcctagtatcctcataatgaaaaagatttagaatgcttacaaccacaccattgattgttttgaagatctcattatccaagtaggtgttgttgctcttgat

SEQ ID NO: 154228 - DNA, 569 bp, Zea Mays
ccatggtgaccgcgtcgtaccatggccaggagcccataaccgatgacacgacaatccgcaataagtttgcatctcctaggttctatccatttccattctcgtattgcatcattccgttgagtagatggtggccaaagctcagtgtgtggatgctccggcgagatgcaccgccgtgggggcgtctgctccattctggcgacgacggaggaaggagacacgcctggtccgttgatcagtgaaccgacaaccatgatttgggtaaaggataacgtttcgcccaattaatcatgaaccgttgatccgcagatgaacgcaggatgttagatcgaggcactttaagatctgaaccatcagattctcaaccgagggctgagattaggctggcaccatatcatttcggggcattcaatcctaaccggtgattgatgatcaaagggttcatattagggtagggcatggtcatcggtcgaccgtagattcaaaatcaaagggttgtgggcgcataccggtttgatacgagatgaatataatctggaccgttcggctatgatccgatggatgaaatccga

SEQ ID NO: 154229 - DNA, 432 bp, Zea Mays
ctttgtcctgctgtgtgccttttcttttccttggaaggttctagaattatttgttataactttctcagaaattttctggctctgtaacacttgtctatacttctcattctcccattaatttttggagtttgcaagatcttttgttatggcgttctgtattaatgattttttggtcatgaatcacagatacatagtgactcacttctgcttgctgcatttttgagttcaacaggttgaaaaaatgcgtgctgctggactcatcaaaggagggtcactagaaaatgctatggtttgcaggtgaacaaaaatacgatggaaaattatatttgtacatttaacatcgagtagaactgcctattagagtgatcctagttggcctagtttttgaaggtttatattctgctggatctgttgtcacgttgtgaatataag

SEQ ID NO: 154230 - DNA, 353 bp, Zea Mays
ctcagaaaacaactttgttacagaccaatcaactggttgccagtgaaaatcgggtggaaattgggtttcaaatcgctcggtcaggcactctaatgatggctcccatggtacagtatctgatgaagatcagatcgaccgtccccctcgccgtcaacgaccctcgcgccatgattcccgccggtgaggtgattcgtgctcaccagtgtttggataacgctcggggtcacgtaaatatcgccgccgttgataggtccggccagtaaacaactccggccaccgtacaggttgccacggtcgctttggataagctcgccggtgactgtcgccttccgtccatgtgccacgtgccctag

SEQ ID NO: 154231 - DNA, 650 bp, Zea Mays
ctcatgagtctttgcggctcgtgctgatggtggttaccagtcgtgtttatgagtgttgggggtacccctaattacagtacccgacaaacacttcattgaatatgaatttcagagcacaaatggtagctttccatctagaattcgatgattttcaatgttctaggagttatcgattgaagttccatgcatctgggatagcctataggaccttggtcgggtgacctctgtgacaatgtaaggcccctcccaggaaggagataacttgtgctgcccttctctcgcttgtatccttcagagcaccaaatccccaactgaaaagattctataacgcaccttgctatcatggtaacatcgtagggactgctggtaccgtgccaactgaatcacgatattgagccattcttcttctagtgtgtcgatctcttcaagacgggttgcttctccttccgctatgtccttgaacatgaccctgggtgccccaaacacaatgtccgtaggaagcacttcttatgaaccatacaccatgaagaaaggggaattaccctagagtgctcggctgggttgggttcggaggctccagacgaaatatgggagctcccttatccacttcacaatgagattttcactcttgcgaaagacctttttcttta

SEQ ID NO: 154232 - DNA, 302 bp, Zea Mays
tggctctgtagtgttgtagaaaagtgaaagatccatacttaataaacaagtttggagtggtatggtctgcccttctatagaattgggagaaaaagggtggtgaacttggccctgtagttgaactgaagaagtttagaacagtccaaaatccctgaaaatatctcaacccactggtttctctgggtagttctggcatgcagcagatatggagagattgtgttgaaaggggggaagtgcatgacatgagtttatcaccccatggatgagtttgaggaggtgtaaaacctatctatttgatgact

SEQ ID NO: 154233 - DNA, 664 bp, Zea Mays
attaatttctctgattttattatgttctggactgggactcaatttcagataagcacatggggctgtttaacaaataacccgagactcagagcgctgtgctctggatggcgggttcaaaacctagaaagtccgagggctcttaagtaaactgtccccgcgaacgggtatcctgaatccctagccgttggatcaattttgcacgccccagattagatcgagaacgcacccgaaccggtacgccacgcagaccgtcggattagcgatccaaggctaggatttaatgcgctcgcgatctactcggatccgtcgatcacacaacggacgaccaccaatcgattcaactcaatgttttccataatctaatctgtaccgttcaatcaaggatggacgacagagggatcatcttcccctaccttcaccccaaacgcgacggcggactggactcacggcggcgcttcgccgtcgagcgcggtcaccgcaatacagtgccccaagacctaatccgatgggcaccctacgtagaggagagttgggcaaagggcagggaggtggtcttacctcagatttgcaacgatagcagctccgcccacgttgtagcgcggtcggcggaaatctcccagcgacggcgaggaattcccacgtgacgcaggcacatgaattcaat

SEQ ID NO: 154234 - DNA, 996 bp, Zea Mays
catgaatcaggcctttgcagcaggactcggcctgtcaagaccgtgcacactctaggtacacaatattgcaaatcagcagcaactaggagagaacccccctcatcgtcaagattacccccccccccccgcaacaaggtcgtagtggcaacgtgaccaggggcagaggcagagactgggacctcagcaatagagaagattctattgtcttttccatgatgaagactcaacacacccaactagaggctgccctgagacgaaagcaacaaaagatcgaatgaccagggctgtgccagctgacatccaaagagtcatcgcacatacatatcaaacccaacaatacaaccagcatctatttcaaaacggacacccctattacccccagtagaaaaaccccaaccttttttccacatcaacaacgccttcaacaccaagaaatcctagctctaccacctccaccacctcagcatccaaatcatcccctaccacccccaccactacctgagcaagaatacttcaccgaccaacccttcaggggagtaatccacatgatctccggagggtccagctccgagttcgaaactaaacgacaaaagaaagaccactatcaaagggtaaaccatgtagccctcaccgggcctgtcattcaaacgaagtggtaccatgtgccactcaccttcgatgcaagagatgtcaaccttcgtagtgcgccccatgcagacatactggtgataaattgtagaatcacagggtgggacctacacaaagtactcgtcgataatgaaaaccagacaaacatcattttcctacacgccttcgaccgtatgggcataaatcacagcctcaagctagcagataactccctctacgactttggaggaaaaggaaccttttcgctcgagaaaatagaactaccattatcagtcggcactacgccaaacgcaagaattgagcagatcaccttcgacatagtcgatatggtttacccatataatgcca

SEQ ID NO: 154235 - DNA, 696 bp, Zea Mays
ttacctccgaagccgggagggccccctcggctgcttcagcagctactatccttgaagtccctacagcaggcagtgtagcagccctttctaaaaagtacgacttcgactggtgagttagaatttttgctttcttcggcgtcggtgcaacagaagaattttttggtccacttttcctttaaccccctctttcgagcagggaagcagtaatcagggtaaatgaatccaatagaatcaaaaaccctgttcaatctttgttttcctcaggcaccgaaggcaacattcatggcttcgtcctcagccttcgtataggcccctaacaattcatcacttgttgcttcgatggcatcaagccagtcatcgtctggctcaccaaattgattcctaaatcgataagtatacttcaggtgaaccagatggctttttccggtatttgcatcagcttcagcatccttcaacatttcccatttggcagccaggggctataccttaaaggctatgtgctcctgcactaagtccctcgtgctgatgtagttgcacacagcattaaacgtcgctaggcatccttgagatctttttgtattcatgatggcaggccttctcaatccgaagcaggatcagataggccactggattacatccttaatatcgcttctttgactcaggtcattcttcacataaaaccactgcttcatccat

SEQ ID NO: 154236 - DNA, 480 bp, Zea Mays
ttccttatctcttcggtgcatcgacaaccatttcttgtttttccatgataagcgtgtttccttatctcttcggtgcatctacacccatttctaagtgttttttctaagataagtgacatgccgctctgatgcagtctcgtatcaaggttgtgcggtgctccgctctattttagtagatcttatattaagcgttgttgttgttaagttttattggttcttctatgtagtatcaacctactctttcatttaagcttcatgttatagattgattttatatggccaaatgtgaactgctcgcccaattgcttcattccgtaatgtccggctgcaacacgtgcaaacgacaactctagagatcgatatgcatctggcacactgtattatatgtcttagtcacatcatttattctggatggactcccttggagatcttgatccatgttcgcgcgtgtgagcatcgactcatagttatagatgcatg

SEQ ID NO: 154237 - DNA, 685 bp, Zea Mays
aaagaataaaaggattaacatgagaataaaagacttcattccagagttcataagcttcaaaattcacaatttctgtaccttcaaactgttgtatgcaatactatctgcgagatcggccttcgtcatggcgcaaaggccagcttcgagcttcggaaaacccatacttctggccatctcccggcagacggatagttctttgttgtccgggaggcagtacatgaaatcatctttgtccgtaccgttaaacactaaagcccccttcggatacttcagttcccgggcatagtgtttggcttcaaaaatttcttcttcagacaatctttttcccgcagcatatagaatgatataatcaaaatcttcggagagtgcttcgggagtaagggattcggcttctttggccgcacttttctcaaaagctatattagtatctggagtcattccttcggccctctactcggttgtggcaagcttcgtctcagcaggcactgtgggccctgcctcagtttcagcctgggttattgtagcttcaacttctatttgcttagtatcagctttaggttgtgttttgttagctttggcaaccttccctgtgggagcgagacttttggagtcggttgtttccaatacatctaatacatttaccatcctccttctcttaggagttgtggcagaactcttttgtgcc

SEQ ID NO: 154238 - DNA, 630 bp, Zea Mays
gaaccattggaacggagggtaggcacatgctaacgcttgagatgcccataggtggatcatggagaacatctgaacgcctctgtcctttctgtgttcaatccaaagtgtcattacggttgcggacctacttcatgggttccccagccgactatgcttgaggaatggaggacttgagaagaggtatggacactccttgagcaagtggtagcccaacaggcaaaaagctccgtgcgatagttcgagcctagcgtcagtcagcgtacgatttcgtcggagcacagagcgggtgtgaaagggaaatgtgtcttgataccctttctacacttgttttggtgattgatgaccatcaaaaccatttgagataactaggttgctgagttttgaaagtatgtactcgagaaataattcaaggaagatcaactctcaaactcagtaggtcacggaccgtctgggtcccaagctcggatgatcagtgataccaagcatgatttcggataggaactatgtcaaaataccacttgaaatacgaatcgtctgaaaagaagaagagtgtcgtcaagcaccatgtgcggaccgtctggcctcaaggcccgtaccacctgctcgttgaaactcagaccaacctgaaag

SEQ ID NO: 154239 - DNA, 807 bp, Zea Mays
ggggcaagctcgtgggtcaatatgccgaccccatataagctgcctggtccaatcgcctcgctagcatagctgccgcacttagagaccgaagaacatcgccgccgtgcaccattaaccagagagaaaaccaatagccgccgccgccgtgtgtgaaccttagattgccaacgaccgcgccctcgaagtcttgtccgggggtctggcgggttgtcgactgaagattttgcgttcatcccaggaaggaacgaccccggtggcggcctgaatttgtcgtcggagtttcgtgtccgccgcggatgtgctgtgcatcgcgggtgatatcaccgcctcgtcaaatctcggtatggcgccccctatccaattcacgagtcggtggatttcattttgcgtgattcctcggggtgatctgctcgtcaggctcgcggttagcgcgacgccggtgagggatccgccgctgccttaggcgcgccgccgtgactgggtgcagtgatagaagaaatgccctgcgccgttggatccgcgatggaggtctgcgagtagatcagcccatatcggttcgaagtcgaatccggaccgtagatcagatgatgtccggataggagtagatctcgggtaattaaatctggagcgtccgaattgatccaacggctgcggttgagtaccgattcagtagagtatacctctaatcctagcggtctataggagatcgggcggccagaaacagagaataccccttcggccgagaatttttacataagagcccctcggttttcctgaaaacaacccgccgtcctatgcgctgttccc

SEQ ID NO: 154240 - DNA, 546 bp, Zea Mays
gttttccccctttccttctctcagaagtcagatggaggttcgcttcgctgccaaaccagcttttgccagaatgaagatggtttccccaagttgctgagagcatgcacagttcgcctcggaatcagaagccagccagagtatgatggacgtgaattcgtcgagaatggcacaaagaagtgtgtcgtgactatatacattggatccagaccacaccatgtggaatggagtgtcactgctgctgggcacagattcaaagacacctgccaagtcgtcgctcgcaaggcattgagggccctgtgtcagatctatgaagaagaagtggccgacacaccgctcagattctttccgccctttcagagagactgtcccgtttggatggccaggatgcgtgcattggaagagcagcaactgcttgaggatgaccccacagtcgtgtacctcactgcatacctgctcaccattgatgcacagtatgatttcttggctcggcaccaccgtcagatgattgcccgagcagaagatgcagagaagtgtggcagaaccacc

SEQ ID NO: 154241 - DNA, 398 bp, Zea Mays
aagtatgtactatgtgcactaaccacatactagtaggggatgatatgatcatgcacatcacaatgatacctttgctatgttggagtagaggatagtcaagattcttttgatttagctctccaatagcaatgtgaagtccaattgaatagcttggtgaagaccaattatcaataagaaatccattcttcaccagtatgaatttgagaacccatttaagatcaagtgcacaatttgaatgttgtagttcacatgcatttgttccttcaataccacttgtatgtgagagaattatgaatttgcacggaatataggaatatcacttgtaaggatgataccacttgttgagatattggtccagaaaattcctttgtttatgcaagactgctactcacggacgg

SEQ ID NO: 154242 - DNA, 605 bp, Zea Mays
agggcggatgcctgacgctctgccaatgagccagtcactgatttcactgccagcggagggtatgcccttctccaagacatccgcttccaaaatcctacattacgtgttcgtgatgttaggatcgatggtaatcggttctggaccctccaacatgttgatttctataattctgtgattcttcccaagaagcaccagccaatcctacatcagcgatatattaactgggaaggatgtgaagcaattggtgatcccgagatgacacaggcattgagggcctatgagaggaagaggatgaagaacataatgacattccaatacgattggaatgatgaagttatcgctcaattctattctaccctttggatcaagctggctgatgaggaaagtcctaacaactttccttatctcaatttcaatattgaaggcagctggtataatgtgagttacaggaggtttgctcacatcctaggattttttgatggaaatatttcaggtgacaaaattaagattcatgactttcgtcctcccaccaaggatgaagccagggatcttcatatctctgagactgataaatattgggagtctaccaatctgcacaagttcta

SEQ ID NO: 154243 - DNA, 652 bp, Zea Mays
attggactgcagagtctcttttggttttcgctatgactccactttcctgtgatggagctcatcagatcggacgtatttctcaaagagctgatatagctcttggaagttgtatggtgggtctctggtagttacggtaaagctagcttgctcgaaggccgctaattgcataatggatcacaatcttatcgttgactgagggtagctgtgatttgaggaggaggaatttcttgtagttgtcgcgaatactctcttttgccttcttcctacagagggacaattctactaattcatcttactcaggcctgtagccttggaaatttagtaggaattagtcaagaagggtcatccatgagtcaatcgaaagtggtggtagtcttgagtaccatgtgagggtggggccttagagagatgatgaatgacttagccttagtggagtcgtctcctcccgaggatgcaatagtgacctggtataactcactatgtattgggttgggtctgtattattgttgtacttgggataggtgcccgctctatagttgtgtggccatggagaggcttggagctatgcagagaggggcctttgctcatcgaggcagtttagtccttagaaagcgtctgcatgtgggcaggcctatggaaatgataaacattt

SEQ ID NO: 154244 - DNA, 741 bp, Zea Mays
gcttgagatttcttaaacatgtcttgagtaagaatttctcccaatacttcggttggagaggtagtggtcaaatcgctccttactaacatggccacaatagtgtcatattttttcggaagagatctaaggaacttgtgagtgaaatccacatccggtacattaaaaccatgtcccttgagctcgttcactatctcatttaagcgattaaacatgtcggacacactttcatcttccttcatgagaaattgttcaaactttcctttgcatacatacaactttgcactcttcataattgtggttccttcatgaatttccattagctttgtccaaatctcatgagcggttgtgagatttttgatgcggttgaactcatttatgtctaatgcatcatagaatacattcattgcttgatcattggttagaatattctcaagatcattgggagacggttcatcttccttcaatacaagaaatccatctctaacaataggccaaatctttcccccgtagctttaagatgcattgacattcttattttccaatagtcataattgttcccatcaaaatgcggcggcttcccaatgtgcacattgttgttattagccattttgtccaactccgggatgataaaatccacaatcaatggagtccttggctttgataccacttgtaggatctaggacatcggctagagggggtgaatagacggttttgactaaaataaaatacactagacaaatt

SEQ ID NO: 154245 - DNA, 534 bp, Zea Mays
gccatttggatctgagcgagacatttgtagatacagtctatcataaaatacgggtgcatggaggatccatttactatggtggaagaacagtcgcagacatggtcttaatattaatcgccatgctgatcctgctcattacatgtgctgccctgccagctacttgttttaatgcctgactccttccttgataggtagctgttgggatcgtcgaggctttttttcattggacacaccttcaccatcggcctgccttttgattcaattggaaaatgctgctattgaagaactttagccgttggactcaaactctacttggatgtgagttgactgaaaccattcttgctgctggtttggctgattagagcagactaatacaacattagatgatgcattaaaccttctgttcctcctttgctagattacctggtggcaacttgcactattatttatgagctcgcgccgaactgtttgaatgctacatgctcatcagtacgaagtaaaagtcgtatgctaatctgatttctaagaaattcc

SEQ ID NO: 154246 - DNA, 400 bp, Zea Mays
atcaagattgatgagcttttagagacatgagagaaccaaggacaacaatcaaatccattgaaccaaatggatatgccatttagagataagttgataaaacaagcatcatgaccctcggagaagggggtatgagaatgaccagaaatgagacattttaagcaaatcaacatccgatacttgtggacggcttatagcagataaccagataatagggcagaataattaaaggatccagagattcagatgataaagccagcatgattcaccaggaaaaaggattaccggatccaggtgaaaggagaggtaggcaacaagatcagctgaatgatcaacaggaatgctatgaagttttaggggcaaggatttatggaaagaaacatggccttgatagggtttgtgc

SEQ ID NO: 154247 - DNA, 610 bp, Zea Mays
ggcagcgccgctcttactcactgcggtgaggtcactggagctggggcgggtgtaggctacaacagttccgaggtcgccggggttggccaggatcagcgaggagaacccggcgaacacactggtggggttctggccacgaaaccggggtgagagatgggagaacggtggagggagagctccgggcgggtcgagggtaactccggcgaggaatatcggccgaggagaggtggtctagggtgctaaggcctggactagctacggcagggtgaggggaacatcacataccaaaccaggggcacagggccgggctagttcggccagtcaccgtgcgggcgcggcgaaccgccgcagctgaactccggcgaagccaaattggccaagacaaagcggaattggaagaaaccgatcatgggaacagatgtctcacctcgggacggagctcggttggcttggtgcggctcctggcggactggacggtcggcagcgcggtcgcggaacttcggcgaagtcgagcggctagaacagagcgcgagagagggtgagcttgcgcgaaatgaggcaggggagcgagtgcgggtgtgggcggtgctcaaaagaaacatggggtgtg

SEQ ID NO: 154248 - DNA, 829 bp, Zea Mays
ataacttcaccatatgtgggtgtgaccaaatggcatggttaacacgaatttgaattagcacctaagttaaattcaaaatttgaattcaaatgaattaggaaataaaaaaaagaaaacagaaaataaaaacaaaagaaaggggggggtgaaactcgtgctgggcccaaactagatcgggcggcccatatactcgccttctccgcgctagcccacctggattttgtgcaccgacggctatgccccactgggcagcctcttgcccgcgcaagttccttcgtgtttcattggcatgcgggcccccttgtcggcaccttcttctccgccagaatcgcgcaccgcttgaccaccatctccgcgggcgcaacggcttgggcgagatactctcgctacgtaccttgacctgagtatatggataccgcgcaacgtcccttctaccccctccctctgcattttccctaattgctcgccaccaccactgcgttgccgcgcaccgagcgggtgagattcgccgccgccgtggaactcgaaaacacaagccctccagccaattgcgtcggtggggaggcttcttccaggtgaggtgaaggttcccttggcgctattggggggaaagcactcacgctttcgccttgaatttctcgccggagctggaattcttgccgcgtcctctcctcgccgtgtgctgcctatgtgtgacctagtcctcggtgagtacggtgcgcatgtagattcctttcatttgcgcaccgcgtagctcgtcctagattaggggtttgtggtctagaaggttgggttggccatcgtcggccatggcgcgccgccgtatggc

SEQ ID NO: 154249 - DNA, 586 bp, Zea Mays
gcggcacaccatgtcgagcacccactcagtctgggcatgctcgagatgaacttacaaggccatggtaaactatggcgacacaaagcacaaaccttgaaggcaaaggggcgcagagagctcgaaggcgaaagggcaacgcgagtgggagagaagcaaggcatggctgctactcaagggatgaacccctttttaaaggcagatttccccgctcgcgccccgaagcatcacgggcaaagtctcccccgatgcgcaccagggttcccttcctatgacacgggggccaggcctcacatgtcatacagctggcccaaagcgcgaagaaggtgaatcatcgcacaaggagcatgccaccaccccgcggtagtgcgccccttcatcttcgctatgaccaacggtcaagaaggcgaaccgccgcacaaggagcgtgctaccgcccccgtggtagtgcgtcccctcgtcttcgctgcaaccagcggtccaacctctggcatgggggcccaggcccacatgtcatgcacctggcgcgccggtttctgtgtgcggagaaggcgaaggtgaatcgacgcatggagagcacgccaccgcc

SEQ ID NO: 154250 - DNA, 865 bp, Zea Mays
tctgactgctgaagctgtcgttgctgattttgtcttcaagaatattcagccgttgaaagacagggcgcacccggcttatctgtatcgaggcctagccgactcaactcgggttaccaacagaagaattccctctacagacttggtgaaccgacttgagatgatccttagaggcaaggtgtcaaatgttggtgccccagtggcatactcggcttggaacctgcctcctcccaaagccttcaccctttttgtgttgaatcctcctgtcactgatggcagtttgggccttagagtgcggccctctgctgaagaagttagtgcctttggatcgcttcgctcggggagattcctgatgatgaacggcaggtccattttgaggtgcccctgaaccctagtgatgcagagataagcgctatgcttgatttgctggctgaggactcttctgacgctgctcctgctggggcatcggtagtggcgcccctcccagaggctgatacaactttggatactcagaagcctgccagtactcgcccgaggcgcccttgccgagctaatcagcctgatccttctgctgatgagcagaaaaagaagaggagacgcctccggcgagtatccagtttggatcgggacgctggtacttcggttcctgctgctgaagaaaagcttgtgactgaatttactgatgctgaccccaatgggtgtacccaatccgctgttgatcccaatgtgggtgctccatctgttgctgatcccaatgggggtgctgcctgtgttgctgatcccaatgggggtgctgtctgtgttgctaatgtggacgacgaggaggaagaagatgaagttcctttgtctcggaaaaacagtcggcagt

SEQ ID NO: 154251 - DNA, 754 bp, Zea Mays
cagaaatcaaaactctatcatcaggtgcgccggcctctaaggcgacctcctgacccgaagctcgtgctgctgccatgcaaccagaatgtggaggagaagatccgacgtgaacatccatggaagtatgagaaggagaacccgctcggacaccctcgggggctgggtcatagctcgcgctgcccacccgagccggatgatcaccggcaacaccctcgggggctgggtaatcgcaagcgccatccttggggaccgagttctctgtagcagccacctctaaggctgaaggattttcagccacttccatgggaacggagcaatccagatcagcctcttgactcctaaaaccgcgctccaaggtcgatgaggcacgagacgctgctcgggataactctaacccgacagcaggcacatcagcacaaatttccatcatcccaccatctgccggctccgacaacagatcttcggggaccatatcttcgagagtctgatcaaaatttgccagagacaattcttgcagaccaacgagagcagacaaagctggagaaggaacaccactactttccctgctggctatgtagcgccgactattcttccaaattaaggggatttcctcctcctcttcctcatcctcatcaataatatggacagtacacccattggggtcagcatcatcaaggtcacacccattggggtcagcatcagttgggtcacacccattgggttcagcttcagtaaaaattggcactggcacttc

SEQ ID NO: 154252 - DNA, 453 bp, Zea Mays
cgaggggaagaaaaagaaaaagagacggcttcggcgagtgtcgtgtttggaccaggatgctggcccttctgctaaagaagtaccgatggaactctttactggagctgatgctgatcccaatgggtgtggccctgctgatgctgatcccaatgggtgtggcccctctgatgttgatcccaatgggtgtggccctgctgatgctgaacccaatgggtgtgaccctgctagagctgatcccaatgggtgtgaccctgccagagctgaacccaatgggtgtgaccctgtgccgtttattgtccatattgttgatgaggatgaggaagaagaagaggaagtccccttaatttggaagaacagtcggcattacagagtcagtggggggagtagcgatattccttctccagctttgtctgctcttgttggtctgcaagaattattcatagccaattttga

SEQ ID NO: 154253 - DNA, 397 bp, Zea Mays
cccttcaccgagattagtgctgctcaccgtgattcgtgcgtgcgggctatggattggtttcaccggcgaaaagatctcaccgtggatatggtcgggatactgtggtggcctgtcaccgtacccacttgcaccgcgacgtggccgcacgaccgtcgccgcgatgatcgccgttcatcggtgtccgccacgctactagccatgctaccaccccgctgtagatcactaaagccagcctcgttgtcaccggagacttaacccagtaaatgccacgttcagcggcctccggtgactcctctcgttcttaccgatagccatctgccgctcaaattcgtcgtactcacgggcgatctctataaattgatgcctcagtgagctccgttagattatccccaagcca

SEQ ID NO: 154254 - DNA, 401 bp, Zea Mays
gaggagcctattgccgaaggtaccttgactgctgaagctgaacaaatcacagttgaaggagggagtgagaacaaagatgaagaggagtacactattctgagcccagcgaaacccagtcacattgaatttggtaagtctactgtgatggcagacaacatggttatgatgaagaaattgggatactttggggaggccgagagcaaacttgtccgttttgctgggaagaggtgattccagatccaaacgacgatgaagtcgtagtttttaaaagcttcttcagggtaggacttcgtttcccactgcatgagatgattggagaagttttgaaaatttttgagatatactttcatcagctgacaccaatgcaatcgttagacttagtgtctacatatgggccttcc

SEQ ID NO: 154255 - DNA, 454 bp, Zea Mays
gaaatctcacacgagagggagagaatccaggcaggacaggagacggctcacgggcaggcaaggtcactgaaatgacagaagaggtgagcacatattagtcacgtagtcataagtatatgaaatgtgaataaatacatacacagagtgttgtggcatagaaatcgagagtaatgacgatcgagaggtcaaacgacgtgaaaacggcgtttgaacgtgaaattgtgctataggaggtttgaaattcgaattgaggcatgaaatgatttggaattgagccgatacttcatgaataggtttatatgggtaaatatgagtgaagtgtgttcttggtttgattttaggcaaagaaaatggaatttggacactcggctcggaattgatcgctagaaacggggaattgtgtgaaattgaagcctggtatatcggattggcgtgaaaattggtgaatatatta

SEQ ID NO: 154256 - DNA, 916 bp, Zea Mays
ggtgaccttgtctcgaacatagctgatcctattcatgaatgcatgacctaaatgtgatcggagacctcgagtcccccacacgtccgctgtgggccacaacgcaggggcccttgaacccctcatacgcaacaccaatgtagcaaagagtgtctaccacaagggcttgtcgcttctagaatgaaggtcgtatagaagaccaccacaccttcgcaccagtcatgccaacgaaaacatgcaaagacataggatttttaggccgacgatcgcgaagctgatctggagacgaaggcaccggtacctcgacctataggtcagagtcctcaaagcaacatcaaggggggtgaagcccacaagacgaagatggcccacctgctgggcccatgcccatagtccaggatctcaagcgggtagatgtattagtgtaaataagtgcgggacagtactatactataattaccctattgcacaacatatttcgggaatgtaatacataactaggggtacaattgtatttagacctgcgtccccctgcttaccctataaatacccccgctcgaatcccaacacgggcgcaattgacaagacattggaactttgagccatctgttttgtcatgccacatgtctctcctgttcttgagtgcttgggcccacatctccaatcctaacattaggtgcccatcatgttgtgctatgaatacaaaccccacgatggctcccaagaaagtgaacgttagggccaacttctcccctaagacgaggtcgtgaaggcaaccatcatcgccaatgctaaaaaagccaaggtcactttccccgacaaaattccacccccacggtaaagaccccccctcatcattaatgggaagtaaggccaaactagccaatatcctcaacacaaagacccacctaccccgaag

SEQ ID NO: 154257 - DNA, 393 bp, Zea Mays
gttgagtagaaaccctgagtaacacttagggtgttaaaggtggcttcgtagctcatgagaaacttcttggggtctgttagaccatcatagataggtagtgtaggaggcatgtacagtggtggccatggtgtagcttgcagctctggtgtcaatggagaaacttcaacatagaggaaatcttgggccttgtacacctcgtgacaaagattgtcatgatcttgcccatcataatcttgctccctgaagttgttcagattttcatgcgcctcgatattgcgcatttctttagttgcttcgtcgatcttcctttggagttctgaaagacaaatcatcttctccctacacttctccacttgctagtgaatagctttgctgatttcttcattgagctct

SEQ ID NO: 154258 - DNA, 640 bp, Zea Mays
acagtaaattgttagaaactcagtcagttgaaaagcaatattatcagtcttggacagcttgaggaggctggttgtgatgggagactgaatatttatgatgcagacaacaacttgttagtatgtgctccacgtactgacaacagattgtatacagtaaagctaggcataggttctccagtatgtctgatgacaaagttaggggatactgcctggagatggcatgctaggtatggacatctgaatttcagagctcttcgggatcttggtctaaagatgaagcactattttatctgaagaatttcagagagcagaagttgaacaggaaggaagactgaaggctttgagaactgatagaggtggtgagttcaactcaaccctttttgatttgttgtgcagtgagcaaggcattaagcactacaccactactccttattcacctcagcagaatggtgtagtttagaggagaaaccaatctgtagtagagatgacaaggtgcttactgaaaagcaaaggggtaccaccaaggttttggggggaggcagtgataacaacagtctatctgctgaataggtctcctactaaaagtattaaaggaaaaactccttatgaagtatggcatggcaggaaaccataagttggt

SEQ ID NO: 154259 - DNA, 399 bp, Zea Mays
gacacgagtgttggcgagcgtgcgtgggcctaggggagggtggagtcatggtctgcttgtgtacggtaggagagagttggtgtgcgttttggtgtgagtgtgtgcatacatgaacagatactacaactgtattggtaagtgagaggcaataaaaatccattgcgctgctcaggagacttgccgccagctacacactgctgggactgggttgtttctgcacttaaactcaactgtcgcttctacatgtatgtcattgttgctaattattatcggactatcgagctaccaggtgtaccgaactgaagctagttgtgttgggcttgagcctctgatgtaatgccgccatgcttgggcctcgagaccggaatggccaatagaggccgcgacgggccgcatatc

SEQ ID NO: 154260 - DNA, 377 bp, Zea Mays
tggacgactacctcgtaggagacgttggcatgtttgatgcccaaacggggctgccgcctggcagtgagtggggttatcgttgtgtggattttgtataatgatatgtgttcttgtgctgatctatttctcggttgtagggactgatgctagacagttggtggtagcatcggcgaagcctgctgaggagaaggcttcggcgaagaccgcaacagtgacttcactggactcttgggtgcaattttgcgccacaactgacggcgatggagaagtcgcctacacatctgcgatagagggcgtggcaacaaccgttgtgtgatagctacgctatgtgagttttcttaaccatatattttgtaataccaggctgctgtcttcac

SEQ ID NO: 154261 - DNA, 489 bp, Zea Mays
aagaggtgagtcaccggagctcgtttaccatggcgctcaatagggtaagaactcagggcaataactggccatccaccacgacttactacgacgtggtacgatagtgtatggcgtggcacgatcggagtaaacgacggtcatgatggcggtggtcacgtgggcacgtcgcggggcaagtgggtacgatgagaccagctgaatccactccccctcagatcttttcatcctcgcggtaacatctcacccgaatcgagcacgaatcgatgcggccaacccaaatcaccatgcggacatcgttggtagcaagattccgtgacctgcgatctttttcagtctactgtaccatgctgactccattaagtgcacctgatagagcaacttgaggggaatttttcttcgatcttcattcaacgaactaccaattcgactataccaaagttgttcccctatataccagcttcaactgttatagagatctgggtcatttac

SEQ ID NO: 154262 - DNA, 943 bp, Zea Mays
gtgacaaaggcgacagaggggtgaggcgcttggggacactaagccgaagagtcgactatcctagaggcctagagcctgtagctgtccaactatcctagatagccgtgaggagggttggggattatggaccttagcagggtgtggatggcaaccatagacgatgctgaagcgccctggaggtgaagcaagagcggttggggctagaggaggctgacactagtctgaactgacccacacctcacacctgtctgggcaaccacatgatgttcagcatgcttagacgaagcaacaggacctgcccagacaatgtcggttgttccaccgcatcgtggcacacaataggtccttgcaacgggattgccgggttgtcgaacatcacagggacctactggctgctctacgcccaaaggtggagtgcctgtaggatgatcatcttgcaagagaaagtcaaaagccaaagcaggagaggttgtgatgatgtgtttgaagggaaaaggggtatcatcaaacacaaggtgccgagagatgataacacacctataatatagatcaaggcacaaataacccttatgggaggtagggtagccgatataaacacatgtcgtggaacaatgtgctagtactgtgatgtttgggtagcataggcaactgaacacctatactcgtgggaacattgaaagaggcgctcaaatggaatgtagttgctgatgaccgagcagtcgcctattgaggagataggcgacagtgggtagccgataaaaacacaggtcgtggaacagggcaccaactgatgagatgtggtggttgtgaggtttgggtagcataagcagccaaacacctatagtaaggggaacattgaaagaggagctcaaatggaacagagttgctgatgattgagcaagggcgcctattgtggagataggcatcggtgaggacaacctcg

SEQ ID NO: 154263 - DNA, 550 bp, Zea Mays
agtcgattccttcctgtagcggctagctactcgacctactcgtggctctatcgctccttcgatcatgactggatcggtagtgggtgaccagacccgtccgctaccagtgtcaccttgtcttctcgtcattcgttagttcatcgcgttatcgggatcccgtgtcaccttgtcttctcgtcactcgttagttcatcgcgttatcgggatcccacacgcagcgccactactttgcctcctcttccgcatcgaccggtggacaagctattggtgggatcctgcctttggcaccatggtgccaccaccatctgcctgcactatgtcaccagggtcccaccacgtcgtcgcaatgcaacaattgttgtcgcttgccactgcctacaaccgcttgccctcgctgcccctcgcatgttgctgcctcattatcgtcatctcaaggcagactcaccacaatgacgcgtcgatgtggccgcttcacccgcctttctgtagggtggccaaaatggttttctgatattcatatcattttagaacgctcctagtattatcacct

SEQ ID NO: 154264 - DNA, 645 bp, Zea Mays
ctttaccttgcaacatgtggaccgagccaagaacgaggaggtcgacgcattggccaaggcagccgccagaggcgaggccttgccctccgacgtgttctaccacatcatcggcacgccagccgtccgcagtccagagggcctacaaataaccaacgacaccgagggtcatcgcatagtcaacctcatcatgaccgaagattggcaggccctaatcaccctgttcctgcagggatattaccatccaagcgacgtcaacgaggccaagcacctcaagcaccgaagccgggacttcgcaatcattaagggccagctttacaagaagggggtcagtcaacccatgcttaaatgcgtcaccgaaaccgaaggcgcccagatcctgcgcgaagtccacagcggaacttgtggctctcattcgggggcctaggggcctcgctgccaaggtgatccgtcaaggattatactggcccgctataatctgcgccgtgaatcgagtcacgcggtcgtgcgaagcctgccagaagttctctccccgttcaagcaacccttcgcaatacacaaagttgattgcccacacatggccacttcaacgctgggggctggatattgtcgggccgctacccacggcccaaggaaacctcaagttca

SEQ ID NO: 154265 - DNA, 437 bp, Zea Mays
cttggattatttttctgcgttagatgtggccgcagcggagtcttcgccgcgtgtggagggtgccggggatcttcctagtgcgagtactgagtataggcggcgaagggtggtgttgaaacacagtgtgggtgagttttcgcgaagtggtaggcgccgtcgtatggggatggagcgtggccgtctccgagtagaccgggttagtaaacgagaattgttgtcctcgccgattggggcgagcataggtgagggggatctgcgaaatctttttgagggtgaggaattgaggataatgttgttcaattacagggagatgagtatcatcccgaaggctgagccaatgtaatgtatgatgccctcgccgtgtgtatgtaactgtaatttgtattgtaatgtggcatgttggtcgtatttgcacgcctgtgctgatccggctgcac

SEQ ID NO: 154266 - DNA, 766 bp, Zea Mays
ctctggtcgagtggcggaatgcatccgcctttgtcctcggatgaggaggggggctagaggttcgcctgactgaatggatgaatacaacaacacaagggtttagagtagtttaggccaccagagcgtaatatcttacatccactatgagttgtattgattaagagcttgagtgtcgtgggtctgaatgtgagccccatgtgtcgcaagttccctcccttttatagtccaacgggggcacgctacaagggagctggaccctgacaggtgggcccagccgttactataatacaaggtgtgaggcgtcgagtagagctgacggtgctcgatcttcaggacgtgtatctcctcttagttgttgtgtgggctcttggggtcctaccctcttgcctcgtctaatcagaacacatgtgtaggccttggtgtaggttgtggcgtagtctgatatgttgtcatgcgtatgggtgtatgggcggtgtcgtcctgtctcctccccctctctcttgattcctcggtaacacacgaggaacaatagaggtcataatgaagggcgcacaagcggtgcattgagtaaatgctcttgccttggaaacgtgtgggtaacagtgatccaatacgttgcaggctgggcgcgccgcgtgcatttaatgcggggggtacaccacctgccactgacgtgggcaagtgtgcatcccgcctgcccctaatgctagtgggccctacatcagaggcttacattagacaccgctcggtggcttacgtcaggcac

SEQ ID NO: 154267 - DNA, 1707 bp, Zea Mays
cgcgcgacttgggccgaaaatggcccagccgagggtgggggagagaaaatgttttttcctttttctttttctatttctcatttctattttctatttctattttctttttatctccttttcctttggacaacaattagctaaataatcttaggtgctaaaaaataatctatgtgaggtgctctaacaatcaaagtgtatgcatatgatgagatgacctacggggtggagttaagggggggaagattaggattccaaaccttgggctgaaattttgggatgttacaaacctaccccacttaaaggaatcttgccctcgagatttagactggatttgagaaaagataagggtattccctcctcaaggagtcctcactctcccaggtagcttcctcttctccttctctgctccactgaactttatagagtttcacttctgagttgcgggtcttccagactgctgagtcaagaatatttactagcttctcacggtactgaagatctttctgaatctatattgtctcttctttgatgtgactttctggtacttgcaggcatttgcggagctgggatacgtgaaacacattgtggatatcagacatggattctggtaattcaagacggtacgctacgggtcccactctgccaatgatgggataggggccgacgaatcgtggtgctagcttccctttcacttggaatcttctgacaccacacatcggggagaccttgaggtagacaaagtctccttcctcaaatctgggttctctccgcctgttgtccgcataactcttctgccgactctgagcttcaagtaatcttctgtggatcagggcaactttctcctcaacctctttaacaaaggcaggtccttccagtgcctttcccctacgttggaccacatgagaggggtctggcatttccgtccatacaatgcttataacagtgacatcttgatgctggcctgatggttgttattatacgagaactccgcataaggcaaactggattcccagcttctatcgaatgttaacacacaggctcttaatagatcttcgaggaccttgttgaccctttctgtctgcccatctgtctgagggtgataggcggtgctaaagtctagcttggtgcccatagctttctgaaggcttgtccaaaatttggaggtgaactgggttcctctgtctgacactatctttcttggaatgccatggagtctgactatctctttgagataaattcgggcaagggtggctcctccaaaggtagttttcactgggatgaaatgggctaccttggaaagacggtctattattacccagatagagtcattccctttttgcgtccggggtagtccggttacaaaatccatgcctatttcttcccatttccattcaggcactgggaggggttgcaataggcctgcaggcttttggtgctcggccttcgttcgttggcaggtgtcacaccgggccacatactgtgctatctctttcttcatccctttccaccagtatctggctttgaggtctaggtacatcttggtagttcctgggtggatggagtaggctgagttgtgagcttcctcgagcaggacttctcgtgcctccccttttggtacacacagacgattcttgaaccaaagggctccttgttcatctgtcctgaggtccggaagttgttctttgcgagctttttccacaagtcttg

SEQ ID NO: 154268 - DNA, 1378 bp, Zea Mays
cgacggtccgcctcccactcatgacctacgaacccttcacactacagtgcatttatggcccgtgcacccccgtctgcggcacactcatgacctatcagacctggcctaagtgcatagactggcagggcgcaacatgacaagccgcaccgagccctaggctacgaaggccaggggtcggcatagcccaaatgatggcgctgggtccccacgtttctcgctccatccaccataaagaatacgagatagccaggcgaccctcgggccacgagcacgtgtggcttcaccccaggtggaacgtttggttttacctttgtctgatggctccttcctgaggaatccaccgctagccgacccctttgttggcgtataaaaggaaggggttggccctcaaacgggaggggcagacacacatggatggacattggacgagaaaacacccaaacaaaccaacgcacgggaggaggacacaacgacgagaatccaaaggctaggactccactctgtaacctttagctccacctccacccctataagggacttgtgagtctctccttcctctctcgcccgcttataacgctcactacgagctctgattatcaatggtaccgatagcgcaagtcaccgacgaccgaaagtaggggacattctttctgaactagtataaatcctgcgcccaccacacacaccgtatagagtccagaatgcgcacaataaatttacttgtcagagtaaggttcgaaacaccgccagttggcgagccaggtaggagactcgcgtgttccacgatgaagttctccaagctctgatggctagcaacatcaatggcgcagtctagacccctagaacgaccatccgttttaggagtctggattttgttgccgagaaggaaggggagatgaccatggccctagaagctccagccccttggacgagtgacctacccaacgttgccagaggtctgagcgacctccaccttggtccccctcatgaggagtgcatgccgcaaggctgaccacacgtcccttttcgctatgcggggcactatagagactctagtgttaaagcctccgactggccccacgaggtagtggggatacacctgggactgtttgcgggggcgtacaatcgtgtccacaacgacatcctggcgtgtttttggtatgccacacatacgtctggacgtggccaagggatgtcgcgtcgagttgctcggtcaggagttggtcggtcgctccgcctcgcagggttgcttggcttggaccagatcggtcgcttgtctcgtagggttactcggtagggatctgatcggtcgctccgcctcgcagaattgttcggcgaggacgtgatgagcaggtgagccgttttaaagaggccattt

SEQ ID NO: 154269 - DNA, 651 bp, Zea Mays
agatggtgttctgcagatgaaactggaagagtttgtttgcttaaagcaaggaggagactctgtgatgcaataccttgccaaattgaaccatctccctcagtatgtcatagagcaagttgacacggacctgaaaaagaagaattgtttcatgagaggtctgaatgtttggctacagcagaagatggccacctatctagatctcacttttagtagggtcgtgagcatagcactccccgtggaggcaaagaattcggggtagggaaagacaaaaaggtttggacgtgaagggggtaaggggtcctcttagggatccgaaaagcggtcaaggctagtgatacgtccctttaacccaaatcgctcttttcctcacccatcctcctatcctttcaagcaaccggtcatcattcgtccaactgctaccgctactcaatattcagccgagtgcccctggtactcgtttcccagccctacccagttcatctaacaactgcttcaactgtgggaagtctgggcatttcatcaaggattttccctatccgaagcaaaataaatcaaacttccaaaaggccgagaaaatatggcaagcactcaggcaggcaaaggtgaaaggaaaactgaacgggtctactatactcaagtggctaccaccct

SEQ ID NO: 154270 - DNA, 428 bp, Zea Mays
ctaaccggaggtagtccagtgggcatggcaaacacatcttcaaactccttaagtatctgcctcagtggctcctgttccttttcagcaccttcctcctgcattgtttccaacatcacaaaagcccacacttcatttcccttcatccaccttctcagctgtacagctgacacttgcaacacttctgtacttcctacaccatccccctttagctacactcttacccctttatcccagaatgccagcaccttgttgtcccaatcacactccataggactatggctctttagccaatcataccccaatatagcatcataagcttctaaatccagtactctcatattactggcataggtgtgtccttctgcccaccactccagcgctgccacctgttttgaacttaacatagactcaccattagccaccttcac

SEQ ID NO: 154271 - DNA, 695 bp, Zea Mays
agactctgagacgctatcacgacaaggccgtgcgacaacaatccttttcagtgggagaattcgtcctctgccgaattctaacgggggagggacgacacaagttatcgcccttatgagaaggaccattcatagtagcagaagtcactcggccgggatcatatcgtctcactcaaatggacgacacagaaattgggaactcctggaatatagaacacctcaggaagttttatccctagctatatttcaaaagctatcgagacgacaatgtactctgtaaaatgggaaatatgtcatcagtaaagaaaggcttcaagaatactcagtttgttcatgattgactcacattcttacttaactcagggtgaccactatgccctgccaacggagcaatcggcttaagtcggcgacgacttaagacggtgcaacaagctcgcgcttacttaactcggggtgaccactatgccctgctaacggagcaatcggcttaagtcggcgacgacttaagacggtgcaacatgctcgcgcttacttaacttagggtgaccactatgccctactaacaaaagcgatcgattcaagtcagcaacgacttaagacgatttcgcatactcatataggggtgacttctatatcccataaacaagttccaaaaccatcacatagcactttactactgcaaatttacgtactgtcga

SEQ ID NO: 154272 - DNA, 998 bp, Zea Mays
gtgaagaccatggtggcgtaggccgagggagacaacctgggtaaaggaacctggatgccaacgagagtgacttctgagcccactacaaagaaaaaagtaaccctcagccgcctcgaccgagcccatgcttgaatcacttaaggggatgggtaaaacaaacctgaagcaccaatctcggtggcctggacagaggcggcgacagaaaggttctagacatcatgatcgcttcgccgtctccacggaagtaagcactaccctcctcttcttagaaatcaccttcattacacacgacatggaagcgacaaggcgaagagcactactagggggaagaggagtctagtcaagggatcatgacaaaagaagggtagacaatgggaccagtgaggcccaccgcccattgaatacaaagtgatgaaccttcgcttttcgggtagctccccgctcccgtgacttcctggtgaagcactgcacatgccacctacatcgggagtatataggggactcccaagaataaggcacccagggcctccaatgagcccggggtggcaagactgcccctactggccgcacccaatggctcataggaagtaggctcggtgagtgaggaatctaacaccactgaggccattggatgttgggagagcgcggaatgctctaggaaatctacctcctttgcagcgaagacgatgtttaccgctccatcgaggggtcgagacaaaatcagccatcgacacatcgagagaatcgtcgcccgcagaaatgaccaagaatttagagctcatcctcgcgacatcgtccttctcctcatcatcatttgagttagtctcggcaccatgatccctatacatctgacgctaagccctgtgacgcctcttctcatctctgattcacttttctctcttttgctgctccacccgtgcatggcccgtctccttcttagccacactttttggcaaaggaatggggtcatcccccaacatcggataggacgactgaga

SEQ ID NO: 154273 - DNA, 926 bp, Zea Mays
cccaaacatgctctgtcaggccaactgaaggagctacgcgatggtacagtgaccagatcagagcgccagctcagttaactcaccaccggcatccgtgcgcccagattcacgctcgccgcggtgattcgtgctcagtgctgttggataacgcagagggagtaagaaatatcacatagtggatgaactccggccactgttcactccagccgccgtgtccgcttagctcacggccgcttcgaatctaccctcgctggagttagacacctcacagccttgcgccacgtgcctctgcactttaaccacaccgtcgtgactcatgttagcccatccggtgatcgccgatgagcttgccacgctaattgccaccaatcgcgtgcgtcagtgcaccttcttctctccgaccgccaccacgcgagctcaaattcactgaccatcgctcaagggacctataaattgagcacgccatgagctccgtagggtaattacccatccatagcaccagcacttgcctccaattgttcaccagagccaacaaattgctcatttcccccaaatcgggtttccgccaccgtgaaaaggtcctcgccgtggctagctcgtttcaggtccgatcttgccctctgctctcttgtttcagcactcttacatgccactgatgctcctcgacccattcaattaagctagactgccctagattgctgggaacacttctgctcatccgttgttcgcactctcttcgtggacagggtgatttagagctcgaactaggcaattgatcgaggggaaatgttcgttaggtgttaaattaggtctcagccaagttagggcaccagccattgcttatcttggccggtacaggttcgccggagctcggttcgtcaccgctcgccgttgaggatctcgagttgtgaagagttagaatgtgg

SEQ ID NO: 154274 - DNA, 363 bp, Zea Mays
caataatggaagaaggaacatgatatcgcgaagtagctggatgagtaagtgaatgaggatcagaggtcatgtgagaggtagcacctaagttgaagtaccagttggtagactgaggctgctggagagttatggtgctgaacgtcaaggtgagcgactgttgatcctaggaagtagaaaatccagacggcggagtggtcggcggagtgtagaagcctggtggtgcaaaaacaccaagtgagggtaggggtgccccttgaagatgaccaccatagtaggctaaagggaggggaccttgtggctgctggtgctgggctagcagtgcctgctgctgctgtgcaagaagcgcctggtggtgccgtggcg

SEQ ID NO: 154275 - DNA, 548 bp, Zea Mays
gagatttacgaggaggaaagtatcgaggcgacgacagaagatgttgctttgcaagaaaccctaaatgaggagcagaagtctacctatgaaaagatcttatctgttgttgacaccagtaatggcggtgtgttctttgtggatgggcctggtgggactggaaagacttatatgtataaggcattgcttgaggtgagtagttaggacaagattgcagttgcaacagctacatctggggttgggcttccataatgcctggtgggagagctgcccattcacgcttcaagatacaactcactattgatgatggtgctatatgtaccttcacgaaacaaagtgggacatcaaagttgctatagaaagcgtcgctcattatttgggacgaggcatcaatggctaagagacaatcaattgaagcgttggacaacaacatgcgtgatatcatgggacaccctagtctgcccttcggtgggaagactattgtgtttgggggagatttcagacaagtactccctattgtatgtaaggggtcaagggctcagatagttgtt

SEQ ID NO: 154276 - DNA, 798 bp, Zea Mays
ctctaatctaatcagttacgccagatgcgagattctcgggcaaacttcgtaggagttcagcggatcaagccatgactcctgggcatataagaaaaccatacccttggccatagacgcatgcagacgcgagccgagaacccagccaccaccaacaggaaccgtagagaggagagagaagtacgccgccaacgctgttcttcgcttaccaaggtcgctcggcgtctgcggataattcgtggggtttgggcgcatcgtcaaggcgtgttgaagctgcggctaccagcgaatcagcgtggttggctactgaaccttggcgatttctcgccggtcgccatggagccgccgtgtcacatgggtggcatcgcggtcaccccgatacgtggtatgatgccttctctgaggtttgcgcttgtatgaatcacgttttgctcgattcctagtcatgattacctcaccaatgcggctctcaaagttttctggtggtcctccgccgcatgctggggcggcgccgctcggcctggctcaaggatggaggaagacgggtccctggccataggattgagatggacggctgggattaaaagtagcatttatcccttcgcgtattgaatccaagcctttggcgtctgatcgtgtggatggggttggagatcgtctggaaccgtggatgccgcatccaaaggttgtgggtgtttcctgttcactttaggggggatctaatcccgtcggttgatgggcgatcggacggctctgggtccccggtaccccttcgccgtgtaattattgcagaagagcccc

SEQ ID NO: 154277 - DNA, 769 bp, Zea Mays
ccaaactccacagcctcgtgaacatgatcccggatgtcaaggaagcacatatagtgattcctcccccttgcacaaatgaatcctgtggcttggtctttgcataggtaaaggctcaatgcttcaagctccagctctacaaggagtctacaaatgattaggaatataagaaattgagaccatagaaactaaaccacaaaagcctacctgcccctgaatcattaagagccactagctgcgaccgaagacatcgtagttcaacattatccgcctctatagctacgcgagctgcgcccaagtccctctgcaaggagtctatagacgatcaagaatctaagaaattgagacaacaaaaaccaaaccatgaaagcctacctgcccctgaatcattaaccgcctccaaagctgcgtgagccgcacacaggtccctctagaggccatccaccgcctgccccagagggatcagtcaggtaggaggctggggcataggaccatggtgccttcgcgcctcgaaagggacaaccgctaccctaaaggaaatcaagaaataaccagggaaggtaaaagagataacaaaaaccttgagataagggcggagcagttgtaccacttccctgaacgacttcccctagggggtccacccgatccatgggcgaagggagactttggctaataaggaagcccacaaggaataaaaagcaaacaaggtcactctcccccttccccctcttgctttttaaagggacgactctcattaaaacttgcgaagaaa

SEQ ID NO: 154278 - DNA, 721 bp, Zea Mays
gaaaggaataaatacacataaattatatttctgcattcatgctggagattttggttgttacaaatttatatttggataattaaacttttgaatctgaattctaggataattaaataaagaatttcatctgatacatgaagtgcatctccatccactatatgttgagaaacacctattataaataactaaattacagattttgaattgtgaatttaatttgaatttgaaaacccaactcaggactgcatttgaaaatttgcaaatctgaaaaaaaagaatggagaaaaggaaatagaaaacatgaaattaaaaaaaatcatcgtttgggcctaaagccacccagccggcccaactaccccatacgcggcctggaatagaatctggtgccgacaggtgggaccaccctgtcggccactcaactgcacgcatcgcgctcgcgcattctctggctcgtcgtcgcgcgggtcccacttgtctacctccttgcgacttggctgggcgcccatcgtggcttggtgacctgctctctctcgcgccgttgttccgctgctggtggggccaacttgtcagacttatccccttcatcacaacaaccccgcatggcgcccttggattccgagctccgtgaaccatggcgtgatccccgcgcggacttcctgacctcggtgcataagaacggatccgcacccgcccctcttccatccgctcaccctgttccaag

SEQ ID NO: 154279 - DNA, 830 bp, Zea Mays
catcaccaaatttgatttggtacatttgacatatgtgcaaatctacaactaaattcaaatttaaatttgaaatccaaaaggtgaaaggaaatataaaaaggagaagaaatgataaaagataaaagaaaaaggagaaaaacctacctgggccgcggaacctcgctttcggcccatccaaggaaacaccctgcacagcccaatcccactcacgcacacgcgccgacataccggacccaccggtcagtctctcttcgcccgtcgctgcacttaacgcccgagtcacggacatgtggggcctgcacggtcagcttcaccccgcgccagacctcgcgaactcccaatgactaccggggcctgcttgccagccgaccatcgctgcgtgcgcatattgtttctcgctagcgcgtgggatccacccaggcggcactgtggatcttccccgcccgcgtgcgccacgacccgacgccatgccgcagatccctccgtgacttcagctggtccacaaccacctctcctacctcaccgggctcggccctaactcgcagccgatagaaaacacctacctacctgggcgcatctcaccgccgccgccatactgtggggaagcgcagtcgcgggggaccgtgtggatcgacgcttccccgtcctcagctaggtgtccaggggagtcgccagggcgcggacaagtcttggacaccaccaattcaaccaattatcgacgtgggtgtgtggaattgctcaccggagcaagctctccgccacagacccgcggctcgtcgtggctggagaccagcgccgcaccgattcttgtaagtcccccactatctgaa

SEQ ID NO: 154280 - DNA, 569 bp, Zea Mays
ggtactggagatccttttgaatctgaattgcctctgcctcgatgcgggtttctggtacttttaggcatttgcggagttgagacacatggaacacattgtgaatatctgacatggattctggtagctcaagacggtatgccgtgggccctattcgggaaatgacggggtagggaccgacgaaacgcggtgccagttttcctttcatttggaaccttttgacaccacgcatcggggagaccttgagataaacgaaatctccttcctcaaatctgagttcccttcgcctattgtctgcgtaactcttctgtcgactctgagcttcaagtaacctcctgcggattaaagcgactttttcttcggcttctttaacaaagtcgggtccttctagtgtccttttccccacattggaccacattaggggagtctggcattttcttccatacagtgcttcgaatggtgacattttgatgctggcctgatggctgttgttgtatgagaattcggcgtacggcaaactggactcccaatctctgtcgaaggttaacacgcaggctctgagtaaatcttcg

SEQ ID NO: 154281 - DNA, 751 bp, Zea Mays
ctgatgtttagtgaatgaattttattaagggaggctgctctgttcttaacaaaaatccagagatatggtgggtagaaggttgctggttcagataagtcctgaagatccaatacgctgaaaatctgaagaacaccaaaagatctacgacactgttgatttggatgaacttggatgaatcggtgaggatttgatcgcctgggattaactcggtacgtggcatcgttccgcgagccgagccacgcgtggccggagtgggtcaccggcgaccacggtgactcgattaacttttgtcgcggtgtcacccatgcctcgatctccctcactgtgtctcttaccgacgtagtagtcatgcgctaacgaagctatctgtggccggagatcgctagccgagccaccgtggctataaatagcaccatgatccacggcggggtatgcacacctccacccagtttgatgatccaagcccaaattcgcacagcctccgcccccttctctcaaattgagtaggcactgtgaaactacagttcctaacggccgtgtagccccaatctccactgccaatttcgcccagagccgccgcgataccattttcccccaacttgggtctctaaaccgccatggatagctcgaccgtggccagcccactctggtaaggttctacgcctctcaagtgccgttttcgcaacttggtatgcactggatgctcatcgtggccaccgtttggtcaattcggccagggttgaacgggaac

SEQ ID NO: 154282 - DNA, 466 bp, Zea Mays
catgggtcggtacggcgtcgatcggcgtggtttaatttgtttgaacgggtcaagtcttgcgtgttggttgctgttgttctctcggctggacgttgacagtttgcgtcgcgattctggtagccacgtatacgtaggtggtggccaactggttaggtttttagccaagtgctgttgtaagcgtgtgtgtgtgatagagattgcatgtccagcaaaagccgctcctagctgcttcagtgccagtgccgtgtggcttctgctagcttagcttgcattggatggcaatggcatgcatccagcatgcagaggacggccgtcggtagcacgtacgtacgtacacacgttcacattggctggctggctggctgcctgccagccgggcaccctagtccgtacggcacggctacgcgttctctcatgtcagtttcaaatgtcaaaatttcccggttcatgtgaagttcgtactccc

SEQ ID NO: 154283 - DNA, 287 bp, Zea Mays
ttgtcaatgttttatggtattgtgctgtgatgaccaatgttattcagacatgacgtagtctgaatttatgcactcatgatgttatgtactattgtactgatctgaagacatgctaagtagctgccatttgtcaatctgtgagtgtgtgtcaactactcaatcgtcaatgatcatgctattgtctatcacttggctcatttatttatcattaaccatgttttggttgtcatgtggatgtgcatgtgttctcaatctgaggacttgctaatgtgctatacattagaata

SEQ ID NO: 154284 - DNA, 846 bp, Zea Mays
gtgtgatcctgttgaagctgaccccaatgggtgtgttcctacaccatctattgtccgcatttttgacgaggatgaagaagaggaagaagaagttccgctaattcgcaacaatagccggcgttacataggtagtaggggggatagtgatattctttctctagctctgtctgctcttgttagccttcaagatttatccataacagattttgatcaggcccttgaggatgtcattcctgaagatatgctgttggaaccgactgttgatgatatgatggatgtttgctctgacgctctagacgtgggattagaggtatcccgggcggtatctcacacatcgtcgactttggaaggcagtcttcggcgtcaagaagctggtcaggattgcccgactcccatggaggtgactgaggatccttcagtcttagaggtggctgttgcagaaaacccagcccccaagggtgatgccggcggttacccagcccccgagggtgtcgccggtaatgatccggctctggtgggtagcgcaaactgcaacgcagcccccgagggtgttgccgatagtgatccggctccgatgggtagtgcgagctgcaacccagcccccgagggtgtccgagggagctctccttcccactcctccatggacgtccacgtcgagtcgtctccaccacgatctgatggagtgatagcgatgcatacttctttagcttcgagtgagggagtcgccttggaggttggcgagccggatgccataattctaatatcttctagtggagctgaatcaacccctaacaatactcttcagattgttccagatgatcttccttcatcgagctacaacacaac

SEQ ID NO: 154285 - DNA, 1000 bp, Zea Mays
gtggaatggtgtggcgccgggccatatctgggatcgcctgacctctagaagttctagagtgtctgcatagatgttattgaggctgctgcctccatccatgagcaccttcgtgaggcgcgtgttgccgatgatggggtcaacaacaagtggatatctcctagggttcgggatatagtctgggtggtcatcttggtcaaaggtgatagcgcggtccgaccaatctagttagactagggtcgctaccttgattgagaaaacctcccggcactcttgcttacgctgcctcgaagaaaggttgacggtgttccccctgaagatcatgtagcaattatgtacatcggggaagccatcgcccttgttgtcgtctccattgccgggagccttcttactacctccttcagccgaggggtcgggtttgttgtagaagcactgtagcatatcgcactcgtcgagggagtgttttactgggcccttgtgttaagggcatgactccttcaacattttgtcgaagcctcctggccccccttgaggagctcggggttgcgcttctcggctgcagcgacgaactcggcggcgagggcctcgggcggaccctgcagcgtcttcttcttcttacccttctttgcgttgcattgggtggacgcctcggggcgcccttcttccactttccatcacccttgtctttgtggaagagggtttcgaccgccttctgccccgaagcgagcttcgtggtgatgtccatcaattcgttggccttggtcgtggtcttgtgacccaccttgctgactagatcccaacaggaggtgccaacgaggaatgcccccaatgacatcagagtcagtgacgttggggagctcggtgcgctgtttcgaaaaccggcgaatgtaatcgcggaggctttcgtcgtgcttctatcggtagcttagaaggtcccaggagttccctaggtgaatgtacatgccctagaagttcgcccaaagaccctgaccaagtcttctcg

SEQ ID NO: 154286 - DNA, 571 bp, Zea Mays
aagaatagcggccagagcagggtcaatggcaggaggggtaacaggagcagcactggaactaccagcctcgtgatcatgtgagcgaggtggcacaggaggcagtggcaagatccccaggtcctcatcatcatcagaggaagagtatgcaatggcaccctgagtctcgaactatctgatagcctcatcctcagccctgatatctatgactggatctagcgctgaaaccgggtcctaaggagctggacgatagaagccaaactggaggcgagaggcctcgagggtggcttggaactgaggaggcctgatcagctgcgcaaagatgtgacaaaggtagtgggcgtatggcagctgacgccgagcacagagaccatccaacactgtatcctcgatctcacagataagaaaatcaaccatgtcgaactctgagtgtgaaatcagggtaccaattagccaaagctaaatatgtgtggtggcctccctgtatcccatcctaggtagcaaggtctatctcatcagctcataaagaaacttcgctgcaggagtgaagtcgacaggggaacgtcgcaaccca

SEQ ID NO: 154287 - DNA, 467 bp, Zea Mays
gctcaaagcaaaggtcaaagctgaagctgaaagaaatacgaagctacacgaagctattgagaaccttcggaacaagtgctctgactttgccactaggtgcattaaccggctgaagggaatatttaactcggttggagctacttctgaagaaattaacccttcagccgaagatatccccgggaccttcgaacatattgaaaatgaagttgaagcccttgatgaagtataaccgggcacggagatttatgtgcactggtggcttcacgcggcacagctgcagcatttatgaaggtcgggtgcaatcatgccaaaactgttaataagccaattttcaacctttcaacatcagatctaattgatattccagtcgaagcccgaagcataggaaacagatttattacccaaatttgggcaaaggacgggcgtgaactggtcggggacgaagaacgaaaactgcttgactgagt

SEQ ID NO: 154288 - DNA, 533 bp, Zea Mays
tttttaggagcaattatatttgagaaattggtgatcgcgtcataagtcaccaacgccgaattcaacaccaaagcaacagaaagatagttcgatcattccataccccatggtgcaggaaaatatagcaccggcctccacaaaaaccgttgaaacaatcatatcatctcttgcgaaggaactcgacgagggggacgtagacaaaattgttcctcagaatgtcgacgcggacatcagaaaggaagcaaaggttgacacaaatgttgaagggccaactactttaacgaaaattcatcagcgaatcgccactgacaatgtcaagaaaccgtcagaagctatgacacgctacctgcaaaaattgaagagagttatgacagatcaatcaaaagcggaatcagcatctcgtggagtacgcacatggtcccaaatagacaatttcgaagtatgggaagaagatggaatgattcatactcgagaatcattacgtcttaaaatcaatatcccgatatacaagaaggaggatgttcctcctaaat

SEQ ID NO: 154289 - DNA, 813 bp, Zea Mays
gcggatgtgagtttctaatttaactcgtgggtgactcatacccgactcgaaatttgtttattctttattttgcccgaaaacagcctcgcgtgagcactgacgcagcagatacacgggcacaaagctagacaacacatacgaagagccatggtatggaggtacacgcaaacaatcacacagatagatgatgcactggcgcactgatgatgccgtgtacactgtgcctgaataactaaaaagacgaccccgggtgttagaaaaaagaggcagaaacctaggagtagttccttctgggcatccctttcaaaaaaaaaaagttccttctgggcattagttgacaacaataagcaaagaatgctaactttctgccacaaaatccgtgcgatggcagcatcaagcatttgacctcacacacaattaattcatgggcaaggtatgatccctccctgtgccggccgggaattcctctcgtcagtggcgtgaaatgtttttttttccattcgacatcaaagtagcatgacgcgtggacaaggaaagaaacaatttggtacacgtatcccaaatagagtcaaaaccaaatcaaatgcgaacatatgtactacggattccaaatacaggtagttgatatatatcccatgtatcaaaaaatccgattcatatatacatatgaaacattcagattcatatacgaattatccatttagtatttatacaccattgtaggacaagacaatatcaggagatataactatacgtacgggtgggctgatagtaggttctgttaggatctatggggtaggcctaaattgcgaa

SEQ ID NO: 154290 - DNA, 465 bp, Zea Mays
cctgtatttagagttttgctcttaggagtcttattttgctttgattcaagcgatagcggacaaatgtgtttgtaatcgatctgaaactgtcaattatgctgaacttcagtttactcattttgtcttcccttctgctaagtgaacaaatctgtattttctgttcaaattggactctgtctgacgcttgcttaatatatagtctcaaatttcctggcgagaacttcatgaggaaagccacagcaggtgttgagtgaaacaggagaactaacaaggttgataactgacaagggcaagcagcatgtggcacatatgagttagtagcttagtatacctgccactgaagagggtttgggcacaccagtacttccccacacccaaatccaggtcatcattgtgcataccttgttaccctccgcaaactcctccatacacatttgcccaaacccaccggataacgatcaagca

SEQ ID NO: 154291 - DNA, 501 bp, Zea Mays
ctgtcagctcctcctcttgtcaattcaacaaaatgtctgcttcaaaatggttctgcgatgccgaagaaaagtccgggagttgataaaataataccatgggacgtggccccatcagtcatcaatctatgtgacctagtatgcagaagttcagtcaggacgctggcgtttttgtttccgtgcaacggtgcaagacattgacgtcaactagtgtatcaaatagccccggattatttcgatttgatgagcagtgagcaattagaaatgctgcaggttctcaagccactgtcagtctgtgtctgtcacgcatggcgacatgaggtcttggagagtgcgctgcagccacaaaactgttttggagtgggacagggctagtggctgctcgctgtgacggacaccgactggcccttgaccggggtcgtgtgaaccagtggacttggccacttggccttcattacaatctgtgtgacgacggatagatagacactcctactacagtacgcg

SEQ ID NO: 154292 - DNA, 565 bp, Zea Mays
tggcgaggcaagcacgacattggtgccactagggatgagccccatcccagtgtcggagctgcagtgtcaatctctgatgccctcctagtgctggactctgccaccgatcgccttcggcgcctggatcagatcctcggtgcccgcctggaggcagagggcagcaagctctgctgggcggtggtagactatgtcctgacgtgcttctggagtcatgaccccgccatatccttggcgccggtgatcgatggtccagtagccaccacagaagatgccgcccgggagagtgtacaagatgcagtggagatggtggccgcgcgctttcagcgggatcctaccgacgctgaatagatgaacctatagagacaaggcgaggcttccgctgggggtggctgtaataacttttggccatgtaacatattttaagaatcgttaatcaagtagcactagaacttatctgtatgttatttgcccttgttgtgtgtagcgtcatcaacttccacctggtacttggcccccctgggaggtaggctcgacgtgtcgaggctggataccagtataccaaaga

SEQ ID NO: 154293 - DNA, 290 bp, Zea Mays
cgcgagcgatgcggaaggaagtcaatcggaggcgtgcgttgttgcgagaatgcgacttttgtcgctaggtgatcaaaatctctcgggtttcgggtaattactgttggtgccatgtgtagctgatcgtcggggacactaatgactcgattgcaggcgcctcgtgcctaatgtgggcgtgccacattgttttgcccccttgcgtgtctcctttctggaaatggggtgtgtgtcgccacatcgggttcactgcgtatccttagacagttttgtgcacggattgtcgagaatag

SEQ ID NO: 154294 - DNA, 872 bp, Zea Mays
gtcttctagacgtcacgtggagatgggttctgagacctcatgtcatgacttgctgctttcgaatggctagttcttggttccaggagggtgtagccagtacagtagcgtggcaacagaaaggagagacttttggccggccgcgcgcgtgtggcatgaaaaagaaaagagggagggggctcaaggtcattacaaacagaaacagcctttcagggtgatcatgcagcatttgatggtggccatggaacatctcatctggttagctaaacccccctgcgtgtttagtttgtcctgctgaaagccgcttttttggcgtgaggagacgaggggccggccggggcaccataaaatcaaccatcacttaccaatgaaatcccttctctctctctgtctcactcactttaaccctttcacttctttttgtttttctctctagcttgggtgacatctcagagtacgtgctgcccgcctttctccctccacttccaagattctcattgtctttatccagagagagagagagttgatatatatccaccaccaccagcacgcagtactagactagacatatatgcatgtcatgtcactttgtaggaatgcttacaaagtagtagcagcagagagaagagaagaaacaaaaaaaagagccaccacaacaacactagagaatggtactatactactacgctagagacaaaggaagtcatgcttcaatacacccgagagaacgcgagagaagggatttggtactgaatgaactgaatgaattcaaactctgcgcgtggtcagtgctgagaatggtaaaaccacttgccatctaaggggctgttccgcaccataggaattttctgggggctgtttatttccatatatgg

SEQ ID NO: 154295 - DNA, 438 bp, Zea Mays
cttcttggctgacagtgttgttatcatgaccaaggcgtacccaaatgttgagaaaagagccgattttgctcaaggagatcgctagttacatgcttcttgagcgaggaactttttcctattggctgggcataagaaaatatagtgtagctaaaaggagaatgacgtgcataggtggacagactaaccgctgatcggaaaagcaaactggtgagtgatcttgtccacgctgcgccacaattcacccaggcagcaagcacccagagcactgaaaaaacagccgaaaaagaattagctaaccagcaaggacatatgtacacatataagcacgcaaatatacatatgtatgcagattctttgctgcattgcccatattttgtgagcttccagcaatgcagattcagaatttgttgtcacaagaatcaaacagctccatgcttg

SEQ ID NO: 154296 - DNA, 664 bp, Zea Mays
gctacatcacggaggctcttagaacgacgatgtattctgtaaattgagaaaaatatcatcaataaaaaggtttcaaaggcactcagattgttcactgtcaattggcacgcttacttaactcggggtgaccactatgccccgctaatggagcaatcggcttaagtcagcaacgacttaaggcggtgcgacattctcacgcatacttaacttggggtgaccactatgccctgctaacggagcaatcggcttaagtcggcaacgacttaaggcggtgcgacatgctcacacatacttaactcgtggtgaccactatgccctgctaacgaagcaatcagcttaagccgacaacgatttaaggcggtccgacatgctcacgcatacttaacttggggtgaccactatgccctgctaacggagcaatcggcttaagtcggcaacgacttaaggcggtgcgacatgctcacgcatacttaactcggggtgaccactatgccctgctaacggagcaatcgacttaagtcggcaacgacttaaggcggtgcggcatgctcacgcatacttaacttggggtgaccactatgccctgctaacagagcaatcggtttatgtaggcaatgacttaagacggtgcgacatgctcacgcttatctaaaactcggggcgg

SEQ ID NO: 154297 - DNA, 786 bp, Zea Mays
tcgaggggtccctgccttcgtcgtccgggcgagcagtttccgccgccagggcgtgcagcttctccacagccgcaagcgcagcggcgcggtcgcctcgcacggtgaggaccccggctggggatggcatcttgaggaccaaatacccataatgggcaatggccatgaaccggtataggttcggcctgctaatgatggcattgaacgggaggttaacctccgcaacgtcgaactggatgttctccgggcgtaagttttcctctgtcccgaatgtaaccgggagcgtgatgatcccgaggggatacaccggttgagtgcccacttcagagaatggatgagagggtcctagccgggaccctgggatctgcagctgcttgaacgcagcatggctgatgacgttgagcccagccccaccgtcgatcagaacatgatgcagcttgatgatggcaatgacaggggcggtgatgagcggctgtatgccggtccctgccatgttcttggggcagtcggatgccccgaaggagatagtggtgctacgccaccgctggtgtggagtggccttcgggacccctggggttgccgacaggacctcgcggcgcagggacttcacgttcttgcgggaggtgagctcccaactcccgtcgtacatcacgtatagcttcttgcggcggtcgttgtcgttaccagagtcggagtctccagtgaggatgtccttgaggacctgctcgggggactgatacccgaggtcccgttctcccgcggccacatcaccatcgtcgaccctctcct

SEQ ID NO: 154298 - DNA, 430 bp, Zea Mays
gtcgctctaaaaagaaaacattggatccaatgtgaaattatgcctagatattgcaatgttgcatataatatgaactgaacttaactgaaaaactgtttttaaagctcgtttcttgcttgctctgtttcctcgaccgacgtgatgcgcacgacatgcacatgcagattctgcaactggagatgcacttcaaggatcagtaggtggtgccggactgctgggtgcttgactagtatttgtcattatttacatgagttcaacatgaaaagtttgtggtaagagagaatagaaaaggctagcagaatactaacgcagcttgaatgcaaaaatgcaataaatttatagagtatacaaccaaaatgaggtcatggatatgctctcctagctctaaggggctacaaagtgatattactaacacaaatagaatcatgtc

SEQ ID NO: 154299 - DNA, 506 bp, Zea Mays
ccttgggtgggttgccagggctcacctacctcacactaacggcggctgattggctgaagagctcatgcaaggcttcggtagttgatgtcgttgtcgctgatggcttcttcctcaagttgagatccctcaggctgtatggctggatgctccagttggtgcccagcgaggactcgactagtgtttcgttcaacatctggaaaggagatgaggacgttgtggcccttggtttctgcagaacaagtgtagcagcacctatgacctcctctatcatcatgccagacctcatagacctgtggttctatgtccctgttagagccttgtgtaagagtagaaatggaagcatctgtgacagcctcggctgggagtgcctcccttcgctacacaaaatcgatgcagttgtcgacagtaagggcgcctatatcggcgatgtgaagaaggtcgaggctgagatgaggcaggcagcaaaactgcatcccaaccaacccataattaatattctactactc

SEQ ID NO: 154300 - DNA, 703 bp, Zea Mays
ggcgttcacctccggtgatttcacgaccacaacgaaactcacatcatgctaccgaagaaggcaacaacaactagctttgtcctaaggaccttggacaccaatcaaggggacgaagctcttctcagggaggtaggaaaccaaaagaggaaggatgtcagcctagaaccataagttgaggagctagatcaagagattgacaacctcaaagcaatcctccagtagttggagaatctcagggaaaaggtgcttcgtctttttgaacttcagaaaaattgacgaagcaactaaagaaatgcgcaacattgaggcgcaagaccagaacaactatagggaccagaattttgagggcatcaaccatgacaatctttgtcatgaactagacaactttcaaggtttcctctacgacgaagcttccccattgacactagagctacagatgacaccctggacactgctatacagcccccacaatgccaatgtatgatggcctgactgatccaaagcaattcctcatgagttacgaagctaccatatcttcatatggtggtaactcagcagtcatggcaaagtccttggacatggcagtcagaagtgtgacccagacttggtactcacctcttcggccaaggactatcacttcgttgtcgaagctcaaagaaattcttctcactagcttttagggttttcattcgaagcccgttac

SEQ ID NO: 154301 - DNA, 383 bp, Zea Mays
cccgatcacagcaaaaccaaagctgtcgaccagggacacagagacaaatctagaatggaccaccatttggtgcaaaggtcgtggacagatctggattctagctatgtggtggacgtaggacatactacccggccgggaaacaattcagtgtgtctgataagcatgtgattacccgttaaatgaagccatgattcgacacgtacggtagcatatatacggcaagatgatcatcgtacgtggcagtgattggatgcctaggtacgtgcagccggtctcgcgcgagcttggcccagcacatatacgccacttcgttccatgcataatgctgtttttagtgcacaagaaagatgatggcacacgcacgcgtgggtttctgtgtggac

SEQ ID NO: 154302 - DNA, 722 bp, Zea Mays
aaggtctcacgcgccgtcgactttcccctttgtccattcatttgtgcactcacgaccatagccagagtgaacgtgagggtgtgggcgtcgcctgcttcaaattagtgagcctcgtcgctatcgcatcctcgggattgtgcctaggagatccgtcgtgccaagaggattgtgccggtggcctcgctgctgtggatcggtgaaggaaggcctcagaatttgtcaccggagcgcaaacttcaccgtgacccgcctcctaccgtggccaagcatcaacaccggataatcgcgggtaatcttcgtcttacctagttcactaggctgtaacttgcgcgtagagtgtttggagagggatctgggtcaaagattggtagtgaaatccctcgtcggagggactgccaccgtgggttgctggcgcggcggcgctggggttagatggggaagacggtcggtcgaccgttggataggagtgagcagtcgagattgaatctggagtttccttgggtctggtagtctggggccatccgatggcaatcgtggggtcaaggttagatctcggcattttaaatcaagaccgtcgatccgctcgcaaatgaatgagatatagatatgagagtaacccttcgctggggaatctggtccgttgagtcacgatcgagcggattcctggcgatcccctctctttaagactacgaccgttagatctaaatctgtgcgcctgcgta

SEQ ID NO: 154303 - DNA, 477 bp, Zea Mays
gcggcaaacggcgcaacaagcgcgcgattttcgcgccgttcttccgccagaatcctcgctgttggccgtaacaaactcgtccgatgggttgtataaaactggcgccctacgcctcgttcacttcacggtgtgtgggctgcgacgagttggagttgaggggttgggccaccattgtcgaaccgtggagcgcagagaggaataggaagccgccgtgacctagctcatgtatcaccgttgcattctcttgggtgtccctgacctctgccgtggatggtgtactgccgccgtgcttggccgtcagtctgagcgacgggaggaagaattgccgccaccgccgtacctcggcttcagcatcgatctgtgcctggaggtcgcctgcacaacagacagtggtaagagccctcgtatctgtctagccttcgtcttcctcgcgtgtagctcgacgagaagcattgttggcggtcccctgctcaggtc

SEQ ID NO: 154304 - DNA, 393 bp, Zea Mays
taatctcaaaagattatgtcttattcgtagagacttgtcttgttctagcaagcatacttatcccaaccacttggcttatatcataaccttttaacgaatataatctattctcatctaacaacaaacaaacttttgacctatatcatgtagtctatcttaccataactatcttaaccatattcccccaactccgatgagatacactaaacccgaagcaatgagaccaagaccggagaagaaaagatcaacctcgtcaaggaagggtagaagtcaaactcgatcttcaaaggcattaccacccaacaaggagttctttctcaccgcaaactttcttaccccatgctattcttgccctaacctatccatctcttataataaatagctcgatactca

SEQ ID NO: 154305 - DNA, 730 bp, Zea Mays
gtgagggctgcgtctaccaaaggcagcactgctccaacactggggaacaagcctggtccgactccgtggttgatgagggagacctaggtgacatggcaggcaagcggaagataaaccctgaatgcgcaaggttggtccttgtgaagctggcgtttgataggctccatgcttccctgtcattaggtttacctaggcaggttgggttgcctgtgttgcaggctgggggcaacagcaagctgttgtcttcccccggttctgttactaatgcaggttctgcatatggtgctccctttgaaccagctgctgttctgcagggtggggcaccaacaacctcgcaggcgctctcctcagcaatctctttgtaaggcagattcacctgtgctgcctcaattgatgcctgcagaaacacctgttgtggccacggctgctgcaaaaacgactcagaacattaaacatcgacgcttattcaatctctctgcggtgcgtcgtagtgctagactcactaatggccctcatatgtcgatcatgcagagggcacaacacaacctctgtcgcaagcttggcctcttggcgaatgacggaactcctaattttgataatgctttccaggactttcaggcttggttccagaaaccattatctaaggaggcaggggtggctttggaagccttgttcaacattcatatgccggacaccaaacacgttgacaatgcactgatggggattgcag

SEQ ID NO: 154306 - DNA, 447 bp, Zea Mays
ccaaaaatgaagccgagcatactaaccatttgcataccgtacttcagagactgcatgaccatcagttgtatgctaaattatccaaatgtgaattctggctgagggaaatcaagtttttgggtcacaccatttctcaggatggggtatcagttgatcctgagaaaggtagaagaagtgatgaattggacacctcctactacagtacgacagatccgtagttttctgggattggcagggtattatcgacaatttattccggatttctccaggatatccaagccaatgactgaattattaaagaaaggagtcaagtatgattggagccagaagtgtgaggatgcctttcatacactaaggcagcatttgacaaccgcacccgtgctagctcagcctgacaacaccaaaccctttgaggtttattgcgatgcttccggtactggaatggga

SEQ ID NO: 154307 - DNA, 517 bp, Zea Mays
aatgcacgttcggccaggcctcgaaagtcgatggccatggctcactgtcgctatcacttcttcctcatggttgctactgctccagactgactctacaagttctagctctgttctacaactacagaacgagagagaaatggaaaccttgcacaagaggtacaaatgcttgcacaaaaacttgagaatgagctgcagaaactaacaggaagggagaagcaatgcgccagatttagttttggagtggtgatgctgatgtattccttttgccgttatttctgaacaaataatgctagattttttattggaattacttccatatgattattttatgcagcttattgtgtattaacttgttgatttcctgatacttggtgtcttggtcaccaataggagaatgatgagctattccagttgaaagagcagttagaaaaatacaaggaggaagcacaagcaaataagaactacatggttcatgtgcatgtctctcaccttgttgaagtccagaagatcatgcttt

SEQ ID NO: 154308 - DNA, 797 bp, Zea Mays
ccctgcccgtacgtctaacgaatccacggctgcagcacccatgtctcgctggattactcttgctttgctcgtctcgtcaaacgatgatgtcgtcactgtaaggaaccaacccaggcaatttagccatttaatcaggtatagttatcactcatggtaattctgtacagcatcttatttatcatcgtaaatattataaatccatttaataccactcgaatacagtttattaccttttcataccgtcaccagtcacgtagaatggcaaaatgaaaaatttacatgtcatgtccatccaatctcttttgatttttttttattttgtactaaagatctagttctccccacacgtttacaccatctaattagctaattaattacaacgcgtgcttcgcctttctgtctccgaagtaaactccaatggtttttttatcttcaccgtctcttttgctctcgctactaccacgattttcttcctggtctaataatcagactgatctaggggcctgggtttgaatggtttctcgcgggtcatatgtggtgtgacggttcatatatgatgtaataatgttttagaggagtagagatgcatttttttacatgaagataaatagatgaaagagataatagactggtgacgatacacagcacgaggaaccgaaccaaaggaagcccgaccgaatatgcagtggaaaaaggtttggatgatagggacggccgacggggtggaaatgatgggtggctggctctcctgcgcaagccccgcccgctgagagcgccacttctccggtgctttcgat

SEQ ID NO: 154309 - DNA, 350 bp, Zea Mays
cccacgcgtgctccgcctcgccgcatcccactgctccacgctgccatcgccacccacaaggcgtgtgacctcggccccgacaaccgcatcggcagtgcaagaccgagacacctctcgttggaaggttccatggtgagtgctgatctgatctgacgaaggaggtggaggacacggagatggcggcgtggaaggcgcctgcagcgtcatgtttcccgacgacgacgcggtgttagatcccttgacctaaagcaacccgccatcgcgcctccccaacacagcctgctcctctggcctgacctgacaacttcggaggcaatcttccccctgcgccaaacgcatctggatccagg

SEQ ID NO: 154310 - DNA, 640 bp, Zea Mays
cgcccttgatgatcgacactggcacgtcgtgatggacaaggaataccaggcacctgtctagaataacacatggtcccttgttcctcggtcgcccaacgccaacatcatcactggcaaatagatcttcaagcacaagctcttggttgatggtactctcgattggtacaaggctcgttgggtccttcatgacttcactcagcaccccgatgtcaacttcagtcagacttttggtccgggaataaaacctaccaccatctgcaccgtcctcagccttgctctatctagggaatgggcagttcaccaactcaacatcaagaatgccttcttgcatggtaccctctcagggacggtctactacactcaaccttctagctttgttgacccgactcgtctgaaccacgtctattgtctctacaaatcgctctttggtctgaagcacacgccctttgcatggtacaacttcttcgccacacacaagtagtacctaggattccttgaagccaagtcaaacacctccatattcatccttcaacgaggttctgccactgccttcctgctcctgtacgtcgacgacgttgtcttgactgcatccaccactacactgtttcaccagattatcgatgccctccaagtgataaag

SEQ ID NO: 154311 - DNA, 1219 bp, Zea Mays
taggagatgaggttgacacctagtaagaaggcatagctagaggtgaactagcgtgtgtcaggacaatcaatcgaatcaacatcggtgtagaagactagcttagaagccggagaaggccaaagaagcagatcatactcgaggctgccacggtggtagtgaagaatccgcttggcagtgaggaggtggggctcccgtggggtgcgcatgtgaaggcacacctactggaacgcgtaggcgatgtcgggccaggtgaaggtgaggtactgtagagccccaatgaggctctgataggccacaacattgacaattgaggcgccatcatcgtctttgcctgattatcagtaggcgtggatcaaggcttgcaatcaggcatgctagcccgctctagaatgtcgatggtgtattggctcttgtgaaggaagaggccttgaggtggcgctccacggtgacctcaagaaagtggtggagagggctccagactttcatcgtgaactcatgctgtagggtagcgatcatgtgctggaggggtatgacactagacgccataagcacaatgtcgtcgacgtagaggaggtagatgaagtcattgatatgccgaaggatgaacatggacttgttcgacttggcctggacgaagccaagggagaccaagtaggtggcgaagcgactataccaggcctgtggcacctgcctaaggctatacaaagagtggttaaggttacacaccatacccaagcgagtggagtcgacgaagtcgatggactggctgtagtgcaacgtctcggtcagagtgtcgtgaaggaagacattcttgacgtctagctggtgtaccgtcgtcccgagagagctcaaggcagaggacaatcatgacgatgatgggcttgatgacagggctgaatgtctcatcgtagtccactccgaggcgctaagtgaagcccctaaggacctaacggggcttgtaccaaaccagaataccaccacccttgagcttatgacagaagatccacttaccggtgaccactttggtaccagggggacatggcaccaagtcctaggtgtggttggccaacaaagccgcatacttatttttaggacagtgctagtggggatagcaagcatggttcgaaaggaggggactgccgagggagctagagtagtggcgatcgtgagcaccagctagtcaatgggtcagagaacaccaaccggtcgacatgtgacc

SEQ ID NO: 154312 - DNA, 952 bp, Zea Mays
cgtctgtgtgtaccgaagggagaggaatgaaaaaggagatagctcagtatgtggcccggtgtgatacttgtcaacgaactaaggtagaacatcagaggcctgtaggcttactgcaacccctcccagtgcccaaatggaagtgggaagaaataggcatggatttcgtaatcagactgccccgaacccaaaaggggaacgattctatctaggttataattgaccgtcattccagtgaagactaccttcggaggagccacccttgcccggatatatctcaaagaaatagtcagacttcatggcattccacgaagaatagtgtcagacaggggaacgtaattcacctcaaaattctggatgagccttaagcaagctatgtgcaccaagctagattttagcatcgcttaccacccccagtcatatggacagacagagagagtcaacaaagtcatcaaggatttgttgagagcttgtgtgttgaccttcgatagaaactgggaatccagtttgccatatgtagaattctcgtacaacaacagttaccaggccagcatcatgatgtcaccttttgtagccttgtatggaaggaggtgtcaaacccctctgatgtggtcaaacatgggggaaaagaccctagaaggacctgccttcatcaaggaggcagaagagaaagttgccctgatccgcaagagactactcgaagctcagagtcggcaaaagagttatgcagacaacagaaggagagaactcagtttcgaggaaggagattttgtctacctcaaggtctccacaatacgtggagtcaaaagattccaagcaaaagggaagctagctccgcgattctttggcccctattctatcattggcagaatagggccagcagcttaccgtcttcagttgccagagtcatgtaagatatccacaatgtatttcatgaatctcagctccgaaaatg

SEQ ID NO: 154313 - DNA, 748 bp, Zea Mays
attaaccctgcctctattaggattctcctcactcttgccttgagtgttattatggatcgttgtgttctgactatacctctgattgttgctcttttgtggtgtctaaggattgcgatttgggcaattattgctataatgaccaaattcgccacatttcaaacacccattgggctgcactggggaaatctggttattcttcctggatggtgtgttcatagtgttaccctgtcggttctgaggatgtccaccagacctttgtccttgttgttgattatttctctaactttgttgttgattactcctctggccttactgaactgagtgttgaacttgatgttgatagtttccttcttgacttgcagagcaaaactgagagccttggtaattgttgtggtggcgggtattgctgcttgactatccctgagattgaaatttccttttgtggtcagtcagttcttttctcttgctttctagaccaattgccttattcaaaagagtttaaaagttggggaatttgtgactctgcagctgatagttcattggtccaatcaaaccttctaagaaacactcttggcgcttttcgttggtatctacttcttctagtgcatagcgtgaaagttgagtaaagcagtcacgatactcactaacagacatgttttcttgggtaagcgataaaaattccttcttctttagcttcattattttcgagggaatgtgatgagcacggaagtcgtcccaaaattcctac

SEQ ID NO: 154314 - DNA, 1068 bp, Zea Mays
gattcatttgatccaaaccgtccgatccgaaatcaagtacccagattagatctagctggccacgaaccagtacgcgatgcaagtcctcggatcggagatctgtggccatgatttaaagtactattcacggctacgatgcgcctacacgggatccgacggcacggatccattttggcgaaagggtatgcgatcgaataaatctaaccgtgtgatgcacatccaacagccacgaacagttgccccgatcccccctatcggacgttggcacagtcacactgccacggcggtgccatcgccggcgaccggccaatcgacaagctagtggccccacacaccggtacgagtgatgcagaatgaagctagggacctaaggaagctagtagggtcatcataccgaagtattgtgcgatgcagagagtcaatccacgacgcacagtggctctgcggcggatggagaagtacggtgagcaattactcgcgtcacggtggtgtccaacttgaattagaggcgcagacagctttcccaggcaaagacgatcctctcgacctaacaccgagggtagacgacacgatgtgatgagattcacctgcggcggctcgcgcccttctcttctcacagtggtggcgagtacggcggtgtctactgctgtgcacaaggcgaacagagaggagaagaccgcaactggggcctccgtatatctaccggggaaaaagatagggtctaagctaatcgcgaggatcacagtggcagttgcgtcaaccatgcgcgagtggaggtcgaggaagtagccgacagcaaggccccacccatcagtgagaatgagaggtaggtgtggtaccggctgacaggtcggttcccgcgtgacagtgaccatatgtgcgcagaacggtggagtccaccagtcagtgaaaagcaaggtgcgcgacgcggtggtgtgactgaccagtgggtccccactagcagcgccacaccataggttgggctacacgggcgcgaaccctaatgggccaaattgggcagaggcggcccggttaccgtttttccctttttcttttgtattttctttc

SEQ ID NO: 154315 - DNA, 537 bp, Zea Mays
cccatccgatttaccaggcttcattttcaccaaattctctgtttcatgcgatcgtttccgagccgagtgcccaaattccattttcttcgcctaaattcaaaccaagcacacacttcactcatattcactcatataaaccttttcatgaagtattggctcaattccacgtcacttcgtgcctcaattcgaattccaaacctcctatggcactatttctcgttcaaacgctgttttcacgtcgtttgacctctcgatcgccatatctctcgttttctgtgccatatttctctgtgtatgtatttattcacatttcatatacttatgactatgtgactaatacgtgctcacctcttctgtcatttcagtgatcttgccttcccgtgagccgtcttctgtcctgcctggatttccacctctcgtgtgcgttttccaggtagacatctcctcttttgatattctatcaactattatcgacttgtgcttagcttttctctctcatttgcagtcgtcaggtcaggatgccacgcacgaagaatg

SEQ ID NO: 154316 - DNA, 784 bp, Zea Mays
cattctctacgataatcaatatcgaagcgcttttcacccaataatttgcattttaacttagacatcacatgagcgctaatacttttcatccgtgaccataaccatacgcatttaggctacaacaagcaaatcatcgtgactacgagcttaactaaagtcatctaacgagtcagctagctagagcaacgacacagcccgctagacagcatacacgtcggcttgcctattattatcacaattcgaggtacaacatatatataataatcacttaacacaatcaactcctacctaacatgagttggctaatgccgtgactatttcccaattaccatcacacaccacctttcgccatttttggataaccggcacgacacacagctattgtaatacatctcaagttcattcaacccatcagtggagcactagcatatttcagaaaatttcctgagactacgacgacaaggcatcgagcttatcatgcacataaaagcatcacaagcatatttacggaacctatcgattaacctaatcgacacactagacatgttcttcgcccttcaaaatttatcgcacaaccaaaatcatcccacttgctaatgacaccaacaatacctactgatatgttattcacatcacgagcacagttacacgctgcatactagtttctaacataatcctcatataactcgtaattcaaactactcactaacaataaatcacgcacgccaactaccacatcgaccagttaatttatttggacaccgcctgtctagcgtaccactag

SEQ ID NO: 154317 - DNA, 667 bp, Zea Mays
gccactatgtttaagagcacatgctctcaacatatcttctaataaatgattggtcctcttagtatggccatctattttgggatgataggttgagctaaagtttggcttggtgtccatattctcatgaagactcttccaaaatcttgaggtgaactgagatccccggttagaaataattttcttaggtaccccttgtaggcatacaattcgagacatatataactctgctaactgggctcccttataggtagtcgtgaccggaataaaatgagctactttggttaatctatccattagcacccatatggaatcattaccattcggggtgtgaggcaacccgataataaagtccattctaatttcttcccacttccattctggtattttcaatgggggaagtaatctagctagtctttgatgttcagcttttaccctctgaccgacatcacatactaccacatgcgaggctacatccctcttcagaccataccaccaatatttttgtttcagatcatgattcattttggtattaccaaagtgaatacaataggccgagtcatgtgattctttttatatcatttctcggaggctgtctattttaggaacacatatcctgtttttgaacaagatagtaccatgttcatccactattaagtctagacctcta

SEQ ID NO: 154318 - DNA, 630 bp, Zea Mays
ggtattatttggttgattgatattgtatcccatatgcagaatgaagatggtggctggggcatgcaagaggttgggccaagcaccatgtttagctcatgcctgaactatgtcaccttgagacttctcggggaggcgtgtgcgcagcatgacgctttggccaagggacaagcatggattctgtctcatggaagtgcggcggcaatacctcagtggggaaagatttggctctcggtatggcaattttgttttaattaattaataatatatgcttttgccctacgtactagcagaccccactccaacaactacactgtgtgcttggtttccttcagttagttccacctgcaacaggaaccatgcatggtagttatagtggggttggtacgtaattaaaatgccaagttgatttatatataagttaaagtaaaatgccaaagttgaagcattgttttaaatctgttttatatatgtggagcgtcctttcctctcggttctaaagaatgatggccgaattccagctgcaccctatttgatttgtataaattagtaaccaagaaggaactaattaatcccttttctcttttccaactggaggtgatcggtttatatgactggaacggcaataattcg

SEQ ID NO: 154319 - DNA, 627 bp, Zea Mays
tactatttaaaattgtttaacacataattatgaaactaacaaaaccattcttatttcatttgatatacaattattcagttaaacaaaatataaacgtcgcagggatctaaacgatattaactatagaaatcgaagggtagctaacaaaaaatagatctcgtcttctaccttcagcacgtggccacgatatatggagcggatcgacggttttaacggtgcggacgagctaggcgcagggacggatcttcctggcgatgatgacggtgttcggtgtggcgatggcgatcatagtgacggtgcgagctccacgcagatagcagatagcatggggggtaacgagctccagcgggcatggcgctgatacatataggccggggaaggagagaagataacagggagaggaaacgaaggggtcgatgcaattaatggctagtggggagaggaagaaaaatgggaacaacgatttacgatggtggcattctccactgcggtagacgagagggcggctgcgagtggaagaggaaacggaaggccagtgcgtggttagcggcggcgttctcctgtaacgtaaacgtgagagccacggagaggcggagagcaggcagagcacagtcaaaaacatatttt

SEQ ID NO: 154320 - DNA, 730 bp, Zea Mays
aatgtccctactatagtctttggttactagcgctaccgactcatgcttgctcgtagtagaggttataagcgggtgagagagggagagaccacaagtctctatgtgtggtgtcttacttctttagggttatttttcgttgccttatcgactgtcttgctctctttctaacgaggttgacccctcctttttcgttgccttatcgattgtcttgctctctttctaacgaggctgacccctccttttatagaccaaggagggagtgtttacagatagcttctcccaaaagagagtgtaatagtaaaagaaggtttccacccctattgaaaacttgttgtatgttgatgtctttcccagtgtgggttttctatcgtatctctgagattgacgggagaggacttgattcgtgccggtgagggaagtccggggcatcatcattactggttcctgtccgcttctcctacgccgaccctctgctttcgtagcctatccgctgtttttctagacgcaggcctaggacccataggccatgagtgggactcaagcctaggccccatagatcataagttggaggaagattgatactgtttgcgttgctttccgttgaccgatgtagttaatgtggcatacacagggctgacatcacgaccaatccgacgtgcatacaatatccacttgaatggtttttgttcagtttgtttgacctccttcaccttcatccatctcgtccgac

SEQ ID NO: 154321 - DNA, 366 bp, Zea Mays
cgcccatgtcgttcctcccggccagcggcggcggcggcggcgccaggtgcggccgcggcgggccgtcgtgccccgtgcaggagatcacgttcgactgcccctccgagcagcggcgggtggccgggtgcggcaacccctgcgacggcaagagcagcagctgcggccccaacaacgggacggagtacttcaagaaggcgtgcccgcagacgatcacgtacccccgggacacgaccaacaccgtcttcacgtgcccggccgggacgagctacgagatcaccttctgcccgtgagaaaccacgagctggcaagcgagctagcgagctgagccaccgacacgtacggataggatcggagctcgtgatggat

SEQ ID NO: 154322 - DNA, 685 bp, Zea Mays
gggagtgttcgtgatggcattccacggtggcgacacggcgttccggggatccttctacggtagagttcaactgggcgggtcgatgagcatcacgacatgtaagagaactcaaaacactctcaagctcgaccacagttaccttagagagctctggccacggtgagatgtcttgaggcggcgcggatgaccgatttagggggatttccgaattccctggctacggtggatggcatgatgtggttggggttgcgttgggttcgtaacaaggggttggagcagggagagtcttcaatttaaaggaatcggctcggctactcgtggatttgaacgaagttacaatcacggaggtgacgtgatatttttactaaggcaagttcaccatggcacgcgatggggcaaagtcctatggcaatcactggttactgtccacgactcatgatgacatggtaagacggcctatggcgtggcacaattgaggtcaccagcatcccacgatgacatcggtcgctcggccacatcgcagagcaatagagcatggccgatgagctcacgcgagagaccataccacctcccttccgatcttttacctctatcagttatccacgcgccaccgagcatgaactgcaacaccggcgtggatcatggcgcggggatcaccggcaataggttctatgaatccttgatc

SEQ ID NO: 154323 - DNA, 319 bp, Zea Mays
ccggaggcgtctctttttctttttctgctcatcaacaggaggatcgagttgattgactcggcaaggatgtctcgggcgaacactgacaggtttctgaacatctgaggttgtaccagcctctgggagaggcgccaccaccaatgtcccagtaggagcagcatcagaagagtcctcagccagcaaatcaagcatagcacttatctctgcatcactaggatccaagggcacctcaaagtggacctgccattcactatcaggaacttccccgagcgaggcaaccaagacgctaacttcttcagcagagggtcgcactctaagg

SEQ ID NO: 154324 - DNA, 663 bp, Zea Mays
aggggcttgaggcgtgctaaggcttgggaaagcttcagcagaggcaggggcgacacaggaacctgcaccggggaactagaccgggctaaattggccagccaccgcgcgagcacggcggaccaccacggtcgagcatcggcgatgccaaaattggccgagcacagagcgaaactagggaaattaagcacgggcaaaggtgtctcacctcggggcggagctcggggaggcttggcgcggtctccggcgagctagatggtcgggaacgcgggcgcgggtctctggtggcatctggcggcgtgggcagagcgcgagagagggcgatgctgtgcgaaatgaggcgagggagcgagtgggggactggcggggctctaagaagggagctgggcgtgtgggcgggcgtcgtggccgagaaatccggcgatgtgcgcgagtgcgcacccgctggtccacgacgagcgcgggtagggcggaactgacagggagggtccacagcgcagagagagaaaagggggcgcgcgggcaacggctcagcgcctggcagcactggcccgcgagacaaagagagaagagggatgcgcgtgggcgaagcaaccggcgccgacaggtcggccccagcgggcagagagcgagagagagagagcgcgcgggagaggaagccgccgc

SEQ ID NO: 154325 - DNA, 876 bp, Zea Mays
gattgtggataactgtgggcgggtaaagatcttggcgcctggatcagcttgagtccggccgcggttaagcccgccgtacccccttgctcatcggtggatcgggatgagacctcaccgccgttgatcgatcactgccgtgcgccgtgtgtccagacactttaccatgtcacgattagttgcgttaggggatccggtgatcgccggagggagcgccacggtgaaaaccactaagcacttgcgccagtgctcccttccctctccgaccgccgcgcgtcgttgctcaaattcgcggccaccgctcatgtttactataaattgaagccacagtgagctccgtaggatgatcatacaccaaaccaccaagtattgtctccagtcatacaaccgagagctccaatttcatacttcccccaatctgctcaaaaacaccgcaagaacaccctcaccgcggccagctcaattcaggtatgctcatatcttcttctcccttgtttgagtgttcttgtgtacccttgatgctcatcgacccgtctaattgaactagaacccccttagtcactgggaacgcattcagctatccgcgatgtccacggtcaccgtggccagagcaaaccaggaagccattagtgaaattaagtgggggaaacactcattagaccttgaattcggtctcggttgaagtatggcgccagtcgctgcgtgagtcggccggtatacgggctcgccggagctctacgcaacgccgctcgacgttgggggcttatttggagaagaaacgaagttccagggacctcggtgtaagatgtcagtgactcttagaatattctgtagaacgttttgcaaattagttaagacctcgggggcgttttcgtaaag

SEQ ID NO: 154326 - DNA, 284 bp, Zea Mays
cagcatctgcatttccagcattggggactagggcgccaggggaggggcggcatggcgaactggagactgacagtggggttgaagccgtatagagaaccgatggcgctggggcaagatggaggacaagctcggacgtggaggtagcagacagggcacgaccggcaccttctggagatgaattcgtgggcaccggtgagaggataaggaggacacgatgcctccacacgtcaaaataagaatagagggagaggacacgtagaggataaagaaaaactcagattttc

SEQ ID NO: 154327 - DNA, 846 bp, Zea Mays
ggtagatatatttttaggcaaaactttggacaccatactgcatatcatattagtgtttgtgaagagaggtgtggtttcatatttaagtgactgatgttttaaaaaataaaaaatctgacaagtgctaaaatagctcatgtggtacacttaatatgcaaaatttcttgcaggacatattgcccacaaatattgattcaactacatctaaaactctatttatttacggaaagggtgcacgaatgataaagctacaatcaattagagaaaaggatatatataaaaaacttagacacacaaacctaaaattgccaaatgaacagccacacgagtagttctctattttgtaaaccaagtctgtttgtgtttcagagaggtgtggtgttcatatttgagtgctcagagagttgtcttccatcttatactcgagcatcgcaagatttgggcggggctggcgcgtataatgggaagtacacgagcatcgcaagatccgggcggggctggcgcgtagaatgggaagaatgagatggcggggtggtcctgcacttgcgatgggatgcgggccgatggtggtcctgtgcactggatagcgacgaggggattggattgcgattccttccatggcgacaaggcatggatttcgtttggggtgcagaggatatgggtggggcatccgcggtgcatgggaagaatgattgggcagggtggtcctacgcgtgcgggtcgtcggcgatgggatacctgcgtgctggattgctaagaggcgtggatagcggcgaggggatgtgtttccttgtgtggcagtgacatgatttttccttccatggccgattgtggctaggaccatgc

SEQ ID NO: 154328 - DNA, 537 bp, Zea Mays
ctcgagaagaagctacggtgttgcgggcaattcggtacggtctagttcaatcaattgagcctacaagcaataggagatcctagatatgctagaacattcaacagagggttatgaatcaacctggagcaggctggccatggtgagctcacaccgcacggtgttcttggttgatttgggggaaatcccaaattggcgagctcaggtgagcaattggaggcacggcttggtggattgggtgcttgactaccttacagacccaatgacacactcaatttataggctccgggggtggtggcctatgaatttgggatggcacggtggcggccggagaaggaagaggttactggcgcaagagatgtgttcctttcaccgtgacagtcttaccggcgacgagccagcaatatggagcggtttactgcgacgtgtgaagcttcaaggcacgtggcatccaatcgccaggcagccatcaccggtgagcttatctgaaccggccgtgagtcaagcggacacggcggccgggcagaacagggtctcaag

SEQ ID NO: 154329 - DNA, 934 bp, Zea Mays
gtcactgacgctttgcaaataaaccctccatgttctatttctttgcagtgggaggtccacgacggcgttctcgcgcggagaaactccggcgagcctctgtactggccgattaaggcgatgaccgacgctcccgagcgacatacaccaaatcggacctatcctaagcttttcccctaacttaattgccctaatgaccaattaaggagctctggccacggtgactaagagcatggcggttagatcatcgtgttcccggcgatgggtggcggtctagttcaattgggggggtcaaagagcttaaggaggatctaagaatgctagaacaagcagtagaaggacttgagctcacctaaaccgagctggccacggtgaggccttctttgcggtggcagaaagctgatttgggggaaaacggcgattctccggctaggggggctaatcgagggggagagtgggtgctatggcttcgtggtaacttggcgcaacagccccggccatcaatttataggagggtaaagcggtggccagtgaatttggggaggacgcgcggcggccggaaatgaagaagaaggcgggcgcggtgaattcgtgtccagtggcgtggcagttgttccggcgatcaacggagagcaggggtaagttgtggcgatgcagtggaaaggggtaaacacgcggcaccaggccagagggcggcggtcaccggcgttcttatcggttttagccgcagggcagaggggaagtacggggaggtcactgaagtggcgtccaacgcacaggcggtgaagatctttctacccagagcgttatccccgagtccggtgcacgaatccaaacgccggcgacacaaatcgtggcagagggattcgtcggcggtgaggatggctctgctggtgatctgatccagtcgggctactgtaccatggcgagaccccat

SEQ ID NO: 154330 - DNA, 706 bp, Zea Mays
aaacagggctccaatttgatctgtcagtcaagctttttactgaatccagtgcactgttcatcggttttcagtaaactcgccgtggataaggattggcccgccggcgataaggatgtcgccgtggctcgggtaagacgtcggcggccacgacaaaagttaccggcgacgtgtcaaagcctccctaaggtggcaggccccggttaaacggcggtcaccgcgctgtcaccggaatccgccgcgcgggtgtgctcgccagcgcagtcacaactcggggatctcatccctcctcggccggccgactataaattggaccctggcgttgattcgtcgttgcatcacgcgctcaagcgatcactcaattgaactgaagaacccacgagctctttcctccctgttcttagctccgccgcaagaatccatgtgtggccagtgcaattcgagatagctcgtgtcttctacttcctcgtttgagtattctcaggtacccgtgatgcttcccgacctatccaattgaattataccatcattaatcgctcggaacatgcggttcctttaagattctccgctgtcgccatgggcagagggttgtagagctccaaattagaaattgagtgaggggaaatactccttaggggtagaatctggtgtaaactaaagattagcgtcggccttcgccccctccggccggtatagctcgccggatttc

SEQ ID NO: 154331 - DNA, 572 bp, Zea Mays
taattaaaaataaacgttcaacaagtttacaacaagagaatcatgaaacaacgaaaaggagaaaaaggacagcaattacaatagactttggcaccatgactcaaaaaagtggctcgatctctgtttagctctaaaggagagctggccaagctctttttggagggcacttcgacttgtctgcaaatttggttgcattgctttgaaaactaaatcattcatagtcgtcctaattgtctagtttaacaggattacgatattcatgaagaagggcgagcttagctgtatttgaaaatcttccaggacttcggacaggctcccttgttgtctgactgtcaggttcagcaggttgacctaagtgtgccttttttgcttggctagttgcagatgctggacggctgaccgtttagccaaaagaaacttgcctcatccagctcgctgtctactatgtgatcaggaaaaagaaaacatcaaccatttgctagtaaatttgtgttttcgcgcgacaattttggtacatcctgctatagagattgagccttgctgctattgccccactccattcaacattttcc

SEQ ID NO: 154332 - DNA, 516 bp, Zea Mays
gtgattggccacgagaaacgtacccatcatgaccggctctccctccggtgtcgtggccacttgtgtataatagattcacccagttttcttcatattcttgcctgctgcattatttgccatgtttcccttgccttggctggaacttcctgggttctgctgattattggagttgttccgcttcggatatgggcagtctttgatgaagtgtccaggcttcccacaattaaagcaaccagttgatgagctcgggagtgcagggaaacgagcaccagtggcactcggctgagttgttgaagtgggggcagtggcaaggcggatgaatacatgttgtttaaaggggtaggagggtggacgtggtgaagaacggttttgattaaaaggtcggatcaccaaccttcgtagcttctcaggcccctggttggacctgtcacctccatagccctttgactttcctgggcctgcatacttggcttcaactgctagcgtcgtgttgatagccctactgtaggagaggtc

SEQ ID NO: 154333 - DNA, 638 bp, Zea Mays
gcatgacaatgtgcccttatttgtttgtcgctaagcattagagtcggcagtcctgcaccctaaagccatccagatcaggatgcatggcagctggcttctggtgggcacttcctaaattttcggtgagcaaaatgcttagattctctcagaaattgtgccttcaggagttttcagtattatgatgtggttatgcattatgttttctcaatgtctgggtggaaactttgaaatgtctactatcacttgtagcattgtccaggatatggaacagtcaaggtgttacagaagataatgggtggtgattgcacttgtactgtgcttgtcgatagtacatattaggtgcttgttgtcttcttccaccttctagacatttggttttgttgttttcaggttaattacatcttttgatgaagttagagtttaccccattcctgtaatgctttacctggtcaagaacttattgcaggtatgtccagttgcccactcattctgttgtatgattttttaaaaaaacaaaaacaagcaaaacataaccatgtttcccggcttctgtggttgtcagtattatatctttgaatatgtggatgcaccagcttaccagattctgaagaacttgaatattatcagcactggtgtcc

SEQ ID NO: 154334 - DNA, 651 bp, Zea Mays
gcgggtttatttttaataacgatggaggctcatatgcaaatgcgtgaccgcgaaggggtatgcacggtttctggccgccagatcgcgaatcaagggccacgattagatctaggttatcatcaaccagtacacgatgaccgcccacggattgaggatctacggcccggatctactcaccccatcttcctctctacaccgttcatcacaaatggatgcctcagatttaatcacgcgaaacgatatgatttggtctaatctagaccgtcgatggccatctaacggctgagcgtcgtctcctacatcgcccatcacccgaccgaacacccagctgcggcgtccaccaaacacgaccaagccatagccggccgcacctagagctcgagtctcgcttgtaaacttcactccgacaaccgcgaaacgaagagcagtggatcgcgagactggtacatgagttctcaccacggttggtagcgcagacagccctggccacgggaacctgcggattcaccaacaccggcaatgtatttcacgatctccggtgatcttccccttcaattgcgcccacacccggcttcaacacgaccaacacttccaattcaattgaccctgaccacccagcagacctcggacgacgatgcaacacacgacgac

SEQ ID NO: 154335 - DNA, 536 bp, Zea Mays
gtgaacactgagcctaacaatggcattcggggtcagctgatggagacatatttcaaatcttttcaaaacttcccctatcatatcgtacagggggaaccgaagccctgccctgaagaagctcttaaacacaacaacctcatcttctttcggctctggaattacttcttctccagcaaaacgaataagcccatctttattttgccccaaaatagcctagctttttcatcacaaccaagtcctctgctgttacggtcgattttccaaattcaatgtgactaggtttcgttgggctcagaatgctgttgtcctcctcactttcgttgtcactttcgcccttcagccacagcctgttcagcttcggcattggaagcatcttcggcagtagcttcttctggcacaaccagacctgatcgtctcatcacttctgatatcggtgctgtttcagttacttcggtctcgtctccctcacggaacaccctagcattggattttactctggccatttcagtgttcagtttccttaagacgaagctgat

SEQ ID NO: 154336 - DNA, 398 bp, Zea Mays
attcaaactcaaatttaaaagataattcaattggaaataaaaacagaaaagaaaaagaataaagaaaaggaacattacctgcgctttgggccaattcttttgtcggcccaacttcctaccccgtcacagcccaactaacctaaaccctagacccatcagcgccgtcggctccgctgcagccgccaaacctgttgtaccgacgcgtgggccccaaccgtcatctggacatcgcgcacgccaaatccacctgctggcgctggtgcgtggggccctccggtcaactacttcttctcccctgtaaccgaacgtgctcagctacgcaagcgcgcgggcgaaaccacctccgcgtagcccaattagactccgcgcttccactgtgctactgtcgccgccaggtg

SEQ ID NO: 154337 - DNA, 471 bp, Zea Mays
taaaattcgcgtagagcaggctgccagcgacatgatgtcgctgatacctgcagaggtctgcttctatcttcggcaagccaacgcttttggagagggttctaacaattttggcctcggtgcggttccgaaggcatcttagcttcccttcgttgaccccaccaaatagcatagcccctgatttatatccacaagatatggcatattttttcaactcttctttttcggcgtcaattaactcttgtccaagcaaatcttgaaagttaaaatctccttcctccgaaatttcatcaatctgctctttccccttttcagttgccgtgttcaccgcagccataacagcttcttcttcaaccattttcaggagtatattgtcaataacctcaagtgtggtttccaggtttgactcttcgatggtcccggcttcggccccgatagcttcggcttcggccccggtagcttcggcttcgccgg

SEQ ID NO: 154338 - DNA, 360 bp, Zea Mays
gcgtgctgaaagtgtcagatttaacacgaagaggaaaagtctacatataataagtgcaatagtcaagaatgaccaaataatatttgtaaccagacacactaaccactggagatgtccacatgtcacattgtataagatcaaacttattaggcgcacgagaatgagaagcatggaaaggcagtcgaacgtgacgcccaagttgacaagcatgacataaagttgaacaatcctctaaattgaaagtgacacttgatgcgagcttcgacagagcttcatgactgggatgaccaagacggcggtgccacaagggggacgcggtcttggtgacaaaagactgaactggaggaagatgcaaggggt

SEQ ID NO: 154339 - DNA, 424 bp, Zea Mays
taatttcaaaacgcagttcacattttgccttaaatgaagaaaactggagccaagcaaacagatgagtgaatatacgcacaaacaacatagtgaaatcacacatttaattccttatggttaagaggaagtaccttgtggtaagcattgatgcatcacgagatgaggaggcagacattgctcgatcaatctcctccgttgtgaaatccatctcctcctcttcctcttccccctttcttgctcgcgcgactcagaagaaatcaaaatcttcctttctgcacccacaggaacaagagtcagatcaatcgtcgtctcatcctaggcctcccaagcaacaaactccggcgaaataataaatatggaattttttcaggcgcacgtacctcgttcaccttgtaccggtcgagggtcacctgcaccagcgaac

SEQ ID NO: 154340 - DNA, 751 bp, Zea Mays
cacaaggtcctcgttgacaacgagagccaagccaacatcatctttctgcatgcctttgaccagatgagcatcaaccacaacctacttcagccaaccaacaacccactctatggtttcggaggaaaggggacatttccacttggcaagatagagctccccctctctgttagcgcaaaccccaatgcaagatcagagcaggtgaccttcgacatagtcgacatggtctattcatacaacaccataatgggcagagggtccatcaacaaacttgaagcagcaattcacgactctacttgtgcatgaaaattctaggccccttggcacaataacaaattacaaggaccaacaaactgcccacaacatcgaaagagacttcgtcctagagtagcacaacgtccattgcctcatctttgaggacgaaggccacactgttccatgtactgagaaagcagcaccaatcaaagcccaaattcaaagcaccgactaggccaaaaaagttcccatggacgcctcaataccaaatcagacagtgttaatcagcgaagacctcacctaagatcgagaggccaagttgttatcctgcctaagtcacaacaaggatgtcttcacttggtcagccctagacctcatcggcgtcagccgttcaatcatcgagcatggtctaagcatagacccttcggtcctgccaaaaaagcagaaactccgcaaaatgttggacaagaaaaccgaagcagccaaggctgaagtccac

SEQ ID NO: 154341 - DNA, 684 bp, Zea Mays
taacaaactcctatttattctctatacttatcttcctatacaacttcctaacaacttatccctatttgctagcagcggacagctctgatctattgctggtcgtgagcttatcttctaaacaaatctcctattttctagctactagcaactgccagctattcatgctccctgatctgttgctggacgcgtggccgacgctgatagcggtgaccccacatgacatttctccctccctcgatgagcagcagctcgtcctcgacctggaagctggggtagcgctcgataaaagcgtcggcatcttcccacgtggctgatgcggtgggctctcctttccagtgaacctgaagctagcggacaccccaggccaagagggagcgtagaacgtgatctggttctggaacaacagccccattgtggatttgcggtagggccgatggattggccggcggcgtgcccacgaatttcttcaagagtccgacgtggaatacgtcatggaggtgggcgcgaggtgggagctctaggcggtaggcgacgtcgttgatgatggtggtgatgcggtacagttcgtagaaccgtggcttgagcttccctgacgtgggcatgtgaggcaacacggtggtgcagacggagccacacccaatcgcccacgacatagtggacatctcggtgatggttgtcgtagaa

SEQ ID NO: 154342 - DNA, 455 bp, Zea Mays
atgtaatggcctggtgtaatgaataaaataactagttaaaaaaaggatggcatgtgcatgatagtgactctcttcccatggcagatggcttcggataaaaccacgcctaccgcctccgggattggagcaggttttcctctgagagccgaaggagaggctggcggagaagggagtgagacccacctccccgcacctccggaactaccactagacctagcccaagttctatccaatcaaacccgactcattgaagtcctcactagaagtctggaaaaccagcgcctaggtggtggaaggccacaggacaggatgggagaatttttgagactcaagcctcccacgttcgcagggtccagtaatcccctcgatgcagacgattggcttcgcacgatcaagagaaaactggaagccatcagatgccccgaaaatcagcatgttcaactagctgctcatca

SEQ ID NO: 154343 - DNA, 418 bp, Zea Mays
gcggccggtgggtcagaaccttcatcttcttgcccttcggctcagctgtgatggccaaagcagcaatctttcccgaagcagtaatctttctccttaaccctcgccctcacaacgggtaacaatagtcagggtatacgaagccaatagcatcaaataccctattcaatcttttcttattccgaccctcgaaagctgcggataaggcattgtcctcggccttggagtatgccccaagtagctcgtcgctagtagcttcaatgcacttcagccagtcatcatttggctcatcaaatttatccccaaacttgaaggtatacttcagccggaccagaccaccttcgctagagtcggtggtggtctccttcggcatttcccagctctctacaagcggccataccctgaaggctatatgttcttg

SEQ ID NO: 154344 - DNA, 997 bp, Zea Mays
tggggagcaaagttatccaacccaaactttctgagcagattataccagaaaatccttgcaaacacacatgagaccagcaggtgattaatagattcaggttcttggtcacataatggacaactgcttggatgagtgagccccctctttgccaatctgtcagcagtctagcacctgttatgggccaccagccagaggaagaaatgacattttgatggagcccaagttttctagaccctcttatagtggccaaatgtgcaggatcccaggaagagacccttgtaagctgctttcgccaaatactttccatctcgagctacactaaagatatgtctgtcttcaatgagagggtgcagctcaattttggagagatagtcccagagctttaagtaatctgccaaaactccaatagtaagaccacctctaatgtcagatatccatcttctgtttaacaaggcctcatgaattgttctactttttgttatcttctttgggattatagagtatagtctaggggcaatggtcgagatgcttttactctgcagccaattatcaaaccagaaaagggtactatacccatttcccacctccgagacaaggaccttactaaagaactctctggctttacttggaacctgaataggaagccatgtccaaggtcttctagagtcggttttttgaagccacagccatcgcatccggagggcccatccaagctctgggaggcttgatattcccagacctccaagctgaagaggacgacacaccttgccccaagccaccaaacagtgccccctttagcttcctttcttcctctccaaagaaatccctttcttattttatcaatagcatcaagggcccaatggggtatataaattgccattgcaagatacacagtcatacctgtaagaacatgttgcactaggattctcctgcctgctctggtcatcaaatcagctttccaattaggaagttggtcagcaaatctatcaacatatgg

SEQ ID NO: 154345 - DNA, 372 bp, Zea Mays
acgctcgtgagcccgggccaagctcatggctgtttggaggttcggtggtcgcttcagctcgacctccgttcgcaagggttcccctaggcctgcagtaaagagctcaacctgctggtgaggcgtgacgtcgtgcgcacgacacaggagctgggagaattgtcgttggtagtcctccacggtgccggtgcgatacaagtccttcagctccgccaagctattgtgtcgcagcggaggcccgaaccgcatgttgatgtacttggcaaagcggcgccacggcaccataccgtagtcgagctcgaagccgaagtaccaatccagtgctgcaccgtccaagtgcagggacgccacccacactctgtcgtcgtcgagtgt

SEQ ID NO: 154346 - DNA, 879 bp, Zea Mays
ctacacacgtcatcgtctatctgtcacgccgttgcggtctcccagtcggatgcctcatgatgccagctgtgtggcctccgtggtcgtgatggcgcttcaccgagcggtctcgacgcgacgcgcgggggttgtcgggaacgacaatgcgtcctccgctgcgctaggtggatgcctgaccggcgataaccgagggatggtcgtgcgtgccagggtggcgaaggccacacaagtagtgccgagggtggcaggcaggaagtacatctcgctgcacccatagtggagatccccgtcacgtgctatcaggtgaacagttcgagttcatggtccattttatggattgcaatttcaaaaatgagttcgccttctgttgtctgaccgtcgccgcctgttttgattcatcggtttgttacttcacgacgccatgtcaattaattacctcagttgcagattaaatcagtattttcctatagcgagtcaaattcattgtgcgcaccggtaatttgatgcacttccctcattttttggagtaaaaaaaatgtgtggtcgcattctgaaattttgttggattagttcacgattgattggatcgtttgccttttttaatagtttgttgattgacatgtttaagcttaacaatcaccgtatagatgttagagatcacagaggaagatgagaaagatgagatcacgaaggctgcaattgagttaaaaattgctaggatagaaaatgggtacatagctgaggtgtccactttcaaataggttcctgattgggttctacagttgtatctatttatgtactccatgttttgttttgtgaggggatgcgataatcctgatattaatcatttgtgtgctgcgagaggcgattgaagttttg

SEQ ID NO: 154347 - DNA, 820 bp, Zea Mays
gcctaatctcataagcatttcatttctcatatgcataaaccatgattgctagtagcacttcacacatagcatttcattttgacacctaggaattatcatgaataaatgaatatttgtataaaggagaaaaggaattagagaaaagaaatgagaaaaaaggaaaacctcccctcccctctcggctgggccaattctggcccatgccctatccctcgctccccgcatcacccctcctcggcccaaccggcccaccagcgcgcgctcccacgctgcaccctccactctctcgctgaccactcagccccgcttgacagccgcgctctgccctgctctctcgcgcccgctattcctctgatggatgggccccggcctttagcccttgttcctgcccatgctcagcatcgacgcgaactccgccgtccgccgtccttcccccgctccaccattactcctgcgccagtgaagttaggcaccgcttcgcccccctgtccactgtgctcacaccctcacacggcatcccgccccgagccatctcatccccgacgctgtgtgccattatcgttgctattgtgcacctcgccgatgcccgccagcctccactcctcccctacccgggcgcctataaaagggccgccccgagatccacttctcctcgcaccggcctcggccactctcccttccctcccctggacccaatcaagctcagcgccgccgccttccttcactccggtgagctctctccctcccctctccaatagcttagagtcaaattatagtagttcacaaacttcaccacttcaccacgggcacagaacaccat

SEQ ID NO: 154348 - DNA, 967 bp, Zea Mays
atttcttcacggtcctaggtccacgacggaaccgcgccgagcacacggccagagtcgcgatttcctggcgacgacgacctctaccggagacaataatcctacagacatcatgcgcaagcctacccgagcaaaagccctcactcaattggatgggtttgacccaaatcgatgcttgttcacggtcatggcggcacaagggctccggtgagcgtgttccgggcaacaaaacgcggtagggtctaaattgaagcttgggtgagtttcacaaattcacgagaggtcgagtatacgcactaatttggaccaagcgaggggggtggaagagtgagtcgacgtgagcatgctctcagaggtgttccgtggcgtcgagatggtgttctcgataccagaatgcggtagtgctcaatcggttaggccgatgagcaacgttaatagtcaaggatgataaaacatggtacagaaggggattaacagacctgagatcggcaggccacggcgagatgcctcacaacggcgagtttggctaatttgggggaaaaactaaattcgctgtctatggtggctaatcggaggtgagagttggtgtcctggcttcgcaacaggctaacggagcaggctgcacactcaatttataccgtttgcaagtggtggctccgaatttgggaaaggcaagcaggcggctggagcaaagatgagtcaccagagttgcttatcgtggcattcactgggcaaagggtttacgacggtcacgacttagtcttcacggcctgcgacgacatggtgaaacggcttaaggcgtgtcatgaccgaggtaaatggcaggcacgacgatgatggtcgtgcggtcacgtcgccggtcaagtgggtacgacgactaagaaggaacaatgccccaagttcatcctccgcgcaagatctttcacctcacatagatatccgcgcaccactaggcacgaatcacagcgcc

SEQ ID NO: 154349 - DNA, 401 bp, Zea Mays
ttggtgatctagaggtgatttccctatatgctgattttgtgggagtttactagcacttcattttgtgggagtttactagctcttcatcttaggagtggccagtcacttgtgtggttcacatgtccgttagctgtttctactgggtagtagatgggtggacacattttgatcttttggtggttgagatgtcatttcctgtcataccttgcttgttggcaactgcgcagcagcacgagtaaatttcgttatcctatgatgtcgatccgttctatttgtgactctgcctccttcccatgcaaaataggggctacataggtagtcatattttggaactatgttatcaagagatctcactgcaaacttggtgccaagtgctcactgttgagaatcagaaagtttag

SEQ ID NO: 154350 - DNA, 930 bp, Zea Mays
ttcggcgcgggattactgggtcgattggcggttgattctgttggatttccgcgtgccactgccattgccacgattctgttactgggtggggaggtcgatgagcgtgcgtgcacgtggttctaaatgctgttctggaacctcctaggaccaggggtttcagtacacttagccacgtttctagcctaatagcacaatttgtcgactagttctgcaaagtgcagtcacggcggcgtcgtattcttgttctgtgcgcatgcgtcgttatcttgtgctcggcttcggtgtgtgtgtgcattgttgttagggatattctaggggctgtgtttccacaaggtcgtctgaggaccagccgaggtttagtacatttccatcttttcaatggctcgactgtttttgcctgataccccagagttgccaacaagtagtacaaagtgcagtgaaggtggcatcattttttggttctgtatatatgtctgcgatggtatctgctgctcatgctctaactaggacatcatactgcatatgtacattgtgcaaaatgcgctaccatgttgtcctaaaagattgttattacaccacattttatgctttggccatgttgtttggataattttcttggatggctaactgctgtgctatgaggttgagtgccaatgtcccattgattttaattcctggagcaacatggcttaagactattctacaattttatactcctacctgatggtaatgtagtaacaggcttgcatttcttgaaatgggcagtggtacttctagatgctcctgggatgggtgtattatacgagtcttgcaagaaactgctctggttccatacctaataattatctctgtaccaatgtattgggcacttctgtcttttggttgtatcattgcatcgcttgtctcgtcctcaatgtgaatgtggttatg

SEQ ID NO: 154351 - DNA, 563 bp, Zea Mays
tgaggactaattacacgggagccaagctagcagaattgtatatgactcagatagtttgtctacatggggtgcctaagaagatcgtgtcaaaccgaggatcacattttacttctcggttttggaagaagttgcatgagagcttggatacacagttgaattttagttcggcctaccatcctcaaactgatgggcagacgagaggactaaccaagtgttggaggatatgttaagagcttgtgctctcaaacatggtggcagttgggataagagcttaccatatgcggagttctcgtacaataatagctaccaggccagtttgaagatgtcaccgtttgaggctttatatggcaggaagtgcaggaccccactgtattgggatcaaactggtgaaagacagttctttgggcctgaacttatacaagaggcagaagaacaagtgcgaatgataagagagaatttgagaattgcacaatcaaggcagaagagctatgctgatacccagagaagactactgaagtttaaggagggtgatcatgtgtatctgaaggtgtcaccgatccgag

SEQ ID NO: 154352 - DNA, 572 bp, Zea Mays
atggcagcaatcaagaggagctgagggctggaggggagagagggtcggtaggaggtgaaagaaacgaggtgagcacgtctcgtactggccaccactggcaacggtgagaaatggaaaggggaccgagtaaacgcgaagtggtggtggggactggcgctggccgacactccacgttgccttgacgtcaacctgcggtaactacctacagtacttgtactactaccccgcctggccccactcgacttcgttaaattccctgcgcacactcccaagtcccacctcacctcacctcatcattgattttttactttactgcatggaggacgtagtgcctgccaatgtgtcacacatcatgtccgcggcggtgtacatacatatacaagtacggagtactgctatgttgcagtaatattatcttttatcttatcttatccaatactctgagcgtaaccgccactccagcggcgaccttcgttccctgcacacgcattggttcacctcctagtctcaagtctcaactcaacaagccaatttactactaacagctcgtcagaccggtagctggcactgac

SEQ ID NO: 154353 - DNA, 354 bp, Zea Mays
cgtagattgtaactcgatggttcgtgccagaggcacgaggaagagagagtcaggtgattgtctgcaggctcgggccgcttgagaagcgtaataccctactttctgggatggctttgtgcgtgtagggtgtttacaagtggtgtcttcctagtggaggggtgctaatgagatgaaaataatgggatccccctaggccttatttacacgaccgtagggcactccccgcacacatgctaatcacactcttccaacttatctcctagctaatagcgaatagactccacttatcccgaggaaaacccgacatctccgtttcgagctatcaccggcgtttgaggacgtcgggcgcgggaa

SEQ ID NO: 154354 - DNA, 429 bp, Zea Mays
gtctgactaccgaagctgtggttgctgacttcgttttcaagaatattcagcctttgaaagacagggcgtatccagcttacttgtacagtggtattactgattcaactcgggttaccgacaggaaaattcctactgaggatctagtgagccaactagacatgatcctgaggggcaaggtatcaaatgttggtgctcctgttgcttattctgcttggaatctgccacctcctaggtcatttttcaatttcgtgtccaaccctcctgccagtgatagtggtctaggtcttagagtgcgaccctctcctgaagacattgaggctctggttgctcctcttcgtgatcttcccaatgatgagaggcaagttcactttgagatgctgccaagtccggatgatgtagaaatagatgatgtactcaatatgttggctg

SEQ ID NO: 154355 - DNA, 277 bp, Zea Mays
aaaacctcctcatccagtcgttgccctccatccccacatgcccacgctgctcgtcgcccctctccaccaccaggaatcattaagttcacccgatccagcgcatcgcatctgcaaccgtgcgtccagttcctgctttgctcagctgacgcggtctctacattagatcaggcctgaggtgagctatgcttgtcgcatccttgactgggctcacacgcaaacactacagttagtacactagtataaccaagatgtccattgatgtgatagaatttgtggt

SEQ ID NO: 154356 - DNA, 1127 bp, Zea Mays
aacctttatcatgaaatcccccttctcaacttctctgatatcaaaaacctcagcattaacaccaacaagaagaccaccagatctccccttagcaggcgtccagaacctggcgaaatttctattaccattaataaagttcagccacgaatcctcaaaggcttttttattagtttcttgtaaaccaataaaatcaattctttcttttctaatcaattcttttaagaattcaatttttattccttttcccaacccttgacaattccagataagaccaatcattctgaatagttaaggttgggcacagaagggagctttttccctttattagatgagtatctaactttggaagaagattttttcttctttttcttgactgaatttttcttataatggattttcctgccttttcacaatatcataacatcatccaagtcagtcaactgattgtttccattatcatcttggatagaattatccaactcagtgtcagaaccaccttgtggtttatgttcaacaggatttttgatagcactacaaacaagaacattcctagacacttctaaagatttaatcaattctagatttgttatagattcattgaaagaattacctaactctattcctaaatctgtagcaatagacataagcacaggattttcagtattaagaacagaaaaaggattagagttcatacctttggtcatgaaggcatctttagccatagctctcgctgctgctttatctgcaatcttcatgtcatcattagcttcaagcctgctgctccttctgatgccttcaccatgctccacttccatactcacaacttgtttttcagattcaattttactagaaccttcagcttgagcacccaaaggagacttgctgatttttccttggcaaggagggataatcccctcatcatatttagcaaattcctccaaatcttgagagcttaagaggtcatcttcactttcatgaaactcttcatcttcatttgtaggatcttcagaaatcgggttcaaatcctcattgttatcacccaagtcagttctctggccagaagatttgccatgagaaatcatatctccaatattttcgagcctcatttcttctttaacagatttttc

SEQ ID NO: 154357 - DNA, 1026 bp, Zea Mays
accggacaggcactgtagactgtccggtgcgcccatctcgcgttttaaaaaaaggcctccagcccgcagagccgagccagaggctcactcttttccccagcgcccgcgccctctgttctctgtttcccctggcgtctccctctcccccccgccggcgatctccaccggcggccaccatctccggcggtgctccggtgactttgggctcccctcttcttcctcctcggtgagcagatctgttttcccctgcctctctttctctctgtctcttaggcagtgctccaccctttgcaccaattccaaatccttttgaattcttgtcaatttctgtgaatccaattggtggaatgagttcaagtgtctctattgtgtatccctgctagcttgtagctccttcgggagggtattcccacctcaaatggtcgtttcaccaaaaccctagctctccgcacgccacatgctcggtgaaatgcccaaaccagccaaacttgctccaattgaacccaaatttttcaggcaccttcacaacacttccagcaacatccttgccaaatttcacgccaatccgagatcccaggcttaaatttcaccaaaatccccgttttacgcgatcgtttccgagccgagtgcccaaatccctatttcttcgcctaaattcaaaccaagcacacacttcactcatattgacctatataaacctattcgtgaagtatcggctcaattccatatcatttcatgcctcattttgaattccaaacctcctatgtcactatttgtctgtcaaacgtcgttttcacgtcgtttgacttcttgatcgtcccgtctcgtgccatatctctctgtgtatgtatttattcacatttcatatgcttatgactatgtgactaatacgtgctcacctcttctgtcatttcagtgaccttgtgtgaccgtgtgccgtctcccgtcctgcctggatcgtcacctctcgtgtgagctttccaggtagtcatctcattctttgctaaatctatcggtcatttttgc

SEQ ID NO: 154358 - DNA, 640 bp, Zea Mays
ccgggataaattgtctgatcttgcacaattttcattcctaggaatcgacatcatgattggtttcaaatcacttttgcaaatggaactggacgacgattcatcttgcaatgacgatgattatttcatcatcgcagctactggaattgtgcaaacctggtggttctgttcctggacatgttgttatttatcgagatcgacaagacgggcatcaaaggatgtttcaagattatttggcggccaatccgacatacggtccacatttatttcgtcgaaggttggtgtttattaacctttgattagctccttactatatgtattatatgtgttgaaggttattatttttttggtttagatataggatgaagagagaccttttcctacgcataatgaatgttgttgaagcacacgatgattactttgtgcaaaaaaggaatgcggccaatgtacttggattgagttgcttccagaaagtcactgctgcatttcgtatgctcacttatggggttccagctgatttaacagatgagtacgttcgcattgccgaaagtactgcacttgggagcctacgtaggtttgttgctgcagttgttgatatttttgaagatgaatacctgagatatcccaatgaggcggacacagc

SEQ ID NO: 154359 - DNA, 680 bp, Zea Mays
aagccttaggcgggttgctttggtgaccgattgagatccccgacaccacgtgagagatcgggagttgagggagccgtcgagctcggagttcgcattcatcaccgttcgatgcttggagcggtattgtggggtccgcttgcgtcctagggtcacgtaggagcattccccttgagcacataagtgataggggccgaagaattccttgtcggtgtcaaattcctgccgtagaccccccaccaatgggagcaatcgtatctgcgcaccggatctcggtgagaactctttcccctggttcgttattgttttctctaagtatagtccgcacccggtgaaagtctatggcgggatcgaggtttggggcatcaccggtgatggcgtccgccatactctgcgagcgtggggtggaaaacgagtggttagccatcgataggctaacggacggcctagattagatcgaggattccccttcatctcataaagatccggcccttgatgtgtgatcgggtgggcgtgatgtggtgtagccataaatagaatcgagaccattcatttcagatcctgtgagtgggattgcgtaccggttcacttttaatcctcaccatacatcacagatccaacagtcgaggcacgcccgtaccccttcgccttggcatatttgctaaagagaccctagatttcta

SEQ ID NO: 154360 - DNA, 695 bp, Zea Mays
acctaaaccatgccagaagatggcatcggtactccacacttagacaagacaaaacgcaaggaatgcctcagttctgtccctctaacagacccaactgtggccaaagataactcggtgttcctgacacggaacccttggggttctgcacgtatcgatagagtgaagagaggagaggagatcatataaggagatttcgtccaaattcgcccggattcgcgacctatgggcatttgaatttgacaaaacgccatgaactagccattcaaccgcaggtttgagccgcttagcgcgccattgcccgctccacgcgcgctaacaagggcccgagctcctgccgtgcgccgaggccaggaaacacaacgtcgagagcgtgctcgcgcctataaaggtcgctccaccctctgtctttccttcccaactgttgcccagccagccttcaccaaaatttcaccgagatcgagtacactgtcgcccgccattgttgcctaagcccggtcacggtgatccaccacctccggtcacgtgccacctccaccagcgccaccgccaagatcccctgagttccctagggctctccaaggccccaaccgaaactctacctcaccgaaaccgcacaatcaccttcgccggagcatgatttttgccggtgatcgtggacccgcttccacggccaaccccagtccaatttcttcgag

SEQ ID NO: 154361 - DNA, 402 bp, Zea Mays
tcaagtttgtgttgaatccctccttcatgaatgaagaacgcagttatttcgcttaaccatcattgcatgctttttgttcgtgtccttgaaggcttgccgacattttagaggtaatgcccgagtgacgactgtgattcttacttttctgagttatgatctggcattttagaggtaatgcccgacttacggagccaacttatactcatgctgacgtgtcttcttgagttccaaaccctaaatatcacttttctcctcagccgcttctctgctttctgaattctcgagcctacccactccgccagagagattgcgatggcccctaagaggaagagacagagtgttgttgctttgatcatgccgcccatcgatcccaaaagccatcttccatttgccggtaaccac

SEQ ID NO: 154362 - DNA, 726 bp, Zea Mays
tgcaaagccagccagactgcctgtggttgcattggatgatatgccacccgctgtagcacgaatgcatgcatgatggagcttctctaaccagtagagtttctggctgggggctaaggaggtatggagctgggatagtagtaacgtgcagtgctccaacgctttccaaaagctgtacatgtcaacgatctattggcgcgtgcacacacacgtacatacgtagaaatgcatgacaagctagccaacagtcttggcaactccattggccaccacgaggttctcggttgttgtgcctaggcagtacatagagttctctctactctcacaatcaaccttacaaatattttataaaatcaggaaaaagtaggcaatgtgctcaaaccttgaatcagcaattaatgtattttagtttgaatgcacccgcttttaacttggatctgctgttgttgtttcggccaggataaggaccgacaaaagtgattaattccctattgccggggccacacactaatccccgtcggtatttatttttgtgggtatttgaagaggccaatgagagttatttaatccccatcggctggctgacttcttggccgaacgatggaaattaacttaaatcggcttcaccactaaaaaatagcactcacgattgataacggaatccgtctataaaaaaatgcaccccattgtgcaggttttggtgtaaagcaatccccgtgcatcgtcgtc

SEQ ID NO: 154363 - DNA, 419 bp, Zea Mays
ccaggagtaactctctgaccggggcgtaccatatagaagcttcgagagatcaccaggaacgagtctgtggcagtcttgggctaggtaacctagccggttgcctggaattcgtcgtcggcgcagttgagtcgtcgtgaaatcgcccatcaccgggggcggcaccaccatcaaccgaatcactggtgagtcatatgccatcacgttcacctcgaccccgtagttgtgaatccatagcctgtcgggagtagggtgctccgtggtgcaggatcggatatcttcggtaaggtcgccgtcgcgggagcgttgttttgtcgtgctcaggtgttggagattgaagatggtgcgcctatcgtctgatttggattgtatggaggagattagattgtgtccatattcgatttgggccatcaggattgaag

SEQ ID NO: 154364 - DNA, 361 bp, Zea Mays
agaccaccggctctgaggggcaaaggaggaagaagttttagtgtggaggaaggttcggtaatcaacccagaaagctgtattgtcttttttgtggcaaggacaagggccacacaacaagaacatgccaggtcacaattcagaagcagaaggaaattgccgaagctgaggcgcgacagagtcagccaaagcaagtcctccacactgcttcatgttattccccatacatcctagaatacataggcaatcaacaacatacgacttttgttgcttcggcaagctattccccagcttcctggccctagttgccaccaccaccaccactgatccacaatcaatagccagaagggcaatcatactcctc

SEQ ID NO: 154365 - DNA, 867 bp, Zea Mays
gggccccacgggcctgcctctcgtgctctcgcgcgcgcttgctggttctgttcttgcgctgacatgtgggctccagtcgccagcctctatgactcacgcgcgcttgactggctgatgggcccgcgctagcagccacactcacccacctcgccgactatggcggactgccgtcgggattttcacgatcagcacggactctcccccctttagccgttaaatgcgagccggatcgcagcccttttctcctcttcgtcctacgcacgataatagccgcgttactgtgttcgtcgccctgtgagaagagaatcgatgggagccgtagttgtttcgccgccgccgcgggagatccttcactcgccgacggcaaggtctgcggtggggtggtcttgcgcttctcctagctgtgggaagggtggatgtagccggaccattggggattcatcattggggccgatccaattgcttgtcggacttcggttaggacatcaccgcgtggccagggttgcttcgcgccgtaatccgtggtgagtccgcccccactttattcgctctattcttctctgcgaatagcataggtctatagtcgaagtatgagtagggcgggggttggatgtttctcagacgggcctccgccggccgtttaggtggcgcctcctttctactcggccgcgagaaggaagacgggatgtgggtggtcgatggaccgatcaaaggtctagagcgggccaccgtatgggagaaatctgggccgctggattagtcacgactggtgcagatgcggtcataggtgttttaaatcgtggacgttggatttagatccaatggctatcggtgcgtaccgattcgatggaacctaaatctaatcac

SEQ ID NO: 154366 - DNA, 444 bp, Zea Mays
gtcagggcttctcgttttatcgccttgcaatgtttgcacatttcctagcgtcggatcaaaacttttagtgaagtatatattatatgtgccattagttaggttaatttgaactgatgcctcaacccttgatgttcctcgcctggttattgtgtctatggaaacttgacgtttccaactttgtagggttgcgatggtaaccaataggcaatgtggcctgctcaggtgagcgcatcacatttcatgcattaggagttcgtcatagctacgccaattgttcagttagctcaagagaaagatgtcgaagaagatgcacattgtggttttgtaattagccgacaaacattgcaacatgatcagttcgaaggatacagaaagttgatgtcagattactttgttgattaaccctctacagtgatgaaattttttatgtccgtaagcaatgtt

SEQ ID NO: 154367 - DNA, 585 bp, Zea Mays
acttacttgtacagtggtgttaccaactcgactcgggttactaataggagaattcctgctgaggatttggtgagccggctagacatgatcttgagaggcaaagtatcaaatgttggtgctccttttgcctattctgcttggaatctgccacctcctatgtcatttttcagtttcgtgtccaatcctcccgctggtgatagtggtctgggtcttagagtgcgaccctctcttgaagatattgaagtgttggttgcttctctttgtgatcttcacaatgatgagaggcaagttcattttgagatgccagcgagtccagatgttgcagaaataaatgttgtgctcgatatgttggctggagaatcttctgactcggcccctactgaaacaatggctgttgtggttataccagagactgtcaacacagtggacacccgaaagcctgagggtactcgcccaaagcgtcttcgccaagtcagccgcccaactgtgcctgctgaggagaagaagaaaaagaaacggcttcgacgactgtcatgcttggaccaggatgctggaccttctgctcctgtttgcgaagaagtacca

SEQ ID NO: 154368 - DNA, 573 bp, Zea Mays
cggggatagtcctgtagttgttggcctgaagagagtagcggtctcaactctataaccctaatcctatcaagtatataaggcaaaataaggacccctacaaaacatttggacccctcttttaggcatagctagaacattaaactcgtctcctttgtaaaactcaaatccaagaaaaatttgactccagtagcacacatgatgtagggtattatgcacatcagtgatctgaacctgtatgaatccccatgttttttgcatttgtcatgcatcgcacgaaccattgagctaactgttgacattacaaaccacaaaagaactatgtgggacatcctatagtgcattgtcagtgctaaacaatgactgccaccacaataataagaccaaccttcagcctctacacaggtgcaacccccaagatggcgaacaggacattcaagaagatagcaatgatcaaagaggagatcttgaagaataagaataagaggatgatgaagaaggtccacgaatgcctcaccctcgagtccgcaccacaatacaaagagatcatcctatggacatgattataggagacat

SEQ ID NO: 154369 - DNA, 779 bp, Zea Mays
gggcagagccttaccagggtgatctggccacggaacacggagttttgtgcttgccggagccagaaaagggggaaactagggtcgcagcggctcggggcgaaattgggagatgggatcggggctataggaccgtaagagactgtgctttcaccgtgcgcaatcaatttgggcgaaggtggagagggcagtgcgaatttgacttcgatttggttcactggtgtgcgtgatgaccgagccttgccgtgatccagggggctatttatagccgcggatgtccggcgatcacctcgtggcccgaataccatcacaaacgcatgccaagcacgtagagaagtgatacagtgagaaagaatcacggtgcagaggacaccgcggcgaaaagggctgacgcgatggccgccggtgaatcactccggccgagctcgggagatggcgccacgtatgagtcaccctttccccggcgttatccatcctataccgtgcacgaatccggacggcgatcaacgacggcgagctgagctggcgttctgatccatccgaacactgtaccatggcacatcttcgtcagtcgcctgaaccgacccccttccatcgactagctctcatgattcttgtgaataaccgggcaaaattccttaataaggtttgttcttgattcaacagtcttcaatccttacacaggacatttgggtcaaaaccgaggggattcgaagatatggcgcatcaaacttgacctcacctcactggaaccttgttttaaccttaggttcagtttcagt

SEQ ID NO: 154370 - DNA, 355 bp, Zea Mays
ccaacgtggcccattatcactcggctgttacttctaaaaatgccgacatcgccggtaatcactcggccgttattcctaaagcgacgatgtggccccaaaggactcggccgctaccactaaagcgctgacatcgcgaagaaggcaatctaaaacgcgactcgatgattctaagtcgttactcaagcgttacatccaagaacaacatctgcagtaagcataaatacgatcgacgatcgacggaaaagcaaaagagtgcacacagaatggggcgaaattcttcttcattataaaagggaagcattaccaaacttaaaaatcaactcattatgagctgattttcttcccatcgttcaat

SEQ ID NO: 154371 - DNA, 822 bp, Zea Mays
gcgaggggcatggctagggatggcaacggataaactatccgcggatagtgtctctggacatccatatccacgacttatatccgatatccgaacccgtacccgttaccctctatggataacaaacagtatccacatccgttacccgcgggtaatggatatccgcggatatatctgtttgcccactacatatacaacatatttaaatccaacaaattcaaatatgatatcatatttgtcaagcaaatttaaatatgataaaaacatacaaccatacagaatttgtccagcaaatgaaaactgatacatgtattaaggcatacagcgagcaatataaaattgtctcgcagggactgaggggaggtggtgggcgcagggtgcagccgcgcagtgactgaggagaggtggctggtgcgcagccggtagcagggactgtggtggcggactggagggcgcagcacaacacctggtagcagcggcggtaggagccggagtatcagactgcagcgggagtctgggagaggagagatagagtgggcgacgacggtaggagtggaagaagagagatggagagggtctggagcaagagcgactgagcgagggcttcgctggaagcctagaacggtggaacctaggcttgtggcctgttggacgggagtacatgatattttaacggatatttgggtatttgggtatggatactgatttttcatacccgttttaaaaatatccacggatatcaagtgctacccgtatccgtatccatgggtacagactcgtacccaaaaccgtacccaacgggttttttatccgcgggtacgcgga

SEQ ID NO: 154372 - DNA, 527 bp, Zea Mays
aagcggaggaggtggagcagactgaaccagaggtgctgagataccagaatgctgaagcataagagccatgaatgccctactctcagcccgatcctgaagtaactgctgctgaagagcatcctgcctgtcctgcatgctctgaaacatcaagagcatcgtctcggataaccgtgcctgctcggctgccaggttggctagaatcgtcgcaagagcagggtccatagccggaggaggagcaggggcagcacgagaactcccagcctcatgatcatgtgagcgtggaggcataggaggcggaggcggaggaggaaccccaaaatcatcatcatcatcatcatcatcagctgttgtaccctgagtgtcaaactgtcgaagagctgcatcctcgacctgagactcaaacacagaagcagaagctggcactggaatctcaggagtaggacgataagatccaaatacaaggcgagaggcctcaagggtgctctgaaatcgaggaggctgaatcagctgcgcaaagatgtggcaca

SEQ ID NO: 154373 - DNA, 730 bp, Zea Mays
tttattaaaaaaatcatcggaccacttgtccaacggcaacctccagcgatcaacgactagctaacgtcatcggacggtcggtgccaccctgttaaggaaggcacatgtcgggtacctaggaaccgggttcctaaaataggctcaagactcttaatggcccacttgccgagcaaccctgtgaggcagagtggcctaccaagtctatgtcgagcaaacctgcgaggcgaagcgaccgaccaagtctctgctgagcaaccccacgaggtggagtggacgagcaaccctcgatcgaccaatcctgcgaggcagagcagccgaccaagtctccgctgagcaaccccgcaaggcggagcagacaaccaactccctatcgagcaatcctgtgaggcagagcgaccaaccaagtctctaccgagcaaccccatagggcagagcggacgactaactcccttttgagcaaccctacgaggcagagtgatagaccaagtctctatcgagcaaccctacgaggcagagcggccgaccaggtcctcattgagcaactcagcgaggcgatccagtactattgacccatgtcagctatgtcagctacgacaagacgcgccataaccaaaccacgttcggacatgggtgcggcataccaaaggggcaccgagaagtccctatcaaaatgacggcacgccatcgcgtacggtctctagcatatccccactgccttgtggggccaatc

SEQ ID NO: 154374 - DNA, 452 bp, Zea Mays
agctagcgccagagtcaaaaagagcatgggccacaaacaaatcaactgagatcgtacctgtcaccatgtctccttgctctttaccatccacagtgggtagcatataagctccggaaatacccgcggaagaggaagctcccggagtgaagttaacagaagaaccccactgagccgccaggtgatgcagacgcagagctccaaactgagatgacataggagtagtttgtgtaggagtaggcgctgctagatactgaggaaaaccctgcatcggcacgaactaagaagtcccaggcacataaaactgctgcagagggagtggaaccgaaaattgctgctcagcacttgacatcatgttgacagtgccctgagaagaggaggaagtcactggctcccatctgagcttcccattaggattcctcctacacaccacatccttgtggtcttgactgtag

SEQ ID NO: 154375 - DNA, 903 bp, Zea Mays
gggggcaccgaagggcgcagaacacggtggggcggatcaacggcagcgtggatcaactctggcgagcaattacgtgaacactagggcagtaacaggcgaaataagggcatgggaaggttgctcacctcgagtgcagactcaggggcgcttgagcggtggcgggaacgtggggaagcctcgggtcgacggtggcagactccgactacacgaggaagtctctggtgatcgcagaccgggcgaactagaggggttggggacgaaccaaggggtgtcccgagttgctgacggcgaggcggaactcaccgaggcaacgagcacggtgatggctcgacggcgaccgtagaacgggcgcaagaccacagcgagtggcggcggaactccctgggcgtgcgcagagcgagagagagcgcgagggcgttcagatgggggcgcaactgagcgaggggagtgagtgagtggggtaggggcactaaacggaggatgggtgtgtgcagaggtggccaggaaacgcacgacgtgggcacgtccatggcgtggtgcgggcgggaggtttgggaagaggagatgactgacaggtggggtccacgagcagagagggagaactcgcgaacgggcggttagcgctgataggagagatccactaggcaataggagagaacgggcgcgggcgtggatgggtcggtgccgacaggtcggccccactggtagcgagcgagagagagagagagaaggaagagagcgtgggcgcgggctagcaccgacagccggggtccacctgtcaggggcggcgggcgcaggcgcacacgcgcggggctgggctggtttgggccgaaatggggttttccatttttctagaatttgtaatgccttttctattttattttctctagggttttcaattca

SEQ ID NO: 154376 - DNA, 825 bp, Zea Mays
ggtgtgtgtgtggaaaacatgtaggagccaatatgttggatggaaaagcctactagcaaggtttctttgggccgaccgcagcaaccaatgcaaaacccatgacaaaaatcacgacagacaaggtcgtagaattcatgcaggagatcctcaaccgattcggtgtcccaagatccattatgtcggaggcagaaaatcctctggtcgggtggaggagtgcacccgcactaggccccctaggaggagctaagaggttttgcctaacctaatggatggcacacaagaacacaagggtttagagtggttcaggctgccgaagcataataccctacatccactatgagttgtattgcttgagagcttgagagtcatgagtctgaatgtggatcctccaactcccctgcatcacatgtgccttcccttttatagtccaaggggcacgttacaagggagttggccctaggagttactataatatgaagcgtgaagcgtcgggtagagctagcggtgctagatcttttgggcgtgtatctcctcttggttgctatgctagcccttggtgtcctatcctcttgccacatctaatcgaaacacaggcgtaggcctcggtgtagattgtggcatagtctgatacgctgtcgtgcgtaggggtgcatagacggtatcttcctgtctcttcatacctcactaacgcacgaggaacagtagagatcataatgaagggcacccaagcaatatattgagtcaatgcccttgccttaaaaacgtgcgggtaacagtgtatcacatacgttgtagactaggcgcgccgcgtgtagttaatgtggg

SEQ ID NO: 154377 - DNA, 605 bp, Zea Mays
cttcaaactttgctgtagagacataccccagaactccatggatcaggcacaaagaagctccaaagttgcaccaaaaacactaaaattcagatttagttagctgcactaagtctgaaatccaaatctgtgagctccactttggaccgccttttctccaagttccaagtagtttcaagggcatgtcccttactaaggattactcccccaacattggtctccaagttttctaaagatactacagtctgaaagcacatgtattgaccaccaaggagccccaaacttgcacttttcactgaaaattcagttctcaatcagccagactgtctgaaatccagaactgaacattacatctttgagccactgtttctcccaattccatataaatttaggggcataaccattaaccaaacttatacaccaacatgtggaattccacgtttgtacataaacgttaacccatagctgtatgtatcagccactaacaggcctccaaatattgcttcagaatataaaatcatcagtttcagagattgcactaagtctgaaactccacaagtattacaaccccattttggaccagttttacacccagttgcatatggttt

SEQ ID NO: 154378 - DNA, 410 bp, Zea Mays
cccaaatagaatcgtggtgccgggatgtgttggataaacccacaataaaatccatgctgaggtcctcccatttccaagatgatatggggagaggttgtaacgtacgtgctaccttcaaatgagtagctttgattctttggcaagtgtcgcactcagatacatacttagcgatttctcttctcatcctggtccaccaatacaaggacctgaggtcatgatacatcttgttactgccggggtgcatggaaaatttggaaagatgagcttcatccaatattttcttcctgagttctgaatttttaggaacaaccaatcggtcctcaaaccatagaactcccttgctgtcctgacgaaagcatttgtacttatctaccttttgttcgagcatctccttaatgacttgaaccccc

SEQ ID NO: 154379 - DNA, 568 bp, Zea Mays
tgcccacgcgcgccgcgccactgtcatgtgggaccaatgcaccagggggaaaacccttcttccccactagctgcccactcattagtctagtttcctgctcaccgtcgcgacgccgcgagacacggtggtcggctcgtcagaacattcgtcgccgatgaggaaacccctgtgaagttcgcatggtcctcctcctcgcatgttgcgagttttgaactcgggtccccagatcggctgaaaaccggtgatgtgccgccacacgggtgctgggcgccggcgtctggtgagctcggaggaagaagattctattgccgtggattttagaatgaacgaccagggttgggggatagggaagaaaggtccctggccggccgatccatgttggatggaatgaattgggggaaatagcgatgcgatccagaccttaggatcctagatgtgtggacgacacttgaccgggtggcttgaccagggccgatctaatctgggtcattcgtgcccgatcggacgactgaaaccaactcatacccgttcggcctggtaatctttcctaagagcccctgtacttttg

SEQ ID NO: 154380 - DNA, 526 bp, Zea Mays
ggactttgtggtcgaattagagtaagatccagtgatggattgggaatagtcactataacaaaattgaagttggattataggataagaactttgttacagatgaattagcaagttcttatacaaaaatccgagatctaggcattacaattctgtctgtcagacgctctgaatccgaattctgatggtacagtgttcagatcagatcgccaaaatcagctcatctcaccgccgacgaccacacgctcggattcgtgctcaacggagtactgctagttgctcgaggtagtaaatatcgccttgtggatgaacttgagccgctgtttcactccggccgccgtgcccgcctgattcacgaccgattcagatgagctcaccagagttagccacctatcgaccatgcgccacgtgccttggtgtcttaccacgtcgtagtagctcgtattacacacatccggtgatcgccgatgagctcgccacagtgaaagccaccaatctcttgcgacagtgctctcctctctctccgacc

SEQ ID NO: 154381 - DNA, 497 bp, Zea Mays
tctatgagtactagagaacttgagggaggcttgaacatcaattaatgatgcatgagctaacctgttgaaggctggccacgacgcggtggttcacggtgtgcggaaaaccgattttgggagagaaagaaattggagctctctggtggcaaattggaggcaggatcgggtattttggcttcgtgatgacccaatggagctgatggcatgattaatttatagggcccgagggtggtggctcttgaatttggaatggcgcgctggcggccggagagagaggagagcactggcgcaagagatgcgtggctttcaccgtggccagaccaccagcgatgaccggacatgctaaggcaagtcactgcgacgtggtattgcgcttaggcacgtggcacccgatcggtaggcggccaactccggcgtggttatctggaccggtcgtaaggcacgggggtatggcggctagggcgaaacagtgtctcgagcacatcctcaacgcgata

SEQ ID NO: 154382 - DNA, 876 bp, Zea Mays
tccgtaagatcgtccttcgtcatggcacagaggccagcttcaagcttcgggaaccccatgcttctgaccatctcccggtagacaaataattctttgttgtcttggaggcaatataagaagtcatcttcgtctgtgccattaaacactaaggcccctttcgggtatttcagttctcgggcatagtgtttagcttcaaaattttcttcttcagataatctttttcccaaagcatgacgaataatataatcaaggacttcggaagacgcttcgggagcaggagcggcatctttttcaggcaaaatctgttctataccttcttcttccgctgccttttctccagtttccgaggatttctccttggcgggcactgaaggcccagcttcggcgtcagcctagctcagtatagctttggcttccgtcagctttgtctcggtttcaatctgtgttttcgaagccttggcaattttttcgggtgtagagcttgaagcttttatcgtctccagcacatctaatacactagccatcctttttctcttgggggttgctgctagacctttttgtgtcttcggcacctccactcttgccgaagggcttagaacttctaatgttttcgtcccttcggttctcggttcttcaattttgttagtcttcggcattgcagccggctcttcaatcctctgcataagagcaggtcctttgggcttcaatagctgaagaagtctcatcgccaaattcaggcactatggccggttcaatgtagcgcggtctgtgagtaaggaccttcaactttttccactttggtgagggctcgcttgaagcagccgaagcagcagtcttcccagaagttgcaccctttcttttctgcccttgcggctg

SEQ ID NO: 154383 - DNA, 661 bp, Zea Mays
gtgatgttaaactctgtgattcaaatttgtgtcttatatgtcatatatttctcatgctgctccttgaatgaaggtgtcaaagaagtctagttttgtagtaggtggatgatgcagctgtgacttgtgaggctggaatggcatgccgtaggcgtgtgtgatgccggtgaggatgccgatgtcgtggtatctagctgattgtgattgcgatgtgtgtttgccgtaggcgtgtgtgatgccggtgaggatgctgatggcagatttgtttagaagtggctgagaacaacctacctatcttctgtagtactagatactattagtcccttaaaggcttctttttagtttgcttgtttaatataggcggatgttgatgcatgcattgatgccagttgatggaatagtatgtggtcactgcttgagagatggagcagaggcagactggcaggaggaaagcagagttcagctggttgcagataacattcaattcagacctttagactggatttgaagtgtacttgttggttggtttgttgttgttgatttgatggaggaggatcttaacttattgctggatacttatggtgtatatatatgtctagtaatcactttctcatgtcacgtcactttcgctcggtccttcccctggattttctaagaaaactgg

SEQ ID NO: 154384 - DNA, 724 bp, Zea Mays
gctggagccagcggtagcctccttctgcatttcccatccactcgcaaggggtcatactctataagcaatatgctcttggatcaaatccctcgtgccgatgtaggtgcatatagtattgaaagccgtctagcacacttgcatatcatttcctagtgcgactgaaagtcttctgatgccgaagcatgaccatataggacgttgaatgatgccccttatatcctccctctggtctaggttgttttcacataaaaccactcctgcatccaagagcccggccacttcttccaaaatgtaagaataggataactagcctcagagaggggcacaaagctgtagcagccgaagttgttatggtattgttctttcccagtcgctatcgtctaatatgataattcatgaatattacagaagcacccggcgtctggctctaacccttggctcctcatggcccatataaaaacccctaatttgataagagcctcggggataagttgatgaaggtatatttcaaaagtttttagaacttcgaccaacatcttatccagggggaaccgaagtccggctttcatgaagcttctaaaaaccaccacttcattagcttcagggagaggaacggtactctcccctccggccctcacaattgaaatgtcacgaaagtatctacctttcatcgcttcaacctgcccttgcttaacagtcaactttccaaaacaacatggctcgg

SEQ ID NO: 154385 - DNA, 797 bp, Zea Mays
cattccctttggataaataaatgacttgttgatcgattggaggtctaatatgagcgttatcgcagcccaataattattggaggcgagtagcgttcatgagtctgtccttgttaaaattgaagaacaattcgataacatatgcacataagtgctttaggttctttagtagccaatgtaagtcttatgaagttttacaccatatatagatgcctctaggttagaccccaacaatgtgatgttttaggtgactggtgtgttaactaaattaagttgagccatgggtaagaaacgccgattaatctgctccaaaccatgtttttgagttacgatgtctaaaatggttcgctaggtcttatactgtaattagcaaactcatgttaagtaggagtcgattttgttaagtgattgttgtatatatatgttgtgtctcggattacgataataagaggcaagctgacgtttaggatgtatagcggcctatgttattgcgctagttagccgaattaatagatgggtttgggtaagctcgtagtcacgatgaattgctggttgtcgtctaaatgcgtatggttatgacacggataaaaagtattagtgctcatgtgatgtctaagttaaaatgcaaattattgggtgaaaagcgcttcgatattgattttcgtagagaatgcgttgttaattgagtatagaaattctaggcacgaaatgacttggataaagtaagttgatttgttgatcctaatttgattaatttaactctaacaaatggtaaagcgttagaataattcaagtctcta

SEQ ID NO: 154386 - DNA, 314 bp, Zea Mays
gttgaaagaaatgggtctgactgcagaagctgtggtcgctgactttgtttttaagaatattcagccgctgaaagacagagtgtgtccggcctatctgtatcgaggcttggctgattcaacccgggtaactaacagaagaattcctgctgtggacttggtgagccggctcgagatgatactcagaggcatggtgtcgaacatcggcgctcctgttgcatactcggcctggaatctgcctccttctcaggcctttaccagtttcgtgtcaaatcctcctgctagtgatagcggtttgggccttagagtgcgaccct

SEQ ID NO: 154387 - DNA, 440 bp, Zea Mays
gccaccgagctctcgcgacagtgctctcttcactcttcgaccgccaccgcaccaaccccaattcacgagccaccgccccaagtcctataaattgagcacaccgtcaggttcgtagggtagtcacgcatccagccaccaaatcgtgccttcaattgttcaccagagctcaccaattccagatttcccccaaacctgctttccgccaccgtgaaagaggtctcgccgtggccagctcgtctcaggtccgctcataccctctgccctctcgttttagtgttcttgtgtgcccctgatactcctcgaccaactcgattgagctaagctaccttagatcgtcgggaacacatcagaatgtctgttgatcatatggtcaccatggacagagtgagttagaggtccaatagtgaaattagttgaggggaaactcttgttagggtttg

SEQ ID NO: 154388 - DNA, 521 bp, Zea Mays
ggcgacggaccagcttcgagatcttctaaacgatgtgcttcgtcctcaagtgactgagcaagctcatacacgcgccacattgcgaagttcactaacacctttttggccgtatctggcgaatccataatctcgtctccggccaaatctttcaactccttcccaactacatgcatctttgcaatggcttgggcgaggtcactacgaactgtttcaaatcgggttatctgcgaaaccacaaaaattgctgttggaattgaacgagtagtactgcatagtattgaacttagtacaacccttaccgacactgaacgaggtggcgagcagtgattgacgacagaaggggtctgctgctgggggagtgctccttgacgacagaaagaggtacctgatgtggccgcgcaggtgagttccttgccggtggtgtgctctttggcggtggagtgctccaagccgcaaccgtcgcctgtacgcttggcaacgattgaaacagataatcggctgaaggcggaagccacttcgac

SEQ ID NO: 154389 - DNA, 402 bp, Zea Mays
tggaggtgcactaccatcctggcaaagccaattgtatgaacatggatgcgagagttaccaccctgtgtgatgaattgtgcaagctaaacctggaagttgtttcttcaggtgatttaaattatatctcggtggagcccacactgcaagagcaaatagtcaggacacagattgaagacaagggtgttcaggttatcaaggaaatgatcaagcagaaggcagagaaatacaagtgcttccgtcaggacaacaagggaattctatggtttggagatcgattggttgttcctaaggaccccgagctcagaaagaagatattggatgaagctcacctttcaaagttctccatgcaccctggcagcaacaagatgtaccatgatctcagatcattatactggtggacca

SEQ ID NO: 154390 - DNA, 607 bp, Zea Mays
catgcgtcacgctggatcgccaccaaaagatcatccgttaagaggagatcgatatagaatatctcctaccttcgcctcatgctcctattgtaagtattctagatccattttaaaactttcatagaacaacgggggatcagttaaaacaatatatagataaatttgttaacgggtgggcgcgttcaaatgaaaaatctattgccctagttttccctcgcatgaaactaatacatagccacccgcacctaatgcatcggctacaaatgggtcatcttatacccaaccattatggcgatgaatgtgttcatagcaccaccacaactgccgccgcatggcacacgattagctctagacatggtcggaccatccgatggtcatctcggaccattcagttacatcacagaatgtccagcatattttgccgaaccgttggaccctacacgggcccgtccgcagaccacctaggtagcgccatatatgaccagaccatccgtgtatacccttgcactgtttttcacggtcgaggaccatcaagccccatatgtcggaccatccaggtacgcgtaagcagagtcagggggtgcgcaatatgtatagttttcgcacc

SEQ ID NO: 154391 - DNA, 587 bp, Zea Mays
gcgggttgaatcctataaagctcggggttttatttgtaaaaggggttcagcacaggggtaccgttttatatgagccgcttgatctatcttcaaccgctaggattacatctatacaaagttgcacaccctagtaccagagccatccatccagaaatcaacggtcgaacctcacgtgcaacactcgctgttggacccgagatctgcgtttagagtttaatgaaggtgcatatcaatcctagccctctgatcagatcagatggttcaaaacagtcaatcccgaagcattacctagatctaatctgagccatcgagcaatcgatcaatgtctcgcagataaccccccttctccagcctaccctgacggcggctccgcactcccccggtgcacggtggcgccatcaccggaaacttgcaacacacacctccgcacatcaatacccaaacccaagacattctacgcgtaacagaggacgagtaaattgcaagggacgaacttacagggaaaggagtaggcgaatggggcctgaccacggcgtagggcggatcggtggcttggtcgaagtccgacgacgaattcctggtcgccc

SEQ ID NO: 154392 - DNA, 517 bp, Zea Mays
ggaaaaagagattgaacagagttttcgatgccattggttttgtttaccctgactactgctacccgctgcggggacggggaaagaagaggaaaactactgcttcggccaggactgttgcctcagccactccagatgagcctgcgccgaagagcaaaaagttgaaagtccttacccatcgtcgcgttatattgaaccagccgtggtgcctgaatttggcagagagacttcttcagctgctaaaccaaaggagcccatttctcctacatagaaggctgaagatccggttgtaatgccgaaggtaccctcagccgaactagctgagtcgaagactgataaggctgaagagccaaaaatcgaaggaacaaaaatgttagaagttttaagcccttcggcagaagtaacagtgccgaaggcacaaaaaggtcttgcggcaactcccaaaagaagaaggatggcaaatgtactagatgtgctagaatcagtaataactttaagctctacttcttcagggaaaatt

SEQ ID NO: 154393 - DNA, 292 bp, Zea Mays
atgtgaatgactccgcgatacggctgatcggtgaaatcttcttgttttggtgcttgggggtgattttggtggtgtgggtacggttgatgcagaggcgggagcaggggtggtacgacttgtacctcctggtggtgctgatatgcgtggttgggtagatgctgggcgtggccgtggttgtatggttgtgggtggtgttgatatgtgtgcgcgacaactctttggttgtcggctggttgtgcccgagacatcctgtccctggtggcctttgtttccgagcaatcccttgttgggt

SEQ ID NO: 154394 - DNA, 963 bp, Zea Mays
aaaccgagggtctctttaataaaactaccacacgaaggggtatcgggtgattctaaccgttagatcagaaaccgactgccgagattagatctgcggccgagggcgcgcgcgggcgagcaagtgctgacaagcgggccaggggatgtcagcgacagagggggagggtgcactgaccgagcgggcccagcgccagggaacacgggcgctgacaggcaggccaggggcacagggcgcgcttgcgcaaagcggtatccacgatctgggtcgtgcgatcaagatcggacggggaagatcaaaccagggagggacgaacagttgcgggcagcgctgctcctctccgcggtggtgaggtcgccggagttgaggcaggcgtgtgctaggggggttctggggtcgccgggattggccagagagggagagaatgccatagcaaactaaatggcagggaaaaggccacgaatccgagggcagagaggggagtacggcggggagaaggcctcgagcggaccggaggtacttcggcaaggcattccggccacagggagggggcttgaggcgtgctaaggcttggggaaagcttcagcggaggcaggggtgacataggaacctacaccgacgaactagaccgggctaaattggccggccaccgcgcgagcacggcggaccgccacggccgagcaccgtcgatgccaaaattggccgagcacagagtgaaactagggaaattaagcacgggcaaaggtgtctcacctcggggtggagctcggggaggcttggcgcggtctccggcgagctagatggtcgggaacgccgacgcgggtctccggcggcgagggcagagcgcgagagaggacgatgctgtgcgaaatgaggcgagggagtgagtgcgggcactggtggggctctaagaagggagctgggcgcgtgggcgagcgtcgtggccgagaaatccggctacgtgcg

SEQ ID NO: 154395 - DNA, 407 bp, Zea Mays
taaagttagtagatgattgggaaaacatggacatagtatgccgagccatattattaggtcagatgaggtacggttatagcaagtatggtcgtgggaaggaagagtataataaggaaagacttcatcctgaactgtggatcttgattcctcttggagttggatttgactcatctccttccttgtcggggttgagctgttcttttcagaccttggtgtcttcattcttggggttgccaccagagttagggacctatggttaagatagatttgtgggtgacaagtaggtagagcagctagtttagtgggtggcttagaagttaaatgagattggtcaaaatttggtttggttgtttgcctctagattggttggataggtcatgtaacctattatgtaggtcaagttggtc

SEQ ID NO: 154396 - DNA, 934 bp, Zea Mays
ttgatgaatccgctgcccccgccggaaacgccggaacgggtcgaattcaatgaacaatgaacagtgagcatcaccggactggacactcttgcagccgcagcttgaaggccgtaaccgtaaggccttggcgtggtgttcttggtcttttctcggcgtcgtcgactgtgtgctggcttcttttctttgacctgtcgctgctgatgcgtgaagcctggcgccctggcatgaacaccgaccgagaccgagagaagtgaaaagacactagtccgtactgtatgaatgaccaagggagatctgagacgtctccatggctggctgcaacagagttgccgtattcgttggtgaatcgttattgcctgccgtctttttcaccctgcggtctgcgctcgatcgactacatactgccaccgggatcccatgccatgctactggctggctgacctacacgcggaacaaggccacgaatgtttgactggtcgattgacacacgtgagtagagtagtcgtttcgactgtgtcctcttgctgcctgcccagcacaccgctcatgctcgttgcttgaattatcgaccgtacggagcccttcattgttcggctggaagctgctcctgctgctgctgctgcgctgaaggatgggtcaccagtcagacgaaaggtcgccggtctacctcgtctctgctgggaggaggattcagggattggaccatccagccatgcagatccgagctttgcctcagctactgtttatagcttagctggtaggacagcagccagcgttagcactcatcagcttcgtacggtgcggggtccttcatcagcagcagcccatcacccgctacatccccgattctcaggcatccccgattttaatgcgcaattgtttacactacctccgtttgaaaaactataacgagaagctatagttactgcccgtt

SEQ ID NO: 154397 - DNA, 645 bp, Zea Mays
atttcttcctcttgtcgaacctattccagatctcgtgccccttttcgcgagattactgaaccgcgtcttcccacgaacggcatgctgctcatgtcggcgatccttgtccatccccgtctttcccttcggcgtccacctcgtcatcttgggcccacaggccggctctgactgtcttcgtctaattttatctaaccatgtctaccacccgtctaactctgtctaaccctgtctcgtgcaactcgatgtgcagctgtctctctcgctcggccaggacaagagtcgccgtgaaattgacaaccacctctcgcgccctctcctttctatacataccctctcctttctatacaatcgcacacccctggcatgaaccccttccctcttccttctcacacaggagcagcccacgcgttttcttctcttagcattgtactgccgtggtctaaggagccgcctcgtcgtcttcctcacgtcgctggagaagcagccccgtcgtcttcctcgcgtcgtcttcctcttccttgcgtgcctgctcggctgttcttcatgcgtaggtgacaaatcatctccttctccctcttcttcgcctccttcttcctcatcactacgcaaacatcatggcggccagggagctcgcaccaaactccc

SEQ ID NO: 154398 - DNA, 753 bp, Zea Mays
gggagataatgcttcgaaggatgaaggtcactaatcaataacaattgtgttgctctattcttggtgtatagcatctgagaacaaggaccaacactgtcagtcggatcaggggttagggttggactgacagtgagctcggatgaactttggaggctgaattctgtgtgattcaatgagaatttgatcaagacctttataacgaaatcaaagctggtttaaaggagagcaactttgttacaaatggatcagtgagttgtcacagaaaaattagagaatgaagccctctaactcgctctgttaggcgctctgatgggggttctgatggtacagtagatacaatgcacctcgccgacgattaccccgcgcctggattcgcgtcggcgatgcgattcgtgcccaagggcacacggataatgactcagggtgaaaagatctccaccgtggatgagaccgtgagccggccccgtacccacttgccctgcgaccggtccaggtgacctcactggagtttgcctcctgccgctcaaatgccacgtgcctcgaagctttaccacgtcgcagtgaaccggctgaggaagcctgtccattgcctgaggcattgactcaatgaccgccacggtagctcatgccagtgactttctcttctctccgacatctagtgtttccgttccaaattcggagacgccgctcaaagcctctataaattgatgccccagcctgcttcgctaggttgttacgaagctagagcaccag

SEQ ID NO: 154399 - DNA, 674 bp, Zea Mays
cctaggtagcctcgcgctccgtctgatttgcccacaagaccttaacatacttaattgttctccttctcgtgacacgctccgaggactccaaaatatgcaccgggcgacactccagagtcatatcttgctgcacagcgatcggttccaactcgatttgatggtccggatcctgcagatacttcctcaacatagagacatgaaataccgggtgtacccctgccatggatttcggtaattgcaagcgataagccaagctaccaacctgagccaagatagagaatagtccaatgtacctcgggctaagtttccttgagacatcgaaccgaacgactcctctagtaggtgataccttgagaaggacttgatcacccactgcaaattctaagtcccgcctcctcacatcagcataactcttctgacagctctgagtggctagaatattctgacgaatctctcgaatcttctcagatgtctgctgaacccaatcaggaccgaccaaggatctctctcccaaagtctcccaacataaaggggagatacaccgcctgccatataaggcctcatacggtgccatcttgatgctagcctgatagctgttgttataagcaaactcagccaacgcgagatgatcctcccagctaccctccatgaaagaacacaagcacgtagcatgt

SEQ ID NO: 154400 - DNA, 317 bp, Zea Mays
gtttaccaacactggtcggctcgagaaaaaattctgggagaagaaaagaaaagggagagggcagtagtgtggactgtggaggacggtgtggtgcttcagctttcatcatgctagatgctggtgtttgccaatcttaagcctcagtctgatttctgggcagttgtgtgttcgcctctgtggcagtttgttgttgttgttgtatcggaccagattgagagttgaattgtagttcatggcatcatgatatatagaaaccatagcaacacacgtgcatctaactagttaatgtattaagcaccagtaaaagaacacaggca

SEQ ID NO: 154401 - DNA, 691 bp, Zea Mays
ggttatctcacctgaaggttagataggaacaaaggaaacccaaagccggaggcattgacgcaccgtcaaaccgtggggtactagcaaaaacaatattgagagcaaactcaagccccaaaggaggatcaaaactcgcgcccaaggcagtactcagtgaaacctcagctccgacagcgtgctgcgaattcccagcgcccgggtcactgacctctaaagtgatcggaccaacaagagcgacaggaagaatcgtcaacactggctccttggattgagcttggcaccgttgagggctaggtcatcctcggcagcaccctcgggggctgtgttatcctaagcgtcacccttgggagctgaagcaccctcgatcgtacccacaggagatgggtaaccctagcctgcaatgtcaggagccgatgtgttcccatgaactaggccgccctcaaaggtcgaagaagcatgagaaactgtctgggttatttcttgcccgactggattactagctgaggggatgtcatccgggacctctgtaagggtgacagcaccctcaattttaggaagctccgataaaagatcttcagggataatctcttctagtgcatgatcaatggcagacatcgtcaacctctagagactaaccagccctgacagagcctgaatcaggacattatcgttgtttctgctacgacagttc

SEQ ID NO: 154402 - DNA, 504 bp, Zea Mays
gtaagggacagggttggcgacgccgtaacctggacgggctcggtacggtaatgcatggtgatttcgttgcatcacaaggttcttgtttcagctagaaatcaatcgatctgtcaatccacatactatcatgaaaaaaaaaactgaagaagtgcgtatgcaatcacggcagcatgcattaccaacaagctagcgcctctcctctacacttgtaccttagccgcacgtggtgcctactgcctaggtagggcatctccactaacccggaagtgagggaagttcaatttgctggaactttcctcagccgtctgtccaccggtgggatgcagaggcactatctccaaacagcaaatggcaatcatgccttccggggctcaggtctggccgtgggcgtttggcttcgcctaatcattggctcacagagtcgtgctgcacttgccctcgctaactactcacttgtgtaatttgtgattcaaattatgtatttagatgtcgtgttgatgagca

SEQ ID NO: 154403 - DNA, 280 bp, Zea Mays
ggaggatatatttcatgaggtgggttggccataatctctgttttgttgaggctgaaatagagtggttatgcaaccatcgaatggttaaggtagttgcatatggtcaggtagttgtatatggtcaagttagtttagggcaccaatttaggttaaaacatatttatagaagtaaggtctaatctatttcaccagtattaactaacatgtttacgtaactaactttagattaaatatgatcatattagattggatgagatctagattagattggtatgactag

SEQ ID NO: 154404 - DNA, 384 bp, Zea Mays
gctggacttccgcaatagcttgaagaagggtagtgccctctcagccagtcttgagatgaagcggctaagggcggccagtgaccccgtaagcttctggacgtctttgattcgggctggaggcctcattgtctctattgctttgatcttctttgggtttgcttcaatgccgcagtgcgaaaccaggaaccccaacaacttccctgcagagacaccaaagacgcacttgtccgggttcagcttcgtgcgtgttgcccgcagcttgtcgaagaccagggttaagtcttccactagggtcgaccctctcttagtcttgaccacgatgtcatcaacgtacacctctaccctgtccctaatcaggtccccaaaagtcttactcatcgcccg

SEQ ID NO: 154405 - DNA, 440 bp, Zea Mays
tggcagtggcgtcgagtgcattagctgtgacacaatttcaaaatcagcagaacacattccagattttgatgtgctttacccaacccaattcctcaattccataaatgcacccaattttccttgccacaaacttgtgcttaaagagagtgcgatggtgatgctgcttcgcaatctgaaccaaactatgggcctttgtaatgggacaaggctgcttatttcccagctaggtcagcgtgttctgcgatgcgtaatactcacaggatctaggattggcgatgaggtattcattccacggattgcgctgaacacaacgaacgtaaaatggcctttcactttgaagaggacccaattcccattatgcatctgctatgccatgacaataaataaaagccaaggacaaacactttccactgttggcctctacctaaagaaaccagtat

SEQ ID NO: 154406 - DNA, 559 bp, Zea Mays
ggctcatatgcaaaagggcacggcgaagcggtatcatggatccagggccgttggatcttggtctaacggactagattaaattagtcccatgccgaaccggtatgcaatcgtaaccctaggaccacaaatcacggtattgtttttaactctcctacattaaatcatgcgcacacatctacggatctacggttgtagatcacccaggcaaactggtacccagacctcctaatcctgaccgtgcgggtgccaatttacggtcacgggcggcttctccttcctccggcccgacggcggtgccgtacgactaccatggcgcagaacttcaccggtgaggcgagtctatggtcctagcaccccaacccctaacccaaacggctttacacgattcgggaacgaaagcgaatgcggttgagggaaccataccgaggatgatgcgtgcaggcgggcggaccacggcgtgagcggccctgtggcggttcgcgtactccgacgagagattacaggtcacctagtggtgcacttcccccgcgagagtaatcggcagcaccccggagacacg

SEQ ID NO: 154407 - DNA, 532 bp, Zea Mays
ttttgtgcccttaaggcgttgctaagtattaagccctatacaaaagaatgaatggattaacataagaacaaaagactaattcaaaattcataaacttcaaaattcacaatttttgtaccttcagactattgtatgcaaggctatccacaagattgtccttcgtcatggcacagaggccagtttcgagcttcgggaaccccatacttctggccatctcccggcagacggataattctttgttgtctgggaggcaatacaagaaatcatcttcatccgtaccattaaacactaaggcccctttcggatacttcagttctcgggcatagtgtttagcttcaaaaatttcttcctcagataatctttttcccgaagcatgtcgaataacataatcaaggtcttcggaaggtgcttcgggagtaggagtggtagctttttcagataaagtctgttctatagcctctttctctgccgctttttcttcaatctccaagggtttctccttggcaggctctgaaggcctagcttcggcgca

SEQ ID NO: 154408 - DNA, 486 bp, Zea Mays
cggagagccgccaccatcgacccgcgtccttgccgcgtcccaccctccgttcatgcgttcctgggacttccctcaaggtaaccggcctagccccacccttattttcccctgtcttgctttaacctacccgtgattgctcgccggagtatcccctggtccgccgaggactcccctctgccgtctggtcgccttagtcccgttcacacaaacctgacccccgccatagtgtttgccagaccctccacaacctctccagctaccttgatcgacctctcgcaccctaggagacccagtctgcctcgcttccggcaatggcgccgcggtgcccatgaggagcgctgcccctggcttcccggcggagacaaagtcccctggcgcgtatcatgtccgcccaaccctaatcggacgacccgattttaattaggctcgatctaatcacaaccgcctaatccagatctgaccgctctccactctctctctcacccg

SEQ ID NO: 154409 - DNA, 593 bp, Zea Mays
agtcgagcccgaagcgacgatgggggtgcgaatccacggcggcgactcttttctctctcgactagcatcgacgaagccgacctcgacccatggagtgcgctgacacccgcaatgatggacaggagagcacatagcctatatacccgagaggaccccgcaacggcctaagaagggggaagaggatcgggttctcgacccggatttccgctcttggttgcgagaaaaggggtaagaaggacctgaccgcatggccccacaggtcggtgggactaagccaaggtgacgcagaacataggcgcgcgtgaggttgagcccaaggcctgactgatggggcctacacagcagtgacggaaaagcactcgtgaagctggtcgctggggcccgggtgtcggcgccgtgtccactgccagcctgggtgagtgccgatgtaagtgggccacgtagtggcgttcgacccagagacctgggctggtgattaggaatcagcccagatgcaggtgtgtttcttcttctttttagttttctattttcatgttttgattttcaaataaattactaaattaaaatcaaggtctgagtatccaacaaaaaat

SEQ ID NO: 154410 - DNA, 1822 bp, Zea Mays
aaactggttttgaaaactttgaacggctttgggtggtttgaaaccggtaagagattgtttgcatccaagcgataaggatgatcaagatcaattatatttgcgatgacccataaaacaagatttacggccattctttagctgttttgtccatacattttcaccacacggtgggcatgcaaatttcccatggaccatatgagaagcaagcattcctaagccaggtagatcactgatggtcataagtacagcccctcgcaaagtaaaattctcatctctcgatgcatcatatgtgtccaatccaatctcaaataaatcctttaggtcatccaagagtggctgaaggaaaacatgaatgctatctccaggactttttggaccaggaataattaaagacaacataatgttgtgttctttcatgcaaagccaaggaggtaggttatatactaccaaaacaacaggccaacaactatgagtggagctcaacattgcaaatggattaaacccatcagtagccaaaccaaaacgaatattacgagattccgatgcaaattctgggaacttttcatcaaaccttttccacaccggtgcatcagcaggatgtcagagtgcaccatccttaatgcgctcctcatcatgccatcttagaaaagctgctgtttgtctacacataaattgtcttttcagcctctttttaatagggaagcatcgtaaaactttgcaaggtgttgctttccttctttccttctttgttaatacagactcaggttccttatccttccaccttgaagccttacaatttgagcaaaaatcatcatctttttttccttccaatacagctgacaattatttggacaagcatcgatattttcatatccaagaccaaatttagaaataagtttcttagcctcataaaagttcttgggcagttcctttccatctggaatagccatacgcaaaacctctagtagatcatcaaaagacttatcagaccacttattcatggttttgacattaaatagaagcacaaaaagagttagctcactcaactcacaccctgtccatagaggttttttggaatcttccagctgcttataaaaccattgtgcttctaaattaggcccttttagtggtatttgactatcgaccattgttgtgtcatcatacaaatgccctacaacatcttcaatcagttgatctatattaacgtgcatttcctcgctatgtgaattagcttcttcactaccggtgtctttcactgaatgatcaccttgaaaaacccattcatcataattctcaagtatcccattgcacaccagatgtccatacatctcatcccttggttgtgtagtagtgtgaacacatgtttgacatgggcaatatatcttggtaccttcagacttatctttaaatgcaaattcaataaatcctttaacaccagctacatattgatcggaacctttaggataacgcaagagacgtttgacctttccaacatccattctgtaacaataaatatgctaacatagtgattcaacaataaaacatagtgatttacaaagataatatgctaacatacaactgaaaaattcagtcctaacataattagcaatctagtagctactgcaggagttagagacaaacctgcaagtgcgagagcggaggggaattggcagaagcggtgtcctggtgttagcggtgacagagaaggtacgtctcagctgccggctctcagggattcaatctggaacgacctccagcggctgccggtgatggattaaggaggcgacctgcaagtgcggagccggaggggaactaggagcag

SEQ ID NO: 154411 - DNA, 423 bp, Zea Mays
aagggatccaaacgtcgtgttatgtgaaaatttatgtgatgtctaattaggtaggcagaattctgtagccacattttgacatcttgtctgcatatcatctgtggcagactgaaatttgttcagcattaagaaggcattctcaagtaggtgaagaatcattacggcactacctcactcatacacaactgcactgtatctaaaattcgaagtcaaacttaggactcgagaagtgctacttaaactaatctttcgtaaaatcgttcaatcatccataataaatgaaggagagcgattgcaaaaacttgttcacggtcactaggcgcctacatataggcacgccgcacgccatgaattgacggatcgatcatcatgatctaaacgctgctgacgtttatcctgatcgtccggtttaacgggcctcgc

SEQ ID NO: 154412 - DNA, 778 bp, Zea Mays
cggtgacgctagagctccggtgagcgcgttccgaacaaccaaacacggcagtgtttaaattggagctagggcgagtttcactgattcaccagagggcgggtacatgcgtgaatttgaacggagcgggtatgggaaagtgggtcgacgggagcgcgctctcagacgtgttcgacggcggcgaggtaaggttctcgatgccctatcgcggtaatattcaatcggttgggccgacaagctatgttaacatttaaagatgctagaacatggcacagaggggaaaggaacgaacctgggaacggttggtcaaggccgggtgcctcacggcggcgtaaatgaccactgaaatttgtcagctcttctgggtaattggaagcgaagagtggtgtgctaggcacataaccagaaggcagatcagggagagcctttaatttatagtatctatgtaagtgcttcatgaatttgggatgagaagatctcacggccggaagggaggtgagtctctggagggcaactatcgtggagcttggtgaggtagggcccctagcggtaaatgggctgtccacaacgacctattgcgacgtggtaacgtctccaagcacgtggcatccttgcggcaagtggcagacgccgacgaggacattccggccggttgcgaagcaagtggttacggtggccagctcacaaacttattagtagtcacgatcttttcacttgctcggtaatatccgcgttgatccgtgcacgaatcttcactacgatctcgaatcgtggcgcctga

SEQ ID NO: 154413 - DNA, 1074 bp, Zea Mays
tctgctgaaatcacatgacccaagtaagcaactgaggtggctccaaaggaccacttggactgtttgacaaaaagttggttaatgcgtaatgttttgagtaccgccttgacatgtcgaaggtgttgagaccaggatgcactgtagatgaggatatcatcaaaaaataccaatacacaacgacggaggtacgaccccaagacttcattcataagggcttggaaggttgctgacgcatttgaaagtccaaatggcatgactaggaattcaaaatggtcgtggtgtgtccgaaaggttgtcttatgaatatcctctgaatgaacccatacctaatggtatcctaagcgcagatgtagtttggtgaagaacttggccccgttgagtttgtctaggagctcatcaactactggtatggggtacttgtctttcactgtgcgctcattaagggctctgtagtcaatgcagaagcgccaagagttatctgccttcttaaccaataggactggagcggagaaggctgatgtactatgtcggattattccctgtttcagcattgctgcacactacgcctccagttcatctttctacagctgagggtatctataaggacataccgccactggtgctgtgcccggcatcaggtggatgcggtgatcacatggtcgtgctggagggaggcccgttgaggatgagaaaacatcatcaaattgctggactagggagtccatcattggtgtcgggtttgatgttgaaacacgtgctgaaattggcctgtgcatcatgctgcgagtagaattcaaccctttccacaaaacttggtaaccattcttctagaatgccatgctcatgttggctaagtcccagaggatgggaccaagagtgcgcaggaactgaacccccaagatgatgtcaaaggaatctagtggaatagcataagcatccatggtgaaaatatctggacgcatgcatagtctgagattgttggcaaggccatgacagtcgattttgtcgccatttgctacagctacccgaccttggcttgagcagacttccaattgcaatgacaaggcagtgttg

SEQ ID NO: 154414 - DNA, 542 bp, Zea Mays
agcgagcccgcgccgaagaggataaaggtgaaggttcttactcatcgaccgcgctacattgaaccggccacagtgcctgaatttggcggtgagacctcttcggctactgaagccaaaggatctgctcttacgtagaggattgaagagccggctgcaatgccgaaggctgacaaaattgaagaaccgagaaccgaagagacgaaaacattagaagttctaagcccttctgcaggagtggaggcgccgaagacacaaaaagatctagcagcaacccccaagagaaaaaggatggctagtgtattagatgtgctggagacaataaaaacttcaagctctactccaggaaaaattgccaaggcttcgaaaatacagattgaaaccgagacaaagctgaccgaagccgaagctatactgagccaggccgacgccaaagctgggccttcagtgcccgctaaggagaaatcctgggaaactggagaaaaggcagcggaagaagaaggtatagaacagattttggctgaaaaagctgccgctcctgctcc

SEQ ID NO: 154415 - DNA, 949 bp, Zea Mays
aggcaagcagaaatagatctaagaagctcagagcctccagagggagggcgtgttagcagatatatctattgctcttgtatcctgctccacattgaatctaccatgacatctttggtatcagagacttcaatattcggtcctgaagtcatagaagaagtggcacgaagttttgagatcgaggcagattccatgtccattcatcagaccttcccagaggacttcatcctgattctttcggatgaggatgctgcaacaaaggtgctcaatggaggaagagttctcagagggcctcagtttaatattcagttcaagcgctggacaaggctggctcatgcaacggcagctccattgccgtcgctggtcgacatcgagatacaagggattccgttgcacgcttgggggcggtccacagctgaacagctacttggtaattcctgttggatcacagatgtgcacccggctacttccctgaaaagtgatttttcatccttcaggcttcgggcttggtgttgcgagttagagaagcttcaacgtgccatgaatctggtcattgttgagccaacgccagcggatcatgtgaaacggtgtttatcctacagtattgaagtgactgtcaccccagtcgagaagccactgtcagatgggacccctccacttcctcctcctggcaacgacaacaggcatgaagatggcgatcgtcgccgtcctgaggctccaccccctcgacgccggcgagaagaccttcggaggggacccatccaccgacgcctgggccctcttgctcctgtgaatgactgtggtaggggctctgctaaccacagcaccagcgatgctctagaggcgccaagatccgctgagacagagacggttcaggtcccaagggcaacaagatccaaagaggcagcggcggtccaggttctagctttggacaatgaagtcctttcaacac

SEQ ID NO: 154416 - DNA, 1216 bp, Zea Mays
ctgccataataaaccttctccccctttttggcaacaagaaccaaaaagagagagagagaccagtccaaggatcaccggttgggaggaggatgatgaggagcaaagaggtggcgcgccaggtgagaggcaaagtgttcttccccagagtgatccgcgggaggagcactgccagaaggatcctggggcggagggtgagaggatgattggcccggatccccgtgatacggaggcgggacaaactgctcacgatcatcaaaataagcttcttcttcttcttcgacgtcatctgttgtcataaaaggcacctcgtatgcctgctggtaccactcgttgatctccggaggaggaggatgaagaggtacatcaggagagcggggggcgaagggactacccaatgaggaagcttgacgacgtaggttgtcgtcagtctcccgctgacgtcgagccacctcacggacatccgcagcaatgttccggcacatggagaagaatgacgcaaacccgtgggccaagcgggcacccatccctcggccacgacctcgaccacgaccacgaccacgtggcgtgggagatccacggccaggggaaggacgcgaggcaccggcagcagcagcagcaggaccagcagacggacccgcagatgtatgagcacgagagctggagggggctttcctgaggcgccctgctggattgttgggatcaatctagaaaggggtatatgactaatgtcttgtacctttgtcaaatttaaactgggtcacaacctcaatcatcttcatgataaacggagcatgaagacaccccttcaatggaaagcaggcggcatgaatgatttcctgccaaatcatatcaaagacatttatactctctgagctgctgggtttcatgaaagagagcaagaccttgctctctccaagaatgttcatctgattacccccttttggaatgagggtcatcctgcagagggagttgatgtatcgataatacttatgaatgtttgtagactcccaatacttcccagactcagaaagatgaagatctttggcttcatctctagtaggctaccgaaaatcatgtatcttgatcttgtcgccagagatatcattgttagaaaaaccaagaatgtgagcaaatcgacgatagctcaccttataccaactaccttcaatgtagaagttcagataaggatagttgtatggactctcctcgtcagcgg

SEQ ID NO: 154417 - DNA, 364 bp, Zea Mays
tgagttcaaccaactctggtccagataccctgtaggctcttttagagatgggggcggtgccaggaagaagctctatggcaaactcaactttcgggaacacatctgggaattcggacaccactttgataatctcgagtgaatctggctccttgctatcaatagccatctgatggcaacttcctttccttggtttaggtgagattaactcggctaccacttcttctcctagtggggtcaccaacttaactgtcctcttatcacagctgataattgcttggtacttatctaaccagttcatccctaggatgacatctattccctgagtacccattactatgagattagcggggaacgctatccccct

SEQ ID NO: 154418 - DNA, 735 bp, Zea Mays
gggagagagaattattcttacacaagttgctcaaatgattgtggattactttggaagcaacttaattgatatggaatcaatcgcaagtaagagaactaaagagaggagggagagaaagaaacaaatcacaagtgaggatcaaacacaaagaacatgagcaatttattttccgaggtttggttccgaagaacctactcctcgttgaggagtccatagaggacggtctctttcaacccttttctctctcaaacagtcatcaagaccgatcaagttttattctcttttccgagggacacaaagtcccgcgaggattaccgcacacttaggtgtatcttgctagatttacaagtaaaagaatgggggtgaaagcaagaattaaaacccaaaacaagagcataagaacttgcaacactcaagagcacaagtcactaagtctatctaacttaaatcgaacaaatgcgacgcttgtgtggctttgattgcttgagagatgttgcattgaatgtatgaaggtttggtgtagctcttgtgtcttcaatgcgctgcttggaggcatttatagcctcaaccaccctacatagccgttggagttgaatggagaaatatgcacagtttcgcgtcacaccggactgtggacagtgtcggtccggtggcgcaccagacccctgtcagtctgctatataagggagccattctgacagcgtcagcctctgacaggtgcaccgaacctttgcc

SEQ ID NO: 154419 - DNA, 843 bp, Zea Mays
attcagtcgctcttctttgagtacatcaacatcctccagcctagtagcttcagcttctgctatgttttcaaagattaacctcggtgccccgaacttgagatcagcaggtagcactgcctccgaaccgtagaccataaagaagggagtatttccatgcagagctcggctaggttgagttcccaggctccaaaccacatatggcagctctctgatccactttcctgtgaacttctcattcttgtcgaagactttctttctgagtgcttctaatatcatcccgttggctgtttctacttgcccgttggctcttgggtgcgtcaccaaggcatatttgatctgaatgctcttttgctcgcagaaatcgaagaactctgaactggtaaagttggatcccaggtcagttatgatgctattcggtatcccgaacctgaatattatgtcttgtatgaattccactgccttagctgaagttagagaagcaatgggtttgaactctatccatttagtgaatttgtcgatagcaaccagtacatgagtgtatcctccttgagctttcttgaaaggtctaatcatatcaaatccccagcatgcgaatggctaggttacgggtatagtctgcagctgttgtgctggtagatgatgctgttttgacaagtactggcaggcttcgcacctctggactaactcggctgcatcactctttgttgttggccagtagaaacccgaccggaagaccttcccaaccagggtcctggatgctgcatgtactccacattgcccagcatggacctcatccagaagttgctttccagtggctgagagaatgcatttcatgaggactcc

SEQ ID NO: 154420 - DNA, 389 bp, Zea Mays
aggtcagacagtgtcgcctgggtccgctggtcacatttgcggtctagcggcggtcggagaagcgcgcagtcaccagaaattcctcgccgaggttggaagatccgccgtgcgtcgtgggtggcttcattcggctcccatctctggtgagtaaacaccacaccacgttcgctcctcccttactaatgcgtagcacccaacagaatcgtgtttaaggcgctagaaccgagggctccggatggccggcgatggcgccgccgcgcccctatgtggcgccgccgtcgggacagcctgggattggggagctgatcgcggcccgtcgatcgaatgatcgatggctcagattagaagtaggaaacgtttcgggtcagcaaatctgcaccgtacgatct

SEQ ID NO: 154421 - DNA, 652 bp, Zea Mays
gggaaccgaagccgtgccctgaagaagctcttaaaaaacaacttcgtcctctcttaactgtgtaaccacctcctccccagcaaagcggacaagcttgctctcggcttccccaaaatagcccaactttttcatcataaccatgtcgtctgctgtcacagtagatttcccaaattcgatttggctaggtttcgctgggctcataatactgttgttctcttcactttcgttgtcacttccgccttcagccacaatctgttcagcttcagcattggaggcacctttggcaatagcctcctctgacacaacaagacccgatcgcctcatcacttcttaaattggtactgtttcagtcgctccggtctcgtatcccacatgagacaccctaggagtggatcttaccctggccattttagtgttcaggctctttaagacgaagcttttctcaagtggcgaagcgcttgtttgaaaacgcaatgcagaaagcttcggctatggttaaattttttaacagcacaacagtgcgatggcaatgttgtggtaactctttaccaacccgtctgtttatatagtgctgtaggggaagaaggcgacccgccatactgcttacactagctaagcggtggaccgtccgaggtgcggaatattttaatcg

SEQ ID NO: 154422 - DNA, 431 bp, Zea Mays
cgggatcatcacaacctccacttcattcaaggtcgcggacacctgcgagcaagctaattgcgagctcgcctcagcaatggccgagctcccgaggaccacccctcaggacgctgccagcacacccgacgttggcttcgacaccctcaagtccgccgagggcgaggaggacgccccgactagcgctgccgacatcttgaagtgtgcgtggatcggtgcaacatcccccaacgaatagacaggagcaaaggcaacagcaaggaggtcgcataggcccttagtaggcagggtttgtaagaaaatgactccacctagtgcgagttgcgaatcatgtatttactaaggaaaaatcaatgagaatcgggggatgcacgttaacaactccacctagtgtgaccccatcgaccagtccggtgcgaacacctcccttccca

SEQ ID NO: 154423 - DNA, 764 bp, Zea Mays
gtttggtagaattatactatgtagagtctggagtcatccaaaacctaggccttgtttggtttgttgggaatttaaagggattaaatgtccaacaagtcaaagtgccccttatccactccaatctccttggggaggtgattaaccgaacaagcactcgggggttttgtcataggaatgggatcctacctaataatataggagttgcaactattagaggaaagcaagaatttaagagttagtctcctcgtggcgctacccaatgcccaccaacacaatgttggctctgatgttgtcacatccttcacctattctacgtgtcaacacttcccatgaaatatgagtcatccatttcccttcagttgtgttttgcacattagcaccttccaagtttggtcatgtattcattttatatgttccaacttgtcatgtagtacaatgtgaacaagaaatatgttaacatgagataatatgtactaccatggtttgcatagataaaaaattgtattatacactagtaaatctaagactgatttggatctgttgtttatccttgtaataataatggtgctaatttcacatacatgcatggggcttggaggtcatatgatttagtggcaccggaaatctaaattccactcatgtttgtggtgggctgctgcgaaacatggttttggaaattggaagctagggcctgtgtatccatccttggagctgctggtgggcagaacgtcacggctgggggtgggacaccccactgatcggcc

SEQ ID NO: 154424 - DNA, 1149 bp, Zea Mays
tacccaggagttcgggggctaattcataattgttccaagactcagagctaacccacagccatgctcatcggaccgcgggttcatttcgcggttcaccagggactcatgtgctaattgccagggccgaagaggtacggggcgatcacagccgttggatcgagaacgtgagcaccagattagatcggcctcccccaaagcggtacactccatcggccacatgattaggatccaactgctaggatttgcgtaaaccggagcccttggatcgttgatcggcgcacacgatttaattcatcgaagagttacgatcggtctaatcgcgaccgttggtcaaggatctaacggttcccatgccacggaggcatcagcggcctagatccaatcccagccatacatctccgtttcaacggcccacgtcctttcccccaaactctcctctccctggtcaatagagcggcggcgccactcacgagcacggcagaggccctcgccggccacagcattccccgcatccccgttctaaactccgatccgaggtgttcactacgcagcagatacatgggcgaactggatggggaatttcttaccgcgaattgccgcgacgactgacccagtcacggtacgatgtgggccgcacggcggtggcgccctccggtgaggaattccgccatgccaaccgcccgtcctgcccgaacgagcagcggatatccatcggtgaccccgcgcgagcccccggagtccccaagtatgcttcgaatggccacctcggtgaagatccatggcggcgattcccctgccctctctcctcacattacgatctctctctctgctatctacgacaggcgcagccgaattttggtctaggaggcactaggcgaaaacccaaggggtcgcgactttatcccccaaacgcggaaggcttcgcgcccagctcccccggccgcaccgcacgggctgttgcaacgactggtccacgaaaggaggaagaccaagctgaccgatgggggccacacgacagcgtcaggaggaaagtgagcgcggcagcggtatggggaggaggtgggccggctgtgcgtgtgttgagttaatgggccagaagtgatggtccgcggcccaggtaagctttcttccgttttcttttgtttttat

SEQ ID NO: 154425 - DNA, 704 bp, Zea Mays
gtaattacagaagaatgcagggcgtggcggaaattcccataccagaggagtagcgggaaggagaggaactccagtctgggcgtcacttgttgcgccgaccagtgccttgttgcgccgaccagtacccaccaacagctcgcgatccttgttgcgcttgattcactcccagaacttacaaacacgaggaggatttggcacaaggagaggaactccagttcacctcgcgtttataagcgtgtatggaggatgggtagggggtttctcgatggtaggggatcccgttcacctcgcggcgtaaggaagggagacgccgaagattgaatggcggatttggcgcggactccatcttcggcaccgtgtatggaagggaggcggcgatggatgagattgaagagcgttcccctctcggtgccgaagattctcccccacgaatttggcgcggatttggctcggatttggcggctgcgggatgcacgctcggcctcgcgaggatggaaggagcgcctgtgggatccgcgaggatggaaggagcacggcgggtgccatcgacggcaaatgttgcgggcgcgaggaggaggaagccgcgtggcgcggatttggctcggatttagcggccgcgggatgcacgctcggcctcgcgaggatggaaggagcgcctgtgggatccgcgaggatggaaggagcacgacggctgccatcagcgg

SEQ ID NO: 154426 - DNA, 574 bp, Zea Mays
ccacgggtgctacacgatgagaaggcgaaggtgaacaccaagggaaggtcttaccaaggaattggagggcgcagagacctagcgtcgaagaagggcagtacagtgggggaagacggagcttcggcgacaattccgaacactacgatgacccccgagcccaccgagatgctaatatacgatccctgagctttggcggaccaccacgacccaacagagaggccggagcaatggtggcgatccaattcaacggcggcggcggaggcttttcccccgcacaaatggcggcggttttggggtcgcgattttggtagagcgagggccatgtacccgcctatttatacccggggcaatatcttcgcacggaatttttgccatgatccaacggatagagccaagatcagtcggcctcccggagattttgttgcgcttcccacggagtcgcgtggggttttttggaggggacgattctgactatgagggcccgcatgacagaggagagtggacgcgcggctgtggtcaagagaggctgacacctggtcccagtcatcagcgcgaggaaaacggttcacgcaga

SEQ ID NO: 154427 - DNA, 848 bp, Zea Mays
ctggcccctgcctcgcccccgccctggccccatggtcgctcttcctggcctgcgagctcgcccctagccacaggcagcagggcgcccgcgcacagcccaagcggcccttgctgaccgtcccctccagcgcgcggtgctcctgccagccggcgggcgtagcaagccccatccctccgagtgtgaagatcaggccgagctagcccctgcagtccccatggcaacctatgttcctgtgtgcgtgggcagttgcagagaggaggaagaaatgccatgctcgatcccacccctttccaattctccgtggctaagttttgtgtggcctagttgtgacttgtttgcaaccaataggaatccgccacatcactttaaatctgtgaattgctaattatatgttagctcttgtgttataaatatgttttgttttgttccggttgcgttagaattgtaacgacgttgcccacatgttttagttaattaagtgattatttatttacttatcctataattagtaaagtagcaatctacttaaatcaatttataattttagttctgctttacaaatacatgttaataagattatgcctactcgaatgtttttaattaatacttgtttatcataaaggtgatgttggttagtcgtccccgcgtgtcgcgcgtgcggatcgtgcgcatcgctgcgcgttgtccgcgtgctatgtcgcgcgtgtccgcgcgtcgtttgcgcactgtcatgctgtttcaggcgtcgtccgcgcgctaaatcgcgtgtggtcgtgcgtgtccgagcgtccttctgcacgctgtcgtgttgtttcatgtatcgtaaattcgcatcgcttataatctct

SEQ ID NO: 154428 - DNA, 299 bp, Zea Mays
caacgagacaataagagatttggctaggggtgacagacgtggcccctgccaaactggagaaccatttggtcatgcagaggttagccataaacatatttttcctgttcatgcaaatggtaaaattccaatacatgctaacagttataacttggatttaaacagtttcatagccgcacagagacatgttatgtcattgctccagaacgaccgatttctgaagtattcaacatatatgtgccacgcataaagcatttgattggcaacaagctgaaatgtctgccctcccagcatcgccccat

SEQ ID NO: 154429 - DNA, 340 bp, Zea Mays
ccaatccccagcatgcgaatggccaagttacgggtatggtttgtagttgctgtgccggtagatgctgctgttttgacaagtactggcaggcttcgcacctctggactaactcggctgcatcactttttgctgttggccagtagaaacccgacctgaagactttcccaaccagggtcctggatgctgcgtgcactccacattgcccagcatggacctcatccagaagttgctttccagtagctgagagaatacatttcatgaggactcctgatgcgccccttctgtatagcgtttccccaatgagtgtatagtgagctgactgccttgcaatgcgctcggc

SEQ ID NO: 154430 - DNA, 676 bp, Zea Mays
gttgagcgccctgtatcagtggaataacatggtcgcactcccgcgaaggtggcagtcccactggatcagcgaatactgaagcaaatttctgtaatatgaactgcacttgatctggtacaacttgttgtgttacagtagtggcagtagtagacaccaataatagttccactatggtacattcaggtatagcagctgattgaccatgtaatgtaacattggcacccttgtatggtatagacagccacttatgctcccaatgaacccgcataggactgaaagtctggagccaatccatcccaataatcatgtcgtaagaaggtagtggcaataatgtaacatcagaaatgaaagaacaaccttgaagctcccattgcagctgcaaaatcttatgtgtacactgcaaaacagcaccactagccacacgaacacataatgatgtaggcaccaactgaatgttggataacagtgactgaaacttgtcatgcaaaaaggaatgtgaactgccactgtccaacagtataagcacagggtgattctgaataatggcctcaaacttcagagtacgcacctcctcagatgttccccatgcagcctgagatactgacatgaacagctgttccacttccgttactggttcagacatggattccggtggagggtctggaggagcaggttc

SEQ ID NO: 154431 - DNA, 931 bp, Zea Mays
gaatttccaatggcttcaataaacctgcaggcctattatgttcgcccttcacgcgctgacatacctcacaggcggccacatacttagaaacatcaaccttcatcctcttccaccagaagttttgcttcaaatctctgtacattttggtttcgccagggtgaacggtgtaaggcgttttatgtgcttctctcaagatatccatcttcacgtctgatttctgaggcacacataggcggcccctgaaatgaaccaaatcattctcatcaatggtgaactcacggggtttaccatcgccgaccctctttcgagcttcctgcaacaaacgatcctgctgctgagccacgcgcactctctccagaagggaggattgaatgagcatctgagtctcctctctagcagtgccgacataacacaaagcgacccccatacggtccggatctgcaatcaatgacatggccacttttggaaccccggacctgctaagggcatcaaccaccacatttgccttccccaggtgataatgaatggatagatcataatcctttatcaactcaagccaccgatgctgcctcaaattcagctctttctgagtgaaaatatacttgagactcttatgatcggtgtaaatgtcacaagattcgccataaagagaatgcctccacgattttagggcaaagacaaccgcgaccaattcgaggtcatgagtcggataattcccttcatgcttcctcaactgccttgagccataagcaatcactctaccttcctgcatcaacacacaactaagaccaatacgagaagcatccgtataaactgtgaaacgattaccactctcaggcaaggctaagataggggcgttcacctacttgttcttcaatgcatgataactgacctcacaatcgttggaccagacgaaaagaacacccttctc

SEQ ID NO: 154432 - DNA, 581 bp, Zea Mays
tttattgctacacacatagcacaacaccacttagaacatttttacactctgactagtatactaccgaagctcctgcattttctccatattctactctcttttgcatttttgcattttctcagggaggttcttttgtcaagggggagtttctgtttctacccttgtttgcgcttgatgagtccatttgccatcgaggaacaggaatttagagattttcagactttcctttcgagggggatttttagggatctagagtatatactaggaatttgacaaggggagaaaaaattgagccttttcgagcttttgctagttgtgttcagccatttgcatctttctagaggaactagctttgttttcagcttttgtgatgattttgtgctctaacttggctttgtctgctggctagtggtgttgagccctgcttttgcctcttcttgaggactagtcttttctacttggtcgtgttgagctgttgcccatttcttttaggaccaagctttactcgcgttggatgaactgttttggattttatctagcttttagtcgttcacgttgtttctcttcttcttcctcctcct

SEQ ID NO: 154433 - DNA, 823 bp, Zea Mays
gcgttacttcgtcgttctccttatcgcggatttctcgggagaacaccaccgcgggacccgaccaggagcgccgtcggctctcgcacctcccgccaccgcgcaccttcgtggttcaccctcggctcgtattattatgacaacagtaagaaaattaatcccagttattttgctatgacctggctccgcccctgtatatgagtttgttctgtatttcattgttagattggtattctcttaatttacttgttactgcattacttaacaactaacagacctatgtgtgatatggtacactaagtgtttactacaatagtgatatttgtatgtccctgtacttatttcagcatctgtgatggacaagagttggatgagcaaaccaagaacaagtgatgactataagattggtgtgacccaattccttactttcgcatttcataatgttcgaccgggtggcaaggttaattgtccatgtgttcagtgtaaaaacaagtcaacaaaatattatgaagaaattagaacccatttgagatgcaacggcattctgcaaggatatactatatggaatcgacatggagaggaacacggttcaacaccagctccatttgctcacatatcatcaagcacacacaaccatgctccatttgaacgtccttgtacttctcctgcacaaactggaagcaagagaaatgatgacatgcaagggctcctaaatgcagcatttcctatggctgataagtatgatacagtgtccagttcagatgaagaaatggatggtattaataattactatacaatgtccagttcatcagatgaaccaatagat

SEQ ID NO: 154434 - DNA, 674 bp, Zea Mays
catgtgtctctgacgttcgcagatagacccttgcagttctatttcttcacagtctcgggtccacgacggtggacggcaacgggcaagtctccggcgagcctgtaccggccaagatacgcaatggtcggtgctctggcttggctggtacacaattctacacctgacgatcatttccccccgatcaattgcgagtttctagctcctaatctccctgcccacggtgacagcgcaaactaagaacaatccgaagtgttcccggtgatctagcgtgatctatttcaattggccgggctgctaagcatctacagcacaaagggatgttaaaacgagaatgaggaaggcatgatcggacctgtggagagctagccacggcgagctcacacacggtggagttttgactgatttgggggaaatcccaaattagagctctttggtggaaaatccgaggtacgagtgggtgcgctggatgcgtgactacctagcggagctgatggcacactcaatttataggacccgagggcggtggctcgtgaatttggaatggcgcgctggcggccggagagagggaagagcacaggcacaagagctgcgtggctttcaccgtggcaggcttaccggcgacgagccggcaatctagagcggcttactgcgacgtggtagagcacctaggcacg

SEQ ID NO: 154435 - DNA, 379 bp, Zea Mays
ccctctagccggtgtcctagatcctacaaccactgcctcggctaggcaccgagacatctctaacacgatgtactccactctctacttcctcgactcggatatggactcagatcagttggagaagaagggggaataaagcagaaacccatctttcgccgaaggctcatccccaaatactccctagttcaaaagatgtgaggcctcaccccgaagcacgttgggggtcacgttcccatgcaccaacacctcctcgacaatgacaatcggaagccggtgaagagaaggcccttccggtcggacactgatcggggctcaccgtcactgccaccccaaagggcacacggtcagatggcaaaactccaccaacattaaggacaac

SEQ ID NO: 154436 - DNA, 450 bp, Zea Mays
attcaaagtcaattatcaaaggtctcggtatggattatgaaaagattaatgtgtgcaaaaataattgtatgcttttcatgaatgagcatgcggaagagaaaaaatgtctgaaatgtggacaatctagatttgtggaagttgttaatgatgagggtgacaaggtgatgacagatgttgcacataagcagctccgctacttgccactaactcctcgagtgaaacggttgtttctatctaaaaaactgctatgcacatgcgatggcacaaagaaggtgtccgtgataacgatgacctaatcgtgcacccttcagatggggatgattggaaggctctcgacacgtttgatccaaactttgcagctgatccgaggaatgttcgaatcggcctcgcgaccgatggcttcacgtcttttggtcaaatggcatcatcatactcatgttggcccatctt

SEQ ID NO: 154437 - DNA, 340 bp, Zea Mays
gtcgatgcgtgctgggaggcgtggatccggtattggacggctccgattagaagtagaaaaactattcgggctcgtacgtctgggtcgtcgatcggggatcgaatggctgaggttaactcgcgatgtgggtggttttggtgcgcagatgccggatctgacggtcagggctgcgcgcggggttggcgtgcgccaaatctaatctgtgctcttagattttaatcgaacgacccgtgttctgtgataccccttcaccgtgccacaattgctaaagagcccctctgttatttattaaccaacccgccatccattggtgctgtgcgctgtgtcttagaattattac

SEQ ID NO: 154438 - DNA, 303 bp, Zea Mays
atatcgttatcatggatcaatctccccctcatgaaagcacactgattggctgcaaccagaagatgcaaatggggagccaaatgattagcaaggattttggtgatcaatttagcgaaactgtggatgaggctagtcggtctataatcagcagcagtagaagcatccgcctttttgggaatcagagtaagataggcagaatttagcagcctcaactgatgagcattcccctgatgaagaaaataaagggcttccatgagatcagctttaattaaatgccaacaggttttatagaaatgacccgtg

SEQ ID NO: 154439 - DNA, 461 bp, Zea Mays
atttattttctggcataaaaagacaaatgtctccccaagaacaactaatagtagattctctcatacctaatgcaccgtcagttgatgaattgcaaagtattccaaaaaggaaacatcacaaggatgcccagccccaagaagaaacacaggagtgttacattgatggatggactatcacctgcacacagtttcagcctcgtcgccgcatcaggtccaagaaacaaaaatggaaacatggaaaaagtcaagaaataacttcaagaaaagcttgttatctatgtggacgtgaagatcgttaccttcgtaactgtcctgagaagagttcatctccggacacctccaagataaagctatcccagactccagacatggaatatgaacaaaaatgcatagaaacttctatcaacatcgtgaagaacaaaaaaaggaataggaaaatgtttggatacatgagtagtcca

SEQ ID NO: 154440 - DNA, 329 bp, Zea Mays
gtcagttacccttttccatacaaaaggggcactcgtgattgcaacacctgggggaaaagttgaatcccattaaattgtccggctagcacctataaagttgggaactaaaatgttcaaaactggccttatcattctaggactagagaacgtggacattatcctaggaactgagtggatgacccagcaccaagttctattagatgtcgccacctgagccctcgaaatacactcccctgcttgtggagagctcagcttatatcttcccagccaaggtgacacacattcttgttatttctccatgattgagtcacccttggaaaggattccta

SEQ ID NO: 154441 - DNA, 554 bp, Zea Mays
gggatactacttaagtccattcatggtgatattttatgattattacaactaagttttgaagttttctcttattaggctttgtttactcccttaagcccagtgtagggttaagcactatatcctagggtttcacccatgaaatgtcacatcaatacaactttgtttgaaatttttgcctagtgaatgcaatctaggtgtgacaaacacatgatatgccaatgcttatgatgtcatgctcaagttttagtggtagtaacaccaggggtgttacatacgtgatgtacgacgggagctaggagctcacctcccgtaggaatgtcaagaccctgcgccgagaggtcctttcggcggtcccaggggtcccgaagactgctccacatcagtggtggaggagcaccactatctccttcggggcatccgactgccccgaaaacatggcaggggccggtatactatcgctcatcaccgcccctatcatcgccaacatgcggctgcatcatgtcctgattgacggtggggctggactcaacgtcatcagctacactgcattcaag

SEQ ID NO: 154442 - DNA, 318 bp, Zea Mays
gatgtctgaagccaccggcctaagaaaaaccacagcgtcatccgcgtagagagaaagcctgtgatgcaaagtcccagatgatagctgctgaagtaacccttcatcggaagccttttgaatgagcaagttcagaacatccataaccaaaatgaacaacataggggagagtgggtcgccttgccttagacccctttggtgcgaaatgatctccccaggaacgccatttagcaagattcttgtggaggaagtagccaacaacccactaacaacatcacaccaaatctgcccaaaccccatcttcctcaaaacctcaatgag

SEQ ID NO: 154443 - DNA, 789 bp, Zea Mays
tcccgctcgatgtcggagtcggagtcggaccgctgcgcgcctgccgttagcaggaacatggtaagcgacagcagcagatgcagtgcgtgcggcgcagccggttgcgcttgcgccgccgccatgctcgtcacggccttgtgtgagactgcgtggtttctcccttttcgtgtgtgctaatggatggcaaggcgtccaggcttataaagggtgttgccgcgggaaactgcaactgctgattagtgcaaacagagagcatgcttggatggtgtctgctctggtttcagagttgtgccgaacggtcctgcaaaaactcgtcaatttaggctgctgacatcgcggtacacttgtcttgacagcgatcattacgtgcgtagacttaactgtgagtgacttctgccacatgagtagagctagactgttcttggtgtttgccttgaccatttcccttcttggtgattgattataccagccaattcaaacacagtatgtcaccgacaccgagccggcatggactaaaaccgaacgccgagttgatgatggcggcgggaattcggttctgatgacatcgtcctttgatcgttctcgccttcatgctgactttgcataattgtgctgtcgtttcctcagcagggattatcaccgctgctcaggcaattccattggtcccaccattaaaattacgattaagaaacatgcaagtgcattgtgacgtgtttacgccagtaaataatgggcaatttccattggggttaaaatgaataatgaagttggtcctttctttaatgttca

SEQ ID NO: 154444 - DNA, 278 bp, Zea Mays
gtctatagtttatattacccttacagtctgtttggtttacaggaattggtccgaattgaatcagtttccatttctcggcccgtttggctgtccatagaattcaattcatcatttcagcctatttcctatccctgaaattttagcctgtgcacgtttcagaccctcatccgtcggaaaggtctagaaagttagctaggtttcactgctcgtgcctcgagcggcggcggcggcagccggactgttctggccgacgacggcatcgacgacgacgaggttcg

SEQ ID NO: 154445 - DNA, 607 bp, Zea Mays
gcgcgaaggcgacggggaggggagcgagtccaggtatttgaagcaggcgtagcaaaacgctgtgggcacgagcggggtgatggtgagttcgcccggaggagcagcgacggctgggcaggaggtctgatgaggcggcagcaaggaggagctagggttcggagttcggacgagatggggctcggggaccgcgagggacgcccaaatgaatctgcttggggtcacagcgaggaccgcaagttggtttgcaaaaaattggagggcttttctgaggctacggagtagatgttttgggacgtgaaatgcgggcatgaacccgcggggttgaagttttaataacttttgtagaatactcgaacggagagattccagaagccactccaccctttctccgtgggtagccaaacacacacaaaatataatagaacgactatgatttcatccgctcactaattaaacacatctttatagacttttaacgagcctagcacatattaattacgatggctaaatttagcggacataaattagtctgctcgacattgatttggtttgttcttgtagtgattaactgttgtcacatccttgttaatcaatacattccgctagc

SEQ ID NO: 154446 - DNA, 579 bp, Zea Mays
ccatcgcttgatgggtccattatggttagttaacaaagatctaggaacccaaatgtcctttgcgctagcgtttggcaaattcattgcctttctagcacaagttgcaattttgggttgcctagttatatatgaatcaaatgacaagctatgagtggaggagttaccaatgggacaatcattgccttgatgtcccttttcccggcatgtgtagcataggcgttttccaagttttgaagatttcttctttccttgtttgttgcttgctacatggttagtaaaaactttcttttctaaccctatgcccttttgatttaaatggggacaagatttaataaagtgtcccttcttggaacatttaaaacagagtttatcatccttgttaataatcaagctatttttaatatagggacatgatctaatcaagtgccccttttcaaagcattcactacacttcttgattctatttgtatgaagtgtaacttgattattaccttgaatgttaccttttatggaggcatggttgaggcttttggaagaggtattgattttcttcttttgctttctcctcttggtaatcct

SEQ ID NO: 154447 - DNA, 443 bp, Zea Mays
ttggcccgttcagcccatcaatgtaaccgagccgtactcgtcaaggctcagcctgctctcttcctgcccccccgtccgatctctacccggcggaattccgtagacctcgccgtcggccaccgcccgtgcaatttggagttgagggaagttcaccggaaggcagcacgatggttcagaagaagaagaaagcggccgcggcgcccaaactccgcaagcttccgaagcgcgacgcggtagctagctacgctccatttccgcaacctccgcgcttggattggatcctctccgggggaaggagtgtctaacttcctttttctcggtctcggttctctcgcaggataagaagctcgggaagaagggtgacatggcagagttcagggcgcagctggactcccttgggctgaagatagtccaagtcacggcagatgggaactgcttcttca

SEQ ID NO: 154448 - DNA, 774 bp, Zea Mays
gtgaaagaagaaaaatcgtacctccgtattgtcttcgtcagtatcatccttttgtaagctggcaatatatttttgtttggtctgtaaacatggaacagataggatatgagtgggtcttattgtaatttattaatgctcaggttagtttgaaaatgaatgagagagattttaataaacgtgtgaaactaagaaggtgcataccaaattcgttaaattcagttttttgaagagagatttgctttctttataaaaaagcaagaatgtgtatacatgaacaacatgtaaagtttcaggtgtatgttagtaaagtgaaacataacttcagctcatacttcttatatgcatagtaaaggcaattaaggttgatttgcctttttataattgataataaggatacgcaaatgtataaataaaagaaggtacgtagatggaaaaggtgtttaagaatatgttactacattgatgggctgtaattgaaagtgggaatagtggatatgctaattgaacgtaccagttgtgctcagaattggaaatcataggaattagaaatgttttctctcagcaccaacggccgacctgcagaatcgatcagaaagcacgttaataaacgaccatcaaactatgtaaccatatctacaaaggaaaaaatgcagcatggattggcatcgcaacgccgtttgagagttgtgtgtagagaggcgaggctctcgacgttggtgcttgcgatgttgcagttgcctacagcgtcgacattttgtgcatctacaccaatca

SEQ ID NO: 154449 - DNA, 672 bp, Zea Mays
ctctgaccaccgatagggagctgaagcactggtggttgccaccaggacctgccggtcattaagcttttgctgccttctattctcctgcgacccgtgtcctccaaagatgacgttgacctccccgtcgacgcgtgggaatgctccacccctccccattccttttgttgaggctgcctaggctcgccaggccctcctcgtggtggggtaggtggtagaggctggaatagttggccattcccgacggaatgcttgaagtctctgcagttccacaaggtgtggtgcatgtccttgtggtacggacattgggcatcgaggatgtcgtccagtgtccgctcgcctccatggggtgcccctcgggcacgagcgacaggtggtccggtggcatggacctcctcacgaggcctcttctcccaacgcctgtcgagttgctggttcacgtcgcgccgcggttccggtggtgcaggtttcgctccctcgatgaggtcctagtcccgctcatcagcggtgatgtagaggtccgcttctcgaaacagttgttcagaggtggttggcgctttctgcagtatggctcggacgaaggccgagtcattagatccccggtagaagtcctcaatcactgctgcctcagtgacctcgaggatacaatttctcatggtctgaaacctcttgagg

SEQ ID NO: 154450 - DNA, 522 bp, Zea Mays
cttcaaggcggcaaggtgaggctcgcgaggatcatgcatgtgaagacaaatctgttgcacaacataggctatgtttggtcgggtaaaagtgaggtaatgtagagctccagctaagctgcggaaatccgatggattagaaacaggagcaccagtagctacagaaacctttgggtttgtgtcgacaggtgtagaacagggcttgcaatctgccataccagcccgatccagaatatccagcatatattgacgttgcgaaaggaagaggcctccatctcgtcgttgaacttgcatccccagaaagtgatgtaggtcacccaaatctttcatagcaaactccaactgtaaggcctgaatgatgtgtcgaaggagaacagtagaggatgctgtgagtataatgtcgtcgacatagagtaacaaataagatgtgtcagttcctctatggtagacaaacagagatgtgtcactcttgacctcgatgaatcccagggagagcagatgagtggcaaaccgactatgccaggc

SEQ ID NO: 154451 - DNA, 460 bp, Zea Mays
atctgaaatccttcccgaccagagttctggatgctgcgtgtactccgcactgtccggcgtggatttcatccaatagctgcttcccagtagttgaggaaatgcacttcatgaggactccagtcgcaacccttctgtacagtgcgccccttatgagggtgtagtgggccgactgtcttgcgatgcgctctaccgcagccttatcatccggctcttcttcattctttatgtacctgacgataggctccctctagtcattggggtccgattctggttggttcaaggtgttgcattcttctgtctgatctgagagaatactcgggtgtgatacttcttggacgaagatcccggatgggacctgggcccgactggatcccagctttgacaacgcgtctgctgctgcgttgcggtctctttccacgtggtggaattccaacccttcaaatttgtcttctaattttcg

SEQ ID NO: 154452 - DNA, 324 bp, Zea Mays
gtcgaacactaggctagagaaaaatgttgaggagcttcgcgaatccaaggagagatgctttgaaaaatccttggattgcgtaagaaaattgaaaaccagctttgccaaggtgggtgcatattcttccgaagagaatttcattcgaggtgaccctgagggtgttattgattggataagcggagaagccgaagcttttgaagagatcctcagtgatcgcggggacatttgtgcctttgccggtgcttggggggttgcggcaattctggagaaggctggttgtgaccatgttaaggctgcagcccagaccgaagccgccttctccac

SEQ ID NO: 154453 - DNA, 733 bp, Zea Mays
cttgctttgagttctttgcgagtcaactttgcttgaccaacagggggtgagggttgattgggtgtctgtatctcatatagctgagcctgacttgattcttctgtttgggtatccatgtgtttcgtggctttcgcttgaggtggactaatcatgtatccaaacattttttctattccttttgttgttcttcattccattcatcgaatatctctgtgactcatttttctcgttcgtagttgttaaggtaggaatattgtcgttgacatcatttacttcatttccattggggttcatcatctggttatagagtaaaaaagaaagtgagacaagattacataagaggcttgtacgatatgaagataaagggcgaacacaactttttgatttccaagattagttaaggaacaagggtggtttcatatttctcctagcttcatcatactacaagagtgtacaagtgttataatccttaacatagatccttttgaaccttataaattacagagcatgatatccaaatcatctttttgatccaacagtatttctttgagcacaaattgagagaaagacttgagcgggactttagggcaactagaatagagcatcatattgtttgcatatagcagatgacgccatactttattctctttgtaaaagggcaaaacacaataggtgcgaaagattctccaaatttattcatatatcacttagcacaattacaaatcttgaaagg

SEQ ID NO: 154454 - DNA, 452 bp, Zea Mays
aaaatctgcaactttgtgtactcaaatctcgcctcgggcccacttgtcatagacttaggggaggtcttcttctacctccagccatcacgtgaacagaagagagccgcagaaaaaccatggggctgcttgcgtggctggttcatctatggagggggccaagcagcgaggagacggtgccatgggaggagagggtgctcctgcgctgatccagaggggagggggaaagtggcgtggagaggaggaggagggctggtgctgccatttttagagcagagctctgtacatatcagactacaccagtaggtggcaggtggaagagtgtcgacattgggcgaccatttttggcgttttctgtttggaatcggaccttgatcagcatacgaaatatcttccttgatctaccctctacaatttttgtacggaacttgaggtgattcgagcactggttaggg

SEQ ID NO: 154455 - DNA, 368 bp, Zea Mays
accaaacacatggagagattgaacataatatcaaacactaaaactagcatagcgcctgttttacatagcaatccgtcattaatctgtgcatccatatgttatagatccaaaagcaggataaaacattttgatctaggttcctgattgtaccaccaaagaaacaacttacatgggcatcaacatgatgttctactttcataggacaagcataatcatggagtctaagctacaggcagatcagcatgcatcccttgcattgtcgcgatgaacacaaaagcacggtgttcccttatccaggacgaaacctaagagccaataaacacgtatgcactccatagttcttgcgaacacaaagcacaacatcctcg

SEQ ID NO: 154456 - DNA, 883 bp, Zea Mays
aacttgagatcagcaggtagtactgcttctgaaccgtagaccatgaagaaaggagtatttccatgcagagctcgactaggttgagttcttaggctccaaacgatgtagggcaactcccttatccattttcctgcgaacttttcatttttatcgaagacttttttcctgagtgcctccaatatcatcccgttagctctttcaacctgcccgttggctcttgggtgtgccaccgaagcatatttgatctgaatgctcttttgctcacagaaatcgaagaactccgaacttgtgaagttggatcccaggtcagttatgatactattcagtattccgaacctgaatattatgtcttgtatgaattccacggccttagctgaagttaaagaagcaatgggtttgaactctatccatttagtgaatttatcaattgctaccagtatatgagtgtatcctccttgagctttcttgaaaggtccaatcatatccagtccccagcatgcgaacgaccaagttactggtatggtctgcagttgctgcgctggtagatgctgttgtttagacaagtattggcaggcttcgcacctctgaactaactcggctgcatcactttttgctgttggccagtagaatcccgacctgaagactttcccgaccagtgtcctggatgctgcgtgcactccagattgtcccgcatggacctcattcagaagttgctttccagtagttgagagaatacatttcatgaggactcctgatgcccctcttctgtatagcgtttccccgacgagtgtgtagtgagctgactgtctagcaatgcgctcggctgcatttttgtcatctggttcctcttcattctttatatatctgatgatcggcttcctcc

SEQ ID NO: 154457 - DNA, 680 bp, Zea Mays
taggcaacttttgcgcagagtgtcgcacgcgagggtagccagcgctgcccctcgcggtgactttggtgaggtcgaatgtcgaagaccgtcgatgtggtctttttcgacatgttgtgtcttagtttttgcgggggatttttgtgggtatattacatggctccgcctcattaaaaacctcacccccaggaggaaaagagtgcgggccggaatgatactgtttggtgaattataagggcgtgttagccctgaggattcaaacaaaaaacttgtggagattatcgatattccagaaatgctctaggtcctcgccggatggcgttgttagcttttacgcgctgggggacgccttcgtcttgacgatgaaaggaccctcccactttggctccagcttgccccgtgactctgttcgagttgtccggacaagtacgaggtccccttcgtcgaattctcttgggacgactgcatggtcgcgccaggccttcgtttgagcttggtatttgttgagagcctgcagggcaaagacacggtctccgtcgatgaggtctttggaggttggttcgtctacgtcggggatggctgaagcgcttgtccgtggtgacccatgtttgatttcctgtagggtcatggcctccgatccgtatagcaggtgaaagggagtgaaccctgtcgcccgacattcg

SEQ ID NO: 154458 - DNA, 301 bp, Zea Mays
ggcggctccagctctgattaccaaatgttaactatgtagtggatctgttggggttttgacgatggtggcggcaacatagccgtatcgctctcaggtacgctgtttcttacgagttccagttctgccagccaaaatctgctatctccattacaacccaggcttttatataactgccatgggctgcccgttacatgggcctaattcatccacacatttcctatatactttggattcggccttttagcccgagtgctccgctttgcttcctgaacttcagcgtccgcctcttccatcacaacag

SEQ ID NO: 154459 - DNA, 486 bp, Zea Mays
gccaatagcccctgcatgtcctcgcctcagcttggcacactcatcgcgctcatcaccggagcatttggccacgaaccggaagctctcccagcccgccaagccgcccgagctccagccaccacggccagctcagcccagccgctcccagtccacaccagcagttcggttagcttcgccagagacccatgaagcttctcgagccctcagacctagcgcaacctaaccgaaaaccccgaatcaccgtcgtcggacttcttccgctcacacgcgaacgtggaccaggtaagtcactgcaccattttccaattcctcgcgtagaccgcctctgcatcaattggtaaagcttcccgagccaaccaattgaactatctcgccgtgagcaggccggaacactcgccgccgatgaactccccccatgcgcacgaggacagaccaactccggccatctccgacgccgacccatacctcgacgtgaccgccgtaacc

SEQ ID NO: 154460 - DNA, 432 bp, Zea Mays
gagggggtataagactcccttgttcgaaaagctatcacaaatagatcgacccaagaacctcctatacttacgcaactcctcccaacttgcccctttcaggtaaggcctcaacacactaggttccctaattaattagccaagattagagccattgtcacaacccaaccaagttatcaggcccacgtacaccaatcattgccctcaaggccttgaatggatatgtaagtgaatcagataacttacacgaggtgccgagtttcggtaaactcgttcattccgaaggaccatccaccatagtagcaagtattacaataaaccaacaagaacataaactttaaatacaggagttgagcggaagactttacaataagataatatacattagcaagcctttaagtttacaaaccagaagtgcatattattacaagcccg

SEQ ID NO: 154461 - DNA, 368 bp, Zea Mays
ggtctttgcatcttcctcggcgggtgcgaagggtaaggaagctagtcgagccaactagggtccgtgtaggcagttggaacgtaggttccttaacaggtaagttacgagaaatagtcgacgttgcagtgaggagacgggtaaatattttatacgttcaagagaccaagtggaaaggacagaaggcgaaggaagtggaaggtacaggcttcaagttgtggtacacggggactgcagcaaacaagaatggagtaggtgtcttgatcgacaagagccttaaagatggggtagtagatgttaagaggctaggagatagaatcatcctagtcaaactggtcattggggacttggttctcaatgttatcagcgcg

SEQ ID NO: 154462 - DNA, 674 bp, Zea Mays
gcaaaatgtgcccatttttggacctaagtgcaaaaaccatgaaattagggtatcttaactcatatgattcacatgtatgtggatttgcaacttaaaccctaagttttgggcctatttgcaaaaagccacatttgagctctattgagttaagtctgaaattcagtagaattggctcaactttgaggccctatatcttccaaattatgaagattttgccctaggtcaacacatcaagtttgtagagctataaaaggggaacaactttgctatagagattaagccttggtactatgaaacgttttgagaaaattggacccaaagatgggctgtcagactatcttaagtctgaattcagactaacagtgtgattgagccacctttgagctgggattcgagcatgatccagtaagaatttgggagtgactgctatagtaagcttgaagctggatagtagagcaacaactttcttaaagatggattaggaagtcgctgcatgaaaaattaagatccaggccttgcaagttgggctgtcaggctgactgaagaatgatcccatggtacagtaactgaaatagattacaagtttagcccccccccctcgccatcggtgacctttgcgccgtgatttgcgctgtcgccgcgattcatgctctctggtaagtggataaccacga

SEQ ID NO: 154463 - DNA, 1083 bp, Zea Mays
aaatgaggatgtacctgtattgggctaaaaccctcagtcggcccaaattcgctcagctcgcgtggcccaccaattccctttcacgcctggctcccactctgccgcgctctgcttgccttctcatcggtcggtgggccctcgctttcagatccttccccaaccaagctccacggtaaacctccaccgctcacgcggaatcagcgtgggtggttcaacaaaccatcgtggatctcgcagcttgctctgactcagactttggccgctaccctgggtataaaacccgtgctgcccccctctcgccatctaccttgtgccgcagcttctttcgcctcgtagcagcgccaccgagtggaaagggcaaggaggatggagccactgcaaccagatctcgtctgcgcagtcactcagaccttctgcgtggtcgagcgggttgtctgggtgggcagcattgtgactgcaagagagggagaaacgtgttcggtcgctggaaccgtgtgggcgaacatgccatcgtggaggagagagagatgcaggaagggagaaaatagagcagggcctcggctacgcgcttgctggtaagggctcctctggtgaactcagctcttaccccgctttgtgtagcacgtttcggatttagggatagtcgccggttgggttttatggctgtgcatcggcgtgtttgccgccggtcaggccatggcgccgcctctgagcaagttcctgggaagacgatgggtttctggccgtcggatccaaacctgtggttgagattagaagtcgcatgccgatcgggctgtccattggatcaagatcgggtgtacgggtttccatctcggctatttaaatcctgagcgttgttatttgatcggaaggtccatattgtgtaccggttcaggataatatagatctaattccgagccgttgagattgatcgagcgacccatatccaacaataccccttcggccgaacaaatttacaaaagagaccttctgttttctctatttcaacccgccgtccatataaggttcgcctgagtcttagtacaaattgctccagtgccctgtactttacagaaattgtta

SEQ ID NO: 154464 - DNA, 387 bp, Zea Mays
gaggaaaggagcatgtggtaacctacataagtcggaggttggtggatgctaaaacaaggtacacttttatcgagaaattatgtttatgcctattttatacatgcaccaagtatagatgttatttactatctagtcattgcaccgttgctagtcaaaccgatgtgatcaaatacatgttgcaaaacccgattatgagtggtagggttggtaagtgggcttatgcactcatagaatatgacttggcctatgaaccattgaaatctatgaaaggccaggtcgtagcagattttattgtagaacatcggattgatgatactcataaactagacatatcattactcattgttactccctggactttatattttgatggatcggtttgcaatg

SEQ ID NO: 154465 - DNA, 463 bp, Zea Mays
ggcgtctgctaccacgttggcctttccggggtggtagttgatttcgaggtcaaaatccttgatcaattcgagtcaccttctttgacggaggttgaggtccggttgcgtgaagatgtactttagactcttgtgatcagtgaagatgtggcatttgttcccgatcagataatgcctccatatttttagggcgtgcactatggctgccaattccagatcgtgggtagggtagttctgctcgtgcggcttgagtaagcgggatgcataagcaatgactttcccattttgcattaggacacgccctaagccttgcttggaagcatcacagaagatgacaaaatcctggtgtatatctggcagagtcagaactggtgtggttgtaagcttctccttgatgatttggaaactttcctcacatttgggggtccacacaaacttattgtcctttttgagaagttcggtcatg

SEQ ID NO: 154466 - DNA, 583 bp, Zea Mays
ttggttgccccgtattctatattacgaatggcgcaggcagcgtgggcacgggcaccatcatttgggctataccgacgcccggtcttcgtagcctggggctcaacacgactcgtcgtgttgcgccctaccagtggcctgcgcactcaggcctagtcccaataggtcatgagtgcgtcgccggctaggggagatgtgggccataaatgcactgtagtatgaggggcttgtaggtcatgagtgctctacgacctgagaggctcgtaggttatgagtaggaggcagaccagtgtccctcccgtggctcagcgtcaggcgcagtttaatggagtcgatcatttatgatgtcaaccgtggtttaggcatggaatacattcgagtggtttaccttcgctacacccagtcccctgtccagtttcgccacgttcaaccccggactcggtgccgcatggttcgtttggagcgggttttttcaggataggcattgtctatctcccttggctgaccaacgggcttcagtggacaaaggcatttttctcagtgcgcttggtgaccgacgggctccatggactaggatcgtatcccc

SEQ ID NO: 154467 - DNA, 680 bp, Zea Mays
agtagccgcctctaaggctgatgaccctcagttaattccatgggaccaggacgatccaagtcagtctcctgaccctcgagaccgcactctaaggtcgacgaggcacgggatgacctcaatccagcgtcgagcacatcagcacaaacctccatcacaccatcacctgccggctcggataacagatcctctgggaccatatcctcaagagtctgatcaaaatttgccagggacaattcttgcagaccaatgagagcagacaaagcaggagaaggaactccactactttcaccactggcgacatactaccgactgttatttcgagtcagagggcttcatcttcttcctccccatcgtcttcaccaacagcacaggcaacacccccattgggatcaacaacagatggagcacacccattgggatcagcagcagatggagcacacccagtggggtcggcgtcagtaaattcaggcacaggcgtttcttcagcagcaggaaccgaagtaccaacgtcccgatccaaactagatactcgccggaggcgtctctttttctttttctgctcatcagcaggaggatcaagttgattgactcggcaagggcgtctcgggcgagcactgacaggcttctgaacatctgaagttgtaccagcctctgggagaggcgccaccaccaatgtccca

SEQ ID NO: 154468 - DNA, 780 bp, Zea Mays
acgaccttcgatccatagaccatgaagaagggagtgtttccatgcaaagctcgactaggttgagttcttaggctccaaaccacatacggcaactctctgatccactttcccgcgaacttttcattcttgtcaaagactttcttcctgagtgcttccaatatcattccattagccctttctacctgattgttggctcttgggtgtgctactgacgcatatttgatctggatgcttctttgttcgcagaaatcaaagaatttagagctagtgaagttggatcccaagtcagttataatgctattcggtattccgaacctgaatattatatcttgtatgaattccactgccttagctgaagtcagagaagtaatgggtttatactctatccatttagtgaaaattgtcaatggtgaccaacacgtgagtgtatccttcctgagctttcttgaagggtccaatcatgtccagtccccaacacacaaatggccatgttacgggtatggtctgcagttgctgtgctagtaaatgctactgctttgataagaattggcaagcttcacacctctggactaactcggctgcatcactttttgcgatcggccagtagaaaccagatcgaaagacctttccaactagagtcctagatgctgcgtgtatcccacactgtccagcatggatctcatctagcagttgcttcctagtagccgaaagaatgcacttcatgaggactcctgttgcgccccttctgtacagtgcctccccaatgagggtgtagtgagc

SEQ ID NO: 154469 - DNA, 735 bp, Zea Mays
ttaggggataaaatttaggggacgttgctggagacagtcttacaactcctccatcccttctacatggagaaaccctagccgctgcctctgagaacctttggaatggagcgtactccccctgttgaagtcgtagtcgaggcgtacgacaccgcgcgtgctgctgccgcaactgcagcagaggctcgttcgacaaccatcattacggaggaggcaatcgctgctgtgcagtataaaaccattgcccggacaaggttgaaggagacgtcgattcagtgaagaactcaacatttgtttatgctaacgccagtgatgatgctttggtaatatttctcgatcccgtttatcttcttggagatccccaatgggtgatgagttgcatggtctgtagggtgctacatgcattagaagaattttgaaagggaggtagctagaattttgaaagggagatagctagtgtttctgtaactgtatattgtgtgaagaaatgggaagggaggcagctagtgtttgtctagtgtgtgggtttgtttaccataacagaatggtatcacagagtgttaaagtgttgctagtgtttcctttttttgtttagcataacaatctattttgtataggacaatgttgatttcaagtatcatgttagcatcaagagatgaggagacaatcaacactgttgcataccattaattctatgtgttctagtatcctagaagttgagggggcaagataggaaag

SEQ ID NO: 154470 - DNA, 1102 bp, Zea Mays
ataatatagttctacatataatatttattggatggttgtaaataactatagtctaacaacactaacaaaataaaaagcataccaaaataataatatataaaatgtaacatttgggtaatacaacatgattgtgcaccaaaattaacacctaaacaaaaataaatatatgcatagtacctggtattttctgggtgtcatctgtttggatgagcttgttttcataatgttctttgacttgatatcaatatcagactttgatctgcttgacacaatggggacttgtggggggagggatgtccattttcaatacacaaaacttcttctttgaacgtttatttaccgaagtggagggtacaactgatctgaaattgcgcttcaatgttggagcatccatgaaatcatcatcagacaatgcagatggagttgtaggctgattttttttgaccagacaagctagtggctttctacggacacgagtaactggtgctgtctgaggatcaatctgctgctggttatggggattgtcagcatgtttggctgagttgctagatcgtgtgcgtcttgaaatgtcaacagaaaacacctcctgacttgactcaatagttaatctgtttgcattagatggtgagcgatcaacagacctcatgattcagcaagcaatataactgttgacaaaaatgattggatttaagtaaaatgatttatgcataaatatatgccaaaaacaattcgaatattgtatataactgtatacaatgcatactacataatacgaaatggagttacttatcttaaactacctttttcggttatatgccataatattaatgaaccatggttatatacaagcataaatattaattaactatttcatataattgtaactggtgcatgataaaaaaatacctattttcatcaactaactatacaaaatatttaaataactagttcatattaatatacacaatttgatgagattcaaacatggatatttaaataactagtgcatatataatagtacctgtgtgcatatatatataatacaatgggtgtgtaaaataatgtttcagatatggggaaaaatacctatgtgcataactat

SEQ ID NO: 154471 - DNA, 614 bp, Zea Mays
atcatagtggttgtgataattaaaaaaataaaaacgaacaaatattgtttccatgaaatgagcaacttcagaatctgaattttgacacccaaattcacattacccagttccataattaatacaaaggttaatgtcttgctagtaaatcaaggtagatagtagcgccaaattaatgccggtcaagagaagtagaaatcggggagctaattggcaacggaaggggcaatgtggttgaataaggcgacaacctcggggatcgagacgccgctgcagagcgcgaggaggcaacagaggagatggagcgggaggtgagcccgaggctgaggctgctgcggattagggtagaacctgggggatcaggaccagacgagctagggtttagtaggtacgacctggggatccgttgatggtgagcacgtactccgtggatgggcgagctacccatggagaggaagggatcacgacgagagatggagtgagcgcggtggagaatggaagccggcgagaagggaagggatgccgcctcaaagcttgccaacacagaggcgagtcgtgcctgctgagatctgcaaaggcctcgtcgtcgtcacgtctgcctccgggcacctcgcacc

SEQ ID NO: 154472 - DNA, 1010 bp, Zea Mays
cagaaggatcctggggaggaggataggatgaagattgacccggatccccctagtggggaggcgggacatactgctctctgtcatcaaaaaattcttcatcttcaccttcttcatcttcaggtgacatgaaaggaatgccataggtttgctgatgccattcattaatctctggcggaggaggatggagggcacgtcaggcgagcggggattaaaagggatacccaaagatgtagcctgacgacggagattgttgtcagtctcccgctgtcgcctaaccatgtcatgaacatcagaagagatattcctgcacattgaaaagaaggttgcgatcccatgatccaatcgtgctcccatgccgcgacctcgacctcgaccacgaccacgaccacgtggtgtgggagagccacgaccaggagaaggacgcgaagtaccagcagcagcttgctcacgagagctggcaggggccttccttaattaccctgctagattatttgatcaatccagaagggagtatatgagagatgtcttgtacccttttcatatcaaaattgtgtcaccacttcaatcattttcatgatgaagggggcatgtagacatcccttgaggggaaagcaggactttactttctcccaggatattcatctaatttccccctttggggatgagagtcatcctgtagagagagttgatatacctgtagtacttgtgcagatttgttgatttccaatattcatcagactcagagatgtgaagatccttggcttcagccctggtgggagggcgaaagtcatgaatcttgattttttctaaagagatatcctcatcagtaaatcccaaaatgtgagcaaacctcctgtagctcactttataccagattccttcaatgaaaaaattgagataaggaaagttgtatggactttcctcatcagcatgtttaatccacagagtagaataaaactgagcaatgatttcatcattccaatcatattggaatgtcatgatagtcttca

SEQ ID NO: 154473 - DNA, 684 bp, Zea Mays
atcaaattgttaggctgtgtattagactcttagtgtgtggctgtgagtgttattatgggcctacatcaccttctggaccttcgtacatgggatctcttcgtcaccaattactgtctccagatgaaggggatggcacgagcctcagttgtctaggaactgctcaatggcaactcgagcctaccaagcagtgccaccgcgttggcacatgacattctgtagctcgacggtaacatgtctgaggagcaagtagaggaccacaatatccatccaacgtcgggaggggatatcagggaacacagtgtgggtgagggtatggtcgtcgagcgtgtagcgttacagggtgaggaggacgaggttgcgccagtgggtgcaggaggaggaagctaggtcaaggagaacagaaaccatggactagatgttctagacaccagccgcatatgcatggaggttggcgatgatggcagtctcgtatgccgggggagtctcaaccatcggtgaagttggaggtgaatcaatatatgaaggaccactaaaccctaaaccctctgtgatcttggagaaatcgtctctgattgcacgctcgccctcaaccttctacgaggccttaacgagctctacgatcacctacggacctagatcacccgatcgtttctgttcctgtccttgcacaaggttcgcaatgac

SEQ ID NO: 154474 - DNA, 613 bp, Zea Mays
taatgtttacttttcgagcttcagactactcccttgtatcgcgttgtggctgatcctgaaattgccctggatgctgttggttgtatgatgaagttggtgctggcatgggtggttgatgcaggacccgtatggctaaagagtgttttgccgaattaactgaagctgaaggttgtgggattagatgttggatgtggacatattctgggatgtatggagaataatacgaagcagtgtgaaggacctactttggcgaattctgtcttgcttcggcttcggcaatttctttttggttttgaattgtgactttgcaggttcttgttgtgtgcccgttgtcctttccacagactaagcagaatagtattcttggctgagaatcgtacctccccccaaaacttcttccaccccttccacctcttagagctggtggtatgaaggaactcttctgggttcctattgactgggcatgattttgttgccctggaggatggttatttttgtcttcgcctttgcttggattgtaaatggtcctgacatgccttggattgaatcgcccaccaaagccccttgtaatttcagagtatctgaaggcttcttctttcctttgtcgaaaatc

SEQ ID NO: 154475 - DNA, 505 bp, Zea Mays
aacaaaggctggaacaagagacaagtcacctagagggagaatttgatgaatccactgtcggatcgttgcatcatcgggtggttcctgtaacaattgaggatcagctggcagaggatgtgccaaatggtactcaatttgatggtacgaggccttcactgctatgttggtccaactaatcaattttatcttgtgtgttcattttgcagaaacatatgtattagatgaagttgagatacctccatttgcgttatgttgacatggtacttaatccaattatgtatgctgaaactgacattttaagaattgtgatagcttcatatggtaactacaatgaattaaataacattagtacatgcttgcaacttatttcagaacttgttctcttgagtcccctgctgtaaacaatggtattattgagattgtcatgaactcggatgaatgcttgcgacattaattgttcagtcatgagtaccagtattgctttatttacagtaaattgataata

SEQ ID NO: 154476 - DNA, 326 bp, Zea Mays
aggcgatatgatccgggacgagtgacctctgctactatgaagggtccttcccacgagggtgataacttgtgccgtccctcccctgttagaattcggcggaggacgaggtctcccatcgaaaagaaacgttgccgcacagctttgtcgtggtagcgccttagagtctgctggtatcgtgctgattggatcactacatttagccgttcctcctcgagtacatcaatatcctctagtctggtggcttcagcttctgctatactgtcgaaaatcaaccttggtgccccgaacttgagatcagcaggtagcactgcctccgacccatagac

SEQ ID NO: 154477 - DNA, 1024 bp, Zea Mays
attttgtatgaactgggagctcaggcgacccctaggaaatgggccctcctaggctacacaggaagatctgtcgcgccaacctcaggagtcgggcggaaggtgctacgattctgtaagatacagagcgtcttgtaaaaagcacacgaagcaagcagggcaaattaaccacccggcaccacaaccggcatgcaacatggtacgtgggatgtgtcacatcccgtcaaagccgcccacgcgaagagagatcatggtggccagaccttccactacgctgccccggtaagccacattacgtcaagctaggtaaaaaaccaaaacacgccccagcctcccacctagagagaggggtggactgagcaagctcctagagagccacaagctaggtgaccggcctataggtcacttgttgagctccacgtccaaggtcgtacctcacatcctcccgcgtaaacccagctgatggggtggccatgaggctcccctttgatcggataaaccgaccaaaggaccaatacaagatcgaataaggaagggctcgataagatgccccagcaggtcgaacaccatcagcgggatcgttcgccgaaagatatcctcgcaagaggatgatcggatcttacttggatagcctgcttgtagctcgatggcaccttcccccacactgactaggtcgaggaaggaaggccctccctttggtaaaaattaaaagaccttctagggggaagcacgtttgaaaaaagacggatggaaacagaggaaacaagcccaggaacgatgacgaaacaacaataaacatggactcgcgccatgtgcttgacgaaccatcgcaggaaagggtccatccttcactacataaacctccgagcaatccatgcgggttactctagggctgaaggactgcatctagcacatgcgctcacgtgcactcgagaaacaaatggactcgcgcccgatgcatgacaaaccatcacaagaaagggtctgcccccttcccaacctagctaaatcatgccattgaaactga

SEQ ID NO: 154478 - DNA, 428 bp, Zea Mays
gtcggtcttagcgcggacggtttgatgctgtcgtttctgcttttgttgtactagttcggctgcgcccttaggcggcttctgcgtggatagtcttcgcggtagacttcggttttttcgcacttgttgtgctagtccggctgcacccttaagcgacttctgcgcggatagtcttcgcgcgagactttgggttttttcgcacttgttgtgctagtccggctgcacccttaggcgacttctgcgcggatagtcttcgcgagagacttcgggttttttcgcacttgttgtgctggtccggctgcacccttaggcgacttctgcgcggatagtcttcgcgagagacttcgggttttttcgcacttgttgtgctggtccggctacacccttgggcgacttctgcgcggatttgtcgcacgcgagggtggctagcg

SEQ ID NO: 154479 - DNA, 632 bp, Zea Mays
gtcgaattcgcttggggggcagagcagcaggaagcatttgatctcattaaaaaatacttgtcttcggctcccgtattaaaagcaccacgagcaggagtaccattccgattatacattgcagctgaagataaggtcattggggctgttttgacacaaaaaactgaaggaaaggagcatgtggttacatatctaagtcggaggttgttggatgcttaaacgaggtacacttttattgagaagttatgcttatgcttgttttatgcatgcaccaagtgcagatgttatttactgtctagtcattgcactgtttctggtcaagccgatgtaattaaatacatgttgcataacccaattatgagtggtagaattggtaagtgggcttatgcactcatagaatatgacctggcctatgtaccattgaaatctgtgaaaggccaggtcgtagcggattttattgtagaacatcggattaatgatactcatgaactagacatgtcatacctcactattactccttggactttatattttgatggatcggtttgcaatgaagggcaagggattggtatcgtgcttgtttcaccaagtaatgtctccttcgacttctctagccgattgaaaacttattacac

SEQ ID NO: 154480 - DNA, 537 bp, Zea Mays
caagggttagggctaggggttgggttaggggttaggattaagggttagtgtttagtgtttggattagggttagggttaagggttagggtttagggtaaagggttatggtttagtgttatggatatggttagggttaagtgttaggggttaaggttaagggttagtgtttagtgtttggattagagttaggattaagggttatggttagggttaggctttagggttagggtttagggtgttggaacttgctaactcgtggtcagccaatttcaaacggtgggagaatagaaagcggtttgatgccaatagacgtaaggtaatagggcaactgtgtttttctccgtcccccataatggtacagtatgggggtatttataggtaaccgagggtcggtcctgccttgctaaggacaattggggggttatggcgggtaattatagcgtatcaattacagacatgggccaaccctctatcagccccgtcagcgtggcggcctatggtcgggaccctgtgacatgggccgattatacaccggcc

SEQ ID NO: 154481 - DNA, 494 bp, Zea Mays
ttcaaaaatgcttttcccctttccttctctcagaagtcagatggaggttcgttgccaaaccagcttttgccagaatgaagatggtttccccaagttgctgagagcatgcatagtttgcctcggaatcaggagccagccagagtatgatggtcgtgaattcgtcgagcatggcacaaagaagtgtgtcgtgactgtatacattggatcgagtccgcaccatgtggaatggagtgtcactgctgctgggcacagattcaaagacacctgccaagtcgtcgctcgcaaggcattgaggaccctgtgtcagatctatgaagaagaagtggtcgacaccctgctcagattctttccgccctttcagagagaccgtccagtttggatggccaggatgcgtgcattggaatggaagcaactgcttgaggacgaccccacagtcgtgtacctcactgcatacctgctcaccctagatgcacagtatgatttcttggctcggc

SEQ ID NO: 154482 - DNA, 563 bp, Zea Mays
ctagcatcaagatggcaccatttgaggctttatatggcaggcggtgtatctcccctctgtgctgggagactttgggagagagatccctggttggtcctgattgggttcagcagacttctaagaaggttcgggaaattcgtcagaatattttggccgctcagagccgtcagaagagttatgctgatgtgaggagacgggatttggaatttgcagtgggtgaccaagtccttctcagggtattacctactaaaggagttgttcagttcggtgtctccagaaagcttagcccgagatacattggactgttcactatcttggcccgggtgggcaacttggcttatcgcttgcaattgccggattccatggcaggggtgcacccggtattccatgtctctatgttgaggaagtttttgtgggatccggaccatcaggtcgagatgaaaccaattgcggtgcagcaggatctgactctggagtgtcgtctggtgcatatcttggagtcctcgaagcgtgtgttgagaaggagatcaattaagtatgttaaggtcttatggactaatcag

SEQ ID NO: 154483 - DNA, 614 bp, Zea Mays
gttggtggtgccaaaggtgatgggcaatgtcacctacctcattgatgagatgccacccatggtgacccatgggaagggatacctaggggtcaacctgttataggggatctgcatcccctcgattgcttgcaaggacaaaatgtttaggaccactacgccatcatgaggagcccacataacttgacattgtcgatgttttgggagacgatgagcgagtggactctagccctaaccatgttggtgggacagttcgaggagtcgaagacgataggggtagacgctcactaagggggctagaccactatgccatagtgcaacatctttacaacctacttagatgttgggctggctgcgtcactgtggatgacaatcatgatgcgacaggcttcgtggaagttgaggtcctcatcattgccaacattaccattttgttgtgggccaggttacccctaaggcagatcctcggtaggaaggttgctagggatgctaccactaatagtgcttgatgagctctgtcagctcccaaacggcacgacgatccaaaatgttgtggtcgttagaattgtgggttgtgcagaaatctttctacttggcccataatgccatgaggcccc

SEQ ID NO: 154484 - DNA, 771 bp, Zea Mays
caaaattgtaattcaaattgaactaggaaatagagaaaagaggatagagaataaaatagaaaagaataaaggacttcatgggctgaccgaccaccacttcagcccaccaaaacttcccacgcgcgcgccagcccaactactacacctacacgcgatcacctgatggatggggcccgactgtcagtcgcgacctcatgcccacgcaccagctgttctgccaacggtcgctgcgccactgtccccactcgtcggcctcttctgacgcataccggtcttcccctttgtgatgatgccagtgggcccggtacgccaggttgtccgctaacagcttcgccgacctccgcgctgacacctgcaaccaattcgcccggaattggcggacctcgacctccataacccagggcgcatcaaccggagcgctcggccttgccattacattaccagcgcttctttcctctcgcctcaccgtagcgactcgcaacaaaaaaacccagagaaatcgtgggtgagataaggaaggcgcggtcgtgcccggttctccagtcattaccgtgttccgccgtcgattggagccagaaaataggcggggaggatcgtttggacgctggtggggcatttacttccacgaagggtcgtcgtctgctcgcgaattgctcaccatggcgatagatctccaccgggccgccaagcaccgtggtcggcctcctcggcttagtcatcctcggtgagacgccctctacgtgatcacctatcccttaatttcatttttca

SEQ ID NO: 154485 - DNA, 744 bp, Zea Mays
tgtttttcaaagaagttgttcgtttaaatgggattccacgaaccattgtttctgatcgtgacattaaatttttgagttacttttggaaaactttgtgggaaaaacatgggaacacgacttttgttctctacaacatgtcatccacaaacagatggacagattgaagttataaaccaaacattatcaatgctgctgcgagctatcctcaaaaaaaatttaaaactttcggaacaaagtctaccacatgtcgagtttgcatacaacagagctgtacactcgactacaaaattttgtccatttgaaattgtataaggcttcaaacccactgctcccatagatcttttgtcattgcctgtgcaggaacgggtcaactttgacgctagcaagtgagccgagttaatcaagaaccttcatgaaaaagctcgagcaaatattgagaaaatgaccaagaaatatgaaaagtgtgccaacaagggtcgaagaaagatgttgttcgaaccaggagacatggtttgggtacatctacgcaaagaaagatttcctgaataacgtaaaagcaaattacaaccatgagctgatggtccattcaaagtgcttcgcaagatcaacgacaatgcttatgaaattgatctgccagacacttatggtgtgagttccagttttaatgtggctgacctctctcatttctttggattggaagagttgaggacgactctttttcaaggggggaggatgatgtgacca

SEQ ID NO: 154486 - DNA, 657 bp, Zea Mays
tttcgccggtgcatgaggggtcgcggcaattttagagaaggccggttgtgaacatgttaaggctgcagcccagccggaatctattttctcggcagatgacaccaaggacccctcggttgaagcctctttgctaggcgggaggttttactctgatgtttggatgaaggatggtcgtgagatgcctgatgaagtcattaaaaagaatgagaaagaatctcacaacgctcgagaagaggctaaacgagctgaagaagctactgaacatgccaggattataggtacttttatttaatgttttgcttcgttgttcgtttctagctacgaaattcaccaacatattctttattgcagctggactttcaccaccaccggagccgtacaatcccaaagccgatctagctccaaaacaagctttggatataatgaagattgctaacgaagtcattgacgaagtcatcgacagactattacatgaagctgctgaaaaagtgctaaaggaagattaaatttttgtatgcttgaaaatgtaatgcttgtgtatggctgtcgccttgtgtaagaaacaaacatcaagtatttgtatgtacattaatgtaatatatctctttgcgatgcatgaaatcttcgtatgtaccatttttgagcctttggcgaaaa

SEQ ID NO: 154487 - DNA, 273 bp, Zea Mays
gtccctgccaatactggtagctccagagccaggggagccgttgtacttatacattgcagcggcttccgaggcggtgagcatggtgctggtcgccgagagggcggcaccacaagggagtcaacaagttcccccatgagaaggtgggggtccgaccaccacgatgttgacggaaggccaggaggttgaggactcgggaccaaccataggggtccaaaccatccagaagccggtctactacgtcatcgaggtcctccacgaggcaaaggccaggta

SEQ ID NO: 154488 - DNA, 642 bp, Zea Mays
gcaagcagctgactcacctgaagattagagaggaatgatggtaaccccaagtcagggggagctacatcaaagctcaatgaaggaagatcaaccggaacaatttgaagaacgttgtcaggggtgagctcagtcccaccagcggataccagacttctcgcatctggctcgccgacctccaaggcaacttgtttgctcgaagccgaagaagcatgcatcgccatcgccccatcggattatggtggagatgacccgacatagacgtccatggaggtgtgggaaggagagctcacctgaacaccctcgggggctgggttgcatctcgcgccacccaccaaagccggatcactaccgctaacaccttcgggggctgggttgcagctcgcgctacccaccagagccggatcactaccagcgacgccctcgggggctgggtaactgccagcaccaccctcaggggctgggtctcctacaccagccacctctaaggctgagcgatcctccatcacctccatgtgagtcgagcaatccagaccaacgcctcgacattgaagactgccttccaaagtcgacgatgcacgagacactgctcgggatacctacaatcccgtggctggaatttccaaacaaatagccatcatgtca

SEQ ID NO: 154489 - DNA, 417 bp, Zea Mays
gcctggaggatcttctgatcgagatggaccgcatcctaaggccttatggttacgccatcatcagagacaaagttgatgtcgttacctacatcaagaaacttttaccagcgctaaggtgggacgactggacgtttgagatgaggcctaagaaagatgcgctcacaataggtgacgaaagagtcttgatcgtgaggaaaaagctctggaatcactcggtgcaagatttgtcgtagcagccgtttctcttgttttgatcctaactgtagctaactctgcaccggcgttgtcctaatcctcaaatgtaatgtagtattcgacgccttcttttttctcgtgtggtgaaatgtcaacagtagatttagcatcagcatcagacgcaggcttcagtccttttgatatacatattacatagtcagt

SEQ ID NO: 154490 - DNA, 651 bp, Zea Mays
aaaattcttacttccacctaatacattgttaacataaataaaattatattagtagtccactattcttatttgtcaccatcatgaattcattgtcatacatttacaaatcaaataagttgtgttttgctcgaaattttttttggaaataagtaccaatatcgaggcatagtattttcgcactatctccctaattaggattatattttcctgtatttatattttttttgttttcagctttttctaaacatgtacactatttccctaattaggattatattttcctataattatattttttctatttttagctctgtctaaacatgtacattacaaattgtgggctgcattacttattttaagtctgcattacatatattaagtttgctgatatcatatttatttatacattacatctgcaataccttctcatatttctactgaatcttagaccatgcttaagtcaacagtttgtttttttggtacctcaactgatccacatatagccaactaatctgtctgaattgtggcatgaaattggcttttctaaatcaatttactattttcaatttgtaaaaaacaacaaaaatgccttcaccaaattttagaatattttcagtatgaaattgatttccttacacctgaaggacccgt

SEQ ID NO: 154491 - DNA, 694 bp, Zea Mays
cttttgtgccaatctgttgttgcgcactctgcttttgcatctgacggttcactagcattttagaggtaatgcccgagtgatgcttgcttttctgcgatcaaaacttctctcgagctattggcctaccaatttgcgcccaacttaacatgtcaacccatacttctactgacgtcctcttgagttctaaaccctagttcttgctttttcctccgccgctctctatctttctgagttctcgaatccattagcgtcgtttgagaaatcatgatggtgcccaagaaaagaaaacagagtgctgctatcccagtcatccctacaatcgatcccaacagtcaactccccttcgctggtaaccatgtttccattgtttctgaagctgaccttctacaccttgttgagattggtgttctaccgccgaaagaattatgttcctggtggatctggcgcagagttactgtcccgacagaggatactcatgaggcgtttatcttcgtgccttttctcatccggggactggccctgccagtttctcccttcttttgcggtcttctcgatttttattctctgaacctcactcatctaaatcccaattatgtgcttcaaattgttgtgtttgttcatctttgtgaagcttaccttggaattcttccacactttgggctttggaagtacctttaccattgtcggtccggga

SEQ ID NO: 154492 - DNA, 754 bp, Zea Mays
cgtcattatctgctgggaaatgtatgtcatatatatactgatcataagagtctaaagtacatttttacctactcagagttaaatacgagacaaagaagatggcttgagctaatcaaggattatgatctagagattcattatcatccaggaaagcctaatgtagtgcctgatgccttaagtcataaagcgttttgccattgccttactatggggttgcctgacactaccttatgtctggaaatggaaatactaaatttggttatagtgcaacaaggaacattgatgcaattgaagctcctgtcggttattcaactgaggattatagatgcttagaaggttgataagggtatgaagcatatccaagagaaaatggaagctggtaaagccacttgttttagaaaggatgaccaaggggtgttgtggtttaaagatcgtatagtggtgcttaaaaatgttgaacttcgtcaacaaattttggatgaagcccatcttagtcagtattctatccatcatggaagtaccaagatgtaccaatatttgaaacaatattattggtcgacttaaatgaagatagaaatcgctcgctatgtggtaaggtgtgacacttgtcaacgagtaaaagtggtgcacatgaaggctgttggacccctacaatcattacctgtcccaccttgaaaataggatgacataagtatggattttgtggttggattacccaagacatccaaaggatatgattctatttgggttatag

SEQ ID NO: 154493 - DNA, 744 bp, Zea Mays
accatgaatggctttatcttgctggggtacatgtcagcagtgattcacttgcatgctatcagaaatgtcaaactttatcttgcttgtcaattaattaccgataaagaataaacattctgcataaacatctatgagaattactgtataattgaacaatactatagaaattaaagtcatgtaatggaccaaattatttctattctcccagcatatcactcaaattgatctgtcctgtttcaaaaatgaacaaagctgagagtattctatcttgctcaaacttgattgtttgcagtctcagctcctaaatgcagttagtcaacacaggaatgagcatgtgccttcagtaatatgcttgatttttttccatgcatcattacaacagagaaaaatcacattgtactggactgtaagccaaaaaaataagaagtgcaactgtgtggagaagtatctcgtttgaatagatacagaaaacatacctcagattcagccttttgaagctcagaacgtcttatctcaagcatttgcttgtaccacaggcccttctttgtcagtacgatggcctgctgcaccatatggttgcaccgatcatttagattctccgtcctgaattccaacactctttatcagtttgtgctataaacaaatgattgtatactatgtggaagaaatatcacattacaaattctagtcatatagacgatttttatgagcattatttttcatctgacgttaacaaaaaacaat

SEQ ID NO: 154494 - DNA, 989 bp, Zea Mays
ctggcgtcctcccatagggcggtggagtgctgatgcccggtgctgcttcgcctgcaggtcgttgggggcatcgtgctgctaggtgcccggttcgtcttaccccagcgagctccaaccataaggttcctgtgtctgtgtgggatcgtcttggaccattgctgaccaaagtctgtatgcccaaggttcgaccggaattggtgtggcgtgaggtctcctctcatggcgcgacgttcgaaaggtcggggccaccgggcggtcgcaaggcagtgccaaaaagcgtcgccactgcacgcggggcataaggcctaaggttccctccgcaccggcagcgggtgcacctgtccaaagtcctctttcaccgaagtcggttgaggtgtaagccacccccagctcctggaagaggttgctacggattttcctcatggttgtgttctcgagcggtctgaggcgcttgtcagagaggaattcagactccaacactgtgctttgttcgttgtggtcactggttcgcgacctcagtgaatgctcttgcagcggtggcagcagctgggttcggtttgctggagaactcctcattacatcgttctttccaggaggacatcgtgttgatctttgactcggagcgcatatcaaacatggttaacggtgttgtgctcaactcgccttcaggttcgttcaagttcatcaggtggtctaggcttgctcatgcagatatagttacgttcccctcccttgtcatggttgagttcagaggggtctcggttcatgcttagggtctgattactgctcagaacctgctgcgagatcactttgttgaggtggagcttcatcctgactctatcaaccgcctcgattttttctgctaggggtggttcccgccggggctcttgccgatcaaccggacgcagagacgggagtaggaacacctccatgaacgaccgctgcggaacccgacaaacgacctctccaggactcgccgctgaagagga

SEQ ID NO: 154495 - DNA, 675 bp, Zea Mays
tggagaggcatgtaagctggatgtaatgaggagattcttttaagctctctattatgtgtttcaatgatgatatcacgtttgtacgtatctaaagagaagtcaccaaccaccaacattgcaagttcatcagtagttggtaagttgtattgaactggatcaccctcttttgcgccaatgattctgatgatgaaatcttcattattgtggtcagccaaccgatctcttgccattctaaatttcttagcaaatggattatgttggtctaacattctaatcaaatcatgtacaattgatggatcgagcgattcaacgggtctatgatcagcatcaagacatttcaatctattactaacttcgttagcagtgtcgtacacataaagttgaagaaattgtggagcagagtcatcaaggggtaaaagagaaccaacacgatgatgtacttgaccacatatcttgaacagcggcggtcctcgaccatcattaatagagttatcaattcgtgcacccattgatttgaaagcaaaaagacagttatattgcctgatactacgcatgaatttcttggacctagaatcaccattgaagattgccaaggaagccagtggttcaggccgatctctaaacgaaggtatataaattttcccactcttacagcaggtatgatactgaggcctt

SEQ ID NO: 154496 - DNA, 1194 bp, Zea Mays
gtttgtgccatagaaagggggagctctatcttgccgtgtggaaatgtcctctttcctacgaaaccatagagcaggttgtcggtgtgctggagaaggctgtggttgatgcccttttggtcgaaggcgtgcatgaaaatgatgtcggcttggcttccgttgtcaacaaggaccttgtgcagctcccatcctgccacattgcaactgatgacaagtgcgtctgtgtggggcgcgctgcgaaggttgatgtctcttgcatcgaaggttaatggtacgtgagaccactttgtctgaacgacgggtcctatgaccacgacatgattgaccctttggtagtgatcccttttttgtcatttgttctcaaagtgtgagctggaccctccggtgatcatgtgaatcactcccctgaagggtggatctgcgaagtcttcttgctttggtggtggcgggtggtaggtgttggtttggatgctgaggcagtggaggtggcaacactagcatttcttggtgttgaaagtgttgttgctggtgaaagaggttggggttttgctgctcggggtaataggggtgttcgttttgatattgatgctggtggtattgttggggttgataggtatgagcgatgactctttggttgtcaactggcgccgacctggccatttggttttttgttgctttggtctctaggaagtctctggttgggtgtgctgagtctttgccatggaaaagacaatagaatcttctctgttgttgaggtcctcggcccctgcctctgcccctggtcgcgttgccaccgcggccttgttgtgtgtgggggggtaatcttgacgatgaggggggttctctcctggttgctgctgatttgcaatattgtgtacctggagctaggcacggtcatgtcgggccgagtcctgctatgaaggcctgatccatgtactactggattgcggggtctacttaggttttcgctaagactctacttttctttggtggatctcttctgattgggcatacttttcaaagagctagtacaactcctgcaggttggttggtggatcccttatctagtggctgtataaaaagcatgcccgaaggccgctgattgcatagtggatggctatgtggtcatcaaccgaaggcagctgtgatttcaacaggagaaactttttgtaatattcttgaagactttctttctct

SEQ ID NO: 154497 - DNA, 472 bp, Zea Mays
gtttgatgggtcatttcggtgccaagaagacggaggttgtgctgtccacacacttcttttggcctcgaatgcggcgtgatgttgagcgctttgtagcaagatgcacgatgtgtcaaaaagcgaagtcacgaccgaacccacatggtttgtatatgcctcttcctattccttcagttccgtgggcggatatttctatggattttgttttgggattgcctaggacaaagagggggagcgatagtgtttatgttgtcgttgatcgtttttctaagatggcagattttataccttgtcacaaaacggatgatgccattcatattgctaacctctttttcaaagagattgttcgtttgcatggtatgccttctactattgtttcagatcgtgatgtaaaattcttgagtcatttttggcgtactctatggaacaaattggtgacaaaattgctgttttctactacttgtcatcccca

SEQ ID NO: 154498 - DNA, 583 bp, Zea Mays
gtggaagattgttgggggagcagaagggcaccacgactccggcaattgctcgtcagaagtacagtgccgccgcggatcgccttctgccgtggccggacaccaccaccagataatagccgataacctactccccatctagttcgcgaggctattctcttcatttagcactagtaaaattagggattggtgctcggaatgaccgggcagggtgtgctcaccgacgtgatttcgaccgtcgaggcggcgccgccgttgaacactatcgggcgagggagataacactagtgtcgtccgattccttttggatggctcagattagatactgcgtaccggttgggttagggcaatctgaggcatagatttccgatcggatggccctgataggatctaaggttatttaaatcttcgtcgtagatctatgaaccaacggcctgtgtcacgtacccgttcagtcaaggcctaagtctaatcagggccctcgattctggatcgagtggctgaaataagccggtaccccttcgctgtgttgcttttgctaaacagttcctgagattccaggaaaccaacccgccatccgcattca

SEQ ID NO: 154499 - DNA, 317 bp, Zea Mays
aggaaacccaaagacactccacagtccagccgcacgtggacgaggccttcgcagccagactccggttgggacggccgcaatcagcagcaagtgcacaacatcgccaaccagcaccccgctggcgatgcccctcgccgccaagaatatccccccagggccgcgggaacggggctcgtggtcgaggccgatgacgtgcgcagcagccgtgccgattttactgcctgttccacggcgaagactgcgcccaccaaaccagagactgcccagagacgaaggccactagagataggatggcacgggcgcagccagccgacaac

SEQ ID NO: 154500 - DNA, 673 bp, Zea Mays
aaaaaggaaaacatgctacaggattgggctgaaactggcctgggtcggcccatttattggcgaaagcgcgcccgcgctgctggtttccacgacggcgaacagcgcagggtcgagctccggtaagcttgtaccagccggattacttgatgacgggtgctctacttcagttgaaaccaaattcaaggcctaacaatcatttcccctcaactaatttcacgaacggcactctatatcatccaggccacggggaaagcgtagaccataagtgaacaagcgtgttcccggcgatctagggggtcctggttctaattggctaggtcggggagcatcagggacacacaaggacactgaaacaaaagagcagggggtatgaacaaacttggaacaagctagccacgacgagggtgtttctacggtggcggaaaccgatttgggggaaatcccaaattggcgagctctggtgatcaattggaggcacggtttagtggcttgggtgcttgactaccttacggacccaacgacacactcaatttataggctccgagggcggtggccagtgaatttggagttgacgcggtggcggtcggagagaagagttgcactggcgcaaagattagtggctttcactgggctcaccggcgatcaccgggcatgcctaacacgagcgactgct

SEQ ID NO: 154501 - DNA, 2046 bp, Zea Mays
ctggccacagacaggagcgtcgacggcgcggtggccggggaggtgtacgatacggcggtggcggatggcgccgggttcgcggacgccgaggcggccaaggccttcttccagaggctggaccagcagctcaacaaggtgaaccggttctacgagagggaggagcgggagttcctggagcgcggcgagtcgctccggcggcagctgcagatcctcctcgagctcaaggctgccgtcacccagcagcagcaggcacggcgcggggggagcgctgccgacacggatgacccctccgtttcttggtccattcagctcggtgagaccaatactcctgtagacttgttggattgacttaattgtataaactgatcctgacatagcgtctcaaaagttacaggaggccaatctctcagggtaattgcagagaaagaagaagagtgtgaagaaaagctcaacggcggcgatgctaccgccaagataagcagtggtgaaggacccgtgtctcaaggtctcagtgaatctgggagactttgcaagccgaatgaagaaatgacgaggacactctccggccagggcaggagtgtgaggatcaacatcccggtcaccacgccttccaggactgtcaccgccatacgcgaactgctgttcggggacatgccgagccagtccaagaagactggcgcgcatggtaccgacggcagtgagaagctgagcatcaacaagaggaaggtgcaccaggcggagaagatgatcagaggtgctctggttgagctgtacaaaggactgggctacctcaagacgtaccggtatgcgtagttggttctgcctgcgacatggcttcttgtacttgaacgtacgtggatgcattactgacaaggagggcacgctcgttgcaggagcttgaacatgatggcctttgtgaagatcctcaagaaatttgacaaggtttctgctcctatctcttgctctcctttgatggtgccctatctcataagagcaacaatcctgatgacagaagctatatatttttccgtgtttcaggttacaggaaaggaagtgcagcaaatttacctcaaagcagtggagagctcctactacaacagctctgacaaggtattttgaaacaatattggagcaattctgatttcattcaacctcagctccaaaactcctgactgcgcgcggttttcatcttaacaggcagtcaggctaatggacgatgtggaggagctgttcttgagacatttcacagaaggtgacagacggaaagcaatggtgtatctgaagccaaatcagcgggaagagtcacactgtactacgtttttcattggtaataacttttgacaaggtttccattccttcatcaccataggtttttccgatctttaaacaggcatgtaaattttccaggagtatccactggcggcttcatagcattgttcataggttactgtatcatggcacgcgttgctggaatgtacactcagcagtcaaacaaggtgtacatgtcaacttcttatcctgttcttaggtgagctctcaaaatgccaaatcagttaccgctgtgcagttcctgaaaaaagaaaaaccgttatgccattgctgacaatacatgatcccaaactgcagcatgttcagcctcttcttcctgcatctcttcatctatgggtgtaacatcttcatgtggagaaagacacgcataaaccacacattcatatttgaattcacgcctactaaagagctcaagtaccgagacgtgttcttgatatgcactgcttccatgacaattgttgttggtgcaatgtttgcgcacctggcaataattgttaaaggaaattcatcaggcgttgtccaagcgataccagggtccttacttctggtatgcactattgaacttaactgatgtgttcataattacatctgaaatttatgagcttataaggtgctccctctatccaggtgttcttgttcatattagtctgccctttcaacatcgtctaccaatcaagccgttaccaattccttagagttatcagaaacatcattctg

SEQ ID NO: 154502 - DNA, 545 bp, Zea Mays
cctcttcgtgccatccttctccacaaataatactggggctgtccaaggtgaagtacttggtctgatgtagcctttctctaacaactcatcaatttgcttcttgagttccaccaactctagtccggacactcgataagctctcttggaaataggggcggtgcctaggataagctctatggcaaattcaactttcctttcaggtggcatgcctggtaactcctcaagaaaatacatcggggaattatgacacaatcctaattgcctcaatcggattggactccttgtcatctactgataaatggtgacaggctccttcttctagttcaggtaagtacaacttagttactacttcctttcctgatggggacaccaacttaactgttctcttgtcacaactgaaagtggcttgatttctatgtagccaattcatccctaggatgacatctaacccttgagttcccatgactactaggctagcgaggaagtctatcccccttatttcaatccttagattcggacaaatcctatcgaactgaacttttccc

SEQ ID NO: 154503 - DNA, 628 bp, Zea Mays
tgcgcgactgcaaaccgtgcactacccctgttgacataaaccccaagctttcagccgatggtgatctagtttcagacgctacagttttttgcagtcttgcaggagctcttcagtatctgacattcacctgccctgatatttcttatgcagtccaacagatttgtcttcatatgcatgatctaagagaacctcaccttgctgccctcaagcgtatactgcgctacattcgtgggacattggacttgtgcctacttgtgcgcccttcttctcagattgaactggtggtctactcagatgcagattgggttggctgtccggatactcgcagatctacatctggatatgctgtttttcttggggacaatcttgtctcctggtcctccaagcggcaaaacactgtttcccgctcaagtgcagaagctgaataccgcgctgtcgccaatgtagtcgctgaggctgcctggattcgtcagctcctgaatgagttgcactcccccctgcccaagaccactctcgtgtattgcgacaacatcagcgcagtctacatgtcttctaatcaaatccagcaccagcgtaccaagcacattgagattgaccttcactttgtccgcgaacgtgttgctcttgg

SEQ ID NO: 154504 - DNA, 798 bp, Zea Mays
atcccaggctgaacaacatggtcaacctggccgccgtgctcaacatagagctggaccacgcccttgacgagttgggcaaggttcgggcggaggttgcgaaattgcgtgctgagtgcgcagcacgccactatctggatggtggttctcccgcccccgtcgggattcaacacccttaccgttcaccgccccgtggtcgcttcgactatggtactccagactgcaagacccggatagatttggatccatagatcgacagagttggagtctgtaataatgcttaattcagtgtcttagtctagtcagtcttagttagagttaatttgcttatcttatgttggatgcttgttatgatggacatgtaatgaagttggatctttgtaatgattgtcaccaaggtgtgggtatcccctgcaacttggtatagttattaataaagttagttatttagttgggtaatccatttatttccactttcctctttatctgagaagctgtcagtgaagatggtcatttgttcagtgctatgaagattttctatacatcttttcttatgctaaaagactgcagagatagatttgatatatgtgtgtgatttctacagatgtctgggaataggcgcagaggtgcatggcatgctcagctagaacagcaggcaccccatgaggatgtagctcagcaatagcagttgcgaccgccaccaccgatgaccattgagaaaatgttcctgatgcagacacaagcagtccaagcaactggacagactttagcagcgatgtagcaggtgcagcagtagccacc

SEQ ID NO: 154505 - DNA, 469 bp, Zea Mays
gcgggtccttagggcgaccggagtggcctgggaggttggggaaggcgcggggaatcctctggcgggggctaggtcgggacaggggcaccggagggaggcggtccacggcaaagcggctcggcggcggcgctaatcgactccggcgaggaattgagcgcaacagggtgcaatagaggggaagggagagggcagaggaggtcccttacctcaaggcgaactccggggactcctcggtgacggcgaaggcgcggcgacggctccggtcgacggtggcggaccactgcggctgcacggaggacaacgggtgagcgcgggcagagggaaatagagagggggaggaggaattggggcgcgtcccgggttgcggacgtcgaggcgaagctcaccgtggcagagggcacggcggggctccgacgtcgacggagaaacgagctcgggacggcggcggtttaatggcggcggcgctctg

SEQ ID NO: 154506 - DNA, 767 bp, Zea Mays
cgagaaaacaacacaagatccatcaaatcaccagactcgagatgtaagactaacctgtttgacaacgaggatctcactggactcgaggtccatgccgaggtagacatgcctgaatgctccactcgtgatgaggtcgcctacggtccctaacacattcgtcggaagccaagatcgtggccaagggcgagggcggttgcggcatgatgcaacacgtgggtgacgtgcccgagtctgctccctgttgcccccagcaccacccgcagtgacagaggaggagagcaatgtggcgagcttgttgagggctagggcgtccgcatggaaggagatggagcggcgcacggagtagaatcctaatcctcgaggtgtcgacgacgaagtagcgcgaggcggcgtggcacacgacgataacagtcgcagagaggagcacaatcccaatgtcgtctaaatcattgctgagaggaccttgatgcttcacttatggcgacgcgtgatgagctggacctgactggcgacgtgatcgaaggtaacctgggcaccggccgcgtcgagcttggtcttgagctcatggatctcccacaccttgcgcaggtcacacacctccatcgctcccatcgccgaatcaccgacacacgccaacgcggattggattcaaatgggttggggcctagggcagatggggcctagggcagataggcgagcgggcgggaaggtgggctcctgtgggtgggggattggggctgggtgttgcgggagatctgagagggacc

SEQ ID NO: 154507 - DNA, 1089 bp, Zea Mays
gcctaagtcaatgatgtctaagattgttcttcacagattcattaggtcctaatacattactactacaactacttatcctaaatccaatcacacactctattataccttgactggtaaaacaaaatatcctagcttatacctttgccttgcatcttacttttacgattttctacaagtctctgctcctgcagcatcaatgatctcccagatccaacaatgtcaggcacttcatttgtcttactcttatcaatcttcattcttgtagagcacctgcttatctttgtggacttcatcctatctcattcatggaactcataaaacatgttagtccacctagttatattaattaccaaaactacacatagagctttatttacattgttatgaaggaagagaaagaattgttgagaataaaaattagacattgtagacacggtgtgattcagggatgacggtggaacttcaaacatcatcagggtgtgatgtttactttatagttcagtttcctgcatgcagttgaagttgaatcatttgcattgtgattatcaggctggtaaacccagctctgacaacttttagtaactacaaaggtcaaagttgtaaaaccaggggatcaagtttaagcataaatttaagagcagctaccaaaggtctaatcgtcttcaaagttgtatcatagcttgccacagaacttacctttaaaagccatttgagtagttttcataggtttactcatcttcattttctaaatctagacgtgctaaatgacacaaatctacttctacagcactaaaacgacagtataaattacaagtcattatacagtaccacatccaccaatccatgtaagaaacatggatataactaattgaacaaatgactgtttgaaatctctttgttatatgggaaaataaggaaacatacaaaacatcgaatgatcttgtatatatccttctttttccatataaggcacattcatcttataaagaaaatcaatagattatttttagctgtgcagagtcaacaatgtgtcctctgttagcacatccaatggcacaatgttatccaagcatcaggtctgtcaaacat

SEQ ID NO: 154508 - DNA, 1630 bp, Zea Mays
ggcttttctcggtactgaagatccttctgaatctggattgtctattcttcgatgtgattttctagtacttgcaggcatttgcggagctaggacacgtgaaacacattgtggatatctgacatggattctggcaatttcaaggcggtatgttgcgggtcctactctgccaatgataggataggggccgacgaaccacggagctagcttccctttcacttgaaaccttttgactccgcgcatcggggagaccttgaggtagacgaagtatctttcctcaaacctgagttctctccgcctgttgtccgcataactcttctgccgactctgagcttcaagtaatcttttgcggatcagggcaaccttctcttctgactctttaacgaaggcaggtccttctagtgtcttttcccctacgttgtaccacattagaggggtctgacacttccatccatacaacgcttcgaacgatgacatcttgatactggcctggtagttgttgttatacgagaactctgcatatggcaaactggactcccaatttctgtcaaacgttaacacataggctcttaataaatcctcgaggaccttgttgaccctttctgtctgaccatctgactgggggtgataggcggtgctgaagtctagcttggtgcccatagcttgctgaaggctcatccaaaattttgaggtgaactgtgttcccctgtctgacactatcttctgtggaataccatggagtctgactatctctttaagatatatccgggcaagggtggctcctccgaaggtaatttttactgggaagaaatgggctaccttggtaagatggtctattatcacccagatagagtcgttccccttttgggtccgaggcagtccagttacgaaatccatgcctatttcttcccacttccattcgggcactggaaggggttgcagtagacctgtaggcttctgatgctcggtcttagtttgttggcaagtgtcgcaccgggccacatactgtgctatctctttcttcattcctctccaccagtatctggttttgaggtctaagtacatcttggtggtccctgggtggatggagtaggctgagttgtgagcttcgtcaagcagaacttctcgagcctctccttttggtacacacagacggtttttgaaccaaaggactccttcctcatttgtcctgaagtccggaagttgttctttgcgagttttttccataagacctgttgtctcagtgtccaggcgttgagccttgcatatgaggtcttctagcactggcttgacttctaggctgccattgtctcccagacatgcattcagttgagctgattcttccttccaatcttccaagaagttggtttctttcttcccgaaaggttttcggctgagggcatctgctaccatgttggccttcccggggtggtagtggatctcaaggtcgtaatctttgatcaattccagccatcttcgctaacggaggttgaggtctggttgagtgaaaatgtacttcaggctcttgtgatcggtgaagatgtgacatttgttcccaattaggtagtgcctccatatttttagggaatgcactatggctaccaattccaaatcatgtgtgggataactctgc

SEQ ID NO: 154509 - DNA, 1462 bp, Zea Mays
gcactgtttataaagtggagtttaaatatgagaacgaagattttaagttgttggagatagttactgtttgtattatatatccccgttgcaacgcacgggcatatacctagtttagcaacaaacatgtaacttggagtcttgtctagtcctcgctatcagaatattgtattgtacaaaacgaagcgggtgagaaagagaaaattggggacaggtacaagtgtattgtacaaaaagtcctcccatgcaacatacagcaccagaaattatataatgcacccagcatgaattatgttggtttctccaacacactgcaggctgcatttttcaatctcttcttatttcgtttggattaggttcagaatttcagtattcatgcattcgttcatgttccagtcagttgtataccctgaatcctgaaaagcattaaaggattactttttccttcctcctttttgcagtgtcattacagcttccattgattatactgttaaggtgctgatcttattgtctcatatttacagtttaactgttcaagttgcaattgttcaacaattcacagacattttcatcaatattcatcaggactttacaaggacaggttatttgaattcacatcctagtttttatttggcctatgttttctgcctccaaaatgcctagatcgaaattctcagctgactaataaataaacaggccctctcatactccagaaattgttgtcaaatagaagatggccagtgactgaacaataagctgaacctctttgtgttgggcgtactcgttgattcgcacattcttctaaatgcctaggagtcatgtaacacgcaatgatttgcacattacaatgtttgatagtgacattgtaaaaggaagttgttgatggatacgaagttgttgatggataggaagttgttgatggagattagtttcctgaacatgagctggcacatagtttactcatcttgtgtggttgaacaagcaggacgcaaactaaaaggaaagcactaaagaagtttagaaaaaagagatataagcaacaatactttcccttaagagtgttcgattgcgctaaatggtagatccaaaaaagaagcatgaagagaagaggttgagagaaagaattgtgggcgggtgcaagtacaacatacaaaaagcatgctaccagctaagcctcccaactatcatttgtttatctaagaattagcatcaacctctatataccggaagcatgctataaactttatacagcccaaagaataccccaaatacacacaagtctggtattttatttaatgtccttaattatcaaccatttactgattatgtcaaattacaatttagagaactcagaatttagcagctaacaaatacaaagggttatgtattgcagaatttaattatcactgattgtagaatattagtgctagaacaatatatgttgtttaagtgtcctaaccataag

SEQ ID NO: 154510 - DNA, 1040 bp, Zea Mays
gctgctcaaggtgctagtggtggagaagtgctcaggggcgctgtccctgcgggtgctgttccaggtggcggggctgaggtgcctcttccagttagtggtctttctctgatgcagtggatgggcatgaagttggattcttttgatggcagtggtactccggtcgaggtggcagattggttgacttacgtggaggataagatgaatgtcttcgagattgtgtatggagatcgggttcgctttggcacacaactgttgaagggagaggctcaaatttggtggagaggcgtgcaggaagtgcactcctcctcaccaggaatcctgtcttgggatgtcttcatcctatggggagaaggagattctaccgagtcaccttcctggagaaaatgaagattgatttgcagtcctacaagcaggagaagaagtctgtcacctagtatgaagtgggcttcaataagatggtccgctttgtccctcatgtggcttataatgagatggaaaaggcgagctagttccgtcagggtctaaaaccttctatcaggcatgcactgggagcctttccgttggtggacttccgtactatagtggagcaggcactgggtgtggagatgcaacactagtataccatggagtcgcagaagtcttcgggtgttgatcagcctcgtggccaggacgcgaggaggggcaacacgggaggttcagcccacaagaagggcaagtctcagcatcagtgccaccatccttatcgtggcaaatcttctgactcgggtacttcgggaggaagtactcagaggtttcgggctgttcctaagcccgagctggggctagtgtgtttccgctgtggtgatgcgcatcgccgtgcagagtgccagtggagtggcaagtgttctatctgcagtcaggaccacaaggatgtggtgtgtaggaggaatcctaatgggaagcttagatgggagccggtgacttcctcctcttctcagggcactatcaacatgatgtcaagtgctgagcagcagttttcagttcctcttcctccgcagcag

SEQ ID NO: 154511 - DNA, 1037 bp, Zea Mays
tgattttgatggtgtgttaagtcttggtgcaatttgtttagtggatttagcagaggttcagtgtggaagtaatttggttgggtgcgttttgcacaatttaaactagtggattatatacagtggcgtagtgctcggtatggcgatatgtggcgctcgtcgtacctgaattcgacacctcagcacaacccgcctagttcgttttggcatctctgactctggtcagagtgtctcgagcggcaacatgtatggtgttgttcgccatggcactacacgtcgacgccatcccatgcgtgctgttggtccacagacgattaggcgattagcataggacaaatacagggtgcaagtcatggagggcaagttgggaggtggtggcggcgttgacgcttgccgcagccatgtccgtggacgagctcttgggccaggaacgagttggaagctgacggagagatgacatgagcggctccactgccatgccttatttcttggtcatgctccgccacagattatatagtggtatagattatgtcactttgatcccgctcacactagggatatcaaaggaaaattttccatcaagggatagctcaccatcgtcatccccttatcgagagaaaggttactcatctcgacggacactcgcgaggaagattttccttccatcctatgcataatgatatgccgaataaagcttatgagatgtacaataatactatgtcggaaagaagggcttcagtattaagagaggccactcaaagcatcaacaagatcaagatcgtactttagctcaatttttttatatgcaataatgaaggatttggaaaaacaagtcaccacaaaacactacaaaaatggttgcgaagcttatgttcagttcagtgtaagcaaagattgaatttggaccatgcaaaaggttgtactttatcacaatcactatatggttactccaaataagttgcacatgctatggtcccaacaacatgtttatagaagctgacaagatgctaattggctaggtatgggaaccaaagataaac

SEQ ID NO: 154512 - DNA, 807 bp, Zea Mays
accctggagaccgatcctagagatgaaatgatcggtctattgaaagaatattcggattgctttgcttggaattacactgagatgccgggattaagccatgagatcgtagagcatcggctgcccattaagtccggtttcagacctttcaagcagaaagctagaacatttcgtccagaccttctcccacgaatcgaggacgaaattcaccgtctgctagaagctaattttattagaccttgcagatacgcagagtgggtctccaatattgtgccggtggaggagtcaggtaagctcagagtatgcattgattttcgcaatttgaatagagcaactcctaaggacgaatgtctcatgcccatagccgacacattgatcaataatgtgtcaggaaatagaattattagcttccttgatggtaatgccggatataatcagattttcatggccgaagaagatgcgtctaaaacggtctttatatgtctagagtatgcattggtcagagtatgcattggtttatttgagtgggttgttatgacatttggtctaaagaatgctggtactacttatcaatggactatgaatttgatctttcacgagctgttaggaaacaccgtggaagtctacattgatgatattgtagtcaattcgactgagtttagctctcatatagctgatttacgcaaagcctttgataaaatgcgtcggtatggtctaaaaatgaacccacgtaaatgtgcttttggagtgtcggctggtaagtttttaggattcatcattcatgaacatggtatagagatagaccctgac

SEQ ID NO: 154513 - DNA, 1031 bp, Zea Mays
ttttcgccccagtacggtcagggatgctccctagaatctcctcgtcgacaccaccaaagagcacggatctaggcttgtagccactagcaatatcaaattcttttaacttagagatatcatcttcgaagagttcctgaccgtccaagtgtcgtaggtccaactctctatcctccgaagaagctccttccaattctttcatttttaagggcaaacccctattagtggtcacttcagccatttccctctcagggatcacatcagctataatcctatcaatctctgacattgtggttccaagagggcctctgctattttcagcatcaggggccgcttcatcagcttcggcatcaacatcagctccggcattagcaggggcaacacttttttctgccgagaccggaggcggggtcttatggatagccttcatcatagccatcgtgcgtcatttcttctaaccccctcatttcccatagttgctaaaccagtcttcttcccttccacgcctttttcaacccccttcccctttgattgcaataagctagtcagatccgacccctaggggacttagcataataaacgggaagggttctgacattaccttcaatatttctgtaacaccggtagaggaagacgaagatgtgccagcagtcttctctggtacatcttgcaccttcgcctcgacaggggccaacattaaggactttcgttttttgggagctgattttttttgttttttagcagccccttgatctttttcaatggactgcatggcttgtcttttcaaaatgcttacaaccctctttttctttgctcgcccagctccttcgtcaagcctttcgtaatctgggtactcgaagttaagggtgtccatcactcggtttagtctttgttttttccgagtgccgaaggcagctgttatcaattgatcctccttcatataattcccaaggatctcattgcacattgtctctatcatttccaaccattcggcacaagggctatggaaagaatcctgaaacttaaaccggtat

SEQ ID NO: 154514 - DNA, 750 bp, Zea Mays
gaaatattcaacgacgacaaaggtgaattttaaattgtcttgcgctattggtagcggtccaacgatgtctagtccccaacgctgtagtggccaggtgtgtgcaatgagctttgtgagctgcgaatgggctcccgttcaaggtgagaatttttgccatgcttcgcacgaacgggtcacccggttgactgcacacacaatggctggccaatagaaaacttggcgtatgaccttggcagtgagggatcttggtcccgaatgtgatccgcatatagccctgtggacttctcggagaagctctatgccttcggcttcagttatgcattttaacattggttgacttatcccattcttgtatagctgtccgttgattatagcgaagtctctacttctgtgtttttaccttttggcttcgctttggtcggaaggatggtagtggccttggagatagagggtgatgggtgcccgccagtcttcggccattattagatttactattcggtgaccattggtgtcttgtgttatttgcaggccctcggggtttcttacgactggtgtgatgattgtgtgaaaaaatacgtcggatggcaagggtttgcccttcgctgctgctttggctaacatgttagcttctttgttcttgttctgcacaatgtgttgcaaggtgaatcctttgaattgcttttctagactttgtacgacagcgagatactcaatgagtactagctctttggcagagtagtctttttcgat

SEQ ID NO: 154515 - DNA, 736 bp, Zea Mays
atgtgatgataatgctcaagatgatgccatgcttaaatttttagtgatgcttaacacctacagctcaaccccctaaaaagaaatctcgccccgagatttacgaacagctagagacttaggttaagaagagaaagacgaggtagtactcacaaccacttcaaacatctatacacatcgacaggatggtttccaacacttcactagttgactgaaaaaggctacatttcaacatcatagattttacactgaagccagaaaatctagaaaattctctgcgagataatcttcggattcccatgtagcttcatcttcggaatgcttgttccattgtaccctataaaacttaacagttctccttcgagtgacgcgatccttccaatctaacactcatattggatattctgaataagtcagatctggttcaagattgacctctgagacatccatagcttgttcgggcactcgaaaacatttcttcagttgtgatacatggaacacgttatgaactacagacatatgctctggcaactgaagatgataaggtactggtccacactgctgcatgattcgaaagggaccaatataacgaggtgggagctttcctttgacaccaaagcgattaactcctttcattggtgatacattcagatagacataatcaccaaccttgaacacaaagggtcgatgtctttgatcggcataactcttctgacgagactgtgctatcctgaggttg

SEQ ID NO: 154516 - DNA, 765 bp, Zea Mays
ggctaccccgccgccctcgtggctccgaccgggagcatataaaccggccccgcgacccccttccttccccgtattccgctccccacgtcatccactgcaccgtcgccgcgccgtgtgtgaacaaatccgccgccagaaatcgttgtcgatgcgccgcgaccgtaacatcgaattcgtccaccctaggcatggggtctcgtcgtggagcaccgctggaggtcgcggaagtcaatccgggagctgagggtgcctgcaatcgtctcgcgtgcgaccaatcactcgtcagagcccatctccgccgcggatcccgctcgtctcgtggaccggccacgccacgggacaagctctggtgagaaaccaattcgctactccctatgttcccttgaatgcgtgggaccgtgaatcgtagctcgtgatttcttttggacggcgtatcgggtggccggagttatggcgccgccgccctgttccgtccatctcggctggaggtgggtgatggcgtgccagccgttagatccatggtggatgcgtgcgattagatccgggtgggtgatgatcttcataccgttggttttccaatgggcgtatgggatcgaatccagggcgtatcgcttcaggatgtgatctggaccatgaatcccggatcctgtggcccggattgattacgggttcacatatgataacgatctaatccgagccctcaaatgtcgatccaacggttgaattctacccgtaccccttcgtcttggacgatttacttaagag

SEQ ID NO: 154517 - DNA, 904 bp, Zea Mays
ggctgccttcctgaccgagggggagggatttattgtgattctccatggtgaaccactcgaggtgccatcccttgatgttgtccttgatggggatgtcaaggtattccactttcctcccccggcgaagttccaaactggcaacgccgacgagctgatgctgccctccagccatgccggtccgacagtgataaaggtacctccagaatccaaagtgggggagaattccaagaaaagcctcgcacaggtgtacgaaaatggcaacttgaagaatggagttagggtttaaatgtgtaagatttaaatcatagaagtcgaggagaccgcggaaaaagggagaaatgggaagagcaagtctgtggatgaggaacgacatgtaaacaatggattcgtgggtgtcctctgccgaaacagtgaccccacaccagatccgccaagaacacagtttttcagtggcaaaaccctagtctccacaagatgcaaaaggtctgattcagaaattatggacatgtgattaccagcaaacggaagctggctattgggatcgatggttggaatgatcggaacaacgacgctctgtgtcttctgcttgggagccatcgcaatctctcgggcagagcgagcgggctcaagaattcaggaaagcggagaagtggcagaggaaaaagtgagagttagggttcggaactcaagaaggcatgtcggcatgagtataagtggactccttaggtcgggcattacctctaaagtgccagatcaccactcgaaaaagtaaagaccgcaatcgtcactcgggcattacctctaaaatgccatcattgtcaagcgcacggataaactttcaagcgcacaaataaaaagcaaacaacgattatctggagcaacttcatccttcattcgtaatagg

SEQ ID NO: 154518 - DNA, 1510 bp, Zea Mays
tttcaatataccaagtcaacgcgccacatggttcatcacattaatcaataataacctctcatgtatgctcgcatctttgagtgcatccgtacgtaggtagccattccctcgctcgtctcagaagccagctgctcctccgggttgactgggaactcaactgacctcgccgccggtgagcacgccgcgctgcctcgctcccctcctcgttctagctactacagtagtaggcttcccacctgaggcacttaagttgcacggtcgtcgcgttcctcatttcgctgaacctccctcctgtgcatgcagatctgtgcaggagctcgggtggcgttggatgactcggatcctgggcaatgcagccatggtgagccaccgacccatcatccatttcttgcacaggcccattcctacactgtgtcacagaggaatagttgatgaaagggatgaatctcatattatttaagctctgttttcgttttccctatctaaaatacctatgcaactccaaaagactctattctttctaattgatatgaatagagctttttctttaaaaaaactaccctgcaacagtttatttaaatagttatccaaatatattcatcttatatttcaaatttctcgctagcccaaggtataaaacgtaaatgactctctagattgtcaataagatattaaaaagttaatgaagattggaaatatatagaaaatgatttttatatagatgactttctaaatgataatttagaaattgaaattctcttggagatgctccatatggtaccgttattcatcactatagtaaccaccttaaactcacttaaacaaattgttaattaaattacgaataacttaacgatttggtaagtagctgattatcatctaggatgcaaaagttacggatattcagttgaatccacttgactaataaatcttgacccccacccccccggcaggaaccacccattgtacaaaacagacccggccaggggacagaggctggcggatggaggccggagtgacaacgtggcaccgagcaggtcagagcgccgagcagctaacaagagcaggtcagtaaagtacaacaccaaggccatctccaaccattttcccacatatttcccacatatgtattcttttctatactttctactctctctatcctaaacaaatatttgtttcagacttttaataggttcatataataattagtatgtgttttgtatgtgtctagaattctagactcatcgtgatccatttaaatatatacataaaaatcaagatctaaaatgaatgggacgaagagaacattatattttactatatctccctaaaagaaactccccacataaaggacatctccaaccattcactctatcagctccccctatacgctaaaaatcgtatatcattatatgaattatttaaaattttctcctgtttttgaagttttaaaaaaatcatatgttattaatatttgtaccacaataatacatattactaacaagttaca

SEQ ID NO: 154519 - DNA, 329 bp, Zea Mays
ctcaatcgctgtgagcactatttcctaggccgacgcacactagaaggggacaagatgtggcttgcctccttccacatgaccagtgtcgcttaacactggtactatatgctccagtgtgacgagcacgggctccaatggccacgtttcaaggagttgtgctatcaacgtttcggcccgcctgctcgctataatccaatggacgagctcacccgactaccgtttcgcacatccgtgacaaattacgccgagcggctcatggacgcacgcgcgcgcccaactcttcacggctggcctgctcgaacgcctgcgcatcgccgtcgagctgtgcg

SEQ ID NO: 154520 - DNA, 985 bp, Zea Mays
cttttgaatgggctttcaattcattcaaaacatgtatgggatgcgagggaccgagagttatgctaacaggtatgtggtatgtgaatttgttatgctaacacgtaaaacaatttattgtgatagtcaaataatggtttgtgggcaactgcagatcaagatcctgcaatgcaaattgctctgagaattgtatttccaaaaacaattcacagactgtgtttatggcatgttcagaaccgatttatgtcattcttaaatgaattatatgcaaggtttgctgataaggattttaaaacaaaattccaatctattatacatcatcctttaactcctcgtgagtttgaatgtgcctaggaaatgatgctagaagaatacaatctgcatgaagatatgactctacgcaagttatatgaaataaggaaagaatggataccagcattttttaaaaataacttctgtggggtaatggtgtctacacaacacagtgagagcatgaacagattagtgaagaaatcacatgtagatgcaaacacacctctgcatgagtttgctaaacaaatgatgaaaatgttgcatagcaggaaaatgaaagaatcaaaggaggcattgatgagcaaggtatatcgtgtttgttatcaataatcaatggcatacatgtttatgtaattacgttatttaattatgatattaacgtcttatagggaccaaggacaaccgatacgttgtataggttcgaagtgagagtctctagggcatacaccagagctgttatgaatagatttgaggaattaatgaaatacgccactgcatacagaatattgaaggacacatacggttgtgataaagattggatcgtacaacatacaaaaagatctaataaaattgtgtggggacaacttcaattcaagataacaacggacatagaaactggagagtatacatgcgagtgcaaacagtgggaacatacaggtttgaacatcttgtcttg

SEQ ID NO: 154521 - DNA, 826 bp, Zea Mays
tgacaaagtcctgaagaaaaagaagaactcgcctggctgtgttggctctaataagtcagggaaaaaagacaagggggataagaatcaagactcttcagatgatgacaactgatctgttgatgctgcttcgggtgggattattttgcaggtctcaatttagccaggctttttggctgtctcggccctggcgtctttgtttgcttattgtgttgaagaactctgtggtttctggtagtgctatgtcccgttctaacggatatgcttttgccctcccagtaattgggtttgggttccttttcatcaacgaacttgatcctttcgatgaatagtcacaatgctattaatttttccgactggtccgttttaagttttaatgtccgaggtattaacgcggtggctaaggggaatgatattcattgtgtgattagggaatccaattgcgacatcatctgcttgcaggagacgaagaaggaattttttgacagggctgacctcagaaggttctgtcccaattcttttgatgagtttgcttttgtcccttcgataggaaattcggggggtttcattactgtttggaatagttcgaagctggttggcagtgctatttttcagaacgaatatgctctctcggttgagttttctgctatatcgtcggatgaatcttggattgtcactaacgtttacgcgccctgttccccgcatgggaaaattgaattcctccactggttctccaatattaatatgccctcggaaaagcgctggttgattgttggggactttaacctgacgcgtaggcctgaaaacagaaatatcgctgggggacatt

SEQ ID NO: 154522 - DNA, 1097 bp, Zea Mays
gaaggccacagggttgccgacgttgttcgagcaacttggtgaaaggacgaataattggatccgtgctagaaaccaagggaaaccgaggctagtgtatcttatgatgatcaaattgtcgaagaagcggcaaaaaccatatctgcaatggcagctaagcggatccaaggaacatttaagccacaaagagagagagacatcctaacggctggtctcggtaaccctaagcatcctggttgtgtacgagaaatctcgtctaaggaaggatagaagaaaggattcgaaccatagtgggaaggtttgtacaagaaatatgatcgatacaaagaagagatgtcagattattttaagcaggaggccaagaaagagttcaaagacctgatgtctcaaatgctatcaaatcgtcctccagaattgatgcagcagttggtgagtgcgatgtctattcaatagatgaccactccacagatgcaaataattccagtagctcaatcgccgggcttccaccgattgtacgacagtcccaagctctatcgcgtcaacgggaaataaggtctgttatccagatgatgacattgcaaggcctgtggcatgaacactggttataagatatggtattaacaatcatcgtacgaataaagtgggcacaagccttgcgatcccaggacgcaagttccatggaagcgacattccttatgattattgcagggtagaagtgacgacagtcatccaaggatccaaggatgacatgctagacatccctagggacaaaggtattgagacacttggacaagccatcaagaatttcatccgttggcctcaaaaggatgtcgaattggttgatccaccactgtcgtcgtcgtcgcatccccaaccgtctccgcctcctcaaattgtagttcttattgtacatccatcatcacctcctcaaacttcacatgctgctcctcatcctctttctgacccaccgtctccaccacaagcatcgccatttagagctccaccaccttctcctcctcatcctcttggagacccattgcctatgccaccagcaagggatccaccttctcaacagacatcaaggtatccacggtcgtcaa

SEQ ID NO: 154523 - DNA, 545 bp, Zea Mays
tcgaatcctgagctggtgataacctgacctcagatctatttttgaaaacacgctagctcctctcagctggtcaaacagatcttcaattccaggcaaggggtacttgttcttgattgtgacctcattcagagctcgataatcgatgcacatcctcctggtgccatctttcttctccacgaacaggacaggggcggcccaaggcgaggtgcttggcctgatgtaacctttctctgacagctcatcgatctgcttcttgagttccaccaactctagtctagataccctgtaagctctattagaaatgggtgcggtgccaggaagaagttgtatggcaaactcaactttccgctcaggtggcatgcccggtaagtctttgaggaacacatccggaaactctgacacaaccttgatagtctcgagtgaatctacttccttcctatcaatagacatatgatgacaacctcctttccttggctcaggtgagactaactcagttaccacttgttctcctagtggggacaccaacttaattgtcctcttatcat

SEQ ID NO: 154524 - DNA, 431 bp, Zea Mays
ctgttcctaacgactaggcgtggtagcgttcaaattctaagcatggagagcatcaccatacctaaaggaagctagaacggatagtaattgggctggaactaccttaggcgaagctggccacggaagagttctcctcggtggcgatggcgaccgaattgggggaaatcgaaattctccggctacggtggctaattggaggcgaggagtgatgctctgggttcgtagctagttagcggagcagacggggacgacaatttatagtgaccaacagcggtggctccaaatttggggaagacaagctggcggccggagtaaaggtgagtcaccggagttcgctaacgtggcaatcactgggcaaagacttacggccgttactggttatcctccacaacccgcgacgacgtggtgaaacggcctaaggcgtgtcgtgg

SEQ ID NO: 154525 - DNA, 794 bp, Zea Mays
atcatgatctgatgatggataatattgatgaggtgactgacaagagactgatggctctaaaagagatcgagaatgacaagatcatggttgtcaggcctaaaataagaaggtgatggctaaatcatttcaagttggaaatctagtttggaagacagtcctgccacttaggagcaaggaccggaagtttggcaaatggtcaccaagctgcgaaaggccttatagagtgacacatgtaatctttggtaatgcacacatgctgtagactttgtagggcgatgagttacctaaggcattgaatgatcgttttctgaaactatatcatcctagtatttgacaagatgctttgaaaatcgatgttctcacattgagttgataacaacctataacatgtgttttttgttcgcttatcttccccaaaaggaagagggcatgtgttgagcaccaaatgcggcacctaggaaggttggacagtctggtcctatggcccggacggcccacgagctagtccaaactgtccgctattagatcagaacacacgaagtttattgggagacacctaagaatcggtctagacctccatatatatatatagggtttagggtttagggtgtggttatttggagcccaaggcttcaaatagttataggataggaagccctagtcggctccctcccgcacgacccacgtcggtgcgccccccaccacgtgattttagggcgcttgattttagggatttgtttttatggcagttatggacatgatgccagatttgagcgtaaaaatcttcacgtttg

SEQ ID NO: 154526 - DNA, 791 bp, Zea Mays
ctaggggcttgtttcaaaccatacaaagctttttgcaatttaaaaacatggtttggaaacttggaactctcaaaaccagggggctgcctcacatacacctcttcctctatatacccatttaagaaagcacttttgacatccatttgaaaaagcttaaaacccttcgaagcagcaaaagcaagaaggatcctaatggcttctgaacggacaacaggggcaaaggtttcctcataatcgattccctctttttggcaaaacccttgggcaaccaacctcgccttgtttctcactaccaacccatcatcgctctgtttgtttttgaaaacccattttgtaccgatgggatggaagttagaaggaggtggcaccgaaacccaaacctgatttctttcaaaattttcaagctcctcatgcatagcattaacccagttaggatcagataaagcatgtccaacatctcgaggttcaaaattagcaacaaaagctgagtgagcaaagtgagacatcctgtgatacctggagcgagagactcgctcatgaagctcaccaatcatttgttgaggagggtgatcgcgctaaacatgccgcggagcctccctcgaagaggtggcctccccctcaacagcaacctgaccgccttcaggcgcaataggctctggctcgacgggaccccaagtagtagaggtggtgatgtcgggtccgtcgtccgatgtcgtcgacgcagggtcaaccggggcagctggtggagtcggctcagcatcgccccagtcagcgtcgtcgtgctcctcctc

SEQ ID NO: 154527 - DNA, 736 bp, Zea Mays
cgatatttttctaaggtcttggagagtcgacactctcccttggtctatgcataggtgtcactctctcttggtcgatgcaaagaccaagtgttcactacaagctggttcttcagtgctcctgcatggtgaaccccttacaaccatatgcaagtcccgagtcaggccaaccacaagctctctatgatcaccacactcccaattgtcactagtcatataggtagcaccgatcaccaagattaactagcattagactcacttgaccatgctaagtctaatgagggcgatggttgcacacatgtcactctctatgcactaattaggtcactaatcgcacgattatcacttctctagtcttcccgctatgcaaaagggtcttcctcactctcaagtggatgctttagctattgaaaggatcaatacctctcatgaagctgagtaatagcccaagggatggtactagccattataaacccgctcaatagttttgggacatcgagcgtgactagtgccaacttttccgctgcatcgaacacgttggtgcctctgtaatggctagtttataaactagtcgttagtgcacatggcatttagtgttagcaccagtgtcgcattggtcccattcagtgagtatagtcctcgaatgcatagtcgcagacctctcttagaaccatgtttggtgtcatgtccagtggcatacttaacacatctagtgagtactcgacctctcgacacattt

SEQ ID NO: 154528 - DNA, 384 bp, Zea Mays
gaagccttcacagtctccagcacatctagtacactagccatcctttttctcttggggtcgccgcaggacctttttgtgccttcagcattgtcatttctgccgaagggcttaaaacttctaacgtttttgttccctcgattcttggctcttcagctttatcagtcttcggctcagctaacttggctgagggtgcctttggcaaggtggccggttcctcagctttctgtgtagaaggaattggttcctttggagtagcagatgaagaagtttccccgccaaactcaggcactatggccggttcaatgtagcgcggtcggtgggtaaggaccttcaactttttcctcttcggcgcaggctcacttggagcagccgaagcagcaacct

SEQ ID NO: 154529 - DNA, 759 bp, Zea Mays
gagatcttgcatcacatgatcatgccatcactaccatgacctacatgtagctccgagtcttacttgtggactatacttaaccattcatttcacatgaaatcattagtccacaaaaacccaaatgacactttcacatttatagctagatttctttggatggcccaagtgcaaaagatgcatagccatgcacgccatacactcaaagccaaatatgcattctagtgggtgcaaatgcacccacaaccaaaagaaaatttagaggtaatcattagatattgacattatctgcacctcctcccaacaccatgcacccatcaagtcagccaacttgtgcctattacagataacatgctctagactctatatgcatggtagtgaggatgtagaagcttgacacgtgcctgaatgctaggtacaagctaacaaactcatttgtagatctaccatgacctacttggggtcctcacctcactcttgcctttttaacaagaatgcaaggttgttttaacttgtaggtttcaccatattcacccccatgtaggtggcatcaaggtcctttcatatggtgtgatgtagctaccactagggccagacaatagtttagaccatcagtatgccatcatcataagcaagccactagaagcattagaagagtactcgatcaatgaagctgctaaatgaaatgacatcatcaaagatgacatggcatgagatattagcacaacaagtagcaatgttaaggcaacgagagcctttatg

SEQ ID NO: 154530 - DNA, 667 bp, Zea Mays
gagtggtcgaatgccgaagaccgtcgatgcggtctttttcgacatgttgcatcttagtttttgcgggggatttttgcaggtatatgacatggctccgcctcgttaaaaacctcaccccccgggaggaaaagagtgcgggcctgaataatactgtttggtgaattacaagggcgcgtaggccctgaggatttaaacaaaaaatttgcggagattatcaatattccaggaatggtctaggtcttcgtcggatggcgttgttagcctatatgcgctgggggacgcctttgacttgacgatgaatggaccctcccactttggctccagcttgccccgtgactctatccgggtggttcggacgagtacgaggtctccttcgttgaattctcttgggatgactgcgtggtcgcgccaggacttcatttgagcttggtatttgttgagggcctgcagggtgaagacgcgatctccgtcgatgaggtctttggacattggttcgtctacatcggggacgactgatgcacttgttcgaggtgacccgtgctttatttcctgcggggtcatggcctctgatccatatagtagacgaaaaggagtgaatccaatcccccgattttcggtcgtgtttagtgcccagactgcttcaggtagttggtcggcccatttaccc

SEQ ID NO: 154531 - DNA, 466 bp, Zea Mays
gacattcctttgtcgtttgtgtgtggaggcttatgggttttgctgactggatcaaaagatatggagggatgaagttgggtttgtctcactgctgaactccgagaggaaatcctgggtttgaagtgtctagggcacgaatctcaatgccatcttcacacacgttgcagaggggttagtttagaacaattttgtcaatggggacttaaggatttgagctagggatcaaggtgaacgtgctcaagttctaggtgaaggctaaaattcaaaaatctgaatttcaaattttccctagagagcttccacttggatggcctttttggggattttaatcaactattttggccaaacttttataacaattgctgtagcttaattagtgtgtttcaacttttataattggcctaagccatgattccatgtttttcatggccttattaacaatttcttcctctctactcaaatggcc

SEQ ID NO: 154532 - DNA, 532 bp, Zea Mays
gaatgatacaaagtttgattggtcctcgaaatgcaacaaagcctttgagcagctgaaagtgttgttaaccactgcaccagttttggccaaaccggatattgaaaagccttttgatgtgtattgtgatgcgtcaggcagtggactcagatgtgtcctgatgcaagaagggcgagtcatagcgtatgcttcaaggcagctgcgccggcatgaagaacactatccaactcatgatctggaactagctgcagtcgttcatgcccttaagatttggcgtcattatctgctggggaatacctgccatttgtatacggatcacaaaagtttgaagtctatatttacccagtcaaaactaaacatgagacaaagaaggtggcttgagctaatcaaagattatgacttggaaatctattatcacccaacaaaagccaatgtggtggcagatgctttaagtcgcaagactttttgtcattgtcttacagtaagagcacctgacaccactttatgtcaagaaatggaaatattgaatctaggg

SEQ ID NO: 154533 - DNA, 1165 bp, Zea Mays
gcgcgcgcctagcgattgggcgcctcgcgcctctccgccgcgccccagcccagtccctgcagcctgcatactgtaggtatatagctcctcgctcggcttcgctttcttgattaattcgctcgctccagacccggactacacgtgccttgtgctaaccgtgttttccgttgtttgtctgcaatgaacaaccgacgagtccaatttttagttccgtgtgtgtgattgtgatctcgggttcacctcagagtgtaaggcagtaacaatcaaaatgaagaagagacatagaacattgcaatcattttttctccagctctcacgtacacccgtcgtgcctaatgtgcagctaagatcaaacctcaattctcaaccaatagtggaaaccgaaaccagtaataattttttatatgctactattagaattttatggtcgcttcggctcgggtcttagctaatttctggacccgtgtattattgttctctccgattaccatgacaggtcgtcggaggccaacgtgtagacgtgtctagcaaagcagcccgcccacatcgaggttgtcgtggtcaattgtggtcggagccgtgcagggcgtcgtagtcgacgggctcatgggcacacttacggccgccgacagggccaattcttcgcccaatcatttctcagactaaactgcccttcataaacacatcattttaattaatattattataaatctgtttagaaccttagaaaattattacctatttttttaatgaggcgctgcttataacatctaatatgaaatacgaacgggtttacaacatctttttgtcgagatgaaaattttttagtttacctcggaaaccagcaaacttgtctttattcaagaacaaaaacgaaatattttttattctatgcaatagaggacatttttttatggacgacaagcaaatgctcttctttctacataatcaaaagtgttccagaggatctcttgcatattttatttttgcacatgcgcatgtattaatatttttaaaatatttccttgtgacggcttcccttctacattcttccgtaattactgcactttctctcaacaaccacccgcacctcctcacgatttcccctcctcccagcccaccaaaccaagatcgtgcctccgatcttttctcccagccacaagca

SEQ ID NO: 154534 - DNA, 770 bp, Zea Mays
caagttaaattgaaatcatgcttatctagacgtgtggttaaataataataattttggcttgtgtagtgaggtggtgacatgccgaagtagtcatcacttcctctatgtttttaagtcaagtcaaaatgcggggtactagtagtacgctaggcaggcgttgttccaaatagataaatcagatgatgtggtagttgtcaagcatgatagaggttgagtcacttaggttataaattgatgttcgacatgtgaggtctcctaaaatatggtgttttaagtgactcgtgtgttatccaatttaagttgagcaacggttaagaaacactgattaatcgactccaacccatattttgagttacgatgtctaaaatagttcgctaagtcttctactgtgattagccaactcatgttaaataggagtcgatttcgttaagtgtttgttatatatgtgttgtctcggattgcgataataagaggcaagccgacgtgtaggatgtatagcagtctatgttgttgcgctagttagccaaattaatagatgtgtttgggtaatatcgtagtcatggtgattttgcttgttgtagtctaaatacgtatgtttatggtcgcgggtaaaaagtagtagtgctcatgtgatgtctaatttaaaatgcaaattgttgagtgattgtcgtgaagaatgcattgttaattggttgtagtaattttagtgcactaatgacttgaataaaatttgcaagtcgaattgttggttctaaattgattgtctcagc

SEQ ID NO: 154535 - DNA, 578 bp, Zea Mays
atccatacgtacgtctgagataatctgaaacggacaaacagaacacggcgcgtgcccttcgttgtcacgagggagcacaacaccgagccgaaatctgggtggaagctagcgtgcgaaagcctcgatcggtacaagtctaatagttccaaacgcttggtggcaggggcaagcatcccccaaatttcttccccagcactagcagttacctgtgcttttcgtcagcaacagcatggttaagaaccagcctggccttaggtgggagggtgggagtttactggtgtttgtttgcttccccagttccaaaaacaagggcgtcgttttcttttttctttcctcgtgcgtggacacaacttttagactatctctaacagacttctcatcccattctcaatcttactttttatttcaaactttactctacaaacattacagtttataatgaaagacattactttgtacatccatttacacggcctgctgaagatagctttgtggggggcaagctgctagcaagcgtactttgagaatcccttggttctcactatcttcagcagcttttctttatatatccctttttc

SEQ ID NO: 154536 - DNA, 349 bp, Zea Mays
atccagtttaaaaggtatagaagatgctgcataaaaatgagtttctagaacaaagctcgcgacgtgcgaatgtggatgataatacaaatgaagtgcgaaactacttgatatccgtcctctcaaaaaatccaaaaggaatgggcctaaaggtaaatctctttttaataaggtatgagcatgggtaacatgatattaatcaagtccatgtgcaaatggttaaaatactcaggaaccttgtgcagtggaagtgatagtgacagtggaagtgatagtgggagccaaagtagaagtgctgcagaaactggtagtggaagcagcagcaatagtgatagtgatggctcatcaagta

SEQ ID NO: 154537 - DNA, 543 bp, Zea Mays
agcagaaattgttaagatcactctcttcattaattccaccgaaggtgcctttagaatttcaaagaatactttaggggataaggggagccccaaggccactgacttagctatcatatcagcatgctcattatctgcccttggtatattttttacatagaatccctcgaatgaatttttgatccttcagactatatcaagatatttctgtagtgttggattcttggccttactagttttgtcaacatggtcggtgatcacctgggaatcagatataagaatttccctttttacacccatagcttttagcttcctcaggcctaagagcaaagctttgtactctatagtgttgtttgtgcattgaaattccaacttgggtgcataccaagtcttcactttcgaatgtgaaataatgacagtggtagcaccggctctgaatgaccccccaagatccgtcgcaaaaaaccatctagagagcttattctggtgtacttgctttgtcttgtggacaaggtgtccaattaacaatgaaatcttccaatgttt

SEQ ID NO: 154538 - DNA, 622 bp, Zea Mays
gcctccttaaaactttccggaagaacagtacaaatgtgacggagcacaactaattgaggaaccaaatttaactaatacagaagaccgaggttcttaaccctagcacttttgtgtactgacagacttagttgccttaacatcacaagactctacatacagtgaaatcgactgtcataataaactaaatggtaaaataactagtcacaaaaaaattgtcatgaataagcatttgcatcagcaaccaaagagctagaagaattttatttaggggccacagggaacatatttttagaagtaggaaaggctagacactccaaaaagtttcaaggaacaacattggatattagaacaaaatttcaagagagttgtgacttatgattatcttgaagcaataaaatttcccttatccaaaacaaagaacaaatgtctcaattaccaactgaagaatcattggtagactcatgtgtagatgttcccaagttgaaagattatcaccagtccatgttgcagcataacgctggcttcctataaaaccagctcgtgtaagaacaaatggccttttagctgcattggccatttccattcctttataagtagatcttgtcattagcattccatagac

SEQ ID NO: 154539 - DNA, 766 bp, Zea Mays
aaacagttccaccctctcggtcacctcagtcggtgacttggttcttccaagtccgttctacctcaaaattgttcttgttgctcctcacatcattcaggccttctttctgttcgtcggtctaccaccgacaactcttgttccattgagtttgacccttttggtttatcagtgaaggatctgactaccaggacccttctcgctcgttgtgacagcttggggctgttgtacacactctggctacccgcttcctccaccgtcgcgtcttccttgcatgctttggctactaccacttcgtccatcacttggcatcgtcgtctcaaacaccctaggctcgattccatgtccaagctatctagccgttcagacatcttgtagcaagagccattttgatagtctatgccatgcttgtcagctaggctgctatgctcgcccccctttctctagttcctcctctcgggttgatcaggcctttgatcttgtacattgtgatctatggacttctcatgttttcaacctttcagattatgaatattacttggtgattgtggatgaccttttccattgcgattgaagtaggatactttccacactctttcgcacttttttgcttgggtctccacccagttcggccgcctggtttgtgctctccagtgcgacaatggttgcgagttcaacaactccacctcacgctctttcttcctctctcacggggttcaactatggctctcgtgcccctacacctccccttagaacggtcgggccaaac

SEQ ID NO: 154540 - DNA, 741 bp, Zea Mays
ccggtgatgggcttcggccaaactccaaattgccgcatccaggagcaataagagatcaaagactaactaaaacagggagtaatttggtaattactgaccagaggagcgctggccacggatgtttcttcttggcggagctaagaacagaagagagagggaattggggctacgtgggttttccggtgagctcgagtcaagtgcttagtcgctgatgtgcggaatgtggtgacgaaacagcgcccgcactcaatttataggccgccggccgtagtcggatgaagatcggggatctctagatcgcgctggcgagcataccgcgcggcggattccggtgacagcgcggtgatcaccgtttaaccggagcctaccaccttagtgactcgctgacacatcgccgggaacttttaccgtggccgccgacgacctatccgagccacggcggcatccttatcgccggcgagaccgatccttatccacggcgtgatctttctgaaaaccgatgaacagtgcgccagattcagtaaagagcttatctgacagaccaggttggagctctattttctccaatttttatgtggtacctaagccaactttctgcatcaaagttacacacctataatccatcttcaactttgccacaacgcttaccatcaaatagtcactgaatcacattcaaaatcgagctcaaagttcaccccatcacactgttactgaaaattcagtctaggggttgcgtgatag

SEQ ID NO: 154541 - DNA, 336 bp, Zea Mays
cagcgttggatgtggctgcagcagagccttcgccacgagcggagggttccgaggagctaccgagcgtgagttctaggtataggaggcgaagggcggtggcgaaacggagagtgagtgaattgtcgcgaagtggtaggcattatcgtagtgagatggagagtggtcgtcttcgcgtggatgggactggtaagcgagaattgttgtcctcaccgattggggtgagtgtaggtgagggggagctgcgaaatatttttgatggtgaggaattgaggataatgttgttcaactacactgagatgggtatcatcccgaaggttgagccaatgtaatatatga

SEQ ID NO: 154542 - DNA, 1148 bp, Zea Mays
ctgggccgctgccacaattccagcgaagctcaaggggtcgcaagcaagttttcaggacctagctgtgatggttcttaagaccaggtaggaccgcgggttgattgaataaaaccgcaggggcccttatgcatatttccccagccaaaggggtatcaagcgactgcagccatccgatcaaccaacagcggccatgattagttcaaacttataagcgaactggtattcgagggtggccgccagatcacgatccaacggaccggatccgaactggtgaaggggtctctagacgcctaatctcaaccgtccgttaactatccaatggcccgaggcctctcttcttcccttatttctctctctcccccaccggtgccagcccgacggcaggcacggcggcgccatcgccggagcacgccgagggacgaccccgatgaccgaacttcgattagacagatgctacgcagagaggagatgatggagaactcaatagaggggttcataccggcgctggtgcggtggcgaggccggtcgacggacctaggcggagggatgattaccggcgcatgattccggcagcgcagagcgcaattccggataggcgaagctacaatagtattccctgtggcatggcgagcttcaccggtccgattctgaccacacgacaacgccgtaggcttcaaatccaccacggcagcacctctctcatttctttgtccttggcggggcgcagcgaaagctcagttcaccacggtgcacggtcgggcagagggcagaagcaggggcgcgacggatttatagtgccgcgggttccgcaagggctggcgggcgaaccgcgcccttcctggccgagttcgttcgatccgcgcggattccgcgccgccggtaccgaggtagacggagatacgtgcggttctgttgcggtaaagaagagggaaagtgatgacatgcgggtgccatggatgggcgagacgagcaagcgccagcaggcatcgcgcggctcacgacgagatcatcgcgcggattccggcggcgcccacggcattctgttgagcaccgcaggaggtgggagaagacccgaggcgcgggcctcacaagtcagagacgtggcgcggggatgggctgcagtgggtcgactggccgagatgggccga

SEQ ID NO: 154543 - DNA, 1208 bp, Zea Mays
cagatatctccttattgtccggtaggcaatatagaaagtcatcttcgtcagtgccactgtataccaaggatcctaggggatacttcggatccttggcatattgcctagcttcggcaatttgctcctccgttagttttttccctacagcgtgacgcactataaattctaattcctcagtagatgcttcaggagcaggaaattcagattcttcggtagccttctctttttctaatggtaatggtactttcgcggcatccgaaggtcttgattcagtattcttttcaacaatctccacaggccttgcttcggcgggagctgagggcccagctttagtttcaacctgagtcatgacggcttcggtagatttctttgtgttcttgtcttccacgctaggtgcttctacagaagcaggagttagcgcctttgaggattccataacagcatccaatacactggccattctccttctcttcagagttattgaagcaatcttttgaaccttcggtagttctgcttcttgcaatgaactcaaagtttttggttgctccgttgctatcttcgggattggctctttggccgattccacaatggcttcggcagtagcggggtgacttgactcaatggcagaagaaggcccttcagcaagcttcggcacttcgactgtttcaatgtgcctgggccgatgtgttagaactttaatcttctttggctttggcgtagtagaaatcgccgaagcgacaactcttgttttatttccttgctttcgcgaaggatagctttaatctgggtatacgaaaccaataacttcaaaaactctattcaaccttttcttgcctcagcttccgaagaccgctttcatggcatcatctttggcccttgaatagacgccaagcaactcatcgctggttgcgtcaatggcatctaaccagtcatcgttgggctcatcaaattggctcctgtatttgagtgtatacttcaagtaaaccaagccaccttggctagacccagcagcagtctccttcggcatctcccacccactcccgagtggccacaccttgaaggcaatgtgttcctgaactaagtccctggtgcctatgtaagtgcatactatgttataagcagcttggcacgcttgtatgtcgtttccgagggcaagggttggtctcctaatgccgaagtgagaccatatagggcgttgggtaatcccc

SEQ ID NO: 154544 - DNA, 737 bp, Zea Mays
aaaaagaaaacaaaacaggaaaaaaaggaaaagaatacactaaaacggattcagcccaggcccacttccttttcctctcccctctccttagcccacttacattcctatcccgcgcggcccactcggagttgtcatctacgcgctgtgctaccactggcatgtgaatcccgcggattaggcttatcccctcgctgcgggtcacttacctgtgggaccgccccgttggtcgctcacccgcgtgtcagtcgtcttctccaacgacttcgccgctcctggcgggagcgcgccgggaatcccggcgtccgttgacggattctacccggctccccctcccacataagctgcgccccctcctctccactcgttgaccctttttgtgccgtagtcgtaggccgaagcctccgtcgccgatcggaaaggagatagtgagagtcgcatccgtagagaccactcctctgtcaccattgagcttcagagcgcggattcggtggagaagtgtcatgcgcagaacatgttcaactgcgcaacttcgtgcgtgggtggttagcgacgcgtgaattcgtcgccggggtcagccactgctgctgtgtcgcctgccctcgcggtcagggctcacctctgatcgattcacaggtaatccgccgtcgtatcccttgccttgatatctgcaacacgttgcaccagtgaattagaagggtagggtcgtcggtgaggtggagtttctcaccggacttcac

SEQ ID NO: 154545 - DNA, 740 bp, Zea Mays
cggctcattgtagcttcggcctcggtcagctttgtcttggtttcaatctgcgctttcgaagcctgggcaattttccctggagtagagcttgaagcttttattgtctccagcacatctagtgcactagccatcctttttctcttgggggtcgctgctagacctttttgtgtcttcagcacctccactcctgccgaagggcttagaacttctaatgttttcgtcccttcgattctcggttcttcaattttgtgagtcttcggcattgcagccggctcttcaatcctctgcgtaagagcaggtcttttggcttcaatagctgaagaagtctcaccgccgaattcaggcactatggccggttcaatgtagcgaggtcggtgagtaaggaccttcaactttttcctcttcggtgcgggctcgcttgaagtagctgaagcagcagccttcccagaagttgcacccttccttttctgcccccgcggcgggtagcgatagtcagggtacacaaatccaatagcatcaaaaaccctatttaatctttttgttttttggctcccgaaggccgcagatagtgcattatcttcagacttggagtatgctccaagtagttcatcactagtattttcaacacatttcagccagtcatcgtctggttcgataaattggtctccaaacctgaaggtatatttcaatcaaaccaaaccaccttcgctagggttagtgatggtttcctttgacatttc

SEQ ID NO: 154546 - DNA, 661 bp, Zea Mays
cgcttatgtgcatatcttatcggattgttcttcaattttaacaaggactgacttatgaatgctactcgcctttaataattattgggctgcggtaacgctcatataagacctctaatcgatcaacaagacatttatttatccaatgggcatggaatgcaatgattgacaaagtgaagcatcaatctgccatacaacaaaaattatgacaacaccgatagatactatcaactaaccgtttaaaatactaaacttatttctatctttgccactacaccaccctacagtcacatgaccaccatgagcatccttcacacgatatacaatagcaatctaaacatcatgttacacaatacatacatctttcctcattgcgagtataaccatgtcatggcatatacccgcactcctcaatcaaataacttacgcgaccactgatacaatgcaccatggcacacacacacgtccactaattcgatccttacataacttgtatttccaaacttactcatcacattagacaagcacgacccgttcgtttctccaatctacctatgcatccacacatacacttgttggctttccgaacacaaacacacccacgtgtaccactttctcctccgtgaatttcaatccgcacataacatattcacacacatttaag

SEQ ID NO: 154547 - DNA, 520 bp, Zea Mays
gcagcgtctgtggcttgagttgataaaggattatgatctatccactcaatatcacccagggaaagcaaatgtggtggctgatgcccttagtaggaccgatgttccaaaagtggccatgcctttgattacagatctggaccgtatgggggttgcattgtgctatgtcggcatcgctagagaggagactcggatgctcatccaatcctcccttctagagagagtgcgcatggctcagcaacaggatcgtttgttacaagaagctctaaagagggtcggcgatggtaaaccctgtgagttcaccattgatgagaatgatttggttcgtttcgggggccgcctttgtgtgccacataaatcagaggtgaagatggatatcttgagagaagctcatgaaacgccttacaccgtccaccctggcgaaaccaaaatgtacagggatttgaagcaaaacatctggtggaagagaatgaaggttgacgtttctaagtatgtggcagcctgtgaggtgtgtcagtgcgtg

SEQ ID NO: 154548 - DNA, 522 bp, Zea Mays
gtacgtcttatccattgttcttcgaacacaaatttagatggtgaatctggtgaggatatcgatattgatgaaacacaagatgcctttactgttatccctgacgtacctgacccgtacgacaaggtgtatagtaacatacctaaagaaacatatttgttgaacactgttgctgactgcaactactgtaaggcaaagaagtttcaatatgaaccacctggattttgttgtcgtaatggacagattgatctagccccattcgagacaccatctcagcttaggaggctgtgggagtgtgcagatgctgatgcgaggcacttccgtgataacattcgattttttaatggccatttctcgttcacttctctataccgttgccttgacaatatgactactaatatggatcgtggtatctacacgttccgtgcacatggcatgatgtaccacaacgtaaggtcgtttggtagggaagctggggcggaacagaagcaccttgagctttacttctacgatgatgatcccagc

SEQ ID NO: 154549 - DNA, 487 bp, Zea Mays
gaaacgccaccgccggcctcatcgtcaaaaacatcggctgccgaagatactacagcaaccgaggctgcccccgtcgaagctgcaactatcgaagctgagacggccgaagatacaaatctagaaggcactttttctgatattgataagatgattttgaacatgaccacggaagaagctgcaacagctgccgaagagaccctggcccagtgcccaggaaagagaaggagattgccgaagatacttcggaggaaaaggattttaattttcaagacatacttggtcaaaagttgtctaaggctgagaaggaagagctgagggattatgcaatatcatgcggctatcaaccaggggcaatgctctttggtggcgttgccgaagagagtttaggatgcctttgggaccggattggggcgaagattgtcagcactctatcgaagagtgttggctttccaaagcttgaggccgacgtcagcagataccggcggca

SEQ ID NO: 154550 - DNA, 881 bp, Zea Mays
cggcgagcaatcaaacgcaacagagagcaaaacaaagggcgataggggcgggagaggtcccttacctcaaggcgggctccggggactcctcggcggcgacagagacgcgacggggacccaggtcgacggtggcggctgcacggcggacggcgggtgagcgcgggcagagagaaatagggaggggaagagggaattggggtgcgttccgggttgcggacgtcggggcggagctcaccgaggctaagggcgcggcggagctccaacggcgacgaggaaccgagctcgggacggtggggttatggcggcggcgctctgcgtgcgcgcagcgagggggaaagagggtctactggggcgcaaatggggggagagggtgagggcgagtggggctcggggcacaagtggccgagggcgaggtggggcgagtcccacgcgcgacgtgggcgcggagaaggcgggcgcgagcagctcggcggcggtttcgcggggacgacggggctgacagcccgggcccgcgacgctgagagagagtgcgggcgcgagagaagcggggctgacgggtcggacccacgggcagagagagagcgagggtgcgggcgcgcgcggggaaacggcagcgccgacaggtggggccgagtgagcagtgagagaggtaggcgggtgcgcggaaggcggccgcgccgacaggccgggcccgctgcgcagagagaggaggggagagaggcgcgcgcgcgggaatgggccggctgggccgaaaggccgaggggggcggctgggttgggcctctttgccttttctttttattctgaattgtttttcccttttcttttttacttattctatttgattcaaattcaaatgagccccaaatccaaattagactt

SEQ ID NO: 154551 - DNA, 424 bp, Zea Mays
ggagactgttgcggctaccggggaaaatgtcggggtcagaagaaatagcaaatgatggacgtaatgcaagtcgtccaaaagatcacgccctcaacttcggcggaaaaaattggtgtgcatgctaatgccgaagatactaccgaagccgaagctaatgaagccacacctgaagttgagaaccttgggaccacaatgtcagagattgacagacttatatctaatgtggctctcgagaaagacatagccgaagtatccactgataaggcttcggaggacacagagttggacctatggcacctgggcggccaagaactgtccgatgaagttatttctgaattgaaagaattcacccttgctggcggatacaagcccagatccgtgctctttagcggtgtggacgaagagattttggggtgtattcctc

SEQ ID NO: 154552 - DNA, 491 bp, Zea Mays
caccatcaaggcatggaatactttagattgggtgtcctttttatgatggtggccttatggtcaacggctacatcgacaccctcatctaattgtgttttagctgatgttccaaaaatcatcggtccttcatttatttctttattgactacagcgtctgttgtgcctattttgatgatgtcgtcggctgtagttttctctaattatttagaacttgttttagccaatgacttgggtgcaacaaatgcaagggttttccccttatgccccttgccaaaagtgtagacctttggggtcaaacggtcaggcatgcctgatgatcttgtgcctaaggaccggattgtggagtttccaatcgatcttgtactggtggagctatccattcaaatactgaggcttgtggtgccccaggctaggtgatgtggtagtctatatggatattgtggtgtggcgttgctcctcccctcatgggtgtttaagcaagtgggtaggcg

SEQ ID NO: 154553 - DNA, 415 bp, Zea Mays
gcggttcgccgtcggggagggtgtcaggcagtcggtgtggcgcgtaggcctgtgcgccacttcggctctggccagaggtagaagaagccagggtgccatcgatcttaatatggacgtacgagatttgatcgtggctataccgcgggataagaattggacgactatgattcagtagagtttacctgttcggccagggtatgtgctagccgttgatgcgatatcaaacgaacgcaaatagatcttaggattttatatctgaaccgttgaagttagatccgatggtccgagttagatccagggttcccctttcatgtaatctaatccgagcccctgattttcaatcggacggttctggtgaatcgataccccttcacccgagacttttgctaaagagaccccgagtgaaatagaattt

SEQ ID NO: 154554 - DNA, 960 bp, Zea Mays
ttcgcctttgccctctggtaatattttatttcctcttcccgaagaagtttagataggtcctccctggcacgagcaagttgctcttgctcttcctcagataggtccctaccctcagcagttacatccaaattatttatcgttatctggagctcatttttatggtgcttgtatatacctctgtcatgtcgtgaccaccctcgaagaaagcttcgaagggcgccaagcttacggttccaacgttgtacagagttgttgccttttactggtttattccacatatcaaccaacttttcgaagaagtcctcacgagcgaaccagctaagttcaaacctaaacggcttggagccccctgggaaaactggtgatcctgtgtcaatgtaaagagacgtatgatctgaaacgcctctgtctaacgcctggacagagactaatgggtatttaacttcccattcggtcgacataagcactctatctactttctcatatgttggattgggtaaagaatttgcccaagtaaattgtcttccatttaactcaatctctcgtaaatcaaagttatctattatcgcgttaaaaaggaacagccatctcatattaaaattattttggtttttttccttcctgctcctcatcatattaaaatctcccccaattaaggttgacagataattttgctgccaagttcttaccagctctgtcaaaaaggctattttgaagtcctcctgagcagggccatagactgccattaaaatccatttgaaattatccaccctattgttgagatgaaatttaacaaaaaattccccttcaaccattagtgttaaatcgaatctgtctctccttactcccaaaagaatccctcccgatcttcctcggggtgggagacaatgccacacaaattcagcacctccggtcagtcgtgacaaattcgattgtgacatgtcttgtttacctgtttcc

SEQ ID NO: 154555 - DNA, 457 bp, Zea Mays
gcttatttgagtgggttgtcatgacatttggtctgaaaaatgctagtgctacttatcagagggctatgaatttgatctttcatgagctgttgggaaaaaccgtggaagtctacattgatgatattgtagtcaaatctgctaagtttagttctcatttagctgatttgcgcaaagcctttgataagatgcgtcggtatggtttgaaaatgaacccacgtaaatgtgcttttggagtgtcggctggtaagtttttaggatttgtcatccatgaacatggtatagagatagaccctgaccgaatcaagtctattcggaatgtgggacctccaacctgtaaggtcgaagtgcagaagtttctcggcaaggtgaattatttacgaaggtttatttctaacctagccgggaagattgatgccttcacccctatccttcggcttaagaatgatgccgaattcgc

SEQ ID NO: 154556 - DNA, 409 bp, Zea Mays
cggtgggtggccagggtggtgtcgggattgttcatcggcgtgtggggatcgtctgcgtgaagtattgcgctcggtgacctgtccaatcatccagaattgctcgccgttgtcggtaatccgccgtgctctgtgggcagaggtctgtgccgcgcgattcacagtaagtcctccccatttcgtttcgccttactcacagcatcgtgttgatcaccacgggtagagggattagcgcccgatgcgtcacattgggattcaccggtgaggtctccgccgtggaggcctgtgcgccgccgcgcgcgactgctggggttggtgtagctgggggatgaactgggggccgtcggatgaccatcgtacggctgcggtttgagctggaaaacgattggggttgattagatctgaatcgttg

SEQ ID NO: 154557 - DNA, 340 bp, Zea Mays
ttcgatttctgcgaacaaaagagcattcagatcaaatatgcttcggtggcacacccaagagccaacgggcaggttgaaagagctaacgagatgatattggaggcactcaggaaaaaagtcttcgataaaaatgaaaagttcgcaggaaagtggataagggagttgccctacgtcgtttggagcctaagaactcaacctagtcgagctctgcatggaaatactcctttcttcatggtctacggttcagaggcagtactacctgctgatctcaagtttggggcaccaaggttgatctttgaaaacatagcagaagccgaggctactaggctggaggatgttg

SEQ ID NO: 154558 - DNA, 328 bp, Zea Mays
agatcgggtggatggagctcttttcaaggttagtaaccaagcccgaggagcatccaaaggcgtgtaggatgtctttgaccgccacaatttcatccctagagggttgatgaagatagcagcatcatcagcataaagagacgtcctaagattgggtgtgttcagcggaaggggggagaggattccttgtcgggttgccagctcaaggatgcgatgcaccgggtcaatggcgagaatgaacaacataggggagagggggtctccctgcctcaccccgctcctgtgcaggatacctgacccttgggagccgttgaacagagccctgaaagag

SEQ ID NO: 154559 - DNA, 669 bp, Zea Mays
ttttccttatcagtatttaccatctcccagggaaggccataccctcgttgtcaccaagacgattctaggatctcgatatagaaaattatcatgggcccaccaattgggaccctcgccttggggccccaaaccctggcctctacccttgtaggggcttggcaccgagtgatagtgacttgacattggggcaccccaaaggaataactacaccataaattttgtaagaagccactaaggggtctagggccatgggatgtccctggctagaagaatctaagtcttcgggccctcttgtgccttgaggcactcatgaacaatctaagcccttaggattcctcgtgccctcgggtgctcatgaagggtacgaatactcggagcaatccgaccacgacactagggccactgctggcctgaatatctctagcctcagattatgagcacgactaagccccgaaccctttggtgtctatagcctccaaaggaacaagggacttgatgcaactgagtgtaatcttatcacaagacgaaagggtgtgcttgggtccatcgaggcagtatggcctaaaatcaagaccccacaccaaaaggcctgctaaaaagtccatagcgttagcttatcggataagccttaggtgcaacacattaaatgtgtgaagtacggcattacag

SEQ ID NO: 154560 - DNA, 556 bp, Zea Mays
gccaccacggtgccgctcggtggcatgggctgtgcgactgtcctcagtattccaggtaatacttccacgctcggttcgtcgttgtgtcctccacgtaaatccagcaaacacaaccaagggggggggcttgggaacatcgggttgcagctcgtcggtgtgaaggccaccgaactaggatgcgccactgtgttcctggtgtccggagaaagaagatgagaccgtagccatcgatcggctagcggatggtcaggattagatcgtcgccctactatttgtctgaacgtcgtggatcttcgatctaacggatatcatggcgtaccggttcgattttatgccggtctaatctggcgcgtttggtgttgatccaacggcctaaatcgttacgtaccccttcaccgtggaatttttgtttaagagtccctgactttattgaaaattaacccgccatccacctagttcaaagaaccttgcgattgggtcctgttttattcagaatagcccatgtactctttagaaatgttatctgcagtccacagggtattaagtactataaaat

SEQ ID NO: 154561 - DNA, 559 bp, Zea Mays
acaaccagatcgaaaccgaacctttgcatgaacgtcccggcaggcgtcacactggtgagaccgacacccgaccgacccgatcgatgctgggtgccttgtcggcctcggccgtcgaatgattgattattcttccgtcaacctgcggctcttcatataacgcgtgtcaagtgtcaaccatcatcatgtatacacggtttagcctgcaataatattgccgcatcgtcacacagacagagagagagtagacgacatactgctgtgctcttgcagctttaggtgaccacttgcgatcattcaggcccataaagcttacctctccttttcgtttgtttattattgcttccctcccggaccatacatatcctgccgccattcaccattcttcattgattggaaaggcccacgaacaccccgccccgtccacgaacggccttgtcgcgctgctggcctccgtgctctgctccccggcgggcgtgcgccacgcggtccacgccatcctcctcaccacgatcgatcagccaccaactgccgaccgtccggatcgagcgcatctcccacg

SEQ ID NO: 154562 - DNA, 411 bp, Zea Mays
aaccttgttgcagcaaagttacattgttcatctaaaaatgtttttacaataagtactagtcttccttcaggaccttctccgcaacttcattcagcaatttgttaaagactttgtcaacaatagattcagccatatttatgatttctagtgcttccttcgttgctggatcggctagtggatcgaatggttccggtggcggagataattcagctacaacggaaaaaattagtcagtctgaagccacaaaaacaaaagccgaagctaagtgctgcaaaataatacctatgcctctctcgtgctctgcagcttcttcagcttgttttgcttgtactccggcatcgtgaatgtctttctcacttttcttcataatttcgtgagtcatttctcggccaccatttacccagatgtcat

SEQ ID NO: 154563 - DNA, 707 bp, Zea Mays
cgtcacaaacaccgtgtgcctcttgcttggatggggcgtgccgtcgcacgcctataggatccgagcgggcgcttccccccttggtgatctcgccgccatggagttcgtgctcttcgtttcctatatctcgtgcgggttggcgctgccaatttcccccttcttcatgttactgttggaggacctcagtctccagctccagcacctcacaccccattcagttcttcaggcagccatctttgcccatctgtgtgagatgttcgtgggggtggccccgtgcacctctctcttccgccattttttcgtgctggtgaagtccgggaaggccaaggaccatcttggagcgtattatttccagacaagggcggattcagcccgctcctatatctcttccctcagcggcgcgaggtgggaaaactggcgggccaaatgggtgatcgccagtaccgaggctagcgaccgcctcatgcttccaagtgagggaccgaggctcgagaagaagcaatggagagctaagccgccgttggcgtcggaatttgagcctgtgttaggcaggatcgaatctctggcgtccggtggtctgacgtcgatgcacacggtcggcgacttcctgcagcgccggatcgtgccgctgcaggcgagggcacgcttgagctgttggttttctggcacgaacgacccgagctgggtccaacacggcccaggcaccg

SEQ ID NO: 154564 - DNA, 347 bp, Zea Mays
ggaacatcgacgcgtggccaagcgaggtgaggtccagtcgcatatcatagaattcaacgacgaggtcatagaccacggcgggctggagttcggcgcaggtgcccaacaaactggtgtagcctggcgttctcgcagtggaggaatagaggataccgagctggagcagggaagaccatggcatgggaggaacggctggagagcgagttggagttaggcgcgccagcaggggagatccgcacgcagggaggaagaagaggactggagctcgtggctgcacacgatggccatgggaggaaccttgctggggagagatctctgctggggaggggcgacgagcagaggggcgc

SEQ ID NO: 154565 - DNA, 618 bp, Zea Mays
cacgcccgcgttccccccctctcctccccagcccaagcggcccagctgcgcgcgcccgcgccgcgcctgacaacccggccccaccggtcagcggcacctcccctctccctctcgcaccgctctcccactggcagcccaggcccgcctgtcaggaccatcgtcccgccaatgccttcaccggcgcgttcgccgccgaccaccgtcgtcccgtctcctcaccattaacgtgcacaccagcctcagctacctcctcgccactgtacccgagccgtcccctcatccctcgcctgctcgagccatcctgtcgccgtttgctccatcaccgccatcatggcgggctcgtcggcgctcgccgtcccctcccttccttccccctcctgggtgcctataaaagggactgcccgagctccgctttctccacatcagccccagccacctcctccactccttcccgagctcgattgagctagcgccgccacgttcccccttcactccggtgagcttcgttctctcctctctagtagctttcggtcgaattactttagtgcttgagctccgccactcactcacgatcgcaatgcacccatccccacctcctattgcgctcggctgcctcgc

SEQ ID NO: 154566 - DNA, 474 bp, Zea Mays
gcacaacaagtgcgcaaaatcgaagtctctttcgaaagaccctccgtgagaaagttgcctcagggtgcagccggaattataggtgcgcacaaccaaagtcattcctaaaagactctccgtgtagaagtcgcctatgggcgcggctgtatcaacgaaggcgcgcaaccttatcatacaaattatggttacatacacagcgagggcatcacatattacattggctcaaccttcagaatgatacccatctccctgtagttgaacagcattatcctcaattcctcaccctcaaaaagatttcgcagctccccttcacccacactagccccagccggcgaggacaacaattcccgtttaccagtcccgtccacgcgaagacgaccactctccatctcaccacaatgacgcctgccacttcgcgacaattcactcactctccgtttcgccaccacccttcgctgcctacacctagtactc

SEQ ID NO: 154567 - DNA, 1288 bp, Zea Mays
tcctcactttctcaggtagcttcctcttctccttctctgctccactgaactttacagagtcttacttctgagttgcgggtctttcggactgctaagtcaagaatctttatcggcttttctcggtactggagatctttttgaatctgaattgtctctgcctcgatgtggttctctagtacttgcaggcacttacggagctgggacacatgaaacacattgtgaatatctgacatggattctgttaattcaaggcggtatgctgcgggtcccactctgccaatgactggataggggccgacgaatcgcggtgctagctttcctttcatttggaaccttttgaccccacgcatcggggagaccttgaggtatacgaagtctccttcctcaaatctgagttctctccgtctgttgtctgcataacttttatgtcgactctgagcttcaagtaacctcttgcggatcagggcaactttctcttcggcctctttaacaaagtcaggtccttccagtgtcctttcccctacattggaccacattaggggggtctggcactttcgtccatacaatgcttcgaacggtgacatattgatactggcctgatggctgttgttatatgagaattcggcatacgacaaactggactcccagtttctatcgaacgtcaacacacatgctcttaataaatcttcgaggaccttgttgaccctttccgtttgaccatctgactgggggtgataggcggtgctgaaatctaacttggtgcccatagcttgctgaaggctcttccaaaattttgaagtgaactgcgtccctctatctgacactatcttccgaggaataccatgcagcctgactatctctttaagatatatccgggcaagggtggctcccccaaaagtggttttcactggaatgaagtgggccaccttggtgagacggtctattattacccagatagagtcattccctttttgcgtccggggcagtccggttacaaaatccatgcctatttcctcccacttccattcaggcactggaaggggttgcagtaggcctgcaggtttctggtgttcgacttttgttcgttggcagatgtcacaccggtccacatactgtgctatctctttcttcatccctctccaccagtatctggttttgaggtctaggtacatcttggtggttcctgggtggatggagtaggctgagttgtgagcttcattgagcaggatttcccgtgcctccccttttggtacacacagacggttcttgaaccaaaggactcctggtt

SEQ ID NO: 154568 - DNA, 359 bp, Zea Mays
aagcactgttccgtcctataccgtgcccacttgtgccggtgacgtggccaagcggccgtcaccggagtttgcgcccttcatcgcggttgcgccacacctcaagccatttaccacgtcgcactaagccgctttagatagctgggttgtcgctggtaagctcaccacggtgaaagccaccaattccttgcgacagtgctctcccctctctccggccaccaccacgctacctcaaattcacgggccaccgccgtcgggccctataaattgagcgtgccattggctccgctaggtagtcacgcacccaatacaccaactcgtgcctcaaatcgtccaccagagctcaccaatttgggttttcc

SEQ ID NO: 154569 - DNA, 939 bp, Zea Mays
ggtcttctctggccggtgtcacacctttggaccaacctctgtccgtccgggttgctaatgggaatatagtccagagtgtgtccgagttgtgccaagctgaatggtctatacaaactcttcagtttcaaaccaatttcaagctactgcccttaccatgttatgacgttgtcctgggcatgtcttggctggaacaatacaacccaatgtttgtggattggaaacataagtggttgaagttcaactatcaggagtcaacagtgctcctccatgctgttcagtagtctgtcccacatggtactctattggaaatcagacattcagattcatcaccactagattcggcccagctgcattcactatcagaattgcctgtgcctgaacccatccgacgtctgttgtgttcattccaatctctatttgaggagcccacctcccttactcctagcagattttgtgatcacacaataccgctgattgaaggggctagaccgatctctatacggccatatcggttttcaccagcaatgaaggacgagattgaagcccaaattcaacaaatgcttgctagtggtcttattcaacaaagttctagtgccttttcttccctagtcttgctggtcaagaagaaggacaatacttggcgtttttgtgtcgattaccgtcatctcaacgcccttacaaacaaatccaagtatctggttcccattatcgatgaactgttggatgaactgtgtggagcttgctggttttccatattagatttacgagctggatttcaccagatacaccttaagtctggcgaagagtttaaaaaaaccttttagatcggtctcactggggcacccaacacatttcaaaaggctatgaaccacactttggctccgctgctgaggaagtgcgcattagtcttcttcgacgacatacttgggtaaagcgcca

SEQ ID NO: 154570 - DNA, 595 bp, Zea Mays
ttgcacttcaatacttatatgtggtataagttgtctgcgaggtggagggtgttttgagacaagaacttcaattttgctgtgacctactcgaagggtctttcattccactacgatccagtcttcgagtagagtaagaatttctagtttttaagtgttattttttattcacctattcacgctctccctgtaggcgacattcagatcctgttctcaaacaaagggaactttcaataagtcaataaataaagacgagattttaattggacttggaaacatatagtacatcttttagtaactacaacttggagtatgaccagtatacctaatccactagtggtatggattttatcatcttggtggtagcgagtatttcttgctctcggtgatgtgatcggtgacattgaaatttatgtacaagcttggattagtcagatagaatttgttggtcacttgtttttgattgttgtatagaatcaaagacaatgcaacgcagtgttaagcagtaagaatcttcgtccttgaagtattactcctccccctccgagataatatctttaggacaaagatagtgatatacacttcgaaaataccaaat

SEQ ID NO: 154571 - DNA, 418 bp, Zea Mays
ccctacgtgaacatccatggaagtgcaagagggagaacccgctcggacaccctcgggggctgggtcatagtttgcgctacccattcgagccagatcgtctccggcaacaccctcgaggctgggtcgcagcttgcgctacccatccgagccgaatcatccccggcaacaccctcgggggctgggtgagcgccaacaccatccttgagggccaagttctctgcagcagccacctctaaggctgaaggtccctcagtcacttccatgtgagcagggcaatccaagtcagcttcctgaccctcaagaccgcgctccaaggtcgatgaggcgcgggacgctgctcgagatgaccccaacccggcgtcgagcacatcaacacaaacatgcatcgcgccaccatctgccggctctgataacagat

SEQ ID NO: 154572 - DNA, 790 bp, Zea Mays
cagattcttaaaattagggctttctcccatgataataggtaagtcttcagaaataatgtatttaataatttcttcacgagctaattgtggattgtaaacccaagtacttacagtgctgttcgcagcaaagtttagttgagtttgcatacctgcaccaaaagtttgccctgccttttttaaacaagctttgaagtgtcaattcaaatgcccagtgccaccagcagaatctacactcaactcagttttacaatagtgacatatagcaatataactttttataccatcctcgataatctcccgcttatccatatgcttccagcattctgccctacaaacagatggattagcaccctttactggcacatcaacaccaatatcccccatctgctggtaaggaactagaaccagactcagcccctctactaccatctactggtactggtaaggaaaaggaactagaaccagatacaggctcagtgccaccaccatctgctggtactcgtaaggagggactacaaacaggtcgagacccagggacttcaatggtaggggagaattcgctagaaataggattgctggaatcatctttcctactactacaaaaagcttttctacctgctaccctcttcctccccattgtagagcaaatgaatacagatctagcaagtgagcagcaaggaaactacggtactctagtgtataaataaagcacgagctcgagcacttactgggaaacatacttggcgttggcggagcagtaagtgcatggaagagacggtgacggggaaac

SEQ ID NO: 154573 - DNA, 1263 bp, Zea Mays
ttaatattaaatttggaaactaaaatttggaaattaacataggaaaaaaaacaaaacctcctttaacccactcggccactccttccttcacgtagcccatgccttgtgattttttttctcttcatttaatcatccagccgcgacctcatgcttgtgtcatctaagtattttttttgcacgtatcactatcgtgtgactcccgataacagctctatctcctacctgggtacgtaattctgctacaacaaactaagttgtggatccgagatattcggaattagaactctgaaccgcccgttcttttcgctctactagtaaccaccgttccctggatatatatgcatgctcgcacacctaccatcaaataccgctagcatgtgctcatgaagaagagccacgagtcctcgcccttgctgtgagctgcgaaagttcctccgccgtgagccgagaagaatagggagaagaccgccgattcggacccaatttctcatcggcgatctctgctcgctgcggggccgccggcttggatccacggtctcacccctgctgtgacctcgattgggggtctgggggttttgccaggtctcgcggaacgcgactgcggcttcatctgggtgagtcgtgttctggtcagcttggaatagctcgccgaacatgtgactccgccgtcgggccaccctccaccgtggactacgctcctgctcgcacgattcgtggtaagcagccctttactatgttcgccaggatatgttcctcgttttgcgcgctttggattggtgtttgaagcgacaagggtggcaatgcccctcctccggcgagacctccgccgcggcaggggcggcgccgtcgttggctgcgtcagatacgtggagaaaagctccctgccgtttgattgtgaacggacgtgggagattagatcggaatcataacccttgggcgtaagatctgagccgtagattggatcggatccaatggctggtgcagttaaagtgggtgagtgctttgttaccgtaggatcctgatctgacggcggtaagggcgtgccagttgctgttgagtgtggcctaatccgtgtcgtatgctctggatcggacggtctggattcccggataccccttcgcgtggcaaacttcataaagagaccctccacttttccaaaaccaacccgccgtcctagcgctggtacgctgtgtcttgggaatctttccccgaggaccctgtgttctctggttatcttgtgcccagtccagagaattatgaaat

SEQ ID NO: 154574 - DNA, 487 bp, Zea Mays
accaattttgcagtgaaatgtatttgcaaggattttcattttttggtccgtgacattgatgggataaatattagatttgtggtagttgacatgtagctctgtggattcagcaaaagaattgagcatcgcctttaggaagaaaagttgtttaggacaagcttccattatgaggatagtgtcatctgcatattgaataatagggaaatcagaaccacaagtgttcgatagagggagccggaggatgccacaatcacaagccttgttgacaatcgactgcaggagatctgtcgcaagaacaaaaagaaggggggcagaggatctccttgtctgactccacgtttgctgtgaaatcgtttcccagggacgccattcaaaagaacttctgaagtgtcggagcctagaatcatagaaacccagtgaatccatttgtctccaaacccgttgtgcctcaaaacatcaataatagttgcatgctccaatttgtcaa

SEQ ID NO: 154575 - DNA, 526 bp, Zea Mays
aagattatgaaggttcttcatcccaacatgtgcttataaactcataagagagatagacaaacaattttaccctcttccccaacctgtggccttcccggatgttgtccatgcacacggtggcatcaagcgcgtgggacggtgggagaaagcagtgccgatggtgttgaggtcgcggatggcgagcacgagggcacgaagaaaggcggcgcccacgacgccagcgaggagcatggcgcaggagaagcagcatgcgtggcagaggcaggggtgtcgtctccgtggcaggcgtagaatggtcggcgacgacatgggcttgctactattgttgacaaccatgggcgccgcgaggccagatgctcaatcatctctgttcatggtcgacaatatcgacgacaacgccgacaacagccccgtgtctcttacagctttcctctcaccatctccatctctgttggttcacctcgccacgaaccctatgcctagggctgctgctgaccccggcaactatcgtgtgccccaaccccac

SEQ ID NO: 154576 - DNA, 626 bp, Zea Mays
gtgggctccgcgtgctgggtcttcgtcttcccggaacccgcgcggcgtcaacaacctccgcgccgcggattccgcgcgtgggccaagtccgtggcttgccgaactccgcactgaacctcggggtataaaataccggacgctattactcctcgctcgtcttatcttctcccaatatcggtgtcgcggctggcatatctgagaacaccgccgcacttctgcctgtcgccgtggccagcgctctgtaggctactatctccagtaagttactcccatgatgttcgcccttctcctctcgtcgtattgcgcctcgtggacagaaaaactgtgctctggtgtgccatcgggggatggctccgacgagtcgccgccgcgttcgctggggcacctcgcctgtgtgtccgtcggaaggaaggagaaccttgtgagccattggatccgggatggagggtagagattagatgggcgacaacggttcgattatggcgtacgtggatcgctggatcgtggggcgacggccatgatcggatccttagtgtttaaaataggcaccgttggatcttgatccgatggcgggtggcgcgtaccggttcgtcgtagctggcttttaatctgaagcgtccggttcc

SEQ ID NO: 154577 - DNA, 333 bp, Zea Mays
attgtttccagcaaccaaagcaggggatttcaacagcaggaaggaagatgggtgatgaggttgcctcaacagtaggaagcacccaactgtctccctgcccctgctccgagaaacaatccacctccgcgacaacaataacagtagtagttccgacaaggaaacggaaatcgatgcttcacgtgtggtaacaccggccactacgccaaggattgcccacgaaaccaaccaagacttgtgctagttgcaatcccggaaaaggggaagaaacaaaaggtacaagtcaaccaaggaaagctgaatttcaccaccctagaggaattacacgagggagca

SEQ ID NO: 154578 - DNA, 332 bp, Zea Mays
tgcgttcgacagcgacaattttatcagattattctgtatgtacgttggctgatgacgaagttgcaacgcccaggttgccgagtacggcgaggaggcggagatggtcgggctcatcaaggcctgcgttagggtggtgggcagaggcggcggcaagaaacagaaacgttcttcctccccgaacccgaagcaggagcaggagcagcagccgtcgccgccggcgtacgtaaaggtggcctgcctcctcggcctcagggtctctccgtctcacaggtacttcaccgcttctttccttttcttcgattctcaccacatgcgggggatgcatgcacaca

SEQ ID NO: 154579 - DNA, 1611 bp, Zea Mays
ctttcctccgctttgtaactatcttcttcaagacttttggaggactgtcatcgaagttatggttcttcgataatggcataaagtcatcgtcctcatcagcagcctgccttgtttcgtgtctaacagattccgccggaacacggggtatgtcaacactaaagcactcttgagtagactgaattataatccgttttggattagatggaggtcggtctacgttcttcatgtatgatgttcctgccaaatcaaataacacatatacataaaaaatgtaaaggagcaataaaaagataagcgcaagtcaattcagttcatgaccatgcattccattactacacaaaaaatcatgcagcagcactactaggaagggtttggaggtagggatagggagacgcgctgctgcgttgttcatatatgatgttcgagccaaatcaaacaacacatatacataaaaaacttaatggatcaataaaaaatctactcatatgcgatgtccaattaatgtatactctggatatttcgtgcgtgctgaccctaattgaacagcgagatgtttatggcataacatattgatgtatatatcataattttgtcaacaaagcagcataatgcagtattgtaaattgcataaacgtgtgagacgttgaatagtataaatttgtgtatccgttgaacaataaatttatgctgaattgttttttgataaatcaagcaattggcaaaataataaggtgaaaccgatttacgattcagattgtgtaaatatgcaaatgtaagagttaaaggttgaggacttacccgagtgtggatgtgcctggaggccggccgatttcgggacccctctacaggggagtagcccaaggcgacgcgtggctcggtcaatgcgtaggggactcggcgttggggacggagctcgcgacggcgtaggggactcggcgttcggccgccgcagtggagaagatcgaggtctcggtctctgcggtggagaagaacgaggggcggcgccaccgcctccgcgattccgggtcccttcccggtgaggaagaataaggcgacggcgtctctgcggcggagaaggcgattccgggtctctgcggtggagaaggtgaatgcgacgacggtggaacgacggggggagaatctctatgtgttccgcggccgcggtagagaagaagctcacgacggcgattaatctagggttcggcgggcgcggtggagaagaagcagacggcggcgattgagctagggttcggccgccgcgagcgttacgggtgaggtgagctgaaaaaatgtgtgctcgattgctggattcgtgggcccgatacacgtaaactgctggcgaaatcaacacgaaggcacatggaccgacacgtggattactgtatcataaacggaagcataaaacatcgtaatatcaatatttatgtggggactagtacggctgcccagattgcggggacacgatcttttcatgggcccggatgccacgaaacatgcgcacaccaaaaaaatgtgtaaaccgtaacaagattgagcataacacgtagttataattgacgtaagtaggtggtacagtgagccaaaaaagcctgctcaactggtcggtacggc

SEQ ID NO: 154580 - DNA, 307 bp, Zea Mays
tacattttggcagatgcttcggggacggcggtatcaatttcttcgaccgaagctgcctctgacattttcatttcttcggttgcctctgcaatttttacttcttctgcttccgaaggtattaccttggttggttctgaaggcccggtttcaactccagtctgttgcttcgtagcttcaacaacggacacttcggcaagcgcttcagaagtttcagcagtcttctttggggttgtgcttggaagtttaattgtttccaaaacatctaatacattaaccattcttttccttttaggggtcactgtcggcc

SEQ ID NO: 154581 - DNA, 1458 bp, Zea Mays
ctggaattcaattaaaaatttgattcaaattcaattaaaattgaatttatattgggaatttgaaaaataaaaaaaaagtaaagaagggaatcacgtgttgggccggccagctaacccacctcggcccaattcccgcgtcggccatctccacttttatctccagcgcagcccaattctccatttggcgccgacacgcgggccatctctgtcggtgtctccgttgcctcggttgtgtgctcagctcgctgacgtgtgggaccacctcgtcatccctatcctccagctgctatccgccacacccgttgacgctgtccgctcggatttggatcccaacaacctgcgtgggatgcgggtggatcttggctttaacccctcaaccacctggcagccttcacgcgcgcgcactctggtcgcccgccaccgacgcatgggccccctctgcagtgcctccgtctccaacggagtgcgagcctagcggaacaatctccgatccgttcgcggaattttcctcccccgtcgcggactcgtttcctataaaacggccacaccaccccgcgtcatcaacctgccgcttgttttccttgccacccccgtttgccgtcgtgagcgagagatctccgctggacaagccgccttcgtaattccgccgctaccgccagtaaaaccttgggcaaagaagtcggaagggtgcgcaggttggggaattgccggttcatcgcttgtgcggctttagggcgggcaacttctctgcaatcgttcatcggaacgccgctcggtctcaggatccgccacacgctgcagctgccgtcaccgtgtcgtgatcgctggtatgggcccctgagtatttgtcgtattctattatgcgttttgcactcttcgaattggtcgttgggtgtttggtgcgacggcggccttagctcgggtagctgtccaccgcggtggtcgtttcccccgccgggcgcggtctggaggtaggagacacagtggttgtcgtcaactgtgtgatggacgacccagatcagtctgggaaatccccgagcgctagaagatctggtacgtaggggcagaatcgggcgaccgtgagccaccagcgaataccgcttcactgcgatcaaccctagcctttggatcggaatcgggtgttgcagataaggtgctagtggaatatctgcgacaccgttgattttggatccagggatcacgagcgcatgcaggtccatgcgatgaatcatttaatccgtgccgtcggtgtctgatcgttgggctcatctcgcgcgataccccttcggccggggatattgcattagagcccctccgtttctgcggattcaacccgccgtccagggaatagtgtcctgagtcttgggtcgttttgcaccgtagccctgctcttctctgtatattatacgcccagtccagaaggttagaaaacccaggaaaaataaatagaaaatggtt

SEQ ID NO: 154582 - DNA, 318 bp, Zea Mays
gattcaaacagcgatatctcctaaaatataactccgaatcgagcgcataagtactcattggaaaggtatgacaaagctatacatgattctcccactgattcccactaattacccacgaaaaattcccagaaactgctagaactactgctgttcgctcacccacaaaatttctggacaacacctctaccaattcgcatacgtaaacatctaatcgattgaattgcagcacaaataaacaagagttaatcacaaaatcaccttgacttctcctcctttcctccctccttccttccaccaaattccaattggagatttgca

SEQ ID NO: 154583 - DNA, 293 bp, Zea Mays
ctgtgaaattttagttaactgaagttaagtatgttgaactttaaaccaccatcttagctcacttgcgaagtgggaatggcagggggtagcagtggcatggcaggagaccagtagtggtatggctggcacacgtcgaagcgagaaaatgggcgaagtgataagaaagggatctgatagacgacagtggaagaaaacattaagcactcacatatgggtccataagttaggccgtatattagggaactacagaaacatctctaccaataatcctaaaaatagtattggaagaaccc

SEQ ID NO: 154584 - DNA, 478 bp, Zea Mays
tggctcgaggcgacaatttatagagctccgccactgcggtcggacacgccgccacccctccttcgctggtcaccgccaccactccgccgacgattttgtcaggtaaatccaacctctttcgcaccttcttggtcttgctaggatttattttctctgttttcgctccttcttcttggatggcgacgaacgtgggctggacggatggtaggagcgagcgcggcagcttgtatttcagggtttggggacgacggtgacgaacaagtgttgttggggcctggggatcatggtagaactgactctggatcttctcgaacgcgtgatgttgttctagccacgctataaagcatcccgcacaacacttccctcatggtcgtctgctcgtttggccctagcatttcctagtggtgatttcctcttcttggtttctttcttttctttcttaccctcatgatctaggtagaaatccgttcgttgattt

SEQ ID NO: 154585 - DNA, 586 bp, Zea Mays
ggaaattgccaagtacatatccgagtgtgacacttgccagagaataaaagctagtcatttgaaggcagcaggccctttgcaaccccttcccataccatcttggaaatgggaggacatttgcatggactttatcgtgggattgcccaatacctccaggcaccatgattccatttgggttattgtggacaggttgaccaagaccgctcacttcttgccagtacacaccacccacaggacagagaagtatgcagagatctacatcgaccagatagttcgtttgcatgggataccaaggactatagtctcagacagaggagcatcatttgtggcacgattttgggaacaattgcaggaatcacttgggacccatgtcatacgaagctcagcataccatccccaaacagatggccagacagaaagggtaaaccagattttggaagacatgttgcgggcatgtgcactacactacggaaaggattgggacaagtgtctttctttggcagagttttcttataataacaactaccagttcagtctaaagatggcaccttttgaagctttatatgagagaagatgcagaaccccg

SEQ ID NO: 154586 - DNA, 646 bp, Zea Mays
gcaaatttctagatttatttttgcactaaaaacccattttattatttaattcagagtattcctaataattctggactgggcacataattttctaagagatcaggggcacgactgctaaaaacaggattcaattgttttaatattctaatactatggatggcgggttgatttcatagaattacaggggctcatatgcaattgtctcaagccaaaggggtacacatagatctcggtcatctgatcaagtattgacgacccagattagacttgcctgaagggatgagtgacttcagatcggagccacagacgccagatccaacggccacgacacccaagatggattggccactcgatcaggtaccaacgtccacgattaaattccacaaaatggacggagcaaaaatcggctggtttcccgtaatcttgttgcgcttcccacggtgtcgcgtggagttgtttggagaggacgatcctgatggtgatggcccaccgtgcagttatagcaacgcccgcggctgagttcacagccacaaaggagatagtctcggctgacatacgggcccagcggtcagcgagcctgggtgagtgatgcgcgtggtgttagagaaactgacggcatgggccccaagtgtccgtgatagggtag

SEQ ID NO: 154587 - DNA, 975 bp, Zea Mays
cggagcggaaatgggagcgggaggggggaaaatggaagctagagtggtggaggtggtgggtatagcagaagtggtggatggcttcgaagcgacaggagctggtgaagtggaaagtgtagtagacacagtggcggaaggtgtggagggagcagtggagcaaggccgagatgcgaggcgatgaactctgtaggctatctgatcagaagggatctgcaactgtcctccccgctcagcctgctctgctgttgctgccactgcaaaatgctgcacgagcggctctgtccatacgatgcttctttctgccctcctgctgctcaagataaatcgtctttcccttgacctgcctgaaggggcaaggagggtcctcgtcgtctcctccccccgatgatgaaacgttcttcgtccacaccatcctgaccagattgctacacaatagagtgaaaagataagcagaagtagagagcaaccgataggatctcaaaagaagtgataactacctggaaacctcacgagagagagaatctaggcaggacaggagacgggcacacaggtaggcgatatcactgaaatgatagaagaggtgagcacgtattagtcacatagtcataagtatatgaaatgtgaataaatacatacataaagagttacgacacaaaaactgagtgatttggagaaccaagggtcaaacgacgcgagaacggcgtttgaacgatgaattatgccataggaggtttgaaatttgaaatagagcatgaaatgactaggaattgagccgatacttcacgagtaggtatatatgagtgaatatgagtgaagtgtgtgcttggtttgaggttttgcgaagaaaacgaatttttggcactcggctgagaaacgatcgctataaaaagatcacagtggtgtattcgatgtctgggtattggataggcgtgaaagttggtgtgagggttactggaggtggcatgagggtgcagg

SEQ ID NO: 154588 - DNA, 413 bp, Zea Mays
tcttgtccaaaaataggagcctgatgtgatggaaaggcagtgctgcgcttgagcggatgactttactatctcctggtgccgtcttgcgtgaataggtgtcagtcgtctgctccttctcttggaaacttgagcgactattggagtctttgcgactgttcactcaatgggtgggaaccgaggagccaaccattgccatctttaaatagcccgcatacccgtgtctgctttcttcactcgttcttgcctttttgcactcttcttcgcctactcttcccgctcgcccgagaaagcatggccagtggcaaaggtggcaagggaaagcgtggctcggcggagggaaaacgcaagcgccctccaactcctccgttagtgaactttggtgactcagagtttttagagggggcttcttgtcc

SEQ ID NO: 154589 - DNA, 496 bp, Zea Mays
tgcggttatgtatgccctccactattttactctttttgagatttttgatggcaccagtttggtggcagtggattactgcaactctgtaaccgacaaataagttgggggacacacacacacatgatgccatgtttcaactccatctaatctcaccacgcctggttaggcatggagatggggcttccagtgaggataccattctctgtacacaaacctttccagatggataggatgccacatgctttgtcactgtgtcctactattctgctttccatgcagaaccagaacaaacggtacatgttgctgctcacctactgtttaccaacgtttctgtctgtttctgtgatttgttgtttttagtgtggagcagccttattgttaactgagataacttgcaggaaagaaacaccgcaggctataaggttgacccatactttactgtgcctgataaatggctagtttagtcctagctgctgtaaaactccgaccaccaaag

SEQ ID NO: 154590 - DNA, 1037 bp, Zea Mays
gagaaatttctcaatctcacaagacagagcctcagcggtaagcgctaaatcctcaactaaacagtgcaatggaaatgttagtttgtagccccgacgcatgcccaaaatactcgaggacatcggggctagttggtctgagaaaaatcatagcatcgatcgcatagaaagagatctgacatctaatttgctggagaacaagtggctaaataaggccttggtctatagtaagtagaaccatggagttgaggacattaatcaccagaataaacaacattggagagaggggatcaccctaaaaaggtcgtggcggtgaaaattgttttcccatgcctgctcattgaacataatctaagtagagaatgtggataagacattggagtaaacacatcagattacgccactgctatccaaaacccatataccacaaaacttctaagaggaaggaccaagagaccgagttgaacgctttagaaatatatagcttgagaagaatatgagcctttttcttcccatgaagcgaatttaccatttgttggacaaacaagaaattatcgtggatattccaccccttgatgaatgcactctgatttgcaaggaccaaggcatgcagcggtagggatagcctgttgggcaagatttttgacaccaatttggtaatgctatgaatcgggcttatgggtctataatccttaacctaattggcatcaacccgctttggcaggagggtgatgaaagttgtattgagcaacctgaacctagaaacatgtccaccttgaattactgatagtgcaagaaggatatcctcctttataacactccagcaagtcctgtaaaaatgaccagtgaacatgtccggtcttgaggatttgtccatagcatctctttgattgtagcccaaacctcttcctctgtgaatggagtatctagagaagacaaatcatgtcgatgaatgctttccctctcctcggtggtaccaaacaagttctcatagaaatttagaatagcttcttgtttgtcttcctaaatgactaggatct

SEQ ID NO: 154591 - DNA, 574 bp, Zea Mays
ggacctcagggcgtacctcggcaccagttggctcctcgacatgaggggagcagtagtggcagtaatgatcccataggggatctagaggtcagagttgaacgtctaacgatggaactatgccatggaaacagggagcatgctcgtgatagccgtcgcatcactgagttgtcagcagaggttgaccgtttgcaacaggagattatggagcgggatagggcttttgactgggcggtaaattcatgatctatagcctgggattgcgaggcgactgtccgagcccgggtggaagagctaagcgtagccctggaaaatctgcaagcgtataataatactttgcacgaggaagtgcacgtgttgtatgaccaattacatccaaacgtgccactggaggttgcaacaatgggagctagtgcattaggagcagctggtggaggaccttatggggagatggatctctttggagcccctccttccatgaacatcgtggatgatcattctcctgaagctagcagtggagcgggagcagccaaggacacggatcactagattagtgtagtagtacgtggtttccttg

SEQ ID NO: 154592 - DNA, 1397 bp, Zea Mays
attcttaaagtaaattgcacaaatataattgtcaaaagtaaaggggttttgaagactcccttaaggttttctcgaggtctccgagagtcagttttctcaacaaatcattattggagcacccgcataagagtatcactcctttttaaatcgcataaggaccaaatgctcactacaaactggtcctttgtcgttttgacacggtaaaccactcacaattgtgtaggtgtcctaaattgggtcattcacaacctccaagggtgatcaccagactctgattgctactagaccgcctaaggatgtcaatcactaagagtaacaaacacaaactctcatttgattctaacaagaccaatgagaacaatgggtgcacactaatcactcttgtttgcagtaataaagctgctaatctcatgaaatttgactctcgagtcgcttaacatgcaattgctccttatcacacactatatggttgttttggctattgaatggggtaatggcaagtgtgttggtcggttggcagggtatttaagcctccaattggccaactagttactaccaactttggctaaattcatagtgcaaggccataatgcatagttcgatgagacacaacggtaattattgtactactatgtccgaactagacatttgaaatattgtcttaagtgtatgttctgacgttcaccaacacctctctagtcactatgcaatactcatcggacccatccactttggtccgacaagacaactgttcgaacaggctgatgaccctatagttgaaatattagctgaaacaatgcccacgtatagtccaatacatgtcaaacgaccaaactgacgcacccctcaaactctcatgtctgacacaatataccataggacccaacgtattgattcgatgagatagtatttgtcggtaccctgaatcaggggtaccccctattacagtatgaagatgcggtgcccgtacgacgttccctagccaaacggtgaacagcatccgacctcaccacgtgggcggctcaaggggcaccatgtggcgagaaaagatggtacatcccaggatgtatcagttggaccggacctccgcgaaggagcaccggacccctgtacgcacaacctggacccccgattacggcccgggactcccaagtaagcatgccgggtcccttggatggggtccatacccctccgagtgaggtccgggccacaacaaggtcccaggacaggggagaccctggcataagcaagggtccggtactgacatgtgctaggtctaatcttgtgcgcttgcgctccccgctcaggcggagacccgctgctgccacgtggcttgttgcccgtgacataagccaacgggcggagcctgacgtaaggcctctaggtcgcgcggtctt

SEQ ID NO: 154593 - DNA, 827 bp, Zea Mays
cacgagtggggtagggggtcacggaggtggagtcaatttggtcggtggacgctcgggatggccggtccacggcgggtggcgggctctgtggcggtgagatcgccgacgaggccaacgggtgtaataggcgaggggaaaaaggtgtgtcgtgctcgtggtgaagcggcggagctcaagagctacactaatttgactagaacccaacagagagaggagagcggagctcaccggagatgggagggatgacggcgtcgagctcgattgggtccgagggaggaagatggagtggctaaggcctggtgcggtgaagtaaggggcttggggcggtccttttataggcggccagggagggggaggaaggggaggtggcaagcaccggcgacgcttgtcgcggcggcgatgatggcgcacagtggtggcgatgggatggctcgggcagacggggtgacaggatggctcggccaggtgcaaggcgccaaaccttgttggcgagcgcgttaatagcgaggcgacggggcgggtggtggccggcggcgatcgcgccgatagcttgatcacgggcacgagggaggggctgacaagcggggtcgggctgtcaagtgggtgcaggcacgcgggaggtgggccgagtgggccacaagggagagcgtgggcgcgcggaagagagaggggggacttgggccggaaaccggcctagccgggggggaagagaaatttccttttctttttttattttcctatttccaaatctattttactttcttctttgctataatctcctttttcctttaaacaaatatttatctatatttcttgggtgtcaaaat

SEQ ID NO: 154594 - DNA, 569 bp, Zea Mays
tagaaaacggttcttcaacacatagtaatcttcccaagttgctaattccactggaacaccagaccagcgaataagaacctgtggaacagcttgattgcccttgcgcaccagacgtcgatctagaatttcttcaggaacaatgccagtccttgagaggtccaccaatggaggcaaataagtaaagactggagtatacgatggatgataaggttttagttgtgaaacgtgaaacaccggatgaacttgagcattgtctggaagatccaatttgtaagctgccgcaccaatcttagccaacactctgaaaggaccaaaaaacttgaaagccaactttggagaaggacggtttaccacagtcttttgagcatatggctgaagcttgagcagcaccatctccccaacctgaaactctcttaccgtccttccccgatcagccatttgtttcatccaattttgagctcgagcgagttgttctctaagatgagttgagaaagcaaccctatcagccagccaatccgttactgacccctcctccggaacaccagattgaggtaacgccaacattggag

SEQ ID NO: 154595 - DNA, 501 bp, Zea Mays
cgaggattatgagcctcctttcttcaagtgttgtgctgataatgaggccataagtatatggaacaagaaccccttgaagatggaagtgggcaatgtcaatagcaagcaccttgtgttagctttgaaggtaaagggaaatgaggcagaaggtcctttcaccttttatatatttgaattaaagatgattcttctcacagtttgttctcctgtgaaggtcaagagtgtccttgatccatgcgatgatgacaatgttaacagcgaaggtgatggcatgactgtggataatgagtctgatcatgatgatgacttttctgacactgaggtgaagaacaaacagatcgatactatgatatattactagtgcatggcattaatttagcaatctattgtgttcctaacataaacatacttaactctatacctatataacttatgctctttttacctgaagtgttgcttcacattatctttgattgtgttaggttcatccaccaaaggcgg

SEQ ID NO: 154596 - DNA, 493 bp, Zea Mays
atcagaaatactactgatattatcgaaattacaattcacttgagtaatacataaattatccatgaagttatatcccaaaacctgatctagctcttcaaatgcatatatggttcaacatgagcattgcacacctaatctgagtcctcacatgtaaaagatttgtcatgggactcgcaggccgggagcacactgccaaacaacttctacattgatttgtgaagaagaaaaaagaaaccaagactgagatatgaagatcttaatcctttttctctgacattacactcatcagtgatgagtcaccaccatattgaatgaaattgccaccatgaagcgctttctagaaaatgattttgattttatttatgttggcacttgtagtggatcagaaccatatattctttgctgtagctgtatttaatgctctttcatagagggttaacaactattcaatcgcctagtcggtagggatcccctgtatcacttcctggattag

SEQ ID NO: 154597 - DNA, 378 bp, Zea Mays
ggcaacaggagcaccaacatttgatactttgcctctcaagatcatgtctagccggctcaccaaatccttagcaggaattctcctattggtaacccgagtggagtcagtaacaccactgtacaagtaagccgggtatgctctatcctttaggggttggatgttcttaaaaacaaaatcagcaaccacagcttcggcggtcagacctctttcattcagcagacatacttcagcaagcagaaccttagcctctgttacttccagggcagtgagagactcaatccaacttggagtgcgcacatctggctgtcttcccgatcggggagggagggacttgccgtggttttccacaataaaccattcaagatgccaccccttaat

SEQ ID NO: 154598 - DNA, 482 bp, Zea Mays
aagacagtctcgagatggcggaaggcgaagaagccaacactcgtgaaacataccggactctgaagatggactatgctaagaaattaaagaagctcgcccctgccaagaagatccgaaagcggttcaagagccaaggatgccagattggccgaaaagaggaagccccaccaacactgcctccctaagggatagaaaccaatttcgacgtggaggaggtgtccctggctagccttgacgatcttcttagggagtttggggacaccctagaaaacgctcgcgcgtagtgtgatctatggcaattgtatgcttgtaatgaacttgagtgctgaataaaataatgtgcttaaaaaatatggcatatgcatagtagtaatcctttctcccctctcgtagatggcctcggataaaaccacgcctaccgcctcagggattggagcaaggtctcccctaggtgctgaaggagaagtcggtggagaagggag

SEQ ID NO: 154599 - DNA, 283 bp, Zea Mays
gggagttcggttttgtggatagggtcggttgtagagataggatctattttgtggatatggtcggttttagagataggatttgttttgtggatatggtcggttttagagatagaatctattttgtggatagggtcggttttagagataggatctgttttgtggatagggtcggttttagagatatgatctattttgtagatatggtcggttttgtaggatggaagcggatggacagaatcaaactgaaccaaaacaaatctaaaccagcaaccaaactcaacct

SEQ ID NO: 154600 - DNA, 414 bp, Zea Mays
atccgccctccatccgctcctacgagcccggcgacacaagggtggcggcggtggcacaagaaatggaagcgcgggaagcttttctggctgacgtccgcttccgtctcgagcaggctcaggcggtccaaaagctgcagtacgataagcaccaccgggaggtcacatatgaggttggggactgggcattccttcgccttcgccaatgtgtggcggcgtccctaccgcgaaccatcactgggaagctcaagcctcgctacgtgggaccctaccgcgtcaccgagctcatcaatgacgtggctgttcggctagaattgccacccggcgcgcgcctgcacgacgtgtttcatgtcggcgtgctccggaagtacgtgggctcaccacccaccacaccgccgcctctaccgcctctgctca

SEQ ID NO: 154601 - DNA, 599 bp, Zea Mays
gggagcgcaggttagatttcggctaagtccagggggttttgtgcaaggtcagtgactcatgcaaatagtagaccgaggactgttctgtgagaggaaaaggagagaaaacccagggtctttagcgcaaacctgtaattcttttcctttttgaatttatttttctttaaatattgcagagaacttaataaatgcataacttgaagaataatcatccaaaatttgtcaaaccaattttgctagactttgtgaaatataaactatcaggcaaaaatcataaaccccccagttcctgtaatgttttacagagttttgaattaaataagaaaactgcacaaagtccattaataaagggaaaatggaaatattgttagaccagggttgaaaaaaatagtggagaccctaacctagtggttatcctgtttaaaattaatgaacaccccagtatacaaggttaaggaggatttattcactaaagcttgtttatgctcaaacttaggaaaattaagaaaaggaattaaaaatgaaaaccagagggcaaccatatttttcctagcatgcgtaagttatgtagttcacaagaaaaatccattaaaccatag

SEQ ID NO: 154602 - DNA, 1275 bp, Zea Mays
gaaacatcattgtaagtatatattctgagacttgtgtatcttaatagtttaaccggatgtttgaggcaactttggaggttctttcaatagctttgctattgttcaaagtgctatgtgtagattgtttagtgtaatgtcttctgctcatgtgatctagacttactagtactctagaatggcatgatgctactagcttgtcaggaaatagatgagccttttggatggactaaagttactttagtccatgttttggatgccaaatagaaggcctaaacataaactgatcatggtctaacaaaaactagtagaggattagtactcattaaaaaaataattagtccatgcttagcctattattcagtgacggactaactttggtccggtgatctgaacaggctcttacagtacttccatgtccaacccccaaatcaaacgctacctaagatatcaagcacactgtaaattctctctgtcatcttttacttcaaggaatggtatgtatcatttaacacttgcagtaaataggtacgtaatatgtttattttgggcagcaggttcgcggtgtattgatttcctttcatgttactggatatgtgtgaagcattgccttttgtgggtgatgggattactgcagtttgtatgtttcgatttgtacacttgtttttttttttctgcagatttatggtgatggatatataggcatgtagcagatggattgccatttgccaagcattcggatcatccgatgagtagtgtgggctggcttgctgacgaacatcaataagacaggatctctactcatgacacctgcacttgtttttgatgttttccccatagttccctttgatgctgaactttggcgtatgctagtgtgcagtctagctgtctaggtcttgcgcgttggtagatttctgtagctactgagatagcctgatgtgtattacagttgagaacacatatcataaatccctaagtctttcactttattttgtagcaaaccagggtttgtgtctacgctggctcactagcatgtagcacgagatgttcagtatttacgcaggtggcagatcaagatatatgccacggcattcacaattgttatggaccaggtgcgtactgcatactgtatttggcacaatattgcgttttgcagttggacagttctttactggttggtaggtgtttacagttgcactggactttcatttgcttctattctatgcatttggaaccaaacgcatgagtaaaactttgtaggaaccatttataacgggt

SEQ ID NO: 154603 - DNA, 802 bp, Zea Mays
catcttccctctgattcaggtcattcttcacgtaaaaccattccttcatccaagaacctggccacttcttccgaaacatgggcacagggtaattcgccttagaccgaggcacgaagctgtaacaaccaaaattgttatgatattgttcctttccggttgccttcgtctaatacgacaactcatgaatattgcagaagcatcttgcatctggctccagtccttggctcctcatggcccatataaaaactcccactctaataagagcttcgggggtaatctgatgaaggtatatttcaaacgtcttcaaaacttcgaccaacatcatgtggagcggaaaccgaagcctagctttcatgtagctcctgaagactagcacttcatcaccttctggccggggaacagtgtcttcttctccagccctcactatagacacatcatgaaagtatttgcctttcatcgcttcaatttgaacttgtctgattatggatttcccaaaaacaacatggcttggtctccatggccgatcttcggcattttcattatcactctcaacatcgaagctttcactgtcgcttgaatcaccagattgcccagctaacatttcgttggtgatcttctctacattggtcctttccatggcttcgtagaagccagcgagtgtggggtcagcgcttttcttgtccttagccatttcggtgatggtcacggcaaaaagtcgaagctcacaaacaattgcactcagagaacaggaaaactaaataacaactgcagcatgaaagctagatggcacgaaaaatattcg

SEQ ID NO: 154604 - DNA, 459 bp, Zea Mays
caagtccctgtcgagtaagtctgagaggcggaacgatcgaccaagtacccaccaagcaagtctgcgatacgtagcggccgaccaggtacccaccgagcgagcccaacttctagaccacaaccacgaacatacgtcgaccacagcaccgaacttgagcatatcacgctgtttgatgggacgaagcagccccggtcagaggcgacctcagcaccgaactctccgcggtagctggtatgttagaagcgtcacgacagggtgccataccgaataggcgaatccatccgcacggaaggacgacgtagggcccacgacgacaagagaaggttgtgccatataaatcaagcctcgaagctgaaccacgagacccgccacatatcatccagggacgtcagccacgaacccgcaacagcaacaggtgtgacagacgacaccataccagaagtactatttcgcacgacc

SEQ ID NO: 154605 - DNA, 400 bp, Zea Mays
gtaggggagatagtgatattccttctctagctctgtctgctcttgtcagccttcaagaattgtccataacagattttgatcaggcccttgaggatgtcgttcctgaagatatgctgtcggagccgactgctggtgacatgatggatgtttgctctgaaattccagacgtgggattagaggtatcccgagcagtatctcgcgcatcgtcgactttggagggcagttttcgatgtcaagaagttggtcaagattgctcgactcccgaggtgattgaggatccttcagccttagaggtggctgttgcagaaaacccaacccccgagggtggtgctggcagttacccagcccccgagggtgtcgccggtagtgatccggctctggtgggtaatgcgagctgcaa

SEQ ID NO: 154606 - DNA, 521 bp, Zea Mays
gaccttttcttccactcgggatcacgccagcgatgccgaccagtgatccacggcggcgccatcgccgggattcccgaatccccgatccctgcgccctagctatgatctaaaaacgtaacacgaagcggttgactgcgggatatcgtccagaggcactcaccgagattcaagagcgtcgattcccttccaatcggtgcgcggcggaacaccgataccgacgcccaaatccgaacgcaataccgattgccctttcgctaatttgccacggatgacacgccagcactgaactgaagcccccgagccagaatacgacgatcctaacggctataatggctgtgcagggtgatggcggcacaaccacacggcggaatggcttagcacttctcccacgccaaggtggctagaaatccggagcgaggaaggggtggggagaagaaacggggtatgggccgcggcttatagtcctcaatcgggtgcccaagtcgcaacggcgcccggattttgcgcccgctgaatcctcc

SEQ ID NO: 154607 - DNA, 1082 bp, Zea Mays
actaaaaatatgattttgacccataaaatgaactaattgcaatcatctaaatatgatttacaatcatatgaactatagtatttgaataaacataaacagacaaatatggtacatcttgcctatcccctacaggctgtttccatcttcaaataccagacgaacaccagctgtttgaagttgaggtatgataccagacgaataccagacgaataaacagaaaagaatagatcaatctatacaatcatatgatttacacttgatcaacagaaacaccactgcccggtaaacaccactgcccactgcccagtaaacaccactgcccactgcctagatcaatagaaacaccactgcccagaaacaatcatatgatttacacttgatcaacagaaacaccactgcccaggaattgacccagtaaacagaaaaaggatatgacacattgttttgttctcctttaaacaaattacaacagatttgaactaaaaatatgattttgaaccataaaatgaactaatatgcaatcatccaatcagcaacaatttcttaaactataaacagaaactgtaaacataggtataaatgggaggatttacaagaaactgtaaacatgaccctttagaaactgtaaacataaacagatactgttggcagaccaaccatttgtgattccatatccagatccagtttctcatgcatatccagtttgtgacagaaacaaaattgcctcagaaatcatgagagtatgcagaccaacaaacataaacagaaactcatgagagtaatttgcctcagaaattattatcaattacaatcacttgatcaatccatgagagtaaatacaataaattgcctcagatttgtatgaataaacacctcatttgaccatacatgggaaaacatagggcagatggagaaatcagattaaaggatagagtatgtttggttgcctgacccaaaataaaaccaagagcaaggaaaacaaagcagtaagtcaacctcccatgaatggtcatcagtcaaatatatttcatcacaggcaaaattcacaaaatgagcaaggaaaacaaagcaacaagtcatac

SEQ ID NO: 154608 - DNA, 481 bp, Zea Mays
gggtaaaggtgatcgggtgttctgaccaccgataggggcgggggcactggtggttgccaccagtatctgtcggtcgttgagcttctgttgccttttgttctcttgcgacccgtgtcctccgaagatgacgttgacctctccgtcgacgcgcgggaatgctccacctcctcccccttcttgcggctgaggtcgtcgaggttcaccgggccctcctcgcggtgggggaggtggtagaggttggaagggccgaccattcctgacggaatgcttgaagtctctgcagttcaataaggtgtggcacatatccttgtgatacgggcactgggcgtcgaggatgtcgtccagtgtttgctcgcctctgcggggtgcacctcgggcacgagagatgggtggtccagcggcatggacctcttcacgaggcctcttctcccaacgcttgtcggtttgctggtttgcgtcacgccacggtgcagtcggagca

SEQ ID NO: 154609 - DNA, 820 bp, Zea Mays
tgattgaagagttaaagacgctatgggaaggagtgtaagcctatgactgcttcaagaagtagaaattcaatctccgggttgcgtatctgttctcggttcatgattttatggcctatggtattttctctcgatggagcgtgcatggtagattgacatgtccttattgcggtcaagatatagattgtttttgtcttagtgctggtggcaggatatgttacttttattgccatagatgttttctacccttgaatcaccccttcagaaggtagagaaaggagtttaggaagggtaccatcgtcatgaagggaccgtccaagcgatgtagtgggatagaaattacagaagagcatagaaaacttgtcctagacgagagtgggaaaaggtatcaaggttttggtgaggagcataactggactcacatatgtggcttgtgggagcttccttatgctaagtcattgattcagatgcacaacatcgacgccatgcatcaagagagtaactttttctaagccctcatatatacatgcatggatttctcggataaaacgaaagacaatgacaaggcacgcatggacttagccgtgatatgtgattgtccaacccatgtgcttagagaaaacataggcaaaccaaaagctgactattgtctgaaacctaagcaatgggaagaagtgatgaagtggatgaaggatctaaaattccttgatggttgtggtgctggttttagaagatctatgaatttgaagacaatgaagatgaagggactgaagagccctgacttccacataattatggaaaggctcgtatctgtaatgtttcg

SEQ ID NO: 154610 - DNA, 373 bp, Zea Mays
acgctatggtggagatgacagtaatacatttgcatcacctgctattagttcctatgctccaaaaggaagcttcccccgaaatcgagcaactgccagtactgctacaagtccattgaagcccaagaaccaaacggtcaaagtgatgcagaatattcacgccactctaaaagaaaattgtaaaattgcaaacaaagtcatgctaggtgagcatctagatgaagtaattagggaagtttagtctatggcggttcgatgtggggcaaaggaaggatcagttgaacacttcatggcaactgaactttttcggaaagttgagaatcagtcctcctttaaggcatttgagatagatgaaggaaggcttcttcggttgaag

SEQ ID NO: 154611 - DNA, 448 bp, Zea Mays
atgggctgtgtacccggaatcagcttaatctcaaaagctgcatcgcgttccagaggaatgcttggaagctctgtcggaaacacgttagcaaagtcacacaccactcggatgtcctgcacccgcaaggcagcctcaccctccaccaccatggagaaaaagattcccgacttcctggaccggtgatccggaagcaattgcgccaacaaggacaacgtaaacttaggggaacttcccaagaataccacctccctacctgacggcgcctgcaataacactgtcttccaaaaacaggatataactgtgcgatactgggataaccaatccatacccaagataacatcgaatgcccccaaggaaatcacaaccagattggccgaaaagacctcatcagcaagaatgacggaacacccctgacaaactgaacagctactaatggagccattagcaa

SEQ ID NO: 154612 - DNA, 382 bp, Zea Mays
cgtaggcacgcacaaggcaccctggtccattgtgggcggcatggtcgccatggagggtcgcctctacataccagccgactcaccccttctgcaggagatcgtggccatggtacacaatgatggccacgagggcgtccaccgcaccctgcatcgacatcagcgtgacttccatttttcggccatgcgtcgtattgtgtaggagttcgtccaggcctgcagcacgtgctagagatacaagtcagaccacctacgtccagccggcctcctctagcctctcctgattccctccagcgtgtggtcagacatcggcatcgacttcatcgaggcgctgcctcgggtgaatggcaaaacgatcatcctcaccgtcgtcgaccgcttcagc

SEQ ID NO: 154613 - DNA, 370 bp, Zea Mays
gtggacggctagccacgacgaggcgtgtcacggcagcgcggctgactgaattgggggaaattgggaattcgaggggctgtggtgggtaatcgggggcgaggagcggtgctctgggttcgtaacaagctagcggagcatgctgaactctcaatttatagcggtcactcgagtgtttcgcgaattttggatggaatgagctagcggtcggaggggaggtgagtcactggagcacaactaccgtggcgctcaacaaggtaaagaccctgacggtaaacgggctatccactgcgacgtcttgcgacacgatgagagcacttagagggggggggggtgaataggtgatcctgtaaaaacttgaaacttaatacac

SEQ ID NO: 154614 - DNA, 1063 bp, Zea Mays
caagtagcagcgaggtagggtcaggtggctcatgaagcatgcacacaactggtggtgtggtggcttccctgacgctgccgcacggacgagccaccatgaaagaaaggaccgaaatccctgatcaagtgggtgccatcagaagtaaagagctcgaatagatgggcacacgtggcctagagaagatcaccatggcagccccgccggaggagacctatgttgtagttgtagtcgacgtggaagatataaggctccccaaaatcgacttcggtccataggatctgcctctgcaatggtgcaagatccattccttcctcctcgaggtccgagaattggttgttgcgtcttatctgctcgaaatctaatccgttcaggagcgcctgcacatggagttgatagtgccctccatgagcagccacccctctatgggtgcaaaagagtggggttgtgctagaggcatactccaagcagacgttggagctttgaaggcatgccactcagtcggtagggaatccgcgcgtgcaaaaatagccactaccctgctcgtgatagttgcaccgttggtaaatgaaaaggatcagtgatgtggttggtagaggcaatgacaaaggcaccatgacctccaatgttggtgtaggggcgatcgcctgtgttggtgatgctagtgttggcgaagttggtgatgagattgccgaagttgttgcatctatggccttttgctggtggtgtcacaattgttggggtaggggtgtcgggtcggagatactagtaggccgtacacgacgccgagcacatgttccacgcctgcgatatgtcgttcatgagcgtcaaggtgcttgttgagggtgacgatctgggccaagatgaggtcgagcttattagagatggtcgtaggatcggtgtcaagaccggtgatggatggcgatgtcatggtagtgggctttgataccaattaatatggattggcagaaggagagccctcatcctagtaaggttcttttttcttgcttgcttacgatcgacactggcttctctcttttatagagatgactgatttgacttctaa

SEQ ID NO: 154615 - DNA, 1024 bp, Zea Mays
gggggccaagacctgcgctaatcttcggtttacacctaattctacccctgaggagtatttcccctcactcaatttctgaattggagctctactgcactctgtccacggtgacagtgcggagaatctaaggaacagcgtgttcccggcgacccatggcagtctagttcaattggacgattcggtgagcatcaagaacatgggagggtgttggaacaatcgcacagagggcgagatcggacctgagttgagctggccgcgacgagggcgttcttgcggtggtataacaggtttggggaaagtaagaaatttgtggtctctggtgagcgatttgaagcaatagctggtgcgttggcttctggattatatggcgcaatagccccagccatcaatttatagggggcttaggcggtggcgcgcaatttggccgagcagtgctggtggccggagatagagaagaaccttggcgcagtggattcgtgtctaccgtcgtggcgacttcaccggcaaccaacggggagctagagtgagtcacgatgatgcggtagacaggtagagacacgcggcggatggcggtgagggcttaacggtggtgagaaccttatccgaaggatcagtgcgcaagggggaggcacggcggctagccggagtggcgtctagcgcacgcagtgatgatcttttaccccgcgatgctatccatcaactcccggcacgaatccagtcgtcggtgacacgaatcgcggcgaaggatcggacgtcggcggtgagggctccctgcactggcgtcttgatcctcacaaagcactgtaccatggcgattttcagtcagatgaacctgacagccaatctttgagctaaattttctctcaaactcatatagcaactaatccgggactctgcagcaaagttgttcctctataatagctctacaactttgttatagcaaccctaggtagattctcactggatcatagtcgaaatggctctcaaacttggatctaggtcactgtcagtctgaaattcagac

SEQ ID NO: 154616 - DNA, 609 bp, Zea Mays
cgaacggctacgctttaattgatcgaagcggtatccacgccctaatcctatccctccgtgaagaatcggacggcgcaaaacccaaccgaggaggtattctccagattagatcacagccgtgcctacgtgattcgacggtgcagaaccccctccctaagtctaacaggaacgcgcggtggcgcacgtgaatccacgacggatgccctcgccggagactgccaatccggcgcaccagagacctattcgctaccccgattggtgctacgaggagagtattacttggtgagtcacacgggtaaagacttaccgaggtttggagcggtggcaagtccgagcgacgaggaacagcgggttcgagtccaagatccactccgacgagaaatccagtcgacgaccgaggctttcccggccccaatccgccatggacacgttccacgagtccaagcgaatcaccccgacctcccgccgacaccggaacggtggcgaagggacgagtcagcggcggcggtgagctgtctccgcgtggcggtgcactgagaacctaatgacgacgcggttgcggctaggttgggcagagagtggtcatgacaccgagcgctcgcatttata

SEQ ID NO: 154617 - DNA, 797 bp, Zea Mays
gtaattttcattgtatataattggagttaggctgctctgatgttgttgcaccgttgtgtctgaactttaggtgtcgttataaccaccaataactcgaccgtgttttgatagtttcatagcccaaatttgggaattccctttaagcaaaactttagttcttctcagtaccttttaaatgggtatttacttgtaattgtctgttaaatagattgggagaggtggttgtccggttatgagtcgaatctccaatgtgcactatctcgggctgagtttagctgtaggtcatgcagagttgagggctataaagataaatttgggtgcaactttattgcaaaagtcatggacaattttcaaacttttccaacgcgtgttcgttgtagttttaagttgagtataggaggagttataggtttttgaattttagttgtccattgtttccatcctatcagttttgcaacaaaagagttacattatttatcggtttgaaaaccaatttcgagacactcattataataaaagttttacagaatgttataatcttttcaatgggtttatatttgcaaaattttgttaagctgcagggagttatgatattttgaatttatgtgtcatgtttcgtcagtttctggtggcagattatgtatgtcgccttacaagtcaaattaaaaatggtagatgaaaaaaaattgtttatcctttgaatacgaaagttgtagatcatgaagtttagatgattttacaatatttcattgttaccattgcttttatagtgagaggtagaaaaaaatgaacatttg

SEQ ID NO: 154618 - DNA, 517 bp, Zea Mays
cgggaattcctcgccggtgctcgcgcccaatctctctccgcaccctgtcgtggcctgcttccgccatagttccgcgtgctcggtatgccacattactgtgttcaccattgtgctctcgctgtttaggttgtctcggtcggggagattagtcgccagtgggccattttggccgtcgccggcaagctcgccgccgcggaggcactgtgcgccgccgcgttctgcctggtcgccgctctgctggccggggatgatgagtcgagggccgtcagatccgaatcgtgaggatgggattggatccagtaggggcgggtgtctggccgttagattaggatcgtgtggatcagggcgcataccagtagggtgatgtggccttctgatctgaaccgtagatccggaatcctagggctctgaatgagtactggttcgggtcttattataatctaatcgcaaccgtggcatacagatccaacggctgatgcgtatccgtaccccttcggccacgctagtttgctaaaga

SEQ ID NO: 154619 - DNA, 475 bp, Zea Mays
agctacttgtacatcatttcggctagcctcagttttgctttgagggtgccgtcagacttgagtaaatagctatcagttcccttgccttcagtaacgcttagattcagtcctcagtaaatagttgttttactctttggttgcaaatttaaaacttatgatgggagcggccgatggcggaaactgctgatggcagtggccgacggcggacagctggtgatggaggcgggcaggtggaatgagttgggttggacgggacaaaaaatggtgcgacgggccgatgtgctacagatggcctgacgacgaatattttggggcaaccaaaatgttccctgtttgtagctatatatgagggagatttgagggctatcaaaaagatgggagaggtttaagggatctgttggaggcttcatttttcattttttcctcaaatttttgtttaaggatgattttaaggaaccttttggagatgctttta

SEQ ID NO: 154620 - DNA, 702 bp, Zea Mays
gtacaaattctcccctcaagttgtcatcaataaccaaagttcagccgttatggtgaattgttttaattcaccatcttataagtatataaaattcaaaagaaaaatgagtgttcatgttagattgagaaggaaatcaaatgttggagagtattccaaactgcaagcccacaaggaggaacgagaagcctgacaaactccaccacggtcgattcatatccgagcaccacaccgcaactccctcatagcaactttggtgatcatgccagaggaacctatcggcgagctcagttcacgctgagtatcacgataaacataacaaaacaacacggtgagaacaaaaacatgtcgatgcaaagagcaaaaagaaacacgcaaaaggaattgaagagatcgtcacgaagcggaaataagaacagcaggttatgagaccaggggcaggggaacgatagagttggttccattggagcaaatcgtctagccgtcgccacataaattgtttttggaagaggaagaaacggaagtgccctagaggacaccggcggcggtggaggatcggagggagaggacgactgcacgagcggcctccttttaaaagcgcgagcgacggatcacggttgggtggaccttgcgtttcggctgcaactcaacagcctgctcgtttcagttgaattattgggtcgttatgcatcagcccaaagaaag

SEQ ID NO: 154621 - DNA, 623 bp, Zea Mays
gtggtaacacatgtaaagtggactggaactctcactgccccaacgaccaaacaacccctaccaactattgagtacactgcatctaacacccattggccacctgaacagacaattccttggtcataggggtcaatcctgtaaggtgccgggccacccgtgaactaagaaatgaatgagaactgcccgaatccaacaataccagcagatcaattccttgaataccacccacaaactttactgttttaggtgctgagatatcagtcacagcagcttgagacagacacaactggagttctgcagatgcttcagatatatcatcttcctgttggtcagatagatccagcaactgccacatttcatccaccacatgtaattagactgtgtcagcacaacgatgtcccttggcatattgcaaaccgcatttatagcaaaggcctttagctttcctatatgcaaacaacgaagccagcttatcttgagtggtcttttcagcagtagcaggagagtcagcaaccttggcattcggcaactgacgagaaggcaaaggacctttggagaaggactgagaataagatgacatctccatcctacgaccgtctttcttcttgtcactgacttcttcc

SEQ ID NO: 154622 - DNA, 450 bp, Zea Mays
gagagccacacatggaatttgtaagatagtgaggtcgatagtaatttgtgttgttcgctttcatgtaatcgttgtgcactaacattttgttgaacaatttatataccgttgcaacacacggatattgtgctatctatgtttatactattttttactctcgtggcaacgcacgggcacggacctagtaaatgaaatacgaaaaaaggtacgaagaaaacaaaggccatggtttgttgacgccaaggcaagatttgctagtgtgaaaaaaccagctttttttaatatgtcaattcatgatgatcaactccatacgcttctaggtcagcctcccttgtctgcttgtttgttctctagccctttatgttaaggtctagccacctagctgttctggttatcaaaagctgcagatacatgagacgcatggccgccacgctcccctactcgatattg

SEQ ID NO: 154623 - DNA, 690 bp, Zea Mays
gtggcgacggcctagcacagcacaagcaattcttccttattccagagcaagacttaaaacctctagccttctctctgagcctggcactccttctaacttcagtgtcaaccaagattgaacgcttctttctgttgacaacatctgcaggcgaaggagactgagattccttatgcaattcctgactaggagggagcaggcatttggagggaatcttgatggggacagtttccatgttgggctcaacgaaagaagaaagagctctagacaacaaaaatttcttggcccactcaaaagaatccggccttagaagcaggcccataaagaaagcagcccacatttttggaataggaataaattctgagttggtggggaacatttcagcacaagatgagaagcgtttcctggccaggtaatcttcataagtaggatcatgaatgggatgctccaagtgttgcatgcagcccacattgatgttttcttccacattcaaattctcctcccctgattgttgtttccctccaaaatcaaatccgctgggcggaaggctggtaaagcaagcacaacatcttcattttctggggcttcctcctgagggaattgaacctcttgagggataatgatgtcattgaaaagacccacagattcatcagagggtaggtcctcgagaccagaaagttgataactgaactg

SEQ ID NO: 154624 - DNA, 645 bp, Zea Mays
aaatattcgtaggttaagcagggctagagtgtattcccgggtattcccaggaataccctataattttggtgcaccattaatcattaatgtatgctatgtatacagaacatgtaaactatttaagtgaaaaaaatggacaataaattaacattgggccctggtccatagccgccctagcctattagccccaatcaaccatcctagtttccacctccactttgacccacggtcagtcgccagcctaaggcccacctgacttgcttgaccatgttccctttccatcttcgagacctagacccaacgccagtcatcaccaccatcgccaccaggacgcaattcgcaagcggcaatctccaacttgctgaggtcaagcgtccaagcggtgtgcggccgatcagtcgtgcatggcgatgagtggtgcacgatggcgaggcggctaccgagaggcacaacagacaacatcactataacactgagctggcatggctatcgctagaagctggcacgacaacacaaggatcgggcgagcgttaatgcttaggtcgagccacatgggggcgcagggtttcgtctcgaagaccgcgtgggtgagcgcttatgccgagcgacactgactcaacccttctttgccaaggttgtccactt

SEQ ID NO: 154625 - DNA, 676 bp, Zea Mays
ggaaactgtcgctttatgcatttttggcgagccaggcttctgctttctttttgcatccacacagcgtggcttcggcgtccccaagacaaccaatcatgtgtaacctgcatcgtggagcctagttatactggtatacgacaaccaatcatcactaaaattgttcgcgctagcttttcgaaactttttttaacgagttacctataagagtttcccttgttatcaataatggttatggaagaataaacctttgttttggtgtattttggtgtgtcattacgagtggttatagattattccactctttttagtagaggtattgtttcttctcaatctaggaaaggccaaagttatcattatagttttagttgttttttactggcaagtgtatagcatacacaggaaaattaaatgttggtagaaagatgttggagcaataatgtattaggtggaaattagaactgtgttgttggtagctaaaattgctcgggcgaaggatgcagcgataggaacctatagaatagattatgttgacatagttataccacgatatatcaatataattcagacacccaccatggaagggttttttgttcaggcgtattttattctattgtcactttttctcttcccctttttgcatgaagattggtatgtttgaatgtagagctaataatag

SEQ ID NO: 154626 - DNA, 690 bp, Zea Mays
agtcaatatagcaaagttatagagccattgtagaggaacaactttgctataggtgtttgggcttggtaccatatgaaatttggagaaatctggacctgaaaatggactgtcaaacgctctgaagatccttcgccatggtacagtgatctgaaatggatcaggccgccagctcagttttttctcgccgctgacgatctcttcaccgcgattcgtgccgctgccgtatcgattcgtgctcgggttgatcggataacgctcgaagtcacgccgccgtggataagctccggccagtaaattatttcggccaccgtaccgagctcgccgcggtggattaggatgaattcaccggtgaccgccgccttccggccttgtgccgtgtgtctaggcatctccaccgcatcgccgtgacctgctttaactctccgttgatcaccggagtgaatgccacggtataggacaccaatccactgcgctagtgaaactccccctcctctgaccgtcgcgcgtcatcgtttcaattcccggccaccgctctcgctcagtataaattgaagccaccgtgagatccgtaaggtagtcaagcatctagccaccaagaatcagcctcaattgttcaccagggagcgtgaattttgaacttccccaaaatctgctcaagaacatcgtaggagagacctcactgcggtcagc

SEQ ID NO: 154627 - DNA, 580 bp, Zea Mays
gcaagacgacagagcaagacatggtagaaaaagcaaaatctcttgtccctgaagccttagttgaagatattgattgcattgttcgacatgcttcggataaaaaaaatatctggagaataaatcttggaggccaaacactatgcccaaggactgaaatagccgaagggggccttagtgttcaatggtactaacgaagatgatttcctgtactgtctcccggataacaaagaaatatctgtttaccaggagatagctaagagtatgggatttcctaagcttgaagaaggcctttcggtcttgtcgaaggatgatcttgctgatagcctcgcgtacaacagtataaaggtatagaggtcaactttgaagcttgaaaatgaagtattttattgccatgctcaactctttcttcttctttacagggcttaattcttagtaatgccttgagggctcagaagagcgccgaagacgaaggctgtacaatggctcttagcaaccttcgagcagaggtgattgaactaagaaacgaaggtctagagaaagacggaattttgatttcattggtgaacaaagtaaaggaaga

SEQ ID NO: 154628 - DNA, 327 bp, Zea Mays
ccagggcacacgatgtagttacaatctgcaacgtctatcagctgccgtatgcccaggacgatgtacccaacgtcactgtacaagatcttctgtcggggcgtgttactcgggaagggaatttcagtgcggtggcatggagatccaccattccgccctactacacctacttggtacgctgcacgtcgcagacggccgggtgttctacggtcaagaagaaacggccccgggatgcaagggagtgaccgtgcgagtgttagtgcacgctcaccgtatgaactcaaatagcgtacgagtgtaatgatcaggctacttatttgcccacaaaaa

SEQ ID NO: 154629 - DNA, 1216 bp, Zea Mays
aacccacctgcgcagcccgtcactaaccacccgcgcgcaagtgtcacctgtcacttacacatgggcccgctcggccagtgcatcacccgcgtgcgttcgctgcttgtgtcgctggactgcgggacccactgtcaggcccgtcttcaacaactctgccgaactccgcgggcgccgttgcgggttgtgcggcggatggcgttgacagtgctccaccccgcgcactcataaaagggtccggccgcaatctcctcttctcctcgagttcacgcgcgccgacaaccaccatctcctcacctagacatcacctcggggcggcgaggacacctgcaatcggcaccaccacgacatactccgccccgtagccttaccgtcgtctgagaggggacgattgacacctaggaagccacacagaagaactccggcgcgtcgggcgcctcggcttggccaaattccgcggcggcaacctcaccagaccagtggagttccaacccgtcgtcgccgtacctgtccgcgttgcctggtgtggtatgtaagcattcctcgcgttcgtctagtgtggggcatcgtgtagcatggagtagattgaactatagggcatcaagggccggaatcgtgatctccggcgatccccgccgccgtgcgtgggggctgtttgcgcggctcggggtgggagaagggcgaagctggcgcagccgttggatgtggatcggacggtcccgattagtagccgggagtacccttacgcgtggaccgtagatctgcaatcctatggatacggtgcgatctcggttattttggatccaaaccgtagatatacgatccagcggctattgttgaataccggttcagagttataaccttctaatctgggccacccattgtggatcggacggccgagatctaaccataccccttggcgggtactttttgttaaagagcccctggaaaaataacaaatcaacccgccatcctatctgactgtgcactgggtctcgtacctcttgcgcagggacccctgagttttctggaattcgaggcctagtccaggggatattaaaaaccgagaaaatgattatagaatttagtttttaatacaaaaacaattgttagaacttggaaaaattcatatctaatccatttttagtccaaattgagccattcaaatttctaaaattttgtaataatattctctaccatttagtgtctctgttttgac

SEQ ID NO: 154630 - DNA, 379 bp, Zea Mays
atcagtggggtgttacaaccggctccgtggggcagaggaggaagaagtttcagtggaggaaggtttggcaatcaacctagaaagttgtactgccttgtttgtggcgacgacaagggcgacacaacaagaacatgccaggtcacaattcagaagcagaaggaaattgctgaagatgaggcgcggcagagtcagctgaagcaagtcctccacactacttcatgttattccccatacatcctagaatacataggcaatcaacaacctacaacttctgttgcttcagcaagccattccccagcttcctggccccagttgccaccaccaccaccaccaccaccactgatccacaatcaacagccagaagggcgccatcatactc

SEQ ID NO: 154631 - DNA, 816 bp, Zea Mays
caaaaacacaccagccctagctcgggcttaggaacagctcgatacctctgagtactccctcctgaagtacccgattcggagggtttgccaaggtaggggtggtggcactggtgttgtgactttcccctcttgggggctggacccctagtgttgcccctcctcgcgtcctggccatgaggctgataaacacccaaagacttctgagactccatggtgtactgatgttgcatctccacacccaatgcctgctccaccgtagtacgaaaatccaccaacggaaaggcgcccagagcatgcctgatagaaggtttcaggccctaacagagctggctcgccttctccaactcattgtaagccacatgaggaacaaagcggaccattttgttaaagcccacttcatactctgtgacagacttcttctcatgcttgtaagattgcaaatcaatcttcattttctctaggaaggtgaccaggtagaacgtcctctcaaactgcctgatgaaaacatcctaggacaggactcctggtgaggaagagtgagccgcctgcatgcctctccaccaaatttgagcctcccccttcaacagctgtgtgccaaaacgaacccgatctccatacacaatctcgaaaacatccatcttatcctccacaacagtcagccaatccgctgcctcaaccggagtaccactgccatcaaaggtgaccaacttcatgcccatccattgcatcagagagagaccactgacaggaaggggcacctcagccccaccacctggagcagcacccgcagggacagcgcccccgggcactcctcca

SEQ ID NO: 154632 - DNA, 665 bp, Zea Mays
aaaagtaagtagagaagacctttggattgattactcaaaatcaattcaaagattgggggcttgtgggggatggatatcccctgggtccacacgagcatgaaaacacgtccagagccacccagcaggcaccctcctggggcgtcttgtagtgggtcggataaaggaaaccagcagtggcaagccagttcttatacgaaagaggcccacgtccgagttagttgctgtaggagcgtgggtatgtctggcagggtctgttgcgctcacccgacagactaaaccaacagtgataattcgggcgcgggagcgcaatatttccccacaataaatgaagactattcgctacaaatcaggagataagcaaagagattgcgatcgacatctgtgtggggggctatccctggtcgtgtatatacggccaggaggcacccctcccattttcatctcaccctcagcccaccattctcacagccacagcttgtgaactcacctcaatacagaaaaccaccacaggacatagggtattacacctctctagcggcccgaacctgctcaagcttgtgtgtttctctcattgtgctaccgcatgaaccatcgagtcacaatcaacgatgctgtcctacccaaaagcactacgagggtaaccccagggtgtgcggtcgggcaac

SEQ ID NO: 154633 - DNA, 994 bp, Zea Mays
gctccgtctgcaagcacgagctgcacggcacgatgtgatcgcggcctgctgcttgccactgcgcccaatagtctcgtcctcacgcttctgggcttgtggttaaaggtcgcagggagggcgcatttacttagcgcttattaatcactctgccgtctccatctctagctctctgcacggttaaagaaacaaatgtcaaatagtgcttcaagtttcattcatgaaaatacagcgagtatactgctacaccatatagtagatccacacaaggagtcgtgagcagcggccatagcaagacctccaaacaaaaaaaaaagaaattctaaacaaaaaccggaaacattccgaaaccagaggaatatttgcgcccacaaaaataatactactccaaccgccatgattagccctgacgatgacagcttcggaccctttcttccccaaccttcccaaaccaataaactaatctcccctcactgatcgcgctatcccccacttatatacgtacccaccacgccaccctccccatcaccattcactcatccaccaccaccaacggcgccgcaacccccacgcaatctcaccggaaaaacgcctcctccagttgagctgagcctgagctgcagctgagccgccatgtgcccgcggacccactgagccaaaacccctcgaccccgcccccactgcaggccgttccctttccaagatccgcgctttgatccgtccgccgccgcccgagaccatgccggccacggacctccagggctcctccccgttctcctccttcggccgcaccctcctctccctccgccgcgacgccccggcgtccgcgtccgcggcggctgcgatgccgccgcccggcgtcgacccggagctcgaggagttccacgcccacgtcgccgcgcacctcgcggacctgagcggccccggcgctgctggggaggaggagttcatttccatcgcgtggatccggcgcctgctggaggcgttcctgctctgc

SEQ ID NO: 154634 - DNA, 397 bp, Zea Mays
gcacagtgctattgattgtgcgagcttcggactcctcccgagtatcgcgctgttgctgcgcctggcgatgcccttctggctgttggttatggaccaaggtaggtgccaatggtggtggtggtggcaactaagcccaagaagcatgggaatgactcgccgtagcaacgaacgccgtaggttgctgattgcccacatactcagggatatatggggaatagcatgaagcagtatgcaagacctgcttcgactggttttgctgtggtgcggcttcagtgatctccttctgcttttggatcatgacttggcacgtccttgtcatgtgtcccttatcctccccacagaataagcagaacaatctactgggttgagtaccaaaccttcctctgaagttcctccc

SEQ ID NO: 154635 - DNA, 394 bp, Zea Mays
gctgcgggcaaaaagatgaaggtacttacccaccggccacattatattgaaccggccgtggtgcctgagtttggtggggaagcctcttcagctgctgaatcaagagaaactgctcctccaatgtagagggctgaagaaccggctataatgccgaaggcaccttcggttgagctagttgaaacgaaggttgacaaagataaggctgaagggtcaacaactgaagaggtgacaaagatgccagggactttaagtccttcaacagaagcaacagcgctgagggcacaaaagagttctgccataactccagagaaggaggatggtaaatgtattagatgtactggaaacaaccgactccataagtctcgctcccaaagggaaggttgccgaagctgac

SEQ ID NO: 154636 - DNA, 467 bp, Zea Mays
ttttaattttgaagttaattagggggacatgtacgtgcatttgtaggaagaatgttatgacatgccaaacattttgataattattgctgaagagcggaaaacagtttatcctaatttgtgagcccacacagagaaaaagtaaaacgacacatctttattgttaattaaacatcaaggtacccacttctccatgtgagcgccacacaagatagttaggcataaacccattcttgcaaaggtgatgctccagttcttcgatctttctcacatacttaaaattccgacacttggtacacggacacttcaccacacgaggtccaccggaaaatgcgagatccacgaattgttttgcaaccctaacccattcctttgagtgacctagagtcacgctattgaatccatcatacatcgcccttcttctattgtcatccatttgcaaaactaaataacccaatgtataaaaaagt

SEQ ID NO: 154637 - DNA, 385 bp, Zea Mays
ccgtaattgcgctccgcataatgcctgcgagtgtgccactgccactacagtgcccgcgccactgttttaaatcccctgccgccgctcaaccccgccgtcccccctctccggctctccgcgacgagatcctctgcaccggctctcccccattccatccattctcccaaaacagcactttcgaattccacggccgcgccgctccccacccaccattctgcgattctcccactggaaacggaggggagcgccatggcgtacatgtgcgcggacagcggcaacctcatggccatcgcgcagcaggtgattcagcagcagcagcagcaacagcagcaccagaggcaccaccaccacctgccgccgctcccgctcccgctcccgccgcgcc

SEQ ID NO: 154638 - DNA, 640 bp, Zea Mays
gtggaatctctgcgtgcctgttaaaccctcgtgagtcgctgacatgtgggccggcatgtcaggctacgatttcggtcacctccgtgtggggccgcgctgtctggtgctttccccttcccccgctcgctcggctttgacccaatctcaacagctcacgcctaaaatcgccgataatctcgccggattgttgtgtcaactcggcatcttccaccgtgcctggcgtgtataaatggacccccctcggcggcaatcaccatccccactatccgagcacccaacatcaactcgtggcggaaaaccaaagaaataggtgtcgggccgccgccggcgtgtaggcgatttgacaccccctgggcctcgacgtgttgctcgggcgcttctctcggtcgtgggtgagctagtcgtgacttcacacggaaggatgggatccatgggtagcctggattgctccgtgggaaacaacatcgccgcctagccatagggctgcgtggcctgcttgctcgatgtcgcgaacccagggataaggtctacatctcgattcgccttgctccacggattgtgttggaggtggtttcggggttcggggacttcggctgctggtcggatttctcaccggagatccacaccgcgacgtgaaccg

SEQ ID NO: 154639 - DNA, 561 bp, Zea Mays
aacttttatatttgataaaacatcaccaatagaaagaacagaaaggccaggtaaaggaaaataccttgcactggacagctcacatcacagaaaagaagccaatttataccaactacctgcgaaaggaaactatgaaactctctggatttataaattggtcactataatgttttcactataagatatgtattgttatggtttgagtgttgattggaatgtgggactgctccaaatagaattactctcgcggtcttgcccaagcaaaaaaaccaatataatcgaactacttctcatactattgaattaggaaacgggaatacatatctgaaccaagtaacccaaaattaacgtcagacaactaatgtcctctcagagtctcggagatctactgctatgacccatggttacctctatatgttataataaggggaagaaggcatgacaccatagtttgcatcaagattaagggggcatgcaaaagaagtatagaattaaaaggagatacctatctcgactaaggcaagtgcattcggatttgttggttgttcaattaaagtagag

SEQ ID NO: 154640 - DNA, 926 bp, Zea Mays
caagatcggacgggggagatcagaccagggaggacgaactgctgcgggcagcgcttctcctctccgcggtggtgagatcgtcggagttggggcaggcgcgtgctagggtggctccgtggtcgccgagattgggaagagagggagagaacgccacggcaaactcaatggcggggaagaggccatgaattcgcagacagagggagaagaacggcggggagaaggtgtcgggcggaccggaggagctccggcgaggcattccggccacggggagggggcttaaggcgcgctaaggcctgggctagcttcagcagagatagaggtgacacgggaacctacaccggggagctaggcctggctaaatcggccggccaccgcgcgagcatggcgaaccaccgcggccgagcaccagcgatgccaaaattggccgagcacatagcgaaactagggaaattaagcacgggcaaaggtgtctcaccttggggcggagctcggggaggcttgacgcggtctctggcgagctagatggccggggaagcggtcgcgggtctccggcggcgtctggcggcgagggcagagtgcgagagagggcaaagctgtgcgaaatgaggcgggggagcaagtgcgggcgctagcgaggctctaagaagggagctgggcacgtgggtgggcgtcgtggccgagaaatctggtgacgtgcgcaagtgcgcactcgccgatccacggcgggcgcggggagggcgtatctgacagggagggtccacggcgcagagagagagggaaggggcgctcgaggcaacggctcagcaactggcgaaccgagcccgtgaggcaaagagagaggagaagcgagcgggtgaagaaatcggcgcagacaggtcggccccagtgggcagagagcgagagagagagcgtgcgggagagagagc

SEQ ID NO: 154641 - DNA, 598 bp, Zea Mays
gaatacgctccactgctagggttgagcgtgatggagacgagaccgaagccgttgaaactgttccgatttctgaagcaatgaggcgctctgggctggttccattagaggacacacctgttgccgaagcaacgcaagctgatgttgaagaagctggttccgaagatgagtacagctgcgggatgccaagtaaacctagtcatttggactttggaaagtccaccatctctgaagctgattttcccaaaatggtgaagatgggctatttcaatgaggcaaaaaaggagctggttcgttttggcggagaggagattactccgaagccagaaaagaatgaggtggttgtgttcaaaagcttctttaaagcaggattaagatttcctttgaatgggatgattgctgatgttttgaagaaatttggggtttaccttcatcagctgacccctaatgctatcgttagattaagcgtttacatttgggcccttcgcagtcagggagtggaaccgttcggtgagggtttctgccgagttcatgaattacactaccagactaaggccagaggagatggtcttcatgagaattttggctgttacaactttgc

SEQ ID NO: 154642 - DNA, 886 bp, Zea Mays
gtcctcgacactattcacacttctcacttacactttatattcaggtcctccactctctatttcttctccacaacagaccctggccacgatgcacacgccgtcggtcaccctgttgctcggaccggccatgaccggcggtggctgctcaaattaactaatgggcaagcattactgacccaatatggacctagaacaagctttaattgggttattatgaccccggctaagcctgaccatggtgacggcggatacaagatacaatttcaagcgttccggttgattgagtgtggttaagcgtaaagggttgaaccgataagtatcatgagtatgcactggtgctaaaacacgattaaaaagagcaggagtggacctaggatcggctggccacggagcacgatggattctgctcaccggtgtctgagaagggggaaatttggtgccgcgacgggatctagtgaaattaggaggtgagattggggctacatggtcgcaaagtgctactgattcaccgggtacacttaatttggggagaggaggaggcagtgcgaattttggcttcaatcgtgctcactgatgaagttgtgagtgcctcgccgtggttcatggtgctatttataagcacggtgatccggctaacgatccatagccgcggattgcattgttcacgcatggttaccacgtaaagaagaggcacagtaagggggaagcgaggcatgagcgacaccgcggcggaagtgatcgagccacggcgatcactggtggaatatctccggacacgcatggctaggttcgcgggatggtgccacgtttgaagttatctccccgtgatcgattcccttcaccagatcactcgaacacatccagttctacagtgcctcaaatcttt

SEQ ID NO: 154643 - DNA, 652 bp, Zea Mays
tgctgctggcgccttgctgctgcttggaagcctacggggacggatgacatgttcttggctaggtctggcaaattgtggcttggtagggataacattttggattgggtggggtcgtttgggtgtctaagctagaggtgtgtactttgtcctctcgctcagtggggtggctaattgcttgtattttgtggagttgcccttgctttgtggcttggtggtggcctttggatcgactggtgggatatcatcaacgaaggcagcattgcttttttagcggcgagggtctcccttgctacgtcatcgtcagttgctgagctggctcgagtggtctttttgggaggcatcgagggattagtcttcgttgcacgaatagtgcgtgccaaatgttgggttcagataagtagacccaagcactcggaggccaaagggaagacagtgcacaacaaaacgtttggtggagaactgtagcgtctcgttatgcgtgtcacgtcaagctataagacgagagtatttatagggccatctggggtaggtggaccaaagtacgttcatacccacggttaccaactacatcctcagaatatttctgtataatggggtaattgcaacactgtagccacccctggcgggcacacccataattacacccagtaat

SEQ ID NO: 154644 - DNA, 597 bp, Zea Mays
atttcttgtaactcgagtcaaagtatccaaaatcttgatcgggtactccgtgtaagtcaaatcaccttgaacactgagctcatccatgggtaactgttcctcgggaacacgaagacacttctttagttgagatacgtggaacacgttatgcacatccgatagactatccggtaactcaagttggtatgccatctccccaactcgcataacgatcaagaatggtccaatatagcgaggggacaattttcccttgactttgaatctcctcattccacgaagtggtgacaccttgagatacacataatctccttcttcaaattccagtggtctccttctattatcagcatagctcttttgcctggtttgagccaccctcaaattctctcgaattatacggacttgttcttctgcttcttgaatcaattcaggcccaaagaattgtctttctccagtctgatcccaatacaaaggagtcctgcacttcctcccatataaagcttcaaaaggtgacatcttcagactggcctgatagctattgttatatgagaactcagcataaggtagacttttatcccaacttcctccatgctgaagggc

SEQ ID NO: 154645 - DNA, 371 bp, Zea Mays
ctagctacagcagcctctcctgctcgtcggcgtcgaccgtaggtatcgagtctacgtgccgccgccacggcccggccccgccgcgggtgtcattgtcagaggaatccgtcgccacggacacggaggaggcgaccccgctgccacccaagagcaaaccaaagaagaaggccaggccatgtttccccgttgcaagaatccgaccaagggcctcagtgccaccaccatcgtccgggccacagccgccgtcgtcgccggcgaagttcgcatgcgcactcaaggctcttttctcctcagcgcgcctccaaaggaagcccaaggctccggcaccggcaagaacgacccctccgcccaaaatctcgcagcctccacgc

SEQ ID NO: 154646 - DNA, 364 bp, Zea Mays
cgtcgtgggccgggcaaagggaaacgatggaagcgagccgacccaggagcgtgttgggcccacgcccggactagtcgcgggttgggcatgatcgtgttgaggtcgttcgtttttctcgcgcccgacatcctcaaacaccggagatagctcggagcggaggcgccgggttttccttgggacagtgaaggttgtttgctattaactaggagacaagcaggaaaagtatgatcaacatgtacgcgggaagcaccctacggacgtgtatataaggccaagggggatgccctccattttcatatcattagcatctcacagctcggtagacaccacctgtaataccactcacatacaaagccaacccagg

SEQ ID NO: 154647 - DNA, 409 bp, Zea Mays
ggaaacgatcgctcaaaacggggaattgagtgaaattgaagcctggtatatcggattggcgtgaaatttggcgaatatgttactgaaggtgttgtgaaggtgcctgaaaaatttgggttcaatcggagcatttttggctggtttggacatttcaccgaacacgtggcgtgcggtgaattaggtttttggagatatgaccatttgaggattgaaaccctcccaaagggagctagaaacctgcagggatattaagggacacataggaacacattccaccacatgattcacagagctttgacaagattttgaatttggcagtcaaggggtggaaagaggttcactgcacaccagaagaacagagaggggagaggcagagggaggaggctgctcaccgagaggaggagacaga

SEQ ID NO: 154648 - DNA, 310 bp, Zea Mays
tggttgtcgaaagtatcacaaaaaggtattgctgtccagaatggcaagctgttgaagatatcatggtgacagttatagtgactccaaccaaactagcaacatagcacatccagacttaacctaagtttagcttcaatgaaacacaaaactataccagcaagcactaatttcaatgaaacgcaaaactatacctgcaagcaaaatgtgaggcaggtaatacatgaaactaagctgagtagatctgatggctaagcagataaatttcatgggattatgaactaactttttaggaatagattatgtaccctgt

SEQ ID NO: 154649 - DNA, 448 bp, Zea Mays
cgcatatgggagataatacacttgtgtggcctattgggccacgatatagacatcgtctcctggtaaggtggaatcttgtcgaatttcgactatcccaagattagaatgtgtccgtctcgtcacttgagggtcaaaccaatgacatttgaatatcactagagtaagaggtttggaaccataaaaattgagctcatatatttcttcgattcgtccaaaataatcgacattatcaaggccgggcgtaaagactccagaacatgttgttttccgattgggccgacttttgtcatagtttgttgtgcaaaaacggtatccattgacgtcatacccagaatatttctggaccctataagcaatgtcgttggctacttgtctcaactcggcactcatagacggatctctttggccctgcaagtattcacaagttaaaagacgctaaattgagttc

SEQ ID NO: 154650 - DNA, 730 bp, Zea Mays
gaccactgattcctcgctgacagaggcctggcgcacctccggccaggagggtcaccatgcgggagcacatgtcctcgtcccctctgagttcaccgccgcaccatgtcatgccgttcgttgatgtcgaccgtgcaccttccggacgcatccgacatgtgagtggccgccggcactcccacgcacgggttgaggaagaggtacgatagagtcacgcagcatgccaacatctgcttggttcagctcattttgtcgtgtacttgcctagttggatatgcatttgtcaggaatttactctggaatctataaattcacagtgagtttatgtgatcagagcctttaaataaaaccttattatttggtccttgcttgcattaggatttaggaccccttttataattgtactaggtgactttcggttgtgcttctacttcatttgttagttgaatatgtcacatgatatcatccttttcagatatggggtgtcaactaacatggactttcagttagacatccaatagctaagtacaggctgcgccttaattgggaagtgtttgctaccccatgctatctactccactctacttgatggtaatgtacccattgaggacgcggccacagatatgaggggttcacatgacggcaggtgataccgtgatagcagaacatgtggctcagtaatactccatatgtctcaaattataattcgtttgatttttttgtgccaagattg

SEQ ID NO: 154651 - DNA, 1482 bp, Zea Mays
aatactgcatgggctcgcgcgcacctctcgctaccacataccaagcagtctccgaatccaatcttcagaggacttgaggtgaggcgatgcaacgcatgcatttatggttccatgaggttggttggcctgatcactcaatgctccttggacgtcggtgacaatggcacgtccgatcactcacatcagttcagcctggggtactctggactggacagccttgaagctgtcataataaactcaaaaaccctgcttctccgccagttgtactgactgctcaccattattctcaaatcttagtaacattttctttaggcataagtatggttcattcaaaagtgtcttgtgggcttgtggccatcgttttcgtttcctgacacgtttacggccgttggatctgagcctctgaggtacatccgcacggccggggcgcagagatatatatggcctgattggttgtctgtccttcgggcgcctggttggtgcgggcctggtcccctagcgaaggccattttcagcttctcctcgcatgcaagctgaacagtgaaaaaggcactaaatggcctgattggttgtctgtccttcgggcgcctggttggtgcgggcctggtcccctagcgaaggccattttcagcttctcctcgcatgcaagctgaacagtgaaaaaggcactaaatggcctgattggttgtctgtccttcgggcgcctggttggtgcgggcctggtcccctagcgaaggccattttcagcttctcctcgcatgcaagctgaacagtgaaaaaggcactaaagtgcattcgcgcgtgcagtcccggggacgtgaggcacggcaaccaaacacgcgctcgcacccggtcaacgcatgccacgagcctgggcgggtaggatctggcaaccaatcatgcggaaagtgcattcgcgcgtgcagtcccggggacgtgaggcacggcaaccaaacacgcgctcgcacccggtcaacgcatgccacgagcctgggcgggtaggatctggcaaccaatcatgcggatatagcttcagcctgattcttgatgtgccctccaacccaatcgcatcccttggctgctccacggccagctacacggttgcctgcggcagcagacgggagcagcagcaggagtagtgtggtagtagatggggggtgccggtgttggtggaggctgtaatggtggcggtggttgttgagaagggcaaatgcgctcgccaaagccattagccatagccactgacgtgcgcgtgcccctgtgcgcgcacatgcgggcttgccgagctcgcgcgacggtgagccccggagcaagagggcaggacggaccaaaaaaaaaaaagtggctgcagaggaggaccaagtgaaagtgtgctcccttccctgtcgacttgtgtatgtataaacgcagatttcgcaccgaggtcgcgtgtggtcagttggacacatcgtccgtatgtgctgtggacgatgattacaagct

SEQ ID NO: 154652 - DNA, 371 bp, Zea Mays
cgcagaggtaccgacacagtgtaaaactcatccaaaaaatcaaggttagagggaaggaagactcatcgaaagtgacatgtcgagagattatgatgcggttggtggcaaggtcgaggcaacgataacctttatggtcattggagtatccaagaaacacacagtgagaagaccggggagcaagtttatgaggtgtggtggaggagaggttgggataacatcgacagctaaagacacagaggtgggtgtagtcgggaggagtaccgtgcaaggcctggtaaggggtggaaaaggagatggttttaatgggtgacggttgaaaagataggtggcgatgtgaagagcctcaacccagaaattaggggggagatgtg

SEQ ID NO: 154653 - DNA, 322 bp, Zea Mays
gctgaccacgccatgggccaggaagccgaaccgccagacgccccgacgccccgcaggaaccgacgtcgcgccgttcgttcttcatcgcgagtaaagaaactttactgctgccgtttccttcccctctattactcgtagctagccgtttctctattctccataaatagctggcgcccgtttcctccccctcggcctataaaacccagccgtatcctccaccgaagttgtcctacttctcctcttccactcccatgagcccctgcgttatgtgcgtagccatgtcaccattgttgcgtcaccgccctcgtcgatcccatgtcgg

SEQ ID NO: 154654 - DNA, 609 bp, Zea Mays
cgtcggcgctgttgggtcaccgtgaaaccaccaaacattggggccggcaccaccatccatcaaatcataggtaagtcatacgccatcgcgttcatctctcctccgtagttgtgaatccattgccggtcgaaattgggacgctcctaggtgccggatcggatacatccgatgaagccaccgccgcgctaacctgggcactgttgtgtccatgctggaggaagaagaacggacgtgggccattgatgttagagggagagatcaggattagctcataaggggcggtgcgttaggatgtagcacaaccgtagatcagcacaagaatggatgagagtggactacgggtatttaacgtctggaccgttggatcgagtgttgatggataggattagatcgagcgtgcctcttcatcacattaaaactagaccgcatgatcggatctgagcggtcgagacttcaagataccccttcgccgcggtgcatttgcgtatgagccctcgggtttcattaaaactaacgcgtcgtccacctagactcaggagttcttaccgtccagtcctgaatattgcaagactgcccctaagcttttgaatattactggccaatgtcctc

SEQ ID NO: 154655 - DNA, 1170 bp, Zea Mays
aaaaaaatcattttaaaagcaacccatggaatatttatccgcataatataccataccagccattcagatgcgccaagaaaacaaggtgttgaattgcatatgtttgagccatgtaaacactcagattagacttgcttcttttcgaacacataccgcatcatattgcctaaatagcatataagcatgcaaaaaggaatctttttctaggcacaatcggattaaaaaaggtgaaaacagaaaagagatgacgactggatgaaattggaactaacaaagttagagaatccatgcgcacaagtaaataggacaaacaagaaagagacgatcatatgttgattgtgatgtgcacttgtagttcagaccaatagcaatagggatatgcatgttcatgtaccatgctgtgcctatgtctgtgtgcggtgcacagcaggatcaagaaagaccatcctgcaaaagcatttacaatagtcagtggccgcccatccatcatgataccatgaccggaatatttgacttgcaattttcttccctcctttacttgtctagtataaactgcaaacattttagttttccgacatacataacttttgatgcgatatacacgagggccaaagcaaacattacatcatcttgcatattgtggtgattcatcatattccatagtgcagaaactcaccactaaaaaggtaaacagttctcccaacagatgcactcagctgacattgtagactataaaatatatacaatctctggtcagctactcacctggattctgtttgttgactgttggttgcacaagtgctcttgcaagaatgaacccaaaaaaaatcaggggtcaaatatctctctgccctggatacacttgtacagaaagagaagggaagaaaaagataagagcaatcctggattccatattctgttttataggttcccaaaaggccactgttgtttcataaagaagggcactttctcatcttcttaaccagaaatgaaatgaccgaggagaaggttattccttttgggtacactcaagagataccaacatcatccatgctggagctccaatgtgattctcacaagtcacaacaagggccaaagtaagtatatagcagcattcattatgccacggtgcaaaaacacaccattcaaaaggtaaacaattttctccaa

SEQ ID NO: 154656 - DNA, 746 bp, Zea Mays
ggcgaccaccggtgggggacctcgacgcggctccgccgtccagcttcgcgaaccgacgagccgacagatccatgcgaagacgccgccaccgttgttctctgtcagccgacacgtcgtctgcgacctctcgtccaaagggaggtcatcgatccggcgatagatctatgttgagccgatctgcttcattcgatctgcaaggtccaaggtacgattcgtgtcttcgccaatgtctccacctctgattgaatcccttgcccaaatatacgtagcttcaatttacactagggtttaggtgttcttgaactggtttcaaagttagggtttatgtgttcttgaacttatttcacagttagggtttaggttttctcggatctccgattcgaccattgtgtaggttgatttcatcccaaaattagctttgatttccgataactgtaaggatccatagtttcctttaacctttgttggcccgtagtgtacctctgtctatgatttccactaactgaacctataatttgcagtagtgtttgcttacaagagtaaccattgcatgcaactaacgaacacctttacttattatgcagcttcaaaactttagttgattatttgacgtccacttcaagtaattgaggttctaattcctttttcgctttagttcattgtttttaatcaatttcttaagtctagtttccatggatgttgtctgtgctttcatgtttgtagtctaattctagtttactatatgt

SEQ ID NO: 154657 - DNA, 544 bp, Zea Mays
gggcagtctaggatgctaattgtggtgactgttttgtgcgtcgaatgtcgaaggccattgccgcggtctttttcgacacccatggccgtgatgccagttggactgcttttgtttggggctttgcggtattatattacatggctccgcctcgttaaaaacctcaccccccgggaggaaaagagtgcgggcctgattgacattgtttcgagaattacaaaggcaatcgggccttgggtcttagatgaagaatttgcgcaggttatctatgttccatgaatgcgctaggtattcaccggatggtgaggtgagcctgtaagcatttggcgatgttttggttttgacgatgtagggcccctcccatttgggttcaagcttgccccgagactctgttctgatggttcttgtgagtactaaggctcctttcaattctcttgggatgactgtgttgtcatgccatgccttagtctgtgcttgatatttgtttagggcatccagagtgaggacacggtctccgtcgataagatctttggaggttggctcgtcg

SEQ ID NO: 154658 - DNA, 1002 bp, Zea Mays
gcagcatacaaaacatccgccttaggatcattgtagctcttaaccaaaacagctccacaacatgtggttccatgattacattagacgaatcaggtgcacattcaagaaataaaatcaaggactgttcaggaacaatggctaacagtaaattttgaattacgcgcaaacaaggaacagtgcaaaaattaaatttcacattcgtcacacttcttcggttccccaattttattggcaacttactcctgctttggttcatcacatttcacatctgaaccaacaattacaagataacaaaaccagcatcaaatgttgcccctcgaaatcgaacagcggaaccaaagcaattggaaaagtgaaatcatctaaccttttagtttgctgcaccttgccctcctcttttagatcatctcatttcacatctgagataacaactacgtaaaaacaaaattagcattaaaaacttgtccacaaacaatcggcagcagaagcaatgtgactaccagtgaggcattcctttttgagataaaaatactcagaccagtaccaagcttcaggtgtaataaaataaaaggtatcagtatagctgctaaatctaccaacaaccccttgaaccaagcttcaggctccagatttcgtacctgatgaagctatcataagcaattcatatagcttgcagctagttgccatctgcactactatacaaaaatgcaaggaacctattgcgagtttatattattgaagcaggatttctccaaatctatatagatcgctaaattgtggcttgatataactttgaatcttcagagacaaatcaaatgtatagttgttcgacctgtatctcttgccaccacgctcatcgcccttcctgcaccggaggcaccagggcaccccacaccgggctagctgccgctcctccccaagggcaccggcagcatgcccaattgcccagcctctgtagctccggtagtggcaaggtcaccaacaacgatggcggcggcgcgc

SEQ ID NO: 154659 - DNA, 677 bp, Zea Mays
atctacaaaaaaagagtacaccttctctccaaggacgttgggctttgttcatgccacttttcctctatttatagtggcgggatatagcttcagatgaatttccaaacatgcccacatatcttacatacatgaactacaaatgatgtagggataacactatcttttctccttcgtgtcgtgctggccaagcttctagattcttcccgtccatttttgcttcgtgtgtcgattacacgaaatcaaatatttctcctccagtttcgtccgcatatcaatcccatggagctaaagcttcgtttctacttcacgcgctgctttagacgaaggctaagctttgtcatccttttaagcagctgaagtatatttcatcgataatacaatgctttgagatcctttgacaatagaggcccctaccaactacacttcacacccgcctctaataaggcaactattaatgaagggtcgatgcatagatattaatttcttgcaaaaagaggagtaccccagcaaacccgcatagagtgacacatttgatatacaaatgcccatgtttaagacacaaagtccattcgttgctagcatagtatcacacacaggctgcttgcaactataaatggttaaatgagtcgtgctaaataggtcgacactaagtacgacacgattcatagtgtttcggc

SEQ ID NO: 154660 - DNA, 412 bp, Zea Mays
atcacagacctgaatctacccatcatagccctatttaggtttgaattatttttgtcagagtcccatgcaatgacccatgtcccatcacaagcagccctgatgtcctaaatttcttgaaggaaaagaattttctcagcatcagtctgaggcccatacacacaagttaaccaccagggaattccatcatctttgcaaaactggacagaaacacaatgggcatccatcctttgtactcctgtatgtcctacatttcttttcgaagcaactagaattcctccgctagcaccaacagaaggtagaaaaacaaattcagtaaactcaactcccgatgtcaccctgagtaataagttacatttttgtttcctgacagcacactatatccacctgaaaggaatccaccaggtctctaaca

SEQ ID NO: 154661 - DNA, 500 bp, Zea Mays
atgaagagtcatattatgttgaggatcagatcattagtggaagtgacttgaagccaatgaagtgaactcatatgtggtgaagttgtttaagtcacatgctcaaggtgtgtttgcttgaagaaatgagacaaagatgattgcaagcccatatgaagtgatattgagaggaaatggcatatgaagacattgaagactcaagtggtcaaatagttatattctctttatcttgagtataggtatgtcgtactatcaagggggatccaatacgaataatagacaagtctcaattgctcaatctaaccaagccccgagtgctagcatgagagaaacacaaagtacaaaagtttaacttcctgatctttggtcttgttctttgctcggttggatagccctagaaataagctttctaaaaagtccaatatcactgaaatcggagtttagagtcaaaagttatggtgtttttcgtgaagcaggttgtgcagcggcagtgccgctcaaaa

SEQ ID NO: 154662 - DNA, 313 bp, Zea Mays
ccttagttgttctctttgaagttgaatagatcaatactgcgcccattgatacgtgagggagattgacccgtaactactcttggtgactgattgatggaaacacgtcaatttgggttgctgataaacctgtaatgtcattcaacgtcagtgtccaaacaacgactaaatcaattaatctattcacatcaaagttgtttgtaagaaacttaggcacacaatcgcttgttgttgacatccttactccgtggccaagatttgttagctaagcattcatatattattcatagcagaactaactggcctataaaattac

SEQ ID NO: 154663 - DNA, 435 bp, Zea Mays
atcgggtatgagttagggtccaagacgtataggttctacaatcctgacacaggacacgtgatcatccatgcggcgtggtatttgaagaaggaaaggcgtggggctggagcagtgttgatgggtatagtacaacgtgagaagaaccgttccacgtcgattttttacgagtgacgctccgggacatggacatcgtcagaccagaataggaagacgcagaagacatagcatctgtgttgggtacaagcggcgtggtgcctatactgggctcactagggcgcatgagtggcacaacatcagtgttccaaggatgccaacaacaagcggcacatttgcaccaacgctcgccacaattccagcagcggtcgttacaccttcatcaccattgtaggtggagtttgtgtcaccacctaactactccagacctcgatgccgacc

SEQ ID NO: 154664 - DNA, 311 bp, Zea Mays
cgtgggaataggcacggcagttggcgtggtcataggcgggccggcagtaattgcagcagcaggcgcacggaagcagcggtctaaccaccaatcagactctggtcccacctgcaagctcgcatcctcccctgaggcgggaccgggggccactgtcggtaccctaaatcaggggtaccctctcatggagcatgaaggcatcgcacccatgcgacgtccctggccgcacggaggaccgcgcttgaccccactggatgggcaggtcaaaggacgccacgtggcagggaaagacaccacacccagtaacaccagac

SEQ ID NO: 154665 - DNA, 543 bp, Zea Mays
ttttaagttgagcaacattagataacacatcatgattatttctttgcttaattaaaacagattcataccgttggaccaaattcccatgagagtaagttagctcctcatgttctttggtcatcttctccaggctgtcgttggttttgatgagagtctcctctagcctgagaagcgtctcgccttgttccttgttccttctcaacagcttaatcaagagcgctttgtcttctttgttgagatgggtgtagaaacgacgaatctcctcttccacatcgttggtctcattttccctgtcattattatcagtggaagcaaaacaggaaaatgtaccttgtgatgatgtagactcctcatcctcatattcttcctcatcatcgcttttgtctccaccattattgttagcaataagacatttattactagtggaagacaaacctgttgatgaggtggattcatcgtttggttgccatcgttcttgttcttctcccttggacaagttagtatcaccagcaatagagggagcagaagtagtgcatatggact

SEQ ID NO: 154666 - DNA, 564 bp, Zea Mays
aaaacatggaatcatggcttagaacaattataaaagttggaatacactaattgagctacaataattgttataaaagtttggccaaaataattgattaaaatccccaaaaaggccatccaagtggaagctctctagggaaaatctgaatttcagattgctgaatttcagccctcacctagaacttgagcacgttcaccttgatccctagctcaaatccttaagtccccaatggcaaaattgttctagactaacccctctacaatgtgtgtgaagatggcatcgagattcgtgccctagacacgtcaaatctgggatttcctctcggagttcagtagtgagacaaaccaaacttcatccctccatatcttttgatccagtaagcaaaacccataagcctccacacacaaacaacaaaggaatgtcaggggaagagatctctcaacggtatcatggccataatcgcgaagatttggagccaatccgcgcttgaacttgacctctctctgcgctgcctcgtgctcgatgccgtgcccaggcgctagagcgcgcactggcgctcgcctg

SEQ ID NO: 154667 - DNA, 949 bp, Zea Mays
ctcactgaaagattaggcacttcagccatatcaaaatccaaatctgtttgagatgaatagcaaaagcacgctggttctgtgtggttacgacgacacttcctcacaaaatcaagtacacaaacacagaggttcaaaacatccgtggaccttctttctacaaaaatgaaagagactaaacctagggcaatgacaaaactaagagtactctaatcactactcaaagaaatgtagccaaaagagatggttgtagaaatagccctctgacctatttgtaggagtttttcaactagactaaactacccctagatacatagagaatatccacataatcaggggcaaaatggatcaagtactaggtttttcatccaatggtcatatgctcttcatgaagttgcttctcctagtgcaccctctgtgatgacgcgacatggcaccctcgattcccaccggaaccataccgccggattttgaggcctaaaccggtaaaaccagccttctgtagcggtggatggttttgacgctcaaccaccgaaaactttgtgattagagtactccatacacatccaccatgtcctagacacgtgttctgctagtccacgatcatgccggtgacatgaactgctccactctggtgcgtgtctcaagtgtcggccactatgtatagtcaccaacttctctagttcctcaatgaagacccagcactcatccttcaccactcccggcccattggcacgaacccacatgaccttcatctcaccttcaccttcatcatcgaccaccatacatgtactacacacctgcacaccataagccgagagacatggttgcacaacacacacttgtactctcgtgattgcactaactcacaccaaagcactacccatgttgacaatcactcatcatcaacccaaaccacaaggaataagtcaaccttgtgttcgtaatctcc

SEQ ID NO: 154668 - DNA, 925 bp, Zea Mays
ggtgagatcacgagacattctcgagtcgagatgtggctagtcccatctaataggaaaccgggtctgtctcccgaccctgacagggggtagccaaacgacggtccctgaacaggacttgatacctcaaaggccttgtcaaaaatgggttgtggtgagcctggctgcatgctcccaccttccaagtgatcgaggtgatgtcaagagactcgctcgtcctaggagtctgggcttcggaggccttgttcatcattcctttgttgccgagggcgttggcagagttcctaaagcgttcggttgctccgagagcccatgctacgccaacatcaatttcagccatctagagcttggagaatctcatcgtggaatgtcggtgtttgtgacaccgcacaccccggggttaccctcatggtgcttttgagtaggatggcgtcattgattgtgactcgatggttcatgcgatatcacgatgagagaaacgctcgggcttgaacaggttcaggccgcttcgagaggcgtaataccctacgtcctgtggtggttttctgtattgaggtgagttacaggttgtggctatgagagtggtgggttgagggtgagatgaaaatggtaggggttcctcctggccttatatatacaaccagagagagccccctgcacaggtgtcgattacaatctccttgcttatctcctgatttgtagcgaacagtcttcctttatactatggaaatcttgcactcacgcgtccgagttattgctggtggtttagtctaacgggtgggcgcaaaaaacccggcccgacatacccgtactcatgcagcagctaactcggacttgggcctcttttgtattagaaccggcttgcctctcctagtttcctttatcccgcccaccacgagacgccctaggagggcgtctgctgtgtggc

SEQ ID NO: 154669 - DNA, 520 bp, Zea Mays
tgacgctgcagtagggagtttgtctggtgacaaacagttgggaaaagcgtcgccgcttgaagggcacggctaggaaaagcgatcgagcagggggcagtcgtaacgaggacaagtgccagagagcgccgtcaccgtcgtaggagcgccgccggccgggaagaatgctgccgcgagcaagagatggggaaccctagcgaagggagctcgtctggtgaggaacagaggagaaaaggataccgaggagaaaaggaaacacaaccaaagaaacaaatcggtacgtacataaccagtgggagtggttattttttaatttggtttgccctcaacgcatcaaaagtagccccatagcagctatgagattagtactgtaaaaagcaggttgtgttgagataagttgctacaaattagactcttttggtttagcttctactttttttaaagcaaaagcaggttccaaaagtagaaccaaacgcactcttagtccagaaaaagacgttcataccgttgcatcattgcccct

SEQ ID NO: 154670 - DNA, 625 bp, Zea Mays
aattttatggctcatgccacatttatttcattgttttcataccatttaacatacattttttcagaaactcaatgttagatgcaaccctcaggatgttattataaccattaagatattgaatgagaggcaacgacaagccgttgctagaaaaggattttccaatattcttgacatgacccttgatacactgggtagccgatctcatcttcgttggttgatggataagttggaccacaaggatatgactattcgccccggtcaaggcaaggaactaaagattacgaaagaaactgtccaccttatactaggcctaccaaatgctggcggtggtaagccactaggaatcgatgaagcagtggcgggcaataacttgagggctgaacttggattgtctaaggttgagttcgttgttgcatctcttcaggaccgattgagaaaaggaaacgatgatgacctctctatcagatgcttctttttgatattgttcaatagattgttgttccccacttccagctggggcatatctaaccatgaggtgttattgacgcaagaaatggaccgtttccatgagacagactggtgccacttaatttttaacgacctctgcgaagctgcacaaaagtgg

SEQ ID NO: 154671 - DNA, 428 bp, Zea Mays
ctggtcatagtgctggtacgcgacctgtgggggtacgcgtacagcagcgaggaggaagtggccaggtacaccgccaggatgatgccggtcctcgccgtgtccgtcatgctcgacggccagcagtgcgtgctctcaggtgtagtgaggggctgtggccgccagaaggccggcgctttcatcaaccttgccgcctactacctcgccggtatccctgccgcgctcgctttcgccttcgtgcgccgtctcgcgggaatggtactctcctgctctctttgcaacttcgattgggatccttcagtttgtgaattacatcagggaagttcttgtgccaactctgaacacaacagggcctctggttcgggatcttgtgcggcctggtggtgcagatgctctcgctgctctccgttaccttatgcaccgactggaac

SEQ ID NO: 154672 - DNA, 401 bp, Zea Mays
caccctgttaagcggatagtgtaccatgttagtgttactgtgtacgcgtggcaggcccaaccaatgacccaaatggccaacccaagacccaacatgtgagtctactcaagtccttgtgacctatgcccatggcttgacctagcgcagcgccgccgctttaacaccacgccacagccgtcgctatagcgtcgcaccgccgtcgaagggggagcactgaagcaccaaaggtcgatggtctcagaggggggagcagagcaccggaggccggagcagccgcacatggaggtcggcgacgagtcggccgaaggccgtagcagccacacatggagatcgactacgcttcgacatcactccattgcgggatttttggtctttacaacgatgtcgtccacgtagacctc

SEQ ID NO: 154673 - DNA, 298 bp, Zea Mays
aagttattgatgtattaagggaaatggtattgcttatacatagcttgtttatgcaatgtgcaaataatcataataagcatattggctctgcactgattctttattagtcctaaaacatttgattgtagatgagagaaaactttggatatgacagtctcacggacaactcagcattttgtgattttatatctcggttaatgtggccatgtatggttcagaggctacacgtggatatagagacatcgagtcacaaattctgagttgcagttggatcgagtgtcttatcctgaattgttgc

SEQ ID NO: 154674 - DNA, 815 bp, Zea Mays
tggtccttcaccgaattctaacgggggaaggacggcacaaattgtcgccgctatgggaagggccattcatggtagcagaagtcactcagccaggatcatatcggcttactcaaatggatggcacggaaatagggaattcatggaatatagagcatctcaggaagttttacccctagctagatttcaaaagctatcggggcagcattgtattctttaatcggaaaatacatcatcaattaaaagacttcattctcaaaggcactcgaactatttgttatcaatctgcatgcttactcgacttagggtgaccactataccctactaacggagcaatcggcttaagtcggcagtgacttaagacggtgcaacatgctcacgcttacttaacttagggtgaccactataccctactaacggagcaatcagcttaagtcggcagtgacttaagacagtgcaacatgctcacgcttacttaacttagggtgaccactataccctactaccggagcaatcaacttaagttggcagtgacttaagacggtgcaacatgctcacgtttacttaacttagggtgaccactataccctgctaacagagcaatcggcttaagtcgacagtgacttaagacggtgcaacacgctcacgcttacttaacttagggtgaccactataccctactaatggagcaatcgacttaagtcggcaatgacttaaggcggtgcatcatgctcacgcctactcgacctagtataaacatgcttacgatcactcatcttagggcgatctctatgcctcataaaatagggaaaagtttc

SEQ ID NO: 154675 - DNA, 739 bp, Zea Mays
ctttatttttattttttttcttaccccgttgctgccactcgggactacctggtcggctcccacctgcctgagcgtagtcacaactccatccattggtcactgacgtgtgggctcctatggtcagttctatcccctccaacagaatgcagccgagtgcccgagtccatcgccgcacgcgccgatctcgcaacaacccatgtgcaggcattcctatgcgagtcccatggcctcgaccataaataccatggccgctccctacccggccacatttcccagagctgtgcagacaccgttcaacccctcggcaggtgactccctcacaggtcggctcggcagccctccctggcgagcttcctccggtggctggacccctccgccgcgaccctgcgctcaccgtctcgccccccatccgtatcgagtccgcgcggccgcactgccggcccgcctcaccgtggatcgcgcatgagggagagagagtgcggcgcgggcgggctcggtccgtcgtgtgttgcgtggccacgccgtcgattgagctcggagggttgccagggaggaccgtcttgactgcccgagcgtggggagggcaccatcttccactacggggcatcgacttcgtgtgaattgctcgccggagcaatactcggccgcgaatttgcagctcgccgtggaccgttcccaccactacacccttgccggtaagactacctccttgtcacccgccttgcccttctcaatgtgt

SEQ ID NO: 154676 - DNA, 912 bp, Zea Mays
taccaggccgaaaccagcccaatatagcccacgcccaggcaaaacgcgccgcgcgcgcacccgcattggtggattttcacagagccccctgacggtttggataactggttaagagccctgcatcctatttcattgtgtcactgacagtcacaactaggcccctatgttcttatttctttacaacgccaagtccacgatggtggacgatggagcaagatctccgatgagctcataccggtcggataacctaactaccggtgcttcggtgcggtgtcaccaaatttgacccctcctaaccatttcccctccatcaattgtagagttcgagcccttaatcatactgcccatggtgacagcgtgagaaatggaccgaccgagatgttcctgatgctccaatggattctagctcaattggatgggtctgagagtatcacgagcacctaaggatagtgaaacgaggaaccagagaacatgaacggacctgaaacacgttggccaaggcgagggctctttcacagtggcggaaaccgatttgggggaaatctcgaattggcgagctctagtggattatttgaggcacgagttgctggattaggtgcttgactacctagcggagccgagggtgcgttccatttatagcgtgcttgagcgatggccagtgaatttgaagaagacgtgcgacggcaggagagggaagaggttactggcgctagcaatttctggcgttcaccgaggcaagctcactagcgatgaacgggtgggttacggtgactcactgcgacatggttaaagggtcagggtgtgtcgcgatcacggcaggcagcgtatgcctcgacgacggccgctgcgccacgtcaccagcgcaagtgggcatggcatagggcggaacagtggcttcgagctcatccgcgg

SEQ ID NO: 154677 - DNA, 571 bp, Zea Mays
ataaaaacacccacctcgctgccgttttcccacggcgcatcgtgcagcaggagcgggagtgccaagtggtttctagaacctggtagtagagattggcggtttgccgatggagaggggcgacggaggaggaggaatggcgccgcggggcggcgtggtggggtccggggcaatgctggggctggacatgcacctcgcccagcagcggatgcaccaggccgccgcgttccagcaccagcaggacagccacaacggtgggttccagctgcagcagccgtcgccggtggcggtgaggcagcaacagccgccgccgtcgtcgttcatgccctactccaccaacacgtcgtcgtccagggtcgtggtgagcgcggcagcggtgggtcacgacgacgaaatggtgggcaacggcggcggcgggaagggcggagtggtggtgcagcagcagcagcagcagcagctggcgtcggcggggtgcccgtggacgaggatgaagtggacggacgccatggtgcgcctgctcatcagggtggtgtacagcgtcggggacgacggcgagggcgtggcgacggctggc

SEQ ID NO: 154678 - DNA, 391 bp, Zea Mays
cgcccgtgggagcgagcgctcctacgctctcccaccagtacatcggcaacgccgccactcacggtgcagcccctgctctgaccgccaccatcctctccctcggcttcccttccatcgccttctccctgccggatgccgccttgcttcgctctcagctgttggcgccgggttttccccatgtcccgctcggcacaatggttggggctcccgtgcgtgactgcacttcaccgatgaccgcctacagccagccctccgccatcacctcatccctgtgcgctccttcggatgacgctgccgccatcctcgccgccacccgggcagccgttacgacggctcgccagcgggcccaggacgccgctcgtgctcttgagcaggagcaggcggttgttga

SEQ ID NO: 154679 - DNA, 1173 bp, Zea Mays
atttaaaaataaaaggaaaaagaaacataaaagaaaaagagaaagaaaagccagatgggccactactctccatttcggctcactagatgaaactagcactgcgcgcggcccattccacaacctggcgtcgacaactgggccccgtgcgtcagccacttctgctctgcttgatctctgacacgtgggaccaccgcaacagttcctccgcgtgcgtttcccttctctcctctacaccgaatctttgctgccgcatggggccatctgacagccacaccgcgcgcgcccctctcaacgccattgcaggacgagcaaactccacctcatcctaaactacccataacaacctgcccacgtcgtacgccgtgcgtcgcgccacatcggcctctcaacggcgcaggcctacaaagggatcaaaccccacctcctccgcgaccacttggaggcagaagctttagccattgctttgcggtcgccgagagagagagaatggtgagaggagagaactagcgcgtgtgctagggaccctaggtggcgatcgttgggcaaaacccatctgcgtttggccgggacggacgtattggctggtctacggcgcagtcctggtgaagctcgcgtcgtatggcgaaagcttcgcgtcgtcttcgtccggcctcgtctgagcctctgtgctggtgagccttcttttcctctgcgttattttggtgcacaccgggagtttgcgtgcgttcgtggcggtcatggtagagggtcggtgttccgccatggggtacctctatcgtgtcttggccaacaccggtggatcaatgggagagagagagtgtactggggatgccacagcgtatgtgcctgggaggcttgaggttgaagaaggatggcgaactgttgatcttttacgcaacggtcgcgattagaacagaggataccggttgggttggatcagcctgtgctgtttgatcaagatccaacaagcgtaggctggtctaggtgttttaaatctgggtcgttggccgaccaatgggtggcacggatccaagcgagtataaccctacgcgggatgtaatcgtgtccgctcatttcgatccgatagcttagatctgagagtaccccttcggctcggtaatcttactaaagagtccccagtgttttgtgttatgaacccgccgtccacagggc

SEQ ID NO: 154680 - DNA, 612 bp, Zea Mays
agcaaattcaacatgcggaaggcagtcttcccagagcttcaaatcctttttcaacacaacacgcaccatggttgacaaggtacggttgacaacttcagtttgcccatccgtttgtggatgacaagtggttgaaaataacaactttgtgccaagcttagcccacaatgtcttccaaaagtagttgagaaattttgtatcccggtctgaaacaatagtctttggaactccatgtaaacgaacaatctccctaaaaaacaaatcagcaacgtgtgaagcatcatcgctcttatgacaggggataaaatgtgccattttagaaaagcgatctacaacaacaaaaatagaatccctccccctctaagaccgaggtaaccccagaacaaagtccatagatatatcttcccaaggtacatgtggaataggtaatggagtatataaaccatggggattcaggcgggacttagctttcaagcaaacgatgcagcacccaacgtgccgctggacatcacgtcgcatgtgtggccaaaagaaatgatcggagagcatgtccaatgtctttttgacaccaaaatgaccatctagtccaccttcatgtgcatcctgcaaaagaac

SEQ ID NO: 154681 - DNA, 688 bp, Zea Mays
tgctagtctttcggtgcagaggatgggtcatccaattgtggttagttctgctaatggctccattagtagctattcagtctgcccgggttgttccgtcattcttgctgatgaggtcttttcagctaatctcatggtgatttccctggggtcatttgatgttatcttgggtatggattggttaactcagtatcgcatagttatatcctgtttttggaagacagtgttattgcaggcgtcgttgggtagggaggtggtattcttgggaagttctccaaagttcactctatccttgttgtctcaattacttccggatcgtcagtcaaggaagtcaggaatctttttctccatggtggtggagagtgagactgccttgcgggtgcaggacatccgtgtggtgtgtgattatgccgacgtgtttccagcggagcttccaggcattccaccggagcgtgatgcagcttttgaaatcaaactgattctgggtacgcagcctattcataaggcctcgtatcggatggctccaaaggagcaggttgaattgaagcagcaattggacgatctgctggctaagggtttcattaggcctagcaggtctccttgggctttcctggtattgtttgttgagaagaaggataaaagcaagaggctatgtgtggattatcgtgctttaaatcaagtgacaatcaag

SEQ ID NO: 154682 - DNA, 354 bp, Zea Mays
gccaggttatcagtggctaccatttttccctacagaaatatcacatgaacaatttaaagcctgtcagaccaatatttcctaccatttcccctctaaaggcttggttagctagagtaactagcaggtcatccctggttccagttatttctggcggtatgcaacaagttactggcaagacccaggtagataatgttgtctgcaggatgctagtcaggggactcttagtaccctcagagagagaaaaaagagcacttgtgaagaaacaatcatttcatggagtttcttgctctcccaaagaagtgggtttatctgccaagcttttacagaatcccacccaattcaactcaaaaacac

SEQ ID NO: 154683 - DNA, 938 bp, Zea Mays
tcagaactttggtcatcactgaaatatcaccaagtctgaaatatctactacagtgccatcttatctctacccccttccatggataaacttccccatgccttactgtgctctagaaaccggcgtgggactgcagggttgagccacgcctccacatccatgcaatgtctaacttccccaaagttccccttgctctaatcccaagaagccagccatcccttgatcttttcactgcccatttaagagtaaccgaggggaagaagcaagagcaaaggagagatccttacctctgttgtcaaccacggtgtgtagcttcaacgtagttctattgccttcctttccccaaactataccctagatgcgcccaacttccttggtcaagttactcaacgtgtctggtgaccacgtcgccgatgccttagcctcatgtggccaggtgactatggtatggtttgacgtatatgcatccatgttctagtgtccttatagactggtgaagctcactgaggtatctatttagtctttgcggtcatagtttagttggaacatgggctcgacgtcacttgaactgctctggtgtcaacccaccaaaactcagtcagtcagatgccaattcatgtaagtgtcgcgtcgtccgtatcctactagtgctccccatgcccttaattcgaatcctccggtgcttgtatcgtctgggcagatgtcgcggaatcgggaccccgtcgtaggcacggttaggttgttctgggggtttataagctacatccatgcccatggctgctcggtttaggatagaattaggtctggcaggtatctaatgggtgctcgggctctccaccgtcgtggcgtggcagggagttcgtccgcgccgccggccggaatcaaggactcaatcttgaaagacaaggaacttaggaggggcagagagtaatgtgtcagtg

SEQ ID NO: 154684 - DNA, 538 bp, Zea Mays
tcttgagcacctttttgatgtaaaacactataaggggtcctacaataaattttcattcacgaaatgtgtaatgtatatggataagactatatagctatgtttacagttgtgtaagctagagcctagtgcatgttgttgtcttttttattctatggcaaaccacctgcatctctcgtatgaatatttccttgcaacttgacgtcgttgggggtattctcgaagatccaccattcctgcattccatatgcaccacatcattacaaatgagagttcccggccttctgaccagtttatctgcccccgaatcgatcttatgatcgtgtggacattaggcacgacgctatcacctcgatcaagtcccatcacctcttcgcgaagttgcagtttaagaacggatgggatagcgtctcttctctttggatgatatagttttcgcatgagtacgagtccaattccatgttcctcttctgagcattgattttgtatttagtttgtcacgcatgattagccaaaagaagaaattttgtttcggttggcg

SEQ ID NO: 154685 - DNA, 521 bp, Zea Mays
caatgatgaagccatttatcgttatcaaattaatcttcaagaagagacatcaagtgcaagatttagcaagttggctaccgcatacaaaaatcatgcacgattcaggtacgctgtctgtttttagtttgatgtgactaatgaataccttgattgattaaattgtggatatgtttctcaacacagtggaactgaagtctgcctttgtctctcaaatgatgctgatgttgatgattttgtattatggttggtttgtttcttcaaaaaggtgatttctcaacatataattattagaatcctaataatgatcttatggtagggtatttgtagaatatattggcaaagacggtagaattaagtgtcaattttgcgcagctaagtatgtcacttttgtgttgttggctccattatgtctgagctgatatttttttcttaacctgtgcagatacaagtgctaagagcagcagtaagtatatctgaactgttatctttcctcaagttggaagtgtagtatttcacacttt

SEQ ID NO: 154686 - DNA, 334 bp, Zea Mays
cggtcggcccactgtacgcgagcatgcgtcagccatgcatatgatagccacgaatcctggatgagacgtgacaggcgatatacgcatgcataaatatatgtagaaatgtgcataaatcatgcatagaaggaatcttttgggccacgaatcacgggaacgaatattaccatgtgtacaccgtttacgactgcataaagctgtgtaacatgatagcgtaaaccatgcaacatttaaatatccaccggtttgagataaggaaagacgtgccccacgttcgtgtaaataaaggcacagttacgggaggaaacaaattctcatttacagccgcttgccc

SEQ ID NO: 154687 - DNA, 381 bp, Zea Mays
cttgtgccgtccctcccccgttagaattcggcggaggacgaggtctcctatcgaaaagaaacgttgccgcacagccttgtcgtgatagcgccttagagtctgctggtaccgtgctgattggattactgcattcagtcgttcttcctcaagtacatcaatatcctccagcctggtggcctcggcttctgctatgctttcgaagatcagtcttggtgccccaaacttgagatcagtaggtagcaccgcctccgacccatagaccatgaagaaaggagtgtttccatgcagggctcggctaggttgggttctcaggctccaaacaacataaggcagctctcttatccattttcctgcgaatttttcattcttatcgaagaccct

SEQ ID NO: 154688 - DNA, 1019 bp, Zea Mays
gcgtcatcttggccctcaagtgcgttactccaattgaaggcactgaaatactactagaagtccataacagattttgtggcttctacatagaccgagaggcctcgcttcgaaggttatgctccaaggcttcttttggccagaaatcgtcagatatgtgttcaacacagcccactcatgcgaagtgtggaagaatttttcaacccgaaggagggccctttcgtagccaacaaagctaatagcccctacatggctcctacaacaatggggcatcgacaacatcggtcccctaccaatggcacaaggcaaccttaagtacgtcttagttgcagtagagtacttcatgcagtggatcgaagcgaaggcgatatcaaaatcacatccaagacgactaaaaaattctgctaacaaagataatatgtcgcttcaaattcacctccgagatcaccattgacaatggcaaacagtttgacaaccaaaaaaatcagagatttcagcttgtctattggaacaaaaattaacttcgtctttgtgtaccacccccaatcaaacaaagtcatcgaaagggaaaatggaacaaactaaacacaataaaaaagctgctcaacaataaaaaaggcaagtgggctgatcaactactcggcatcctttagggactaaacaccatagagtctaaagctataggctatacacccttcaagttgatgtacggggcaaaagtaatgcctccattggaaccaaaacatagagctcctagaaccaatctagacttcattcaagaacaaaaccaataagcatcaaaagagatactttaagtctgcagaactgaagcccttgatagcttgacatggcaccaactctcaattaaggcatggaggcataggaaaatagcccccaaataattaaacaaatgctaagtgggaaggctagaatagagagtaaaggaaaacttgagctcaagtggggaggcccctttgtcatcatcatgaagacttcaccaaacacatatatgctagcaagcc

SEQ ID NO: 154689 - DNA, 692 bp, Zea Mays
caagctcaaggctgatggtaacttggattggtacaaggcctattggatcctttggggcttcacttagcatctgtagtggactatgatgagaccttcagccccatcgtgaagccaaccaccattcgaattgtcctatcccacgtgctctctagggactagcggtccaccagttggatgtataggaatacctttcttcacatcattctaaccaagacgatgtactgcaccagtccaccgggtttgtcgactccactcactcgggtctggtgtgcaagcttaatcactccttatatgacctcaagcaggcacatgagcttggcacagtcgttttgcctcctacttggtctcccttgactttgttgacgccaagtagtacacgtccttgttcatcatttgacacgatgacaacaccatctacctcctgttctacgtcaacgacgacgtgctcacggtgtccagtgccgccctcattcagcatacgatcgcttccctaaagtgagagtccaagatgaaggacttgggccctctccacaacttcctaggggccaccatggagtgccaccccgagggcgtcttccttcaccagcagtagtgcaccatcaacgttctggagcgggctagcatgtccatccgtatgccttgatccatgtttgttgacacctagggaatggtccctgacgatgatgcctccc

SEQ ID NO: 154690 - DNA, 572 bp, Zea Mays
cacatgagcaacacctaacataagtgacttaagaagtaacataaacagtttggggatcccatagggaatcatgttcagctatgaaatgtaagtcttggctttcaaacaacgccgtttacttggaacatacttgaaaggcagaagttctgcagggaaggggaaaaccctgttgttgcgatgaaaggtcaggtaatgcagaacaaaagcacgttggtccaatggttcatcctgaaatagacataatagttgaattaatgataagaagatgtataaaggagtaatatatgcatgatcaaaacactaatttagtaacataccggtacaacaaattctgataagtcgccatcatcaaaatcgtagcatcggaggaagtttgcgacaaaaaaaccacaatcatttgaccctggtatcatggttggacaattgggaagaagcttaatcttgtagttgctaaactttggtaaacttgaatctggtcgagcttcatgtaacgcaatgctaagtcttctcattattaatctggaccaaggtatttttgttccatttatcaacaattgatcattgtgaatttg

SEQ ID NO: 154691 - DNA, 737 bp, Zea Mays
cgcggcggagtcctccggctcaccatgcccctcatggctagaggcctcaattgcgtacgatcaacgcgatcacccaaacaggttcccgcatcctagaacctacccccttgtcatcgaagcaatcgtctgctcgaaccgtctctccaaagtcgtcatggatggggggagcagcttcaacatcatgtacgcaagaattttgatgccctgggatcgcacgctctgcgctgcccctcagcgtcgcgtcgatccacggcatcacgcccggccacactgtccacccgcttggacaaattattctgctggttatgttctgtagttcgaagtgatggacttcctaggggcctacaacaccattttggggagaccgtgctacatcaaatcatggtcgttcccaagtacgcatacctgaagctaatgatgcacaacccccatgggtcaatacggcgtccgcttcattccaaatagtctatgcatgcgaaaaagcttgctgcgagctcgcgttagcacaagctgctgcgagagagttggcggagttgaggagaggcattgactccagggaggggccggacgcacccaaggttgcctccggcatgttcaaatccaccgaggacagaaaagacgttcagatcgatgacactgacccttccaagcatgttcgaatcggggccacgatctccgacaggcaagagggcaccctcatcaacttcctccaaaccaatcgcgatgcctttgcttgg

SEQ ID NO: 154692 - DNA, 403 bp, Zea Mays
tcatatgatgctctaagtgttttatatttgcctagcaggtttgtggttggaatcaagatgtttggacatctttcatggttttagtaggtacttagggaggtttggttgcaggggtgtgggtaacatccttcatctccactaattctccttttcattttctacttatgttttaaggtaggcttgaactaccatagtgatttagaattttccaaaaatgttgcaaaaattacagtgggctaatatttagcattgtagtctgttctacaaatttgaggttaagaataattaggataaactctaggcaaaaataacaaaagtgagggtggatggtcactttgcactatagctctgatttaggtggggtttctgcactgaaaattatttttgtcaacatctatgggta

SEQ ID NO: 154693 - DNA, 279 bp, Zea Mays
ccggaaggttgttcaacatacattagttcactaatgttatcatttagaaaggcactctttgcatccatttggtagagcttgatattatgagcacaagcataagcaagaaggatctggattgcttccaatcttgccacgagagcaaatgtctcaccgaaatccaatccctctatttgagtatacccttgtgccactaatcttgccttgtttcttactactaatccatcttcattgtgcttgttgcgaaacacccatttggtaccaataacattgtggttc

SEQ ID NO: 154694 - DNA, 826 bp, Zea Mays
cgaagctgaccgagacgccagtaactattggaaaaattatcgggagaagacagttgtagaaattcggccttcaaaagagaaatgctacgaaaaatccatagaatgtgtgcaaaaaataaaatctagcttcgccaatgttggcgcattctctagcgaggataatttcgtaaggggcgatcctgaaggcccaattgactggatcagcaatgaagctgaaacctttgaagaagttttgagtgggcgtggggatgtctgtgccttctcaggtgccaggggaatcgcggctattttggagaaatcaggctgcgatcacgtgaaagctttgactcaaactgaagctgccttatctattgaagatacaaaagacccctcggccgaagcaagcttagttggcgggaaattcttcgctgatatctgggaaaatggcggccgagagatggcgcacaagataataaaaaagagtgaaaaagattctcatgatgcaaaagaagcgacgaaggcagctgagaaagctgcggaacttgaaaggcggataggtattgcttaattgcttttgactttgtgttttatttctgcgacttcgaacttatttatgttttgtatcgcagctgagctatctcctcccccggagcctttcgagccaacagccgacccagaagcaaagagagaggaagaaatcactaaaatggccgaagctattttggataaagctatttctcaactgttaaacgaagctgcggaagtagttttaaaagaagaatagctgctattgtaaaaacatttggaatgtaatatttgctgaacaaagtgtgtagtatttttataa

SEQ ID NO: 154695 - DNA, 978 bp, Zea Mays
ggggctagggttgctgggtgatcggagcggggatcgggtcccattattttcagggccgggacggtgggttcgaagcgcggggtcgttcgggtggtgggtgaatcggatggcttagattgcataacggtatagcaggcaactgagtttgcgtaacggtagaacgattgggaggcagccaaccccttgcagccttaataagtagtaaagattatacgatggtacggtggtgcactttggctttgttgacttatcttcgtcttctttttttgggggagggggggagatgactctttctatattcgttggtgattagtgagcacaagaatatagttggtctctttgcttcttagttggtctcctcagttggtctctttcaacgtgctccttgatttgttttttaatgacgaataatacggctataactgtgtttgtgatggttcattgcacatagatcaagcacttgatctagcaatgtttgttcgccttgtggaatatatatctgtcagctccacaccaaacgaacttgtgtcgtacaagttttactacatcaagcacttgattgcttcttaatacgtagctttacactaatacgtgaaagacaggatagcttagcatcatataaaatacagagcagtttttcctttgtcgatctttttttgctagatatatatattttactctcccccgttccggctatcgctagctagcagcttccctatgtcacctgctatctcattctatttcaatcttcactatgtaaacagtagagtcgatctatggtacgaaacaatattttgtacggtcatatacacgttgtgttgagcacagccacatcgatcacccgccgtcacgacgatttttttctgcccattgtccgacataaagtacttggtaaataggtcgttgccgataaactgttcaatgcgccctgtttgccgagtattataatcgataaagcgtttgtcaagtgtcatcgag

SEQ ID NO: 154696 - DNA, 357 bp, Zea Mays
ccacccacgtctttgccctagcaggtttacgacaggaagagagagagagagagagagagcgcacgagggagtgggcggatgttaatgaaccactggtgggggagaaagcggtagggggcagcgaggacgcatgcagagcaaacgacgtgcggaggggaggagggagaagaagggcttggccttagaggctgtggctttgatgtgtatggcgtgctcgtggcatgcggagcgggcgttggttgccaattttggtggagctctggagctggatgatgcagggtggttttaacaacgtacgaaaggtttcaatgcgggagcagacgcacgacacacgattgttaatcgtcgaaattgttg

SEQ ID NO: 154697 - DNA, 336 bp, Zea Mays
atgccctgggttttcgccgcctggaacctgccatatgaaacgccctgtgcaaatatttctcgcgcgcgaagttgatggactcaattcgttgctcgccgggggggacttcaccatggagctcgaacgggtggggatcgctgggcggaccggacccctggtcggtggatacctccacaagcggggagcaaccattgctccgtctacctcgcgaagggaagatgatggaggaccgttggatgcgccatcaaggattgaggtaagaggattgttatcggccgtggatcagaaatccaaaggctagaacggtttaatgcgggatagagattttggaccgtg

SEQ ID NO: 154698 - DNA, 559 bp, Zea Mays
gcaaaaaagagcgcctagttaccgagcactagcagaggcaagggcaaactagagtatagggaggaaggagtaggcggaaacgaagcaagggaagcgtaagcgttaggagacgaggcgccgagggaggcaagccgatcacaccaaacgcttcgtgctgctgccccgtctcttctcatcgtgatctcagggcagtggatcgatctcacgtcggaggcgaccttcttaggcgcgccaccgccatccgagccgagccgcagcgatccagatccaggtacccccttttggaccgcccctgcccctctatccctcgccccatcggcgtccgcgtgtcctcgtcccctgagacgccaccggcgtggagatggagtgacgatccgatcagatccgattgctcgttttctccgagaatctctcccccttttgtcggttgtgagctctgaaagtcgaatatgccctgtttccctccaatccatccagttggcagcttgtttgccgcgtggtggagttcgtactgatgtaggtgatttggtccaacttttcgattttatctgtgtgttca

SEQ ID NO: 154699 - DNA, 519 bp, Zea Mays
gctaaggcatagtttagatctacaccgttggatctcgggtgtgcggatcagattttgtgttggtgtggcacactgcgggccgcgggatcgtgatccaagcgtgggcgtggcgtacctattcgggtgcacgctcgatctaatctaaatcgttagaattcgatccgacggcggggaaacaatggcaccccttcggctgggtattcttcttaaaaagcccctacgatttccagaaaacaacccgccatccccgctgactgttctctacgtcttagacaacttgcgccgtagcccctagggtttccgtaaatagtgcgcacagtccaaagtgtgggtaaatcagtgaaaatatttataaattgatttgtgactataggaataattgtagaaacttattttattcataaaaaatcatatgtggtccaaattaatccattctagttcctataattttgtattaattatgtttatcccttggtaacactgttttaacatgaaagccatattgaaattaatatccta

SEQ ID NO: 154700 - DNA, 540 bp, Zea Mays
tctgtcagacagactgaatatgaacctgatggtacaataaacaaaagatcttcagatgtcgtgaacgtgccgccggtgagctctgcgccatgatccttgccgatgtcgcgattcgtgcgctcggtgtgcagatattgtcgacgatgaaaagatcttgacgctggataagcctgggcgcggtcatcgggctggccgccgtacccccccccttgccttacggccggtccagataagctcgtcggagttggccgtgtgccgattggatgccacgtgcctaggtgctctaccacgtcgcagtaactcgtcttaagcgtgcccattcatcgccggtgaccttgccatggtgaaggccacgcatcctttgcgccagtaactctcttcctctctagccgcccgcgcgccattccaaattcaagagccatcgccgatggaacctataaattgctgccccagtgagctctactaggtagttgtgcatccagttaaccagccctcacctacaatcgtcccccacagctccccaatttgggatttccccca

SEQ ID NO: 154701 - DNA, 713 bp, Zea Mays
ggttatttgagtatggttgctatagcaaagtcacagctggattatagatcaacaactttgttacagatggattaacatgttgtcacataaaaattagagaatgaaggcctctaattcgctctgtcagacgttctgatgacgatcaccatagtacagtaacagaaagatcttcaggtgcaatgcacctcaccgccggtgatctgccgctgcaattcttgcccgcctaggagattcgtgccgcgggagaggtagataacatcggggcagggtgaaaatatccgaggaggggtgaatctggtcgctggccggaccggccgtcgtgtcccgccgcggtcagtcgcgttggcatcaccggagctcaccgttctccggccatgccacatgcttaggaatgttgccacgtcacaatgaactgtaatatggagtctgtccatcgccggaggctttgccacagtgaaagccatgatagcgctcacgccagtaacttcctcctctccggtcgccagctcttcccttccaaattcggagccaccgctcaaagcctctataaattgatgccccagactcctccgctaggttgttacacgcccaatgcaccagccctcgcctccgatcagccactgtagtgcatcaatttgggatttcctccaattcggttctccgtaccgccgtgagccaccgcgccgtggaccgccgtctccaggtccgctctc

SEQ ID NO: 154702 - DNA, 598 bp, Zea Mays
ggtttgcaaacagtggtgagggctagttgatctgcgcagtcgcaaccatggcgatcatagaagagggagtcagcgtcggggacgagaacggaggagcggaagccaggaggcgctgcctgactagagaggagtgcgcttgccgaaaagactgtggggacgacgctggctcgctgggatgggtggcggcttgaacatgaaggagaggaccggtcgacacgggcgcctgccgcccgacggctgcagagtaggcgatgggaatagggcagatccggtggtgtcgcggcacgtcctccctcacgggcgacgaagacgtggacctacggtgacgtccgtgggcggtttggtgtacgagcggcggagcaggctacgtgcgcctatgtgctcccgcgggtaggaccctcacgaacacgcggaacacggagggaggcatgggtccaagcagaggaggtggggtcggtctgaggaaggaggtcagtggccagggagagggggtcgacggctgggatggggtggtgggatggaagagaaacctaaacctagctctggtaccaagttggattgtgtgaaaccctaaccataatccagggttgggtgtata

SEQ ID NO: 154703 - DNA, 424 bp, Zea Mays
aaacaattttcatgtccaaaaggtactaagagtaagggatgagtatcagaaatcaagacaggtgagtatctaaaatcaagacatgtctggtaatgagaagctaaccagatttggaatcccacaatgttctaaacacaaatgaatatcagacgatgctttgctgctacaacaaattttgaaaaatcgcaaatttataacagagtggttagaatcatatttggaagtctaaacaattacagatccttggcaacaaagttagatcagatccctgttctctaaaccaaggaggtaacacacagatgcagaatcagacatgggactcgatccgtgagctttggtgttacctgagcgggaacagatgagagcagttgcgagtatctgcgaaccaccaccacgtagcaatgaagcagtcaagccgccattt

SEQ ID NO: 154704 - DNA, 691 bp, Zea Mays
aggcgcggacacgcaatcgtcccctgcaccggtgaccaagaagaaagaaccggtgcaggagccggcggtgcatgtcttcaactccatcccaacacagtccagcaccgggtcactgatattcccgccaccgccgccgccgtccatgccaccgcccaccggagccgcaaaggccaccaagaaggcggcgcctggcaccgccggcgacgccaaggcggcggagtatctcatggttgataagctggagttcctgtacgtcaacgtagtgcgcgccaggggcctctccggcactgacctcacgctcggaactgatccgtacgtggaggtccgagtgggcaactactctgcggtgacacgtcatctcgtcaggaatcatgaaccagagtggaaccaggtgttcgccttctccaaggatcagctgcaggcggacaacgtggagttgatcgtcaaggacaagaacctcatcgtgtgggacagcatcgtgggcaaagctgacctgagcatcgccgaggtcccaagcttggctcttcctaatcgtcctctggcccctcaatggtacaggctcaagggtgccaagggacaatggacaggcggcgaggtcaatgtcgccgcctggaaggggtcgcagtccgacgaggccttcgcgggcgcactgcacgccggcgcacacgacctagcactgcccgccgtggcc

SEQ ID NO: 154705 - DNA, 464 bp, Zea Mays
cggtacttttataggcgactggggagcgggaggagaggtggcgagcaccggcgacgcttgccgcgacagtgatgatggcatacagtggcgacaggatggctcgggcaggggttggcgacgggatggctcgggcacagtgcgtagggacgcaaggcgccaaaccgagctggcgagcgtgtaaatggcgaggtgacggggcgggcggtgtctggcggtgatcgcgccgatagcttgatcacgggcgcgggggaaggggctgacaagcggggccgaattgacagagagagagagcggatgcagggagatagcaggagcggctgacgtgtggggccgggctagcagtgggcgcgtgtggaaggtgggccgagctgggcctcgggcgggggagacgagcgcgcgggagagagggagaagcttgggccggaatcggccaaccgggggggggagagaaattcctttttcat

SEQ ID NO: 154706 - DNA, 2018 bp, Zea Mays
agtctgtccaaaaaggattttgggatcatgggagaatcaaaggtatatgtgcacataccgctgtaagatatatgtactgtgaaaaggaattagactctcgttattccaatagagtactgcacttagttggaattttcaagtctcctagtgtcttgggaattgtacttatatagttcacctttagaaaattcaagggaacacaattaaaaattcctaaggtagctatctagagagctagattattctgtgaggaggcttaactatagaaacaagacatacattagatgcaaagtacttgacatcgagttagtttattaattaggtgaatatcagatcacaagattgttaatcccaagcgtgctgcagatacataccgcattgagattcgcacaatgggaccctacgtgagttacaataggtgacacttttaaaacttctataagtatctgcagtttagtgcacacaagggtgcaaaacgttagccaaatggtaggaagggaaaccctacaaagtaaccaaccaagagagctaagactacgagtctgcaacttaaagctgcttcttccttctctgagattttgtgctagcttttctccaaatttagttagtctttgataagagcagagccagtgcttagtgacccaccttgtttggccccaaagaaatatatggtagtcccacactgagtggaagaaagggttcgttttagctccagtaatcagcagaaaccagaatcttttagctacttcctaccgagtgaagtttgaccatacagattaaccgttaggttttgtagctggtaacttcttgtaactagaagcaggtgagcactgcttgagatatacagcatctaaccagtagtttgttgtactgtgtaaacatatggatgccatcagaagtgatgacatagagaagcaagatgaagttatgttacctggattcaggtttcatccaacagatgaagagcttgtcaggttttaccttaaaagaaaaatccagcagaagtctctccccattgagctcatcaggcagctagacatctacaaatatgatccatgggatctcccaagtaagcttctgtgcacctcttccccttgttaactatattctatttctctgcacaaatctgtaaagagctaataaagaaaattgtttgttttaagataagcttagttcgctacatgatgctccttttctgtacaagtaacgtgggacatgttttgatactatgaatcttagtaaatcttcaaaaacttttacatgcatgctcgtctgtatctataaggttttgtctacttgcaatactgagcattatacaacaggtaaaactggtcatagagttaaatatcattaacatgaatagtaaggtatgcacaaaccaacataatataagcttgctgtcctaatgtatttataatgttttgtctcggtgttaacgaaattttatgtgatcacataaccagctctgagcctatacgaacctgtaagttcttgctgagcttatgctttcaattgtatgctgttgtgttgtatagctgattcaggcttcggctatcaaagtttgagtgcatgtaggttggacatagattatatttgcacacatgaatgtgtaatgcatcttatcagttaaacaccttggcttcaatattgaaccctaaatttgggatctttgatcgtaactagtaaagacagcatgaatcttacatacagttacttacaaaatattctgtctcttttatctccataaagaactggcgagtactggagagaaggaatggtatttctactgtccaagggataggaagtatcggaacagcacaagaccaaacagggtaactggagcaggcttctggaaggctactggaactgacaggccaatctactcttctgatgggagcaagtgcataggcttgaagaaatctcttgtcttctacaaaggtagagcagccaaaggtgtcaaaaccgactggatgatgcatgaattcaggttgccatcactcactgacccaacactgctg

SEQ ID NO: 154707 - DNA, 741 bp, Zea Mays
ttccctttgtaaccaatcaagtctcccttcagttgtccctaacaaactgaggaccttcctaagttcaggtttcataatgagcaatgttgatgaatgcataagggcagtttttttcttgcactccatgttctttcaccatcctcattgcctctgcaattgtaggaactgggttggtcataggaggagccgatgaagcttcaatacttgtggttatcttgtccactccttctatcttgctgcaagtttgcttgtacaagcgtaagaatggacttttctcttccttgtcttccatagcagttgaagagaccttacgcttcttgtgttttggtatatgcaaagtagacaatttgacattcatggggctttttctctaactcatgcacctcatcatcactgccatcatcagacaaatctccaggaatggaagcagaagccccagtaacatgtgcacttccaaacatgatgtgcaacgaatctaggttggttggtccacattttctgaactgtacatgcttgcatttcctactatttgctggatcatggcatctctggaaaaaatacacatgaagttagatactaacgacaaatcaccataaacaataaacaatcatgttttgtgacacttactgcaaggtgatccttccaccatgtatcatcacaatccacagtttgccttgcttcatcccatccaagtctagtggccatatttttcaaatccatgaaacaggaataacttctttt

SEQ ID NO: 154708 - DNA, 1112 bp, Zea Mays
ctttgagtctttgttgcctattatttcttgtccttgttggttgattctcgactcactaacaccttatgcaggatatgctatatcaactcgctgtttcacttctcgatgctggggcaagttgaaggagcagtcgtccatgcttcatgaaaagctttctcctctgcttggatctgaggttgcagtgctttgcaaacagttggctgacttagaggcctctcatgctacagaaaatgccggtaagatagccattgttgcattctcaactttattagtttcatgcttattctatgtggtgccttgtagcttctacggataaattttctaaactcgaagacactaagattcgctacgagcctgacctccgtcgggttaaaacaactcttgatggcgaccgagaggccaataatgcttcactacgacagaaatttgacatggagaagaaaaatcatgaggtaacttgttgtgaactccagctcgcctactccatttgtcgaagcgctacataatatgtcccaatctgcaggatgaaatgcataagcgagaagagaagatccaaagcttgttgagtgaggtgactcagcagaaggaacatatccaaactttgtcctccacaaagtctactctcaaaatactacgtagcttgtcagaagaccaatccaaaaagtatatggctgtgaagtccttgagaacaactgtaaggtgttcaaatttcttatgataaagccatggacaggctgaagcatgttgttcggtaaaaaacagtggtctccaatattgatgcttacagagaaattacgatagaaacaactcaaaaattagagtctaatgtggctagaggtgagggagctctcccccaagataaaccagtatctccccccaccatgtagagtagctatacttagttctggagtatgttagtttgagaacttttggttgtattgtgttgtgaactatttgatgcctttctcaggctgttgtatgcttgtcgttcctataatgagaacacctaagtggattttcttttgtcaatgtcaaggctttgtaccaacctaagttagttgtaaggcttagattccacttgcgctttgtatgcatgaaaatttatcaccgac

SEQ ID NO: 154709 - DNA, 999 bp, Zea Mays
ctactagcaaaaatacgtgcctacctacaaataagaaagtagtagcatgtatatgtatctctaaatatatataaacacgtcgactatttggtttacattgcatcatctcggtgataataatatatgtattattatacacacggtgacaaatattgatagtcgtcaatgatactgttgcatagtggttatctaataaatactggttttgatataaaaaatcaatgtgttatgatataatccattgtgtgacgttgctatacatgtgattctcatccgattcatgtatagtggaacatctggttttgtccttagaaccgggtgtgacatacttcacaggcggccacatacttagaaacgtcaaccttcatccgcttccaccagaagttttgcttcagatctcggtacattttggtttcgccagggtgaacggtgtaaggcgttttatgagcttctctcaagatatccatcttcacctatgatttctgaggcacacaaaggcggcccctaaaacgaaccaaatcattctcatcaatggagaactcccggggttaaccatcgcgaaccctctttcgagcttcgtgcaataaatgatcctgctgctgagccgcacgcactctttccatgtgggaagattgaataagcatacgagtctcctcactagcggtgccgacatagcacaaagcgatccccaaacggtccagatcagcgatcaacgacaaggccacttttggaaccccggacctgctaagggcatcagccaccatatttgccttccccaggtgataatgaatggacaaatcataatctttaatcaattcgagccatctacgctgcctcaaatttagctccttctgagtgaaaatatacttgagacttttatgatcggtgtaaatgtcacaagcctcgccataaagataatgcctccacgactttagagcaaaaaccatcgcgaccaattcaagatcatgagttggataattcccctcatgcttcctcaac

SEQ ID NO: 154710 - DNA, 527 bp, Zea Mays
aaaccacagagggagtccccaccttgaatcacatcgcggcgagccctgaccacggtagactttgccccatggtggtagatgacttccggcaagcaattcacctcttctctgccaccctctgtgcccgctggtgctactaaacttcctccccgagatcagcgcatcccgcagggatggtcctgaggctggaccggttgcccaggcaagatccggcagtggtagcttctctccctttctctctctctctatttggtgcatctagatggctgaggggggtcgccatggtcctgagttttatagtctagggcgaggacatgccgcaatactagggcgacgatggttgaagcggtccgcccgagaactccggcggcgtgattctgttttttggacatgggcgcgacgcggtagagagtgaatccgacgagcggggaatggggaatgatggctgggccacgctgatcagcgaaagacttcgcgagcgcgcgaaaggagtatccgacaaagtggccccacgtggaagtgcccca

SEQ ID NO: 154711 - DNA, 696 bp, Zea Mays
acaataacacaaaggagagaaatagtgaagggttaaacgctggttgggcctcaaaccgccttcagcccagctccactttcaacccttctggcccaatctgcacacacgccgccatcaccgctgggtggggtaccgcggtcaggtacgtcgtcctcaaaatgccgcaaagcagcggactccgcaggaatcgcgcgcgcgcaacaggaatccgggcttcgcggcgggatcaagtcttcggagtccgactccaagttgtatataaccgtaccctcatccagccattagtagccccaagttagccacgcaagaagaaagagagagagagggtggaaagaagcccatcgctggttttgcccaggtcgcgtggtgctctgcggtgcgatctgaatggtcggccaagcgctgtgaacaaatcgaatggagggctggggtgttggctgggcgcagccaccttcggtgctcgtgccgccatgggcagcattgtgagcgtggggaaaagagctcgtggggatctcatctgtaagctacttgcctcgtcggggtcctgctgtcgggttgaggagcttcgcctgtgccctggggaggttgggatagcatcaccgtggttgaagggaccaccgtgtgccctgaatttctcacctggggtcggcatcgtcgcggtccgccgcgtgctatgtgcaggacccctgctgctcc

SEQ ID NO: 154712 - DNA, 593 bp, Zea Mays
tgctgaacgtgggggcagagcacgggatctacggctgttcaggagtggccgagatccccgcccgacgtgatctgcgagatccccgcctagtggaattcgaggctggccgctgggagtggggtcggctgttgggcgccatgccgccatcagcggctgcggaggcgtagcacggttgtgcgggcgaggacaaggcgggggcatttggttgctgggagttgggcgagatccgcgcttggcgtgctggtcgtgggcgcggctgcacgctgggagtgtggttgctcggagttgggcgagatccgcgcttggcgtgctggtcgtgggcgtggctgcaagctgggagtgggatcggttgctgggcgccatcgccaggggcagtcggctgctgggcgccatgccgccatcagcggctacggaggcgtaggacgggtgtgcgggcgaggacaaggcgggggcatttggttgctgggagttgggcgagatccgcgcttggcgtgctggtcgtgggcgcggctgcacgctgggagtgtggttgctcggagttgggcgagatccgcgcttggcgtgctggtcgtgggcgtggctgcaagctggga

SEQ ID NO: 154713 - DNA, 360 bp, Zea Mays
cggtaataaacaagaactgtgattctataagcatgaagtgctggtgttatctacttggtgtatttgtaatctacaatgtttacttcttaatgcaaatgatgaacaattatgcctatttgagaaatagaaacaagaacgaaatatagttcaagagggcaggtgcaaacacaccattaccccgatctatgcttgcgaagtagtgtgcaatgatttacttgtcaatccacagtttcaacaaaaggacatgcacttatatttgaactagtgtttaagttttgaaatatgaagatatgatgtttttgtagtgagacactcagtggttatttcagttcccactctctacaaccccatggaaaaaca

SEQ ID NO: 154714 - DNA, 716 bp, Zea Mays
ccctctggaacatgatacaggtggaaattttctctaaattcctcccaggaatgtgctgctccccttagtagacggggaccatacagaaccttctctttgacgttgcattgagcgatgtgcaactcccactctactgtgcgtagctagtctttggcatccatgaggtctgcagtgtgggcgaagacaggggatgacctctcatgaactctgcacgcttgtccctgggtagctgaggcatctgcacttgcggtaggggttgaggttgctgttgcacttgctgcatggctgctagggtctgcccaattgctagcattgcttgagtctgcctaagaaacatctgctctattgtcctcgagggtggcagtggaggcagctgcgactgtggtgcctcatcctacggggcatgttgttcttgctaagaatgccttccacctcggcgcctattatcagatatttgtggaatgcattcacacatcagaactagccttgaaatctttcaacataagaaaagacttacagagatcttcacaatactgaatgaacaaacatcttcactgattctcaacatagccaaacacagctactcagataaagaggaaactggaagcaaaataatgcccaactaaatatctaactttattaacactataataaaaccaaactgcatggaacacccacattttggtgacagacattacaaagatccaaaatcatca

SEQ ID NO: 154715 - DNA, 1066 bp, Zea Mays
agcgagaatgatatttttatgagaccgagaaaataggcacgagcatatgaaatacctgtaggtagtggcgtcccacaaacaaacagtcccatcatctaatctggtagccaatattggaagtgtggggtggcaagcaacatcacgcatctcccgctggtgaacaaggagcctgtggacagttttttgtgtctgtagatccaatatctgatttgacaaaaaagagacagaaggtactaggctagttactgtccagtttcagtcattttaattcttcataatggagacggatgacatactgttgccttctgggaccaaatgttgagaaggaactggcgatcagcatcagtgaaataatcaacgttgttcggaccaaacaatgtggtgataggggtggaagaatgaatctcccagacctgcgagtaataaataagatcttttaaccaaaacaattgatatttaaatttacaccaaattaccaaccattgccattataaagatatctaaagcaacctaaattgttcatctaaattgcatctctaccattattaaaaacaaactaagatctcttaaatctgtatagtattgctgaggaccgaggaccgaggaccgagatgacgcttcccctcccgcctccttgactccctcctccatcctttcgccttcctgccttggccgacgcccctgcctcctcctctaccagccccacgccggttcttattccaaggctggtggccaccgcactttcctccccggcgtcggtcgctgctcctgtttctcctttctccggtcctggcgggcgtacaaaggcccagcgctggagtgacgagggcggccattcttcggctgctgctctggtgcgtggtgcaacccggcgttccttcaaggaggcgttgctggctgcagagcatcccgctactggtggcgccgccggtgtgactggtggcgatggctggataagagtggaaggtcgccgggctcgacgtggtgctgctgtaatttcgaagcccccgtcaaggccagtcccggtcgacttgcgcgggaagtgtttcaattgcttctcttcttc

SEQ ID NO: 154716 - DNA, 294 bp, Zea Mays
ccacatttgacttattggcatttgatctattctgcggggacgcctgcggatatgatccatcggccttagtcaaagcatatgttctgattgcagattcacgtggtctgtgataactctcctccgattaattcaccctgatggtgatttgcctcacgaagaggttcatcttaatgatgaagttcctagcaatgcgcgcaatatcattgtgctgggaatacggaacaatgaatatttcgtttttgggaaacgacgaagatcattattaaatgtgggagacaaatatgtcgacaccta

SEQ ID NO: 154717 - DNA, 453 bp, Zea Mays
ttctgcaagtatttaaactaaaaccatagccagatagttgcaatcaactacatcacaaaagcattactgagaggagattattagacgagcaccgtcttactttacaaattcaataagctgaagagaagttgtttggtctagtctttggtgttaactaaagttataagcatgaatgaaatgctgtaagacagggattgatgtcataatttatgccatacaagacaacacgatgcactgaaggaccttagagcagatcatagcttcaccttcactaggcaatacaaatttgatgtgcgtggaagccgagctgtggaggccgagttgtggctgtggtctgtggaggtcatgccttggtgcgtggagccgtggaggctgtgcgttgattccgtggaggccgtggagtcgtggagggctaggaactgtacctgcgaagcctggaagccatgctgcccg

SEQ ID NO: 154718 - DNA, 425 bp, Zea Mays
ttttaacttgggagctcctgttccgaatgatcaggatttgggtgctcaaggcatggatggtctactctttgaagaggaggacaataatctggagcttgaccccatccctgttgtcttagctctatggggccatgcagccagctccaattcagtagcatatagatgttgctgatttagctgtggatatcaatcaagagcaactacctatcaatgtgcagggggctattggcgggctagattttcaggtagttccccaaggggaagatcagataatggaagaggctcagcaacatggcaatcaggtgggagcagacattgacccatttcacaataatttggagatcaactacatgtttgcacctaaaagacagcctgacccagtattccaaagtcatgtttcgagaatgaaaaatgctcaattctat

SEQ ID NO: 154719 - DNA, 717 bp, Zea Mays
taataaaatcccaatttgtgatgttttctgtgccaaaaaggctttcatgcattaatattgaatttcttcaggttacttcgggtaaaactttatgcacgaggagagagcagagatttaacttatctgtgttccattgtatttcgatttaatttcccagatttaatatagttgttatggccacttggcgatatatataaatatacgatgccacacaacacaatcaaacaaaatataaagtgaaaacaaaattgtttacgaaggttgcacataatgtgacttcacgaccttgaacaacccaccacaatccacgcgagtacaagctctagcgtatctggcgtcaacgcgtgtgcggccatcagggctacgatagtatagcaagccttcgtaataagcgcaacaggcacaattatggctcggtaattggggaacacgataaatccacgcaacgtgcacaacaggcgcaatttttggctcgcgttagacagacagtgcctacagggcatgcaaaaaatacgcgacacagcgatgacggtctgactcaacgggagcaatccgattaatggagagcgcgacgtagcaatcacataacgcaactaagttcgaacgacacaaatactgcgtcgtgttgccagggtgcagccagtgcacagccaacgccataacttggtcgattaataacgtagtctgatcgatgtgtctgagtacccactatacaat

SEQ ID NO: 154720 - DNA, 883 bp, Zea Mays
ttcatgcctttgaacatacccttttgccaccaatctagctttatgcttaattatgtcacccttttcgtcatgcttcagcttgtaaacccacttcagacctattggcctatgtccctttagcaatgttacaagtgactagatcttgttctccttgatagactgcagttattctagcatagcagcacaccagagtgggtcttgaatagcttcttcagttgtggcaggttcatcccctactgctgctagtaactcttcaacaagtcccatgccattttgcactcgagcattgcctaaacccagaatgtgttcaagagtcttgtatctgcgtggagcatcatcatcatgatctgcatcaaggtcgggggtcactgttggtggtgttgcaaactccacaacaccggttgttgtaggggtctacagttactgattccacctggagtgattgctgaagattggactggcatgtgcaatgtcgtggatggtgccctggatggtccagcaaagtttttctccctgactggtgtattgtccagctgctgatcgccaccaatttgcatgaactcaacacagaaaggattctcatagtctaccttctcggcatcaccccagtcccatgcccgattttcttcaaacacggcatcacgggataccatcacacgctttgtggcagggttgtagaactgccaagctttgctcccatgctcatagtcgatgaacacaatcggcgtgcttctgtcctccagcttcaataggtgtttggccccctgtttgacatgcaccacacatccaaacgtatgaaagtgttcaacatagagcttaaaaccataccatgcttcatgaggtgtgcaccctttaacactctgagtgggagattggttcaata

SEQ ID NO: 154721 - DNA, 766 bp, Zea Mays
cgttagtagggtatagtggtcaccctcggttgagtaagtgttctgatttcaagtttaatcaagtcgaagtcgatggataacgaatagtttgaatgcttttgagaatgaaatcttttattgatgacgtgttttccaattacagaatacaacattgctctgatagttcttgctaagggtaaaacttcctaaggtgctctatattccatgaaatccctacttccgtgccatacatttgagtaagccgatatgatcttggacgagtgacctccgacactatgaatggcccctcccatagcggcgataatttgtgccgtccttctcccgttagaattcggcaaagggccaaatcttccactatgaaggatcgatgtcgtatagtcttatcatgatagcgcctcagggtctgctgatatctagctgactgaattactgtattcaaccgctcttcttctagtacgtcaatatctttagcctggtagcttctgcttcagctatgctttcgaagaccagccttggtgccccaaacctgaggtcgacaggtagcactgcctccaaaccataaaccatgaagaagggggtgtttccatgtagagctcgactgggttgggttcttaggctccaaaccacgtaaggtaattctctgatccactttcttgcgaacttttcattcttgtcgaagactttcttcctgagtgcttccagtatcattccattagccctttccacctgaccgttggctcttgggtgtgctactgacgcatatttg

SEQ ID NO: 154722 - DNA, 891 bp, Zea Mays
gccaaacatataaaaatgctcatcaaaggcatcgtgtagttccatacagcaaaaggccttctcataagctaaatttttacctccaagctcactcatgcaaatgagccaacaaaataaaactagcaagagtccattcgtaacctcacaaaatttgccttatgaagggcccgtccccatccacgtcatcaacactaattgatcgccaagatcttgatgacaaatgatgcaccaatacgatgcaaggcgacgattaaattccttgacttgcagaccttgagcttcttcgcatgatctatggcaaagctaattgcttcctaagtcgactcagtatcagatgctttcgctgtagcagcgagaagtatcaagatcaggccgctcacaatcatgttgtgcctggatggacactcattgttgcaagtccagttaaaattatcatcagtcttcaattttgggaccatagtggttatcactagaattgttggcctgtactttgccacaagccttgttgttgtgccgccccttgtgaggaccaagatgagtgatgcattagagatgttggcggtttgaaccagtgacgacgccaagctctccagtggactcataaagattggggcaatgttactcattaacttgaaaactgctccataatttgtatgtgaatccttgacattatttgcactactagctctggatatgccccagctgcagctaagcatcacacaatcagagccatccaggacaacattgcgcgatgtcggttgcttttgctcttgtaggctagggacatttaatcattgactccagcatctgggttgcagtaacaacatgctttctttgcacattgcatttgaagatcatcaccttatgagcatagacacatagtgcatattt

SEQ ID NO: 154723 - DNA, 343 bp, Zea Mays
gtgggaaacagtggggaaagtctgttaacaagacgcccaagccaagctcgaagtttgcatgacgactcgatcttgcaacaagctagctagcttagctcgagagcaatttggttaccgagtgatggtgaccccatgatgctgatcgagtttggttgcttactccaaccggttatgatgggctctcctcgttatcagcttcctcctttcggagcgagaacagttcacgtcattgaaagagcactgaaacttcacaagagagttgcaagttgggaactcattaatgtagttccgagttaagaaaaaagaatgagacgattcttggtgtgggtatggtgtcccatat

SEQ ID NO: 154724 - DNA, 682 bp, Zea Mays
atttttttaatcgtcaacggggatagacaatccctagctgattttcattgattattggtatgactaagctacacctcaacgacctcgtttttaaaggaaacaaggtaacctttacataatgttgtggcacataacatattacaaacaactgcaagcacaacgcaggcaaggaggaaaacaaagaaaacaaacacaacacaaacagacttgacatgagtacctgatcatcaaacaacgtacttgtcggctaacccaaaccaatgtaaccaatgtcgcacaattgtttccctccattgcgcacaacaaggggagaaatccttgaagtgatgagggactgtccaaccaagtggggactaagagtgaggaagcataccaatcgaagcttgccaaagaacaaccatatcccttgaacttgacgacgagcacacccacagagaacacatccaagcaccataaaccgccatcctacgcccttaaaggggaagaaacctctatggagggagggcaagaacttgggtccacccagcataagattgattttaccaccaacatgagacagatgacgaagcagaggtgtcaattgtcacgcaatcaggagccacgactattaccagccgcaaggccaaggctagcaaaagaagaacacacataaacaaccatcaagcgagcagagatgatagtg

SEQ ID NO: 154725 - DNA, 548 bp, Zea Mays
agaaattgtgctttctaaatgtacatcttcggccgtggcagcttcgacagctgcagattcagcaggtgcagtttcggtcgctgttgtgctctcaacaactggtgccttcggagccgaagcttgtggtggtgtcccttcaataacttctgtcacagtgacaattcttcgcctttttggcccagttaccttctttgttagcaagggcttcttttccttctgaaaaagcttcgtcagatgcggccccagtggacttagcttgataggcaaagatttaatcattacctttaagatttcctccacgtcggttacagaaggtgttgcagcagtttcttcttctatatcagttgccttctgcttcggagccgcagcctttcttttcttcgaagcatctgtcttcggctcaggcctcagcttcttctttttcagtttttcttcatcatctttcactaatttagcgtcttctttattcaagacgctggcaactctctttctcttctgtccttcggcccctcggtccagccgctcatagtcaggatactcaacgttca

SEQ ID NO: 154726 - DNA, 739 bp, Zea Mays
ggcctgcgagcgtcctgcacactcaggtctagtcccgataggtcatgagtgcgccgctggacgggggacgcgcgagtcataaatgcgccgcagtccgaggggctcgtaggccatgagtactctacggcccgaggggttcgtagatcatgagtgggaggcggatcggcgcctagccgtggctcggcgccagacacagttaatgtggctaatcatttatgacgggccggtcttagctgagacgcgggatccactcgagtggttttccctttggcacgcccgatcctcctatctggttccggcacgcctgaccccaggcttagtgtcgtagtgtttgcttgagggtgggttcttctagagtagacgttacctgtctcctccgattgaccgtcgggccctagttgctagaggtcttttcccggtgtgctcgtcgaccgatggaccccatagaccgaggattatatccccgacaagtagtagaagttggtatggattaaagccaagtgaacagactgttagctttcaggattggggattgtgactttgttgcctcacatggtaaatagggattcgtttgactcattgactgtctgtcgtggaagatttcaatgtttgtttgttcaaacgatcgttgtatcaagatttagctggtatcccccacatgtgaattcggtgcacatttgtcatcaagaatctcatgggggtagatagatggtagtattagtgaacatagataaatttt

SEQ ID NO: 154727 - DNA, 793 bp, Zea Mays
tatgttcacaagttcacagaattggctcgctatgcgctggatgatgtcaacacagaagccaagaagatggcccgtttcttgaaggggctgagaccagaactcaagactatcctcgccagccaagattttcttagcttctcgcacctctcaaacaaggccatacaggtggaaagggctagagaagaataaaagggtcacctcaagagaaagtttcaagttctccaagctcaacagcaggacaagcacgagagagtccaatcttttgggtttcctcgcaaaggaccaagcttcaacaagccagcagggtccgctccgtcatgtttcagccagcagggtcaaagttccctccatgccccatctgttgcaagaaaccaacctccagccaatgcttgttggcactgcggagaccctagtcactacaagaataattgtccttagttgaagacatccgtgcctacctactccaactcggtgaatggccccaagaatgctccaacacacgcctccaaggcaccatactccaacagccagctaagcaagacccaatttcatggcagggcacgagtaaaccacgtcgacgctcaagaagctcagcaagccccgggagtagtgctcggtgagttcctagttgaatttacccccgctgttgtactttttgattcacgagcatcccattcattcatagccactagttttgtggaaaagcatggcattcccactgcatctctagagattcccttggtcacccgaaccccagggttagaccttctatgccgcctcaaatgctcccaag

SEQ ID NO: 154728 - DNA, 766 bp, Zea Mays
cagacccctctgatgtggtccaacataggggaaaagacactggaagggcctgctttcattaaggaggcagaagagaaagttgccctaatccgcaaaagactactcgaagctcagagtcggtagaagagttatgcagacaacagaaggagagaactcagtttcgaggaaggagacttcgtctacctcaaggtctccccaatgcgcggggtcaaaagatttcaagtgaaagggaagctagctccgcgattcatcgacccctatcctatcattggcagaatagggctcgcagcctaccgccttaaattgccagaatccatgtcagatatccacaatgtgtttcatgtatcctagctccgcaaatgcctgaaagtgccagaaagtcacattgaagaagagacaattcagattcagaaggatctgcagtaccgagaaaaagccagtgaagattctcgattcggccatctgaaagacccgaaactcagaagtgaaactatgtaaagttcagtggagcagagaaggagaagaggaggctacctgggagtgtgaggactctttgaggagggaatacccttaccttttctcaaacccagtctgaatctcgagggcgagattcttttaagtggggtaggtttgtaacatcccaattttgatcccaaggttagaaaccctaaactcctaaacccccccttatttatcccctaagaccccccgtctcatgaaacatttcattcatcatatgcatgaaccctagttgttagtagcaccg

SEQ ID NO: 154729 - DNA, 299 bp, Zea Mays
catggccagatggaagagaagagggagttggaaagaagcaacagatgatcagaggatgtgtgaagacaacaacggggcaagcaggctatttataggggccggaggcaactgttcatctcctaccacgctcaccgaacagtcgcaagtattcaataagcaattcaaaccgtctgaaagcaaatcaggcagcagacgccgcttcacgtaacacgacaccatttggactaaggtcaactgctcgggcgatatgattacgccccgcggtcacgtcaagttactactccaggacagtgtgctaa

SEQ ID NO: 154730 - DNA, 466 bp, Zea Mays
tgaaagggtatgttatgatttaatcatagtgtaggatcttgcccaacggcggtaattagatcctgctaccccgaaccggtatgcgatcagggtcatatatcagacgatctacggttatcatccactgaaacgaaaaggtatgagggctctaatcccattcgtccatacatggatccatggccatcagatgcttagccgaagtggcgcatcaagttttgattagtatcgtctgatcccgatcacgcggtccggcactctccccccatccctcgtaacccgacgcggtggcgcgcatgtggcgcggcggcgcagctctagcgagcagcccacaccggcacgcccgagctccattaccctattagataggcactacacagggtggaaagcatcatgagcaggtgggggaggaactcaccagtgattgcaacgccgagacttctgcccgtggtacaaggcggcacggccg

SEQ ID NO: 154731 - DNA, 734 bp, Zea Mays
cgtcggcctggaccttgtgctgatgagcagatttatggatctagaggcgaggtcgcctaggagtgcagagaggaaaatctccattagggatcctagctccttcacccctcaggaagaagatggataacaaacccagcacaggtgtaggagaggagagaatggaacgaagctttgttcaagtgcagaaggttgcattggccacctaattctccaatgcttttctattatcatcaggtgtggcatcgaccggaggaacagcgtgcagtgcagtcgacggatagatccatatatagtttaagatttgtatcaaattacaagaattccaatgtcgacaaatacaaaaaaaatatcaacaataatcacaagcattactttttttgattatggaaacaaaatgttccagccttttgcaatctcttacatacggccttacaaatcgaaaaaaacaatcatccatcgtaaacattctttgaaataaaacatcaacaaatcaagctccttctaatctagcattggacctccatccatggcttgcaaagatctccatagccaccacctctaaggattgacataccgcaaggatctcgtgttgaggttgttctttctgcaacaatctccagaatatgagccagtatgttgccctgaaaagaacctgcataattgatggttttggtttaaaagtaaaaacaacatcattgcgacaaagccaaatagaccaaaacattgccgccact

SEQ ID NO: 154732 - DNA, 347 bp, Zea Mays
ctggaactcgattctttcctgtgcgaccactgatggcatcctttatttgcgtcaaggatttccctcaagatttatgcatgcatgtgtggcacaaatttctttgctctcctaagtggtgtaattatcgtgttccattgctctcaaacccgatcatctatctatgtcagttgatgttccaaatgtcacccctattgagatgttttttatctatgccagttggtgctgcaacaatcacacgtgtagagacatctggcggtcgatggtttagtggcttatccatgaaaaaggaaagtggaagagggagccacgaatataaatagggtagtgagactggtcactggtgcttc

SEQ ID NO: 154733 - DNA, 860 bp, Zea Mays
cttgacatttcgcgaaataaaaacgcgatatcgatgcggcatcgaaattgtgatcctttcggaagcaacgtcacgcaacgttcacatgggcgacaagttgtgcacagtccacacacaggttagcgcctgccacacgcatcatgatgtcaggccacagagagacacgtgcaacgcaagcgtgaaagaatttcaaacgaagtttaaagaaccagattcgatttcaaggattaaagtttgggcaagacgtcgatggctcaacccaaacgatattggattcgatgtttcagaagattactaaagtctgaattttgaaaaataaattaggacaatttagatagatggagatagacacgatgtcaaaatcatgataaacaaagatgataaaaatttagtgacctttacattcaccgctatcacgtgttaaagtccgcactcgtggtcgagcagacgataaacacctggggtgttacaggagtgtcgctcgctttgggaaggttggtgactgcagtggtttgacaccttaagagaaaccttcacccactcccaagcttctcaaaaccacctctgctaagcctgtcacccttgtgagagatggtgtgattgatgaacctatgagagctcctcctcagaaacaagtgtggcttccaaaacctaccatcttaagaacacacttgacacctttcccgacatctctagcgatccccttcctagagcccctcatccatccaaaaagaaagccccctcccacaaacaaaatccacccaagagagaggtgaggtaccattgtgaatattgtgagagggatgggcatctagcttctttttgctttaggaggaagagagatgagcgacgggtttctg

SEQ ID NO: 154734 - DNA, 383 bp, Zea Mays
catcgccagtaaccgctcggttgttatttctaaaccaccggcgtggcccgttatcactcggctcttacttctaaaaacaccgacatcgccggtaatcactcgatcgttattcctgaaagcgctggcatagcgaggaaggcaatctgaaatgcgactcgatgattctaagtcgttactaaagctttacatccaagaacaacgtctgcagtaagcataaatatgatcgacgatcgacggaaaagcagaagaattcacacataatggggagaaattcttcttcattataaaagggaagcattaccaaacttaaaaatcaactcattatgagctgattttctccccattgttcaataccctacactactacattacatttcgctaca

SEQ ID NO: 154735 - DNA, 1542 bp, Zea Mays
cgatgattgaacggctgacgccgatgaggtgtacgactgatcaagcgaagacgtccttgttgcgacttaggcatgataacagcttggcctctctatcttgagtgaggtcttcgctgattaatatagtctgatttgttattgaggcgtctagatggacttttctagcctagtcagttctttgaatttgggctttggttggtgctgctttctcggggcgcaggacaacgtgacctttgtccacagagataaggcagcagatgttgagctatcctgggacgaagtctcttttgatgttgcgatcagtctattggttcccgtaaattgttattgcgtcgagaggtcttggaattttcatgcatagataaaggccgtgaattgctgcttcaagtttgttgatggaccctctccctattatggcattgtatggatagaccatgtcgactatgtcgaaggtcacatgctctgatcttgtgttggggtttgtgccgatgaagagggggagctctatcttgccaagtggaaatgtcccctttcctctgaaaccatagagtggattgtcggcaggctgaagtaggatgtggttgatgcccatttggtcgaaggcatgtaggaagatgatgtcgacttggctcccattgtcaacgaggacttcgtgcagctcctagcctgccactttgcaactgatgacaagtgcgtccgtatggggcgcgctgcgaaggtcgacgtctcttgcattgaaggttaatggtacatgagaccacttcgtctgaacgacgggtcctgtgattgcgacatggttgacccttcgatagtgatccctttttgtcgtttgttctcgaagtctgagctagaccctctggtgatcatgtaaatcactcccctaaaggctgggtccgtgaagtcttcttgctttggtggtgggggcgtggtaggtgttgatttgggtgccgtggtgggggtggcaaagctaatctttcttgatgttgaaggcgttgttgctgtgggaagagattaggtttttgctgctaggggtagtatgggtgatcattttgatattgatgctggttgtactattgcggttgataggtatgagcactaactctttggttgtctgccagggtggccctagccattcggtcctttgttgctttggtctcggggcagtctctgtttgggtgtgctgagtcttcgccatggaagacacagtagaatcttctcgattgctgacagttcagcctcggcctttgcacctggtcacgttgccaccgtggccttgttgcgggggatagtcttgacgacaaggggggttctctcctggttgctgctggttttgcgatgttgtgcacctggagttgagcacgctcatgctgtgctggatcctgctgtggaggtctgatccatgtcctgctgaactacggagtctccttaggcttttgctaagactcaacttttcttcgatggagttcttctgatcgggcatatttttcgaaaactgctacaactcctgcaagttggttggtgggtctcttatgcagaggctat

SEQ ID NO: 154736 - DNA, 832 bp, Zea Mays
gggggattggagggcgagcagcactgcagcagacgcgatcggaagaaaaggcgtgcggcgtggaggaaggaattgaagtcaaatcttttcagcgtacgtaggaagaggagaggaggacccggccagccacgaccacgagtcgaaagaggttgggacgtcgtcggccctgcatgcagatgcagcccgccatggcgccatgcatggtcgatggatcaatagggtcatggatggatggacgcgcctgcatgctctgctgatagaacgaccgaccgactgaagtgacctctcttggaaagcccttgatgcaaccaccaccgtttaccctcttcactagctgcctacttttgtttcctactactagcttttacctggcccggggggcccccacggatcgatatccgagcccccccagctcggctcctccctctcgttttttttaccatttcgaaactactgtgtgtaagacactgtacgtacatacgacgtatactaccagcagtaaaccactggagtctggagagagctagcactccagtgagtctcttaccgatcccggccgcgcgcggatcagcctgcacctctcttgtatttgcaatggctccgtatcaggtgcacaaacgacggcccgtgcacaaatgcacaaagcgcatcaagtccacacatccggcaaccaacggcagctggtcttttttcaaagaaccccccgcgcaaccatcccgtgctcgccttcctttttgcaaaaacagacccgtgcgccatcgaggcttctcttgtacgccagcgactcctcgcctaccgccaccgtcacagtcgtcgcgcgcccctgctcggc

SEQ ID NO: 154737 - DNA, 337 bp, Zea Mays
actggccttgactctttggcaagtgtcgcattcagatacatacttagcaatttccctcttcatcctggtccaccagtacaaggatctaagatcatgatacatcttgttagtgccggggtgcatggagaatttggaaaggtgagcttcatccaatattctctttctgagttcgggattcttaggaacaaccaatcggtcttcaaaccatagaactcccttgctgtcctgatgaaagcatttgtacttatctaccttctgttcgagcatttccttaatgacttgaacacccttgtcaccaatctgggccacgattatctgctcatgtagagtgggctcc

SEQ ID NO: 154738 - DNA, 659 bp, Zea Mays
ctgagcacgttgcaggtgcatgcgcatctgttgtaacatgagttgacggtccttcaaatactgttgaagatccggaatggtacactgagcagtcgataccaggcccaattgtgatggtgagtgaccatatagtaccagaaaaggagatttgcccaatgaagaatggtagcaggtgttataccaaaactccgcgagaggcaaccacattggccattgtcgtggacacgactgaacaaagcaacggagatacgtttcaagacattgattcaccctctccgtctgttcatcagactggggatgataggaactgctaaggcataactgagtacctgtcaacttgaatagttcttgccagagccaactggtgaaaatgggatcacgatcagatacaatgttcataggaaatccatgcaatttatatacttcggacaggaaaacttttgcaactgtcagagcagtgaaaggatgcttcaacactaggaagtgagcgtatttggaaaacttgtctactacaaccaaaatacagttacccttgctggatggaggaagccctgatataaaatccatgtcactgtttgccaagcttgttcaggaataggtaatggcaaaagcagtcctgggtatttgaccctctctggttttgcctgttgacaaatctg

SEQ ID NO: 154739 - DNA, 438 bp, Zea Mays
atagatgccagttctttgtgctaaggcctaaggggctttctgttgtagaatgaactgacctcagattcaattgcttcaaagaagccaaaaataaggaagagagaaaataacaattctgtttcaagttctgctcccaacattcctaatactcaaggtttgtttctattggtttgtatatcctacccatgtagcttcctttttgtttcgagttctactgactctggttataattatgctttttagattttatcactaccttctgtgaggtggtggaggatttctgtggaaaaaccgaaattcctgaagatggaaattgcggtgactggttgtcaatcccacttggtgatgttaaggttctcgtgaatgaaattacatctgttcgatccaaaaggatattgcatgaggttcctatggatacagttacaaggttattggatg

SEQ ID NO: 154740 - DNA, 627 bp, Zea Mays
ctctgcctctgctctctatctctggtggtttccactccctcgccggcgaccacccctctccggcgatcctccggcgtctgctgttcccctcggctgtgctcctcactctactctggtgagcacctccctcctctgtcttccctctctctctccatttctctaggcagtgaacactcttcctccccttaagtgccattttccaattcttgtgaattcctatgaatcctactggtaggaagtgtccctatgtgcttcttgagtattcttgcaggttactagctccttcgggagggttttcccacctcacatagtcttttcaccgaaaccctaaaactccgcacaccacgtgttcggtgaaatgcccaaaccagccaaaaatgctccgattgaacccaaattttttaggcaccttcacaacagctccagtaacatatgtgccaaatttgacgccaatccgatattccaagctttaatttcaccaaattccctgtttcgagcgatcgtttccgagccgagtgctcaaatttcattttctacgcctaaattcaaaccaagcacacacttcactcatattcgcccatataaacctattcgtgaagtatcggctccattccatgtcattttgtg

SEQ ID NO: 154741 - DNA, 627 bp, Zea Mays
gagattattgatgttctaggaatgctcgaagtcttcgccgtttggcgttgcgagcctgtatgcgctgggggaggccttcgtcttgacaatgaaagggccctcccacttgggctccagcttgcccctggactctgtccgagctgttcggacgagtacgaggtccccttcgctgaattctcttgggatgactgcgtggtcgcgccatgcttttgtctgggcttgatatttttttagagcctgcagagcgaagacgcggtctccatcgataagatccttcgaagtaggttcgtccacgtcggggccagctgacgagactgttcgcggggatccatgctttatttcttgtgcggtcatggcctctgatccatatagaaggtggaaaggggtgaacccagtcgccctgcactcagtcgtgtttagcgcccagaccgcttcaggtaacaaatcggcccacctgcccttttttcgtcgaggagcatcttcttgacagcggtaaaaaattttccattggcgcgttccacaactccgttggactgcgggtgatatactgaggcgaaggcaagcttggtgccaatggagaagcagaaatccttgaagtcttggctgtcaaactgcttgtcgttgtca

SEQ ID NO: 154742 - DNA, 1022 bp, Zea Mays
ccctctcggtcgtgcccctggcttcgtttgcactcgggctccgttactccgacgtgaggtatgacctaacatctcccctgtgctcgaccgtctcctgacttgttgttcttatctcttcgctctctgtgttcgttctcgttcgttccccaacacccttcccttaccttctctcgtcgtgtctggaagggaggataccaccgacggcggatcccgcgtcgccgccgctggtgagatctcctcgattgtgtcgtcttccacttgttagctctgtaaccctaattcttggtgccatggattccgacatggaatctgccgctgagctttgtgcccagaaattctccgcggccgttaatgcagcccgtgacaccgtcagtgcttctgatgccgcctgtgtggtagctggtgacctctgcgccacaacatcagtaggtaaccatgtggtttcaacgcttgatgttcttgaatccactgtggaggcggaaaaaattgctatgtgttcgtatcaacaggccagtgcagtcgtcgtttgtacttaggagacattggccaaatactcatgtttgcattctgaaaacttaactgaaccaatggtgccttgtgatgcaatttgggccataatgatgcaatgtgaatcaatatggtgccttgtgatgcaatttggggcgtaatgatgtagtatggtgccttccgatatttgtggcatgtggtttgtagcagccctgtgatggatttttgataacctgagggttgttttaatgttgtgacacttgttctttctagcagccctgagatgtaatttggcttgtgatacatgtgagatcgttgctttgtcctatgatgctttctttgaaaatattgaactgtatgctacacttgatgttttttttgtcaaaaatagcttatggttgttctttgctgtggcaagtgagtgtatcgaggccagtgatggtactgaggccaatgatggtgcatatggctacttgttgttgtttctttgaaaatattgaactgtatgctacact

SEQ ID NO: 154743 - DNA, 477 bp, Zea Mays
cttcttacgtttggcgttgtgccgaatgataatggtagctctattttgctaagtggaaaggtccattttccttcgaagccatagagggagttatttgttggcttctgtggtttatgcccatatgatcgaaggcatgcacaaagatgatatcaacatggctgctgttatcgacgagtactttgtggagctcccaccacgcgactctacaatttatgaccagtgtgtctgcatggggcacactgtggaggtcgacgtctcttgcatcgaaggtgagtggcacgtgagaccactttgtcctgaccatgggtccggtgacggctacatggtttacccttcaatagtggtatttattttgttgtttggttttttgaagtcggagctagaccctctagtgatcatatgaattactcccatgaagggtggatcggcgaagtcttcttgcttaggtggtgggggagtggtagttgttggtttgca

SEQ ID NO: 154744 - DNA, 719 bp, Zea Mays
gaaggcccctttctgcagtaacttcgttagtggccgagcaattatcccgtacccttgcacaaagcgcctgtagtacccggtcaacccaagaaaacctcgcaaatcagtgacattcagtggtgtcggccacttgcgcatagcttcggttttctgagggtcagtagccacaccctcactagatataatatggccaaataaatcagctcctttttaccaaagacacattcctctctttgagatagaacttgtggtcccttaaagcagcaaataccaacctcagatgctccaaatgagagtgccaagtgggactataaatcaatatatcatcaataaagaccataacaaatttccaaaggaaaggagctagcaccaagttcatcgcacactggaatgtagctggagcgttagtaagtccgaaaggcatgactcgaaactagtagtgaccctggtgagttttaaacgcagtcttaaactcctcgaaggcgcctatacgcacctaatgataccccgaagtcatgtccagactggaaaataatttagtgccagcaagctcatccaaaatctcctcgaccaccggcatcggaaaccgattcttgatggtcatatcattgagcttacggtaatccacacagaaccgccacgtaccatccttcttttgcactaaaaggaccggagaagcaaatgggctcacactgggggtgatcaaaccatatttcaac

SEQ ID NO: 154745 - DNA, 548 bp, Zea Mays
aaggatgggagtaggaaggaaatagcaccgaggtcagatgtatggcaacattttattaagataaaagatgataaagacattgttaggcatgctaagtgcaaatattgccatcgaaacatgaaggcagaggctggacgtcatggcacatcttcattgaagaggcatttggttgcttgcaaacacaatccaaataagtttaacaaagatccatctcaaggtactctataagcaactcaacatgaaggtgtaagcacgtggaggtttgatcaaggcacactaagggttgcttttgccgagatggtaatagaggatgagttgccattttgctttggtgagaaacctggatttagaaagtttatgtccaaagcatgccctcactttctagtgccatctagaagaacatgtactagagatgtagtacattgtttcttccaggagaaagctaagctaaagaaattcttcaaagactcctgtcaacgggtttgtttgacaacagatggttggacttctaagcaactagatagctacatgactgtgactgctagctt

SEQ ID NO: 154746 - DNA, 299 bp, Zea Mays
ccaggattgaacatatccagaattctagaaaagaaagatgatatcagtactattgtatggccaggaggcagtgagaagacacctagaggatggcttttgccagtgaataaagtactcaaaataggagtacctgggaaatctgggtttagcagttttataagatctgaagatggtatccccaagggtttctgcattgacatatttgaggaagttattagtaaactgccctacaaagttcccaagcactatgtggagtttggaaatggaaaaggagaaagtaatggaacttatgacgaact

SEQ ID NO: 154747 - DNA, 597 bp, Zea Mays
gttccgcactaataaacaaagcgcacaaaagcagagtgtgtaatgattccgtcagcgtatggtgcttagctcttctctcctttccccctttggctttattccggttctttaaaaaattcctattctggcatgtggcttgtagctacacgacaacataaaggtaaacgctattacgctacagcctgagaggaacaggctgctactgggaagacagcaacctaataaatcataaatgtacacgcaccagattttttttattgtactcccaaacacacttccattaaactacgtttatgcgaccagaaagccagctttcaggcttgcgaagataagctaaccaagcccgatcaatcacgtgtattatagcgaaaacgttcactatttacagctagtgagcttcaatatttggatttgctatgttaattcaggcaagggatacatctgcactaatgtatctgccgtttttaagctccttttgtatcccttatatattaggaagcttctgtaagacccaaggagcatggaccagttggaacatgtgtgatgtaactggttatatatggatctgttctatttcagctgatgtgcatcggtgct

SEQ ID NO: 154748 - DNA, 565 bp, Zea Mays
ctgaaattgccctggatgttgctcgttatatggtgaaggtggtgcttgcatgggcagttgaggcaagacgaatcgagccaaagaatgacatgccaaagcaactaaggctgagggttgtggacttgggtgttgactacggacatactctgagatgtatggagaataatatgaggcagtgtgaaggacctgcttcggctgattttgttgtgcttcagcttcgacgttccttctgtttttggattgtgacttgacatgttcttgttgtatgccccttgtcttctccacaggatagacagaataatttcctttgttgggagttgaatctccctcaaaaactccttcctcttcttccacctcttggaactggtgctctgaaggtactctggtgagttgctgttgattgagagtgattttgctgcccttgagtatggttgtttttgtctttgttgacttggattatggatggttctgacatgccctagattgaaccgtccaccgaagccccttgtcattttggaatatctgaaggcctcctctttcctttgtcgaaaatcattgtctgtcc

SEQ ID NO: 154749 - DNA, 552 bp, Zea Mays
ctacatttgttgtgcttattgctgttaaatattttttctaattctaacagctcagtgccttgcttcctagctgtatctagaatgcatggccttatacttttatctgctttgcttggcctctacatcagacagagccttgagagcattcattcatgtggccaagtgttggtttgtaatctcccttgctagtgaattcctggagacaatttggggatttgttgtgatgagaaggttttattgggcttttgggcccggggagtcacgtgttgtgatctcatcactcctcaagtgccatcttggcgttctgcacttgaatggtgatggttcgtgagatgtgattaggagtggtaatggattatgtcttttcacaatttgtttgaaccctttaattaattttagttcaaaagtgaataaaaataaaacatgattctgatccgatctgatccttaattttatagtgtaaaatttatagcttgttaccaccctatatgtgattgagaatttaagattagtggatttgacttctgtccggttgttgcctgctaatgtctc

SEQ ID NO: 154750 - DNA, 906 bp, Zea Mays
ttaattaagtttctggatttattttaacactaaaaatcattttctaaatcattttctatgattttataactctctggactcggcctcatttaatggaaaacgcagggggctctgggtaaatctacagagacacagcgcacaggatttgtggacggcgggttgatttccttaaaacccgagggttctttagaaaaatacccaagccgaagggggtatcgggccgttccggccgttggatcacacatggacggctcggattagatttagtgtaacccaaaccggtacgcatctacaaccgtttgatcggcgattaacggcccagatttaatgacaccgagatcacgccgcagccctccgattgaatcctacggtccagatctaaagcgcgaaggggtatcccttggcctaatctcggccgtacatcgccgaaccgacggcacacgcgatccggccgacccccgcccaactccggcaccggagaatgtctcccccgcggcggcgccatgccggagcccgcgaaatccggccaattcgagcgccatactcaaattcgtcggacccacgcaagattcgcgaacccccgaatccatgcttcccaacaatttcagccacagcaccccgcagacccccggccacggtgcagttcaatccacggcggagatacatgctacggcgagcaattctaagggctccggtcatctatggtctagcccaatcgatgctacatggcttatagatgatcgcaaatcgaatgggagtgcgtacctaggatccccgggcgaaggcgagctcggccacgtgcggatggagtcccgccccgatgtcggcgaggaattggcccccgatgcaccgaattcgcgctccacaccggtacaggacggcacggtgcacaacggcgagccccgg

SEQ ID NO: 154751 - DNA, 481 bp, Zea Mays
caatgacaacactggcacgggaaaacccataacgttctggagctgcaatagtgccacgatcacgaagatgatacccctgattaaaaacaacatgagagtcatcattgttagtacaagtatcagcaacaggatcatcatcaggactggccgtgggagtagagcgaggacgacgaatgtaagtctgagtaacaggtggtttggaagagtaagaaggagatggtgtggaagcggaaggtggtgtgatgggaataagaacatctggagtagaaacagtaggtggtgatactgatgaagtttcagaaatgggaggaaggctcatgaatgaggtagactctgtggaattaaaagaagaatgagtggaagagttgtaaaagaagggtcggttttcattaaagctcacatctcgagaaatatgcatgcgacgagaagatgaatcataacaccgatagcctttatgttcagggctgtatccaagaaaaac

SEQ ID NO: 154752 - DNA, 338 bp, Zea Mays
gtgcgccggtgttgcgcgaattccggtgattgttagaccagtgcgttcgggtgggtttggacatcgcgtagaagtcgagggggcccgggattgtaactagggcgccggattcactcgcgtcggcgagctcaccaccacctgggtgggtggcgccaccgtcgggccacgctgggggaggaagacaggcctaggccgttggatccgcagtgtacgcacacgattagatctgggcggcgtcttgacatcgagcatcgtggaccgttgatcgctcatcgatgggaggagattgatttcggcttcattgaactcgggccctcggatcttgatccagtggccgt

SEQ ID NO: 154753 - DNA, 333 bp, Zea Mays
tggggagatacctgatgacgagcggcaggttcattttgaggtgcccctgaaccctagtgatgcggatataaatgtcatgcttgatctgctagctgaggattcctccgacgctgctcctactggtacgttggcagtggtgccccttccagaggttggttcaactttggatgtccagaaaccagtcagtactcgcccgaggcgccctagccgaaccagtcagcctgagccttctgttgatgagcaaaagaagaagagaagacgcctccggcgagtttccagttttgatgaggacgccggcaccttagttcctgctgctgaagaagtgcctgcaac

SEQ ID NO: 154754 - DNA, 406 bp, Zea Mays
ccgcctcccggccttgcgccgcgtgtctaaccctttccaccgcatcaccacaacctgctctcgctctccgttgatcaccagagcgattgctatggcgttggacaccaagccattgcgccagtgacctctccctcctccgaccgccgcgcgtcgtcgcccaaattcgcggccaccgctcgcgggctctataaattgaccgcgccctcagctccgtcatgtaatcaagcagcttctgcacctacctgtaccccaaaccctccaccagcgagctctaattccggatttcccctaattcgggtttccgccaccgtgaaacgaacttcaccgcggccagccctttcccggtcagttcatactcctctctccctcttttaagctttctcttacgactacgatgcttgccgac

SEQ ID NO: 154755 - DNA, 643 bp, Zea Mays
gggatccaacttcacaagttcagagttcttcgatttctgcgagcaaaagaacattcagatcaagtacgcttcggtggcacacccaagagccaacgggcaggttgaacgagctaacaggatgatattagaggcactcaggaaaaaggtcttcgataaaaatgaaaagttcgcaggaaaatggataagggagttgccctacgtcgtttggagcctaagaactcaacctagtcgagctttgcacggaaacactcctttcttcatggtctatgggtcagaggcagtattacccgctgatctcaagtttggggcgccaaggttggtttttgaaagcatagcagaagccgaagctactaggctggaggatattgatgtactcaaagaagaacggctgaacgcagtaattcaatcagcgcgataccagcaaactctgagacgctatcacgacaaggccgtgcgacgacgatcctttgcagtgggagatctcgtcctccgtcgaattctagcgggggagggacggcacaagctgtcacccctacgggaaggaccattcatagtagcagaagtcactcggccgggatcatatcgtctcactcaaatggacggcacagaaattgggaactcctggaatatagaacacctcagg

SEQ ID NO: 154756 - DNA, 895 bp, Zea Mays
cctatgatcacctaagaattagatttgatgattgcccttttaaccatagttttaagcttccttaggctcagcagcaaagcttcgtattctgtgatgttgtttgtgcactagaattccagtttaactggatatgaacttttcactcttgaaggtgatgtgatgacagcggctgcaccaacccaaaagtttcccaagtcccaccatagaaaaatgtccaaacatgttcttctgaggtgtctgattcaccttgtgaactagacgttcaatcagcaatgaaaatgccaatgtttgaaattgaattgatgataaatgtatgaagtcaatgacaattcattgagctcaccagaccatttcccaactcgacctgtagcttctctatttctaatgatatccttcagagattgagacgaaggtacgacaatgttgtaagattggaagtaatgacaaagcttcttggaagttattaagaatgcatatagtaccttttccatttttgagtaattccttttggatgagccaagtactttggagacgaagaatattgacatttgatttttggatccatcctgtattttttcctggaccaaagtagttgtcggagagtgaactctaaccgggtggcggaatgcacccacccgatcctaagagttgggggaagcctagggttagcctgatgagctgaatgaacataagaacacaaagagtttagagtggttcaggccgccggagcgtaataacctacatacactgtgaatgacgtgggtctaagtgtcccccttttgcatcgcatgtgctctccttttatagtctaaggggagcacgcacaagagtgatggacccccaacaagtgggcatagcgtgcttgtattaaatatatatcacctgaagctataag

SEQ ID NO: 154757 - DNA, 539 bp, Zea Mays
ccgggctccccatagcgaatcctcttgcgggaaggggacaacgccacggcagggacctgggcttcaaggggatcccgtccttgaagctgagcttccagggctgcaatcctggtgtgggcatcctccagctccatgtgcatcctagagagatccagggtggcactgtccaggtcggtgttaagaccggccacaacactagctagggtgttgaggcgatcctcaccagctccacctggaatgatgctggtctggcttcctccactcagacgcagaggaagatgcctgaacctcgtgccatgcagctgctactggtaggtgtggctgagagaccttagagtccgtctggcagcatcgctgaccgaagcagcgtaggtggatagcggtgtcagggactcatgagctgatagagtcctgaaccccctatcccctgcatccatcaccctaacgtggatgcgagtgatgtagtagcaaacccggggaggctcgcacactcgccttgtctcgtacaagggtccgatgtaggttcccacgcatgcagc

SEQ ID NO: 154758 - DNA, 692 bp, Zea Mays
gaaaagattgaacagggtgtttgatgcaattggcttcgtataccctgattattactacccactgcgaaggcaaggaaagatgagaaaaactaccacttcgaccaccactgatgtgtcgaagggtaagaaaataaaggttctaacccaccggctgcaatatattgaaccgatcgtagtgcctgaatttggcgaagggacctcttcaactgccgaagaaaaataagcgacccccaccgtgcagagcgctgaagaatcgattgtagtgtcgaaggtgcctatagtcgggccagctgaaaccaaagatgatgcggccgaagaaccaaaattggaaaaaacagtgaaaatgctagaaattctgagcccaccagcaaaggcagaattgccgaaagtgcaaaaggctcctgccgcaactcccaacagaaggaggatggccagcgtgctagacgctgttatggagaccacaaaggccttgagccctgctcctacaaagaaaattgccgaagctgttaaagtccaggccgaagccgaagctgggccttcagcgccccttgagacgaaggctgtcgcacctgaagataaagctgatcaacaaacttcagataccagcatggcagcagggcaagatatgacagaaaaagcaaaatctcctgccctcaaagctccagccgaagatgttgactacattgttcgac

SEQ ID NO: 154759 - DNA, 272 bp, Zea Mays
ataggatatcgataacgaactgtgatgttattaatagcacgacaatctacgcacatacgccatgacccatcttattttggaatgagtaaaacaggaaccgagcaagggctaagagactcacgaatgtaacctttatcaagcagcgtctgcacctggcgctggatctccttcgtctcatctggatttgtacggtacggggcgcggttcggaagagaagcaccggggatgagatcgatctgatgctcaatgccacggaggggaggaagacccgg

SEQ ID NO: 154760 - DNA, 1024 bp, Zea Mays
gcacatgataaccagagaacacaggggcaatggcgcaagtattcctaagacacagagttacagccgcattgatggcgggttgaatgtatgaaatcctagggtctcttttagaaagtgcacgcggcgaaggggtatcgtctattcctggccgtgcgatcggatatggacgacacagattaaatcgatcaacttcctaaaccggtatgcactgagcaccgctgatccccagatctggggccagattttatgaaacccaattaacccacaaccgccagattcaaaatctatggcccccgctgcccggtatccaacccccaatccacaccgttgattaaccccatcaacggccatgacgttcccttcttccctgagccagaccgagcggcggcgcacatgactacaccactaccgaaagtcaccggcgagcgaccgatccgaccctgggcgcaccataccccaatccggccacgcaacacaatggggaaacggacacgagtcgtttggtggggttcttaccattgagggttgcgtagagatccccgcccacggagatgtgccgtcctccgcggtcatcgttgctccggtgagcaattggccgcgccgtgcttgactcccggccctggttagcccgtgtacatctttgttaggtcccatcgaacctcacagagcagtcatcgaggctaggacgtcatcctgagcgcagttcgacggcagcgacagcctgcatcttcacgactgcaagacaatggtggctcgggcgcggtgcgattcgagggagctagggagacgacccgagctttatacccaggtatgaggcataccggccgagcgacaatctcggaatgcggacttggtcttggcagatgcaacggcgcagggcgatcccggcagacatggctttgactacgacaacaggggaagagggcggatctgaccgcgaggccccacctggcggtgtcctgtagctcgcgcatggagccagcgaaaggggaaagcagcagagagaggtgggccgaacgatccg

SEQ ID NO: 154761 - DNA, 634 bp, Zea Mays
cgaagctgaatttccctctcaaacaggtccttatatatcgttcttcttcagaagctgtgtcaggaagataagaagaatgtagcgtcccctgaggctctgctggcaatgatgcttgcgtgtctgcagagcaaagaggcagagagcctgaacaattcgtttggcccttttcttgtgcttggcagcctgatcagatgccaatgcgatcccatatctccccatatctgatagggaaaataaaatctctccgcgtctgctgcactaccggctggtggttgtgctcgccagcgcggttgaatcccatctcacctcccctcatctgccgtcgtccggtgactgacaggacgaggctccttttccgcaccagcagcgccctctccacttgatgatggcctggcctgctagctcgagaagaagaaatgggcaagcagtggcaatgagatggatgttcttggtttagcagttcttggtcgttgcctgaatcctgcacattttactactacagttgtgagccagaatcgcacagatctgcctgaattcttcttctgaatatccacagcaatgcgaaattggacctgcggaaaaggaatgggcaactgattggtacagtactcactagacaataataatcctgacc

SEQ ID NO: 154762 - DNA, 291 bp, Zea Mays
ctaagatgagggggtttcacaaacttcttcttaggttgtcttctctaactgctactgattacagtacctttccatctagtattcgtaccaaattaagtaagatgtacataatctatgagaccaaatttggtgaggtgtgcttgaatgcaaatcagcagcctgcatctggtggttctggtaaggctagtgaggcttgggatgacatctatggtgatgatgattctttttctgcttctgttggaaggggtgcaggtccctcagtatcatcttctcaatctgctctctctgaac

SEQ ID NO: 154763 - DNA, 584 bp, Zea Mays
ttcaggagtaggagtggcagttttttcaggcaaaatttgttctgtagcttctttttctgtttctttttctccgatttccaaggatttctccttggcgggctctgaaggcccagcttcggtctcgacctggctctttgcagcttcggctttggttactcttgtctcagactgcgtctttggagcttccgcagttttccttggagtagagcttgtctttattgtctccagcgcatctagtacgttgaccattcttttcctcttatgggtcgctgtaagacctttttgtgccttcggcactgtcacttctgtcgaagggcttgtaatttctgatatctttgttccttcgacccctatattatcggcctttggctcagctaatttggttgaggatgtcttcggcattgcagccggctcttcaatcttctgcgtaggcgcaggttctttggcttcagtagccaaagaggcctcaccgccaaattcgggcactacggccggttcaatatatcgtggccggtgagtaagaaccttcacctttttcctcttcggcgcaggctcgcttggagtagctgaagcagcatccttcc

SEQ ID NO: 154764 - DNA, 394 bp, Zea Mays
tgaggggcagagtgtcaaatgttggtgctcctgttgcctattctgcttggaatctgccacctcataggtcattttctgaatttgtgtccaaccctcctactagtgatggtggtctgggtcttagagtgcgaccctctcccgaggacattgaggctttgattgctcctctttggagtcttcccaatgatgagaagcaaattcactttgagatgccagctagtccagatgacgcagagatggatgttgtgcttagtatgttagctggggaatcttctgacttgacccatgctgagccgatggctatcacggctggacaagagcttgacaaagcagtggagacttgaaagcctgagggtgctcgcccaaagcgtcctcgccaagttagccgcccgac

SEQ ID NO: 154765 - DNA, 624 bp, Zea Mays
ggaaaagagagcgggcccaaataacatagtttggagaattacaaaggcacttgggccttggatcttaaataaaaaaacttgtgaagactatcgatgttccatgagtgttctaggtcttcgtcggatgatgttgctaacatgtaagcactgggggacgcctttgtcttgactatgtattgtccctcccacttcggctcgagcttgccctaggactctgttcgggtggttgttacaagtacgaggtccccttcgctgaattcccttgggacgactgtgtagtcgcgccatgctttggtctggacctggtacttgttgagggcctgcagagcgagaacgcggtctccgtcgatgagatccttggaggttggttcgtcgacttcggagacggatagcttgtttgtttggggggaccccgtgctttaattcttgcggcgtcattgcttcggatccatacaacaagcggaagggtgtgaacccggttgctcggcactctgtcgtattcagggcccatatgacttcaggtaactggtcggcccatttgccctttttgtcgtcgaggagccttttcttgatggtggtgaagatcttgtcgttggcgcgttcgacgacaccgttggattgtgg

SEQ ID NO: 154766 - DNA, 303 bp, Zea Mays
gtgaaccaaattagtaaactaaattgtactttgaaactttgtaatatgttggattgttggttgatgctctacaaatgtgctggtgtacttgttttcttcaaaaagagagaacggtttgagcattttcccctgcctatgctgcgtgggggagctgttgagacaaacaaacacggtctgaccggctctcacctagtcaccttcccttcctgttcgagcagactacgtccgggcaaacaaacgcgccccataacactagatgggaaagctgtttatttccaaggcattgataaattagaatgtcgt

SEQ ID NO: 154767 - DNA, 805 bp, Zea Mays
cccggccaaaatatctctgcccacgacgacggcgaaaatccgagacaatccgaggtgttcacgatttggtgcggtctagcttaatcgaatgggtctacgagcaacagggggcttgagggaggctagaacaccaatcaaagaagcttgaactaacctgcagagggctggccacggctaagtgttcacggtggcacgaaaaacgtatttggggaaaacacgaaattgagagtctctagtggatgatccgaggctagggctgctgcgttggatgtgcaattacctagcagaactcacgggggcaacaatttatagagtcctacggcggtggcgtccaatttgaaggaagtgtgctggcggccggagagaggggaagtcactggcgcaagcgctatcgtggcttttaccggggcattatctcaggcgatgaacaagctacctaaggcggtctactgtgatgtggtaaggctttgaggcatgtagcctggccagataacggcgaactccggtgatgccagcgcgattgaccgcggcgggacatgacgaccggtccggccagcgactggattcaccccaagctagatattttcaccccgtcccgacgttatctactcttcccgtggcacgaatctcctaggcgggcgcgaattatggcggcagatcaccggcgtcgagctcacaacaccggagatctttatggtcactgtaccatggcgatcttcatcacacactctgacagcgcgatttggagagcttcattctctatttttcatgtaacaactcggtcacttgtctacatcaatattgt

SEQ ID NO: 154768 - DNA, 644 bp, Zea Mays
tttttcttttttaatttctatcgaagggagggccttccttcctcaacctgcttggtgcgagggaagggccatcgagctacaagcgggctatccaagaaagatctgatcatccatctgcgagggtatcttttggtgaacgatcccgctgagggtgttcgacctgctaggggcatcttatcgagtccttccttattcgatgtcgtattagcccttcggtcggtctagctcatcaaaaggggcctcgtggccaccccatcaattgggtttctgtgggagaatgtgaggtacgaccttggaagtagagctgaataagtgacctatgggtcagtcacctatcttgcggctctctgggagcttgctcagtccaccccttgctctacacaagaggttggggtgtgttttggttttttacctagcttgatgtgatgtggcttaccggggtagcatagcggagggtctggtcatcatgattacgcttggtgcgggcggcttttgataggacgtgatgtgtcccacctgccacgttgtgtgcttatttgtcgggtggttaatttgccctacttgcttcctgtgctttttacaatacggtttgcatcttgcaaaatcatatcgccttccgcccgactcccaaggttggcatgtcg

SEQ ID NO: 154769 - DNA, 477 bp, Zea Mays
caaacaaatatgtcttgcatgagctcaaccagacgttgctcatcctggctcagctcggatagcccgactgaactactacaggcaaccaatcagacggataatgaagctgcacctgcatatagttgaaaagagtcatgacaaaggaatggaggggaagagcaaggcctcactcatagaaatgaatgaacaagaccacgtagctagggggaggggctagaatctcctcagtactgggagttgcgcagtatccatcatccaacaagccaggcctcacaagagctcaaaggtgaccctggtccaccaatgatcgacaacaacaagccataggggagcatggcaaaggcaagatgaaggctaaacaaaggagatgggacaacatggaaggcaagaggaaaatagggagaatgaggagaacaccacaattaaataaaggccacactacgactcctcatcactctgatcgaggcaaggtgactc

SEQ ID NO: 154770 - DNA, 455 bp, Zea Mays
gtgacatgctcacgcttacttaactcagggtgatcactagaccctaccaacggagcaatcggcttaagtcggcaatgacttaaggcggtgtgacatgctcacgcttacttaacccagggtgaccactatgccctattaacggagcaatcggcttaagtcggcaatgacttaaggcggtgtgacatgctcacgcttactcaactcagggtgatcactagaccctaccaacggagcagtcggtttaagttagtaatgacgtaaatcggcacgacatgcttgcgactactcgattcaacataagcatgtttgcgattgctcgtcttagggcgatctctatgccccgtgaaataggaagaagtttcaaaaccatcacactacacttacttctgcaatcataacgactgttgaattcaaacaacagaaaaataataatagcgttcagtaccgagaacatt

SEQ ID NO: 154771 - DNA, 515 bp, Zea Mays
cacctaatgctaggcacgacagtgcttctctttcacggcggcgtgccccaccagcgacatgcgggacgaccctcaggtgacctatccccaacatcgacgggcgatactccacgcgggggctagcacaagcgaggcagagagcttcttacctcgaattggatcagtggtgagggcgtcaacgtggaatggtggattggcggcagcgatatactccggtgaaggattcctagtcaccttgggcacaccccgtggccccaatgctcgtgatcaacttaaggtaccacccgcgatgcacctaggctacgtgcacaaggccgcgcaatgacaagtcatcggacggcttgcgacggtgagaacctatccccttcctccgctcccatgggcgatgatagcaatgttcaggagacgccccgcgaattagagggatagttgggagagaggaggctagttatagggctagacatggggaaaggggagagttgttacgtcggcaggcgcgtgcaaaatcggcggcg

SEQ ID NO: 154772 - DNA, 317 bp, Zea Mays
atactgatactgagtgctcatgttggtctatctgaaccgttagatctagcgggtgttgcactggaatagaaacgccacgcaagacaacctggccaaccgcactcgtctgtgtctggtggggcctgctccttgcaccaggccgtcgtcaatttagcatttcagatgacccggacagctgaaccactgcttcatgtggagtactagtagggtgcagtgcagtgcagtcgttgtcccagcaataatcccacctcactcaaatgcacattgctatcatgcatggctgttgccaacgacagctcacatgcgttgcgatgcga

SEQ ID NO: 154773 - DNA, 361 bp, Zea Mays
atgattcactagcattttagaggtaatgcccgagcgatgcttgctttgctgcaaccaagatttcttccgagctatcggcctgccctttttgtgcctgacttaacatgccaacccatacctttgctgatgttttcctgggctctgaaccctagttctctttttttctccgccgctctctagctttctgagtttctggatccgttcgcgtcgtttgaaaaaaatatgatggcgcctaggaaaagaaaatagagcgctactatcccagatattcctccgattgatcccaatagctagctgccttagctagtaaccatgtttctgttgtttctgaggttgaccttctgcatcttgttgagatggg

SEQ ID NO: 154774 - DNA, 515 bp, Zea Mays
gacatcgtccgggcgaggagtaagtagcctctccgatccctccccttcctgctcgaatcggtggagatggttatgatcataatctagcggctctacaagcgccacggtgtgggttgtgatgaagtgattatggatttggtgtagagttggcaaaaaagctggaaggcattgacatcgacgaactgtggcgagaggtagcacaaatcgaagcatctaagagccccgaggtcgaaatgcttgccggaccgcttcaccacgccgcgcagagtgcgtacaagcccatgtgcaagctccttatcacgcagtgcagatgtgacgtcaatgcttcaacgattgattcctgtaatttctgccacccgctgttggtttcgatccatttgcgtcgtgtatttgactatctgtgcgcctatttttgatttcgcctgcgattgccgatccagatgaattttcaggtctgcgttagagcccatctggttgatttttggcttgtaggtatgggcttgggctaaatttgg

SEQ ID NO: 154775 - DNA, 757 bp, Zea Mays
tgcgagtgatggaacaaaaattcgggttaatccgatgcaccgagatatagatgcccctatttgccgctcagcagttaagaggccctggcagcacctggtgggcaaaattttccaccatacagcctgcgggacatcaagtcacttgggaagagttcaaacttgcatttagggaacattatgttccagaaggagtgctacaaatgaaactgcaagagttcatccgaccgaagcaaggatgagattctatgatgcagtatctcaataaattcaatcacctctcccagtacgccattgatcaagtggatacagacttgaaaaagaagaattgcttcatgaggggactaaatgacagactctagcgtaagatagcaacgtgtttggacctcacatacagcagggctgtcagtacaacactgtcagttgaagccaaaaatgtgggacaaggaaagtcaaaaggatatgcaggtgaaagatcaacttagggacctgaaaagagaacaaggttggtaatccgacctttcaatacaaactgttcttcacctcgcccacccacatatcccttcagacaacctgtatttattcgccccactcctaccctcgcccagcccaatcagtcgagtgcccctagtactcgtttccctgcctttcccagttccttcagtggttgcttcaattgtggaaagtccggacatttcatcaaggactgcccatatccgaagcagaacaaataaacctttcaacagacttctgggaactc

SEQ ID NO: 154776 - DNA, 520 bp, Zea Mays
gccgaatctagcccaggtggcccaactcaggtggaaagcgcgcctgcgcccgtgctggcagctttgcgaaaaaacccttggcttattgaataactagaagcggggtcatggcactatttgactgagtcgctgacagattacaagaaaccccctcacgttctattcccttccacgctgaggtccccgacgacgacgagcgcggcagagctccggcgagctcgtagaccggccgaacggggcaaggactggcgctcccgagtggcagacaccaaattgaacctcgcccgagcatttcccccaacctaatttcatgaatggtggtctaccctactctgtcaacggtgatagtgcggagaatcaaaggaacatcgcgttcccgacgattggtggcggtctagttcaatcggatgagtcgacgagcatcatgggtatgtgagatcactcaaacgagggagcagaaggtttgaactgacctcaattgcactggccacggcgagggtgttcatgcggtgggatgaac

SEQ ID NO: 154777 - DNA, 637 bp, Zea Mays
tggtgactccattgtactttacacatctttatcaccttatttcttgtaactcgagtcaaagtgtccaggatcttgatagggtactcataagtcagatcatcttgaacactaaggtcttctattggtagttgctccttagggacacggagacacctcttaagttgagacacatggaatacattatgcacatcagatagattatcaggtagctcgagttgataggccatctctccaactcgcctaaaaactctgaatggtccaataaagtgaagggacaatttgcccttaacttttaaatctcctcattccacaaagtggtgacatcttgaggtgcacataatcaccttcctcaaattccagtggtcttcttctgttatcaacgtaactcttttgtctggtttgagctaccctcaaattctcccgaattatacagacttgttcttctgcctcttgaataagttcaggtccaaagaactgtcttcccctagtctgatccaatagagaagtcctacatttactgccatacagagtctcgaacggtgatatcttcagactggcctcgtaactattattatatgagaactcgtcataaggtagattcttgtcccaactactaccatgctgaagggcacaagct

SEQ ID NO: 154778 - DNA, 692 bp, Zea Mays
ctaaggattttccaatgtctccgcccctatgtccttttaccaagaaaaaaaacaatgattttcttgtggaacttccattggttatcaataaaatgtgccgttacacacatgtaatttaggttggtattagatgtccatgtgtcagtggtgaggcttacgcgctcacaatgttcacctaaaaacttcttaagcttctctttgtggacatcatatactttcacaactgctctagtagttgttcttctagagggcaaaatgaaacgtgggcatgctttggccaaaaattttctaagcccaggacgctcaggcaaaacaaaaggttgttcatcttcaataatcatttcagcaaaactattccttagatcatcagcatcaaatttccaagttgaaacagtaccaacactactgtttccttgactaggttgcagttgcaaagttccttgattatcaactacctttttgtttggattctttttgcagattttcaaatgagatttcatggaggacgtaccatttatttttgggtcacagcgaaacagttttgcacaatacttgcacttgactctttcatccccattattaagtttaaccttgctgaagtgctcccatgtatcagatctttgagcaatagctttccttttcttgcactctccatccttctctacatctaccacctcagtgacttggtttgc

SEQ ID NO: 154779 - DNA, 396 bp, Zea Mays
gttttggtgtccaactttaactccttaaccttcagaagaaggttagttggagaaggggcccagagccttgaagaattggaacggatttgtaacagattttgtctttctgcttcgaaagacaaagcggtttggatgttaaacaaaaaaaggtttggctgttagatctgtttacaatatatgcagatgtaacctggaaaaagcccctacaggatgatttcgaaggataagatccctcagaggatcaaagtctttttgtgccttattatgaaaaatagggtcctgtccaaaggtgaacttgaaggtcagaaatgggcggggggggggtactggctgtccctggtgtggccatacagaatgaacagatcatatcttttttgagtgtcaggtggctgtttt

SEQ ID NO: 154780 - DNA, 734 bp, Zea Mays
gacttcgcgtggtcctcggccatgccgtttcttcagccggagcatatgcatatatatggaaaatcgtaggccgccttgacccatcgacttgacctacaacaccttcgataaagaagaaccatacaaggagaaacaacatagagggagaaaagcggatctgccaccgtcgaaccgggcatacgctctcggtggggtctcggccttgggtgtgggggattcgactcattccctaggagttgctcgttgtcttgccctacccgattggatcacggagcaccggagattgctcgtcgtcgggagacttcactgctgcaccacatggcgtctcggtcgggcttcctgtgtcgctgtttgctcacggtaaggactccattcaatgcgccatgttctccgacctgcttatgcatccgattgtgtgggaggccaggtattagggcgggccatgcttctccacgcggattcatggttgtgtggtgggcggcgctgctgcctaggccaccatggagtggaagaagacacatgtatcgttcatctgctgatggacagtcatgattagaaggaaggcggggccacgatagagttctcgcgaaccacgtggcgtaccggtccaggaataagttgcggtcgtcgatcacgcgatcaatggttctgatagtataccggttggattcaaaagagcggtttgatcaggcgcgtccaattttgatcggacggctcaaaacatgtgatacccc

SEQ ID NO: 154781 - DNA, 417 bp, Zea Mays
agacaatgtgaagcgaatgttgaatgcggacccggtttgatactggtatctaaaaactgtcccacggaatggaacaactagaacagacaaattcgtctattcagctagatttttaaaatccgtaccttgcatgattttgcaggagtcatgaggtaacagtaggaatacaaatccacaagcagcaacataaacgggttacttaaactgttcatttataacttagaattagattagaaaaatattaatgtagcccatctatcaaaaatgtactagctgtaatttttaactgccagcaagggacgtagacgtaggacagtagacaaatctctagagaatagaagattccatgctgactgaatcaggtgttgtcattgccctgtactaggtattaagcaaatcaaatgtttcagtatacag

SEQ ID NO: 154782 - DNA, 761 bp, Zea Mays
atagcaaaatctttaaattcactagtggcttgtctaacttgatgtcattcaagtacaaggtgggcaacaaatttctgttctatcgtcatctcccaatcaagatatccctcagcatcataatgacccgaaaaagatggtatagaaaatttaatcttagcataagggtcatcaggagcacgattgttattaccttgctggcggtgtggcataccttctgtgttttgatgaagacgacaacgtaggcgcaaatctctggtggccgcttcatcataattaccttcttcatcaaacaccgcatcatcgggaaggcgtggacgaggaggtggtggtggcggtgcttgttgttgcgtttccaacacaacaagtctatcgatgatctcggacaatcgtcgatccagcctctcataagtcttgccaaggttcatgtcaatgaaggcatcatgcactgacttgtggaccgtctccttcatttgctccttcaggagcttgttgtttgcctcaagatcttggcggctaacatattcatcgaagtctgtagggatccttgcttcttctttgtcgcctgccatcgaaacacaaaaataggaaacaaacgatgaaggttatcctaataatttcactacactctcctctcaggtggaacacaggaacacgctctattgtatcttaccaagctcttacaagtgtctgacgaaatacaaagcaaaggatggtacaatcggaggctggttcgtgatacttaccaagaggtagtgaaaccg

SEQ ID NO: 154783 - DNA, 385 bp, Zea Mays
aggatactgtgtcgtgacatattgcgtacaatgttgtgggcatcttttaagctaccgctcatgtatcatgtgttaccaaaagccctcctgtaactcagtgcagatagtcttaaacctatagccaacgtaataatctatgataccaaaattacacgccttggtgtcatagttatggagccagggtatatgacatgggagccatagttgtcgtgacctattgggactttgatgtcaagatctgcgtcgtcaaggtcgaagatatgatgtatgataccgaggttggtgcatgtgatgctgattttgatgtcatatattttggcaccacatctcatcgtcttcctcttatctctcgtttctctctcttctacctcgactttgatccgcg

SEQ ID NO: 154784 - DNA, 297 bp, Zea Mays
attctttgatgctgctaatgcctatattgttttcgaatataattatgtacaatgggtactgatggtgctaattcaataggaacaaatgagttctgagtcatcttctgatacatctgggtcatcaacttcagaaacctctgggtccacaagtagctcatcttccactagcttgcattcagaggacattgttgaaaaaggttcttgtacttctgccaggcatagaacgaaacgaggtcacgccaaatgcaagaagctagaaaaaggaggtccccgtcatcttacatttgataaaaatgg

SEQ ID NO: 154785 - DNA, 547 bp, Zea Mays
gacacctgcaactattgcggcaaaatcgaccactgggcgagggaatgccgggggaggaagaaggaccagcaggctcagcaaagtcagcaggcacatgtggcccaagacaacgagtcgtctcttcttcttgcccatgttgcagatgtcgccatcaactcctcgccaaagctgaaccaggcacaagcaccgagcgatgcagcggtgatcagcaactcgtcgaacaccacggcagcgcgctcaccacaggagtgtgttcatctgatggagcagaaggtctttgccacgctcgacgaaaaggaggagcgagatccacgacgctggatctttgacacgggggcgtccaaccacatgacagggtgccgcgacgccttctccgacttcgacatgggcgtccctgggaccgtccgttttggtaacggatcaacggtgtgcatcaaggggcgcgacaccgtgctcttcgagtgcaagaacggcgaacactgcaccctctccaacaccttcttcatcccgcatctcacggccaacattgtgagctgtgggcggttgg

SEQ ID NO: 154786 - DNA, 513 bp, Zea Mays
gcggatgcccctgctcggcctcgggcgcggggtaggagaagaactccttgccgtgcgatcggattcgtgcggctgggatttggtttgggttgtgattcggccaaatccgatatccgacgttggatcaaacgtggatgggcaggattataggattgtataccccttcgttcgggccgtcgatctcaaatcggacggatccaaggcgatcgcgtgtatttaaaatgtaaaccgtggatctctgatccaacggcttgggtggcgtaccagttcacttaagcttggatctgatctggaccatggatttctaatcagacggcctgaaaccctggataccccttcgcgggtatcttttgcaaacgagcccctctgtttatttaaaaacaacccgcaatcctcgggtgctgttctttgagtctagtaagcattgcgcagagccccctgcagtcctctggttttgtgcgcccagtccaaggagttaagaaatcagataaaaggaattagaaaatgattttt

SEQ ID NO: 154787 - DNA, 1838 bp, Zea Mays
gtccgcgcctctgtagagagcactaccgccgatactcattgtagtgattggcgcccagatcggtgccaacagttatctagaagaggggagtccatgaactggatcagcttgtagaggtctctagatctgaggtcaccattgtcatcgatgagagggctcagtcgttggtcggggagatccgaggtgttgacattgaggagagcagcttgaagtagttccagatcatgtcttgcaaccgggctcagatgcggggggaggtgccttgtggtcccatcagagagaacttgatgcacagacgcagacggatttttggcatggcttgtgagggcaggaaggcgatctgtgataggaccaaaatcaagccagtcatcagaccagaaactggtagttctcccattcccaagcttgacagtggtgatggcggagtacaggaggagcaacttttggatttgattcaagtggtctccagatggtttgacaccgatctctgattgaacccaagtgacccaagaagaacaagctggctacaacatcttgtgaaccagtttcaacataagacaagtattatgagtctgcatgtgattcacacccaagcctccatgttgtctcccacggcaaactttgtcccaagacacaaggcatttcatcccagatgtatgatcgctacccggaccagaggaaggagcgacgacgtgcatctatcgtctcgataactttgattgggatctttgttgcacacatggcgtagacgagctggccgctaagaaccgagtttaccagctgagtacgaccaacggtgttgagaagcatggccacccattttacaatcaataagaaacaggtgtgtacggtgagaggggatcaccttttacaatcaatccaggggcctgggcagccatgaagcaatacatcagattttgaactggagagcatgtcattgatccactggcaccacagagtggggaagcccctagctgacataattttgtcgagagcactccaactcactgtgtcgaacgcttttgcaaagtcgagtttgataaccaaagctggtgtcctgcgctgcttgtggcaagtctggatcaattctaaagcataggtgaagtattctgaaatggaccagcctcggatgaacccagattgatcaggatgaatcacatggctgatctgatgttgaagcctggtggttagcatcttactgaggatcttcacactgcagttctgaagggatatagggcggaagtctgagggatccgaagcggtctctttttctaggataagcacaatgaacgatctgttgatcctgccaagatccgcaactctcgagtggaaagcttcagctagtgacatgacagtgccggcgatctggttccaagcagcaaaataaaacccaggaccaaaccaatatgggcccgaggtgctatctttgttcatacttttaacaacagtctaggcttcgaccccagtagggtattccgagtagagttcgtcaaacaacaagtgattggaagagattgcagcggtgcccaattttaatctgaagaagttggtgagcctttgtgcgaggtcatggagatgtcgtcgacaaccagacgttggatttgattgtggtgtagtctgatggagcatctggcatggaagtagtgagtgcaagcgtctccctgcttcagagctttggactttgccctctggcgccagtaggtagcatggtctaggacagcagaggacatgcatgattgtaaaaaagttaaggttctgtctagggtatgttcggtagagctggctgaagggctcttcaatacactaaaaatgtggttctcctggatactctaggatga

SEQ ID NO: 154788 - DNA, 462 bp, Zea Mays
caaacatgacagcattttcacctaccaaatgccttctaaaattcaacccctgaaaattagaagagatcacttggtcaaccctgatttttttgtcaaaggttaaatcaaataaccttttgaacttgactctaaaaggagaatccccacaccagatatccagccaaaaacaagtatgagaaccattcccaacttttttgtgcagaatttatgaaacagatctttattctccaagagccccctccaaaactgagatatattttgtttttttcaccacaatcaagggattatcttttatatatttatgcctgataatcttttgccacagtccatccgaagtctccaacctccataaccatttggtcaacaggctaatgttcatgtttctcagatcaagaatacccaaacccccttgatctttcggggagcaaactatcggccaattaaccaaatgatatttcctag

SEQ ID NO: 154789 - DNA, 798 bp, Zea Mays
cacgcgctcttttgccatggtacgatgctggcggaagtacgagtcgcacttgttgaggaaaagcatgggatctgtcgtactatcgaagcggggaaaatcccacctcctgtgcttgggcggatgattcgggggcggaccctccaagcggtgctcgctgccaccgccggacgatgatgcagacttctccttcttcatcacctccatgtcggccttcatggtggccatatcggtggagagggttttgagggcttgcaggacgtcggccagggtcggcttggccatggttggtgcggcagaggtaggcgatggtggtggtagggggtggtggtgggtggcgacggatgtagaggactgcatggagcgggtgagagaggatcgtcgagaccttgataccaggttgtcaagggcacggtgatccctagtagctggcccttgactgcggagctcgtaatcggcgtcagattcctccagggcagaggttatgaccctcacggctgcctgggcttaaacactagagagagagagattgatagttgatcttccttgcccctttcataatctgagtacaaggtatatataggccaaccgaccaacaacttatggaaacaaactcctattttctgggaataacaaactcctattttctgggaacaaacttctaattcatgggccctaatctctcctagccgctaggatcagacctgccctcttgggtcacggtgatcgcggctgctgctgcgcgtgctcctcgcgctatgcggctgtcacgcaccttgcgacgtctcgtgtacgccgtgc

SEQ ID NO: 154790 - DNA, 523 bp, Zea Mays
gccgacttaagccgattgctccgttagcagggcatagtggtcaccccaagttaagtaagcgcgagcatgttgcatcgtcttaagtcgctgccgagttaagctgattgctccgttagcagggcatagtggtcaccccgagttaagtaagcgcgagcatgctgcaccgtcttaagtcgttgccgacttaagccgattgctccgttagcagggcatagtggtcaccacaagttaagtaagcgcgagcatgttgcaccgatcgctgccgacttaagccgattgctccgttagcagggcatagtggtcaccccgagttaagtaagcgcgagcatgttgcaccgtcttaagtcgttgccgacttaagctgattgctccgttagcagggcatggtggtcaccccgagttaaataagaatgcaggtcgatcatgaacaaactgagtattcttgaagccatttttattgatgacatatttcccattttacagagtacattgtcgtcccgatagcttttgaaatacagctagg

SEQ ID NO: 154791 - DNA, 813 bp, Zea Mays
aaacgggggagccgagggagccaaaatatgggtgtgtgatgccgccagcgtggtctctcatctccaccattgtttggagccccaacgcataccaagtcggtcgtcggggtataccgaacgggtcgacaaccctacatggggggaacatcaagcaccgagataatactcgtatgagatcaatcctcataccggggccgcaagatcgcgtgtgcagcgccaccaccgtcaccaacccgggtaagaagtgcctaattcgattcgtcgttgtctctgctttgtttagcactaggtggattcgcgtatgggtgtcgggcagctagagcagggtccgtgccggcaaacctccgccatgggatgcacgggcgtcaccgtggctagcccgtcggggggaaacatgacttgggtgtcgtcgattgtctggtgaacagctgcgattagaccaagcctactgattcgtctgagattaaccagggccgttgatcgggcgatggtcagatatgggtacattcaggtatgggcgatctctggtcgtagatatcggatccagtcgttgcggacgtgtgcgggtttcattgtcatggagatctaatcctgaccaccgatgggcgatcgaacaactaagatacaaagttaccccttcagccgtgtaggtttgcatatgagcccttggggtttttcataaacaactcgtgatccatcctattcaagaaaccttacatccgagccctggtatttgcaaattagaccctgaccttcaatgaaattgtgaccacagcccatgatctcaggatattaataaaattaatacaaaat

SEQ ID NO: 154792 - DNA, 457 bp, Zea Mays
ggagatatggtggcgccaagtcagggttgtcggcactgttcaacccgagacaaaacttgtgtcaaaccgtgtcaaacagttctggtttggtttcaaaattttcaggggtgtgccttgggtaatttggctctttttttcaattgaaccttgtggatttggcgccagcaactaagtgaacatctctgatctttagaagagggctgatttttgacttagagaaaatttgggttgctctatagtgctctccacttgggggctgaatttggtggttttgtgggacctttttggaataacactcttagtacttcttgtatatatataaatgtacttcaactttggtaaaaggtttaagtcatgaattggtcatttgcatagtttttccactaatccaatgcttgggggtctaatggctcaagagggggggtctagggtttgagcatctttttccaaggtgaag

SEQ ID NO: 154793 - DNA, 1066 bp, Zea Mays
ctgccagctcattgggtggcatcttgtatggtcttcgggaaattggtgtggtgcccgtttaagctccatagcaaactccacatctctcttaggtggaagtcccagcaaatcttcaggaaaaaaattaggaaactcacaaactactgggatctcttcaattgaggttgcttgggttgcaaaggatacattggtcagctcaaagcgaggtaaggttatccaaaacattttggtgcctcgtggctcccttagcgacaaggttcgatttgcggtgtcaagattgacatcccaagatttcatccaattcattcccatgatcacatccaaggataatcccggcatcactatcaactgggctcgaaattgccttccttcaattttgagggttgcctctcgggctatatgatttgtgaaaatctcagccccagctgagcttatccggtacttatgccccacttctacagatgattggttaaagcgatgagcaaaagcagtactcatgaaataatgaaaagatccgaaataaaaaagtatgattgagagatgatcgttcacaagaaacgtaccaaccatcacaagttatccgtcaggaatctcgtccatagtggtgagatgcactcgagtgggatagacattgttcttcttctttaggcgaggaaaagacttggtgaagtgccccatctgtccacagttgtagcaaggtcccttcacctgagctgtactacccgttgaacttcctagtccagcttttgcatgcagtagggccaccttgaatgccttcggacccctgaatccttgttgttgattcttcttcggaggaggacgaaatcttgctctgggtatcattggcctgaaatttggttgagtcactatggtggttcaaggttgtgacattcctgattccaaaggccttttacgcccctttgccaatgcgtagaggttgttgtttttctcttgagtcaagtagtcactgacaaaatcgttgaaggaagtgcgggaggaaattcccatacttttcatcatcttcgaactcaagtgtctcttgaaactagagatcttcttggcctca

SEQ ID NO: 154794 - DNA, 817 bp, Zea Mays
ctcggagacagtccgttgagcagcaggacttcattcaccaggaggtccggaagctgcttgacgtcggcttcatcgaagaggttcatcacccagtgtggttggccaacccagtcatcatccccaaggcaaatgggaagcttcggatgtgcatcgactacaccatcctaaataaggcctatcccaaggacccgtatccacttccacgcatagatcaaatcgtggactctacctccgggtgcgacctcttgtcctttttagatgcctactcgggtttccatcagatccgaatgggtagggaggataggaagcataccacttttgtaacagtggatgggctctactgctatgttgtaatgccctacggtctgaagaacgccttgccaacatttgtacgggagatgagtaagaccttcggggacctgattagggacaaggtagagatatacgtcgatgacatcatggtcaagactaggagggggtcgactctggtggaagacctgaccctggtctttgataagctgcgggtgacgcgcacaaagctgaacctagacaaatgtgtctttggcgtctccgctggggagctgctgggattcctggtttcacaccggggcattgaagcaaacccggagaagatcagcgcgattgaggcaatgaggcctccggcccgtatcaaggacgtccagaagcttacagggtcattagctgcccttagccgcttcatctcacggctggctgagagggcgctacccttcttcaagctcctgcgaaaatccggtccattctcttggaccgaagaggctgaacaagcctttcaaga

SEQ ID NO: 154795 - DNA, 593 bp, Zea Mays
cataaacaagatcgtatcatctgcatattgcatgatagataacccgtcatcaactaggtgtggaagtacgcttgcaatcataccacctcgcttggctctgttaactagaatagctaacatgtctacaactatgttaaacaggatcgacgataaatggtcaccttgtcttagccctttaaaagtttaaagttattatcggtgtagttattcaccttaatgcctacttggcctttccgggttaacgcgtcaatctagttgcaccatttttcactaaaccctttcatttgtaacgtctgcctcataaaagatcatttgactttgtaatatgttttttcgaaatctatcttaaaaatcacccccatcaagtttctttctatgcaactcgtgtaaggtttcgtgtaaaacgactatcccctccatgatgttcctccctagcaaaaatgtggtctgcgacggacttatcacttttttagcaaccgagattagcctattcgttagaaccttcgtaaattttttaaaactaacgttcaggagacagattggcctaaactgttgtatttttacagcttctttacattttggtaacaaaataa

SEQ ID NO: 154796 - DNA, 1108 bp, Zea Mays
cgcaacaatccatgctctaattcggtctatgcctaattctaaccttggcgctccaatgaggatcactaattgagcctggtcaccattctagagctcggtccacgtacacccacggagcttaagacattcccgacgcgttcctaatgatctagcgcggtatagcttaattggccgagccgacaagcatcacaagcaatcgtgggtgttgaaacacggacaaggagggcgagagcggacctagaggtggctggccacggcggcgcgcacaacagatttgggggaaacacgaaattagggtgctacggtggacgatcgggagcgaggagtggttcgctgggtccgtaacgagtaggtggaacaggaggtgcctccaatttatagactccagccaagcttatcacgaattttggattaagatcgaggttaccgtggccaggatattttacggtggcttgctcactgtggcgcgcgagagggaattggtccagggacgataaccagttgcttgccacaacccttacaacgcggaggagatatcattgcgtgtcacgaccagagaaatggtgagctccggtgatgccaacgcgactgaccgtggccatacacgatggccggtctggctagtgactgggttcacccctccctagatattttcaccccgtcccggtgttatctatctctcccgtggaagatcacccaggcgagcgtgaattgcggcgaaagatcaccggcattaggttcatggcaccggagatctttccggtcactgtgccatggctatcttcgtcagtccctctgtccgagcaacttgcagggccttgtcctcaattttttgtgtggcaactcactctcctgcctgtatcaaagttgttgtccaatgtactagctacaactttgttacaaagaccttgctcaaacatccactaaatccctagcaattcgatctcaaagttcatccaattccagtgatggtcaagattcagtctgaaagttgactgacattcgaatttcatgtctatttttctccaatttctgtgcagcaccaatgcttagtcacttaatcaaacttgctcccctaacatagctctacaagtttgctgcattgacc

SEQ ID NO: 154797 - DNA, 619 bp, Zea Mays
ccattgttcaaattggtcaaggtgaatttaacttataaatttactggacaacacaagagaggaacatccagccaaaaagccaacactatcatttgtacgtccaaattatcgaccaacactctataggaattcgtgacgaccgtctggtgtagtggagctttggaatggatggggtaggtaaggtagcaagcttgcaggttcgataaaagaggatgatagccttcagacaaaaacgtatggctgccctgatcgcctaactgcgccctgaccgtgtctctgatgcatgtcgtgaccatgccctgaccgcgtctctgcttggccgccctgaccgcctccacaagcggggataggagaggggaaggaagagagtgcagggccttaccgtgagaaggcggcagagagagtcttcgtcgactttgcgctccgccaccacatagttactccacgtcgcctcctccgtcgttagggctgcgccacatctcgctcttgcgtcgtcgccatgatccgatctggaggatagttgatcggggttcgaaccgggccgtcaaggatgggaaaactccaaaccaggcggtggaggaggccacacgtggcgaggcagaggggggtcgtgcttgtc

SEQ ID NO: 154798 - DNA, 583 bp, Zea Mays
gaaagaaatcgaacaaggctttctcaaatagaaaggttaatcgtccttctataaagccattttcaccctctaaaattagtttaaaatgaaaggaattttttggaattgtagaggtcttggggatttggctaaacacaattacttatctcacctttctagagaacatagactcgactttattgctctcatggagacaggtcgtagtgcattctcagagtctactttgagacatttttgtagtggcgtcgatttcctctggcaccttatgccacctagaggaagatcaggagggatgttgttaggggttaacccgggggtgtatgacattggagctattgatgaaggtaatttctattgtaagttccggctccgaaacaaagaggacggattcatttgggccctttttgctgtttatggccctgctcaagatgatttaaagaatgattttttagcggaaattgcaggtgcgtgtagttctgagacacatccgtttatcatagggggagacttcaatatcatgcgaagtgcggaagacaaaagtaatgataacttcagccttcgatggcctaatttgtttaatagt

SEQ ID NO: 154799 - DNA, 1085 bp, Zea Mays
ctcccgaaattcttcttccttgagctggacgatccctaggggcacatgatgctctcggaaagcggcttcaaattctacccaggtagcatctctgacgatagcgctgaaggtatcccaccaggatagggccatcccggagagttgatgagcaacaagatgaacacactggttttcagggcatccgatggcatctaacttcctttttactgtgcgcagccagtcttcagcgtcgagcgggttgctggatccggcaaatgtgggaggctggagccttaggaactctcccattctatcctgatgccttcctccattcgggcgctgttctcgaggcttctagtgaggacctcaatgagtcgggtttggttggccagaacttgggctaggtctaatggcagctccgaaggtgcggggaggtgggtctcactcccttctccaccgacttctccatcagcacctaggggagacctttctccaatccctgaggcggtaggcgtggttttatccgaggccatctgctagaggggagaaaggattactactatgcatatgccatattttttttctcaaacatgttattttattcagcactccagttcattacaagcatacaatcatcatagatcacactacgcgcgagcgttttctaaggtgtccctaaactgtctgagaagatcgtcaaggctagccagggacacttcctcaacatcaaaaaagttttatatccctgggggaggcagtgttggcgaggcttcctcctttgggtcagtctggcatccttggctcttgaaccgctttcggatcttcttgacggcggcgagcttctttaacttcttagcatagtctgtctttagggtccagtatgcctcacgagttttggcttcttcgccttccgccatctcgagactgtcttgaagagactccttttcttccatcagttccttgatttgttgctctaggctttccacccaggaatttaggtgggtgtagtgggagaaaaggtcgtcatagtggttgtcaagggtgtggagatatccggccatgtagactatggtagggtcgtcttcattaggatctcttcctaacaa

SEQ ID NO: 154800 - DNA, 406 bp, Zea Mays
tgaaaagatacatgttcaagaaaaaaaacctagaactctgcaaaactgcgccatttcactaacaggagtctaattttctatatatgtttagggtttagacgtaatagtcagtgtctgcatttgagaatgctcggagtcaaattttggaataaaggaggattgactgtgaggctatagccagctgagatcactccatttttgccttttgaattatgtcacgactatatctaccaattttttaataggggcttggattattttcatgtattcactgttccttagtatatttgggttatttttgtagtgaaagcttattgttctgtagaatattttgcattgttttagtagtgaaaatatattctttcatgtgaaaatttatcattccatggtatattttggattgttc

SEQ ID NO: 154801 - DNA, 589 bp, Zea Mays
tccaacttcacaagtttagagttcttcgatttttgcgagcaaaagagcattcagatcaaatatgcctcggtggcgcaccctagagctaatgggcaggtagaaagagccaacgggatgatattggaggcgctcagaaagaaagtcttcgacaagaatgaaaagttcgcaggaaagtggatcagagagctgccgtatgttgtttggagcctgagaactcaacctagtcgagctctgcatggaaacacacctttctttatggtctatggtttggaagcagtgctacctgccgatctcaagtttggggcaccaaggttaatctttgaaaacatagcagaagctaaagctactagactggaggatgtcgatatactagaagaagaacgattgaatacggtgattcagtcagcccgatatcagcaaactctgaggcgctatcatgacaaggccatacgacatcgatccttcgcagtaggagacctcgtcctccaccgaattctaacaggggagggacgacacaaactgtcgccactatgggaaggaccgttcatagtagcagaagtcactcggcctggatcgtatcgccttactc

SEQ ID NO: 154802 - DNA, 662 bp, Zea Mays
tctgaagctgaatttgtggtcttcatgggaatgaaatgcgcagacttagtcaagcgatccactaccacccatatagcatccctgccccgaggagaacgaggtaagcccaccacaaaatccatggtgatatgctcccacttccactccggaatttccaatggctttagtaaacctgcaggcctcttatgctcggccttcacgcgctgacatacttcacaggcggccacatacttagaaacatcaatcttcatccgcttccaccagaagtgttgcttcaaatccctgtacattttggtttcaccagggtgaacggtgtaaggcattttatgagcttctctcaagatatccatcttcacctctgatttctgaggcacacaaaggcggccccaaaaatgaaccaaatcattctcatcaatggtgaactcccggggtttaccatcaccaaccctctttcgagcttcctgcaatagacgatcctgctgctgagccgcatgcactctctccatgagggaggattgaataagcatctgggtctcctcacttgcggtgccggcatagcacaaagcgatccccaaacggtccagattagcgatcaaaggcaaggccacttttggaacctcggacctgctaagggcatcagccaccacatttgccttccaagg

SEQ ID NO: 154803 - DNA, 408 bp, Zea Mays
ccgccgccgagccccccctcgcctcgttgcctcgccattaatgctcgcccagcctccgcgacaaccccgccactgtgctcgagccgtcccctcacccccgcctgcccgagccatcgcaatcggcgttagcgccattcctgccatcatggcgagctcgccggcgctcgccgtctcttccatcccactccctcccccgagcgcctataaaaggacccgcccgagccccatcttcaccacacagttccggccaccgccactgccttcttccccgagccattcgagcttgcgccgccgtgctcccttcatcgctctggtgagctcccttttccccctctagcgatcctctgtccaattaaactatgccagaagctccgccacactctcacggtcatagggcgccacttctcc

SEQ ID NO: 154804 - DNA, 342 bp, Zea Mays
cttgataagagtacaggtaaagtctcgagtggttgtacttgatggaggtggtcttgttcctttcggaacaaccgttaaggtaaagtcgtgcaagggaggagagagtttcgatattcggatatcacgacggtaagattgcagaaaccagaacaaaaggattccccctccttgtcctcccgatgctccccaaccaccataatcctatggtgcaggccgttcaagttcggatcaaatgactgaccatacagtctcgagtggttgtacttgataagagtacagacagtgaagaatggtaaaccggtccttatacaagatgaacaatccttcatacccacacctaac

SEQ ID NO: 154805 - DNA, 647 bp, Zea Mays
cgaatatctttctaccccgaagcgttatccggttaccagcgagcgtgaatcctaacggcgacggcgtgaatcttcgcgtagggggggtcactggcggcgagcaagctatgctggcattctgatccacacggtctactgtaccatggcgagacccttgcagtgcacctgacagccacggttgagggccaatttgctcctaaatttcaatggcaacacacctaagtttctgcagcaaagttgttcttgtatagtagccctacaactttgttagagcaaccctgggtaagttctcactggatcttagtggaaatagctctcaaacttggatcaaagtcactgtcaacttaaagttcagactgtatcagtctgacagtccaactttggacataaatatcttagaattctttatggtaccaaggcatgatttctatagcaaagttgttcacctaagatagatctacatagttgatgtggtgacctagggcaaattctcaataatttggaagatgtagagctccaaggttgagccaatatcactgaaaatgagacttaagcatttgagaaaaagtgtggctcttttgcacttaagtccaaatctcagggtttagattgcaaattcacatatgagtgacccaaatgacttaaga

SEQ ID NO: 154806 - DNA, 711 bp, Zea Mays
ggatacttaggtatattgtgtttttccacaaatgactcagttataaacgaatgtgatgctccagagtcaaataaaactgatgcaggtatggagttaacaaggaacataccatacactatgtcggcatcctcaggcactgattccgcggtgacgtgattgacccttcctcggctctggttctgcggagtcttgttctgagcagatccacgagcgggggtgctctggtcattcctctgattattgcctttctggggtgtctgctggttgcgccttgggaagttgttggcatagtggcctagctcaccacacttgaaacatccattgggttggacaggtgcgttgtttctggcctgcgtgttactggcaccaccttgacgattctgggaattcccaccagacctctggttggtctgagagttgctcctttgttagttctgattctgattatttctctggctttgctgtccagagcgttgcacttgataattgcttccgccatgatttccagagcggaactgcgaaccttgagcattgttcgggcgagtgttcctgctggactgaccttgaaattttcttttgtgataagataattccttccttttactctcaaggccaattgccttgttcagcagtgtctggaagttgggaaatgtatggctctgaagttgatagttcagaggtccaattagtccttccaggaaacgctcttgg

SEQ ID NO: 154807 - DNA, 773 bp, Zea Mays
aaaagaccgcatcgacggtcttcggcattcgaccactccgaagtcaccgcgacaggtagcgcagactaccctcgcgtgcgacactccgcgcaaaagtcgcctaagggtgcagccggaatagcacaacaagtgcgttaatcgaagtctctcattaaaaagacactccacgcaaattcgcccatgggcgcagccgaaccaacacaggcgtacgaatacggcaaacaggccacattaccatacatattacaattacatacacatggcgagggcatcacatattacatcggctcaaccttcgggatgatacccatctccctataattaaacaggattatcctcaattcctcaccctcaaaaagcttccgaagatccccctcgcctatgctcgccccagtcagcgaggacaccaattctcgtttaccaacccggtctactcgaagacggccacgctccatccccatacgacggcgcctgccactccgcgaaaattcacccacactatgttttcccaccacccttcgcctcctacacccagtactcgcactaggaagatccctggcaccctccacacggggcaaagtctctgctgcagccacatccaacgcaacaaaataatccaagccttcatccgaggactccgtccaaggaaacgaactcccaggttcaccatcggactcaaaacactcagagacagaaccaaacaaactatcatcggcaggcactacggttgaggccgccacaaaattagtattgtcagcagcggttgcttgcgc

SEQ ID NO: 154808 - DNA, 695 bp, Zea Mays
gtaggagtgactggagcgggcgaagtgggaggtggagtggtagcagtggcgggagtggtaggtgcggaggagcgaggccgagaggcgagacgacgaacgcgataagcaatctgatctgaagaaatccgtagctgatctcctctctctgtctgctcagcggctgctgcttcttgcgggcttcctgctgctccaagtagacagtcttccccttgacctgcctaaagcggcaaggagggtcctcgtcatttcctcccctggcgctaacacattcttcgtgcatggcatcttgacctgaagactgcatatgagagagataaactaagcacaagaagataacagccgataggatgacaaaagactggatagctacctagaaatctcacacgagagggagagaatccaggcagaacaggagacgactcacggacaggcgaggtcactaaaatgacaggagagatgagtacgtattagtcacatagtcataagtatatgaaatgtgaataaatacatacacagagtggtatggcacagaaatcgagagatatggcgatcgagaggtcaaacgacgcgaaaacggcgtttggacgagaaatagtgccataggaggtttgaaattgaaaatgaggcatgaaatgatttggaattgagccgatacttcacgaataggtttatatgggtaaatatgagtgaagtgt

SEQ ID NO: 154809 - DNA, 593 bp, Zea Mays
gcgcgtgggacgagtgaatcgagttatggcgttcgtatgggccgggtttgtgatctccggcgcgcgcggcgccgtgcggtgtcttgcgccccatgagctagcgccggaggaaggcgaaggctctctgaccgtcgatacgagatgaacggctgtgatctgatcgtaggataccgagtcaataggatgatcaggaacgttcgttttgaatcaaacgcgcacgcttcgatctaggttcataaaactagggccgttgatccttgatcttgtggtctcgatgtcataccggttcacgggggttgtggtttaatctgggcgctcggcttataatccaacggcctagatcgtcggataccccttcgctgcgcgccctttacacctgagtccccgcatttaatagaaatcgacccgctgtccagctcgggttgcctctgagtctggggagttttcttagataagcccctgcgctttctggaatttgaggcccaatccagagagcattgaaaatcagaaattaatatcagaaattaatttttagtgcataaataaatgttaaaacttgtttaaattgtagaaaatgcatatgaactccaaat

SEQ ID NO: 154810 - DNA, 661 bp, Zea Mays
tacgccttgctccagatatgctagtcgtatgcagcagctctgcgcctgagatggcaaacccgcaggtggtgccatacctacgccttgctccagatatgctagtcgtatgcagcagctctgcgcctacgacctccatgccaagtggtttgcttggcaacgcttcgctattactccaaagacaaagccgggagcaaacaattctttcgtaggttagcatacttgagttgtgtgatgtacgccagtagaccaggtttatggggccagaccccactagaccagaactcgtgtaagtgcagcctggctcaaaggcaagattttccctctactaccccgagctaccttggctcttttggaggtagtctcgactatttgaggaaaatgtcagactagaggtcaatcctgaatatggctcaggaccgctcaacagcgtacccacgggacgcttactttgttgcatttaatccaccaaatcatgtaactgaatcctgccaagcgcagttttgggaaccatcccttaagtttggacgaggttcggacttctagggacccaatccgaggtactaggacaactgttatagggtggtgggaaggtgtagtattacaatatggggccaggctaagcgacaacgcagctccaaaccacccccaagaacgtggacct

SEQ ID NO: 154811 - DNA, 424 bp, Zea Mays
tgccaaccaatgtataccttctacattacatcaaatgttaatacaatgggtaggcgatgatgtagaacaagtacatgctgatgtatgggcctgtattgctgtggccgatgcccctgtactctggacttatgagactgctacatgtctcacaggagtagatttttctgattaccagttcataagtatagataagaagggtttcattcctgtaatgctagagctgatggagaatcggctaaatcctaagtaaagtttaaatgatgagtacacacaaaatctatgagtccttggtcacggacagttcggtttctaaagctggatcgtctggtctttcaccaaacagttcggactttaagaccgaacaccgaccacagcgtaaagacagtattatggatgatccgacccccaagatcggagagtccgc

SEQ ID NO: 154812 - DNA, 368 bp, Zea Mays
gtagactggtagcttgatataagtgcggcagccgctaggcctcctctcctcagcatttcagcacccagttcggcgttgcacatgtgacccgggcacccggcccccagcccccagctcccgaccatttctgcacatctacagctcgcgagctcagcaccagaacacgccaggccagcccaacctctccaagaacccaagcagcagcccccgaccgaccggccatgccaagggccatcggcggtggtgcggcctacaagggcggaatcaagggctactggaagcgccgcggctacgaccggatcgacgcggccgcggcgcagcgccgcccgcgcctccctacagcggagcttggcggcggcgaggcgcat

SEQ ID NO: 154813 - DNA, 433 bp, Zea Mays
ctgcatcgcaccagacggtggatatgcataggtaggtggatatcctgctagattcataggtgaatacggaggtgaggtgtccatgctggtgtgttgtgattagctaaacaatgtttcagactgatttattcagccttacctttctgatatgatgtattctcttttgcatgtctcctcatggtaggtgaatgatgtcacttcgctggccggtcacgaggaccggcttcctgttgacgtacttggataatagttgatcaaaagtgggactgaccttaatcagccggccaggtgcctttactatattttgcttccacgtacctattttggatcgtcgtggtttaaaggcatgtagtcactggtgtctctggataccaccgcaccgtcgcccaagatgcctgaaccgtccaacaaagacccggaccatctgctctac

SEQ ID NO: 154814 - DNA, 1042 bp, Zea Mays
tataatggctgttgttagataagtaaaacaccatggccataatccgctactctgctttgcttcggcttacttgatgtgatgtcttttgctgagttgtccatttgtgaattcaatatatatgtagacgtaggtagcccctacatgtgtccttttcctttttgcatcttgcactatttaacttaacagaagagaaaggaaagaaactttgaattcttatccgtatcaaagcttttctccaagttgtatgccgtggagtaaaagagagcagcaatagttgggtctttgtggtctatgcactaccttattgctcaattagaacaaaatcttaccttacttatttgcaggagcagtttcaacaagtagctggctaaaaaggtctcaagtgcagagcacttatcaacactttttttatttaccttatcacacacattaaatttcttatttgttgcgtgcattacctgcaacttcttccccgtcttattggttagtgtgacttaacttttttattaagttttaatgctaaccagctttacaattattgagagatgaaatgatagctcactcactcttgcactgaacctgtcagttccgttctgttcacttgtattgacacctctatacagttgtccaaaagccctgaccaatattggccaggaaaaagctaatggtagcgcatcccatgaaagaaatcagtggtttcttgtcactgatgtttctagcttgtttcagaacatacccgtggacaagctgcatgtgtgtaccaagatctctcagaataaacaggccgttattcctgctctttattacaaataacctgttgacatgtttctgttagacagaccattagtggcttagctaggtttatgctgcttgggcctgggtccatgcaccttcttttgcaactgcctatagctctggcgcacactgtggttacctgtatatatgcacttgtattctgtacatggcaagtcatcaatttgatgccctacaatataccaagcttacattttatcatgttgtaaattaaattcttgtctatttg

SEQ ID NO: 154815 - DNA, 548 bp, Zea Mays
gttctgcttgaaggccttcttcgcgagccggtctagacgcttcttggggcattggcaaatgaagtgcccttcttccttgcagtagaaataagcacctcttattttgacctctctacgagtcagctttgcttgattgtcggcagatgatggttgatcggttgcatgcatgttgaacagctgagcttgatttgattctcctgtttgggtattcacgagctctagcacttctgcttgcgattgaggcaatttaatcttgtacccaaacatttttctggtcctcttgttgttcttcattccattcagcagatatctatgtgactcatccttccttttcaccactgtcggggttggaatcctgccgttggcctcatccactttatcttcattgggattcatcatctaggtaggggaaaaaggcagagtgagacaagatttcacaaggttcatgatatatacaaagggcagatatgaaacaaggacatttagacatttataatagaaaggaagtgacagctagcgtgaaacaaggatggtgttgtattttgaca

SEQ ID NO: 154816 - DNA, 778 bp, Zea Mays
cgacgcaggagcaggcggttgttgacgccatcgagcgccagtacgccgagacctaccgccgtctcgctggcaagggcgtgtcggatggctcctccacgtccgctcgtcacagcgccgacaccttcgagcccgcgcccgccccagcctcaactcctcgcgcctctcttcacgctcaggcggcggcccacaccagcatccgggcaaccatcaccgacattctcgcgccagactccactcagtaccctcggtggcgcgactaggtcctgcagaccctccaccgttacgccctcgccgaccacgtcctctccacggtcgttgacccgacgaaggattggctcctgatggatgaggtggtgctttcttggatccatggcaccctcacggccgagcttcaggacatcgttcgagtgtcggacgatactgctcaccggatctggggtgctcttgaggctcggttcctcggcaactgccagactcagattctgtacctagagaccgctttccgtcagcttgctcagggcgatctctctgtggacgagtactgtcgtcagatgaagacgatggcggacactctccgcaccctcggggccccctcactgatgagagcatcgtgctcaacctcctacgcgacttgagccctcgcttcgatcgcgtgacgcccatccttacccgcatgaagctgtttcccacttttgcggaggccaagaacgatctgcttctcgaggagcttcgcctctctgccactgtgaccatcgctcccgccacggcgctctacagc

SEQ ID NO: 154817 - DNA, 552 bp, Zea Mays
ccacagccgcaagcgcagcggcgcggtcgccccgcatggtgagtaccccggctagagacgacatcttgaggaccaaatacccgtaatgggcaatggacatgaaccggtacagggccagcctgccaatgatggcattgaacgggaggttaacctccgcaacgtcgaactggacgttctctatgcggaagttttcctctgtcccgaatgtaaccgggagcgtgatgctcccaaggggatacaccggttgagcacccactctagagaatggacgagagggtcccagtcgggaccctgggatctgtagctgcctgaatgcagcgtggctgatgacgttgagcccagccccaccgtcgatcagaacatgatgcagcttgatgttggcgatgacaggggcggtgatgagcggcagtatgccggcccctgccatgttctcggggcagtcggatgcaccgaaggagatagtggtgctccgccaccgctggtgtggggccgccttcgggacccctggggtcgccgacaggacctcacggcgcagggacttcacgttcctgc

SEQ ID NO: 154818 - DNA, 421 bp, Zea Mays
cgcggcccatccactgcgcacccgcgcctgctgacgccggggcccaccaatcagcctccgcggacatctgtttgaaccaatgacgcgtggggccacgtcgtcagctcatccgtcttcctcgcgctagcgtgcactgctggaatcgcacggactctgcgcaacgaaatccgcgggcgccggggcgttgagccacctccgccgttctcgcgccctcggtaaaccgcccaacaacctccgccgctcacgtggattcggcacgggcagtccaccaaaccaccgcggatctcgcggcgtgcttcgactcggaatttggttgccgtcggggtaacaaccaggcggagctcgcggcgaattatccggcgatggcttgcgctcctcaacggtctccacccatctataaaaccatggcgtgggttccccc

SEQ ID NO: 154819 - DNA, 456 bp, Zea Mays
catgtgttctgtcattttctcaatgctacgctataggtccactgaacagcataaagtaaaacataaatgaaccacccctcctctcgttttcggggaaaatagtagtctggtagagatctgtgccattctaattcaccgcaagatctctggaactattatgtgttcccggtgatcgtaagagttctcaaaagaaagagaggatatttctctctcaacaaacagaaacaaacaagaaagggacgccgtcctcatagcccatagagcacgaccttgtttgttcctgccattgctttctgggatacttgatagatttgcattgtactttaagctgcgagttgggatgggcatatatagtcgcaaggtttaggctgtatacatggcagcgcgccctgcagattattagatcatccacatagactcccaccaccaggagagaatttccagccccttttctgt

SEQ ID NO: 154820 - DNA, 762 bp, Zea Mays
ctgggagaagttcctcgagctatgttacatgtgcctagtaaaaagactcgtgtaagcaatttagagtggaatgaatgaatagatacatagataaactgagacagcgagaaaacaacacaagatccatcaaatcaccagaatcgagatgtaagactaacctgtttgacaacgaggatctcactggactcgaggtccatgccgaggtagacctgcctgaattctccacttgtgatgaggtcgcctacggtccctaacacattcgtcggaagccaagatcgtggccaagggcgagggcggttgtggtttgatgcggcacgtgggtgacctgcccgaatttgctcactgctgcccccagcaccacccgcagtgacagaggaggagagcaatgtgtcgagcttgttgagggctagggcgtccgcatggaaggagatggagcggcacacggagtagaatcctaatcctcgaggtgtcgacgacgaagtagcgcgaggcggcgtggcacacgacgataatagtcgcagagaggagcacaatcccaatgtcgtctaaatcattgctgagaggaccttgatgcttcacttatggcgacgcgtgatgggctggacctgactggcgacgcgatcgaaggtagcctgggcgccggccgcgtcgagcttggccttgagctcatggatctcccacaccttgcgcaggtcacacacctccatcgatcccatcgccgaatcaccgatacacgccaacgcggattggattcaaatgggt

SEQ ID NO: 154821 - DNA, 497 bp, Zea Mays
caaggtaagatggagagacggcgaaggtaaaggtagtaacagacaacaaagggtggagttagaactcgcaagcgacaaggaataggatacaactaagggaaaatatgtaaccttcaacttttaaaattgaaacgaaaagagagaaggttttggagcgcatgtataatatggggcctcaaggtaagatatagaggtgtcaaaggcgaaggtgataataacaaaaggcataacaaagggtagagttaaggcaagactcgcgaaatgacgaagtggagaaaacaatcaaggtaagataggtgatgtttcaatagaatggttgaagtaagaattcattaccgaaggaagttacaaggaattaacgagatcaccaaggatgtgtgaaataaaatgaatgttcatggatcatcaagaaacaagggtggtcaagggcatgttaaatgaaatatcttaaacagaccttgggatataaaggtaagcataaaaagatgagagtatga

SEQ ID NO: 154822 - DNA, 655 bp, Zea Mays
ctaatgttgtataaaggtactctctgcaaactcatgaataaatacctgatccactgccttcgtctaggtctatgaatgccgagtgatacactggatctagaagaaatgcagatgccctaagatcggggctcctgaacaaaagatagatgcaatgagcgacacaataagcagattagagagatgtataatcggatacaaatcacacatttaggtgaagaataagggttacaatcaaatccacttcaatcaacgaaaaaggcttcaagaatcaacggaaaactcgatgtatttcaagttggattacctggaacttctaggaaagcattggctcttgaatcgggctccaatgctcggagattgaaggagctcagctggattggagcggcgctggattggagcggcggaaatcgctggcgagtcgcctcagacgcaaggaaggacgacgcggtcactggggtttccttcctatcgacgcgggtttccctgggctgattgcgcaaagacggttttagaaaccgggaaacaagggatacgtggctgggactgacgtgggaaacggtgtaacggcgccgtgactggaaactgttgaccaggtctggttcaacccaaataagcatattgactagcatgggcttcctctattattggaagccca

SEQ ID NO: 154823 - DNA, 721 bp, Zea Mays
ccgattacagagtacaatgttgcttcgagagcttttgaggccttgctaagggtaaaactttctaagatgctctatgttccatgagttccccacttccgtgccatccatttgagtaagccggtatgatcctggctgagtgacctctgatacaatgaatggcccttcccatagtggtgacaacttgtgtcgtccttcccccgttagaattcggcgaaggaccaagtctcccactgcaaaggaccggtgccgcacggcttgatcatgataacgcctcaaggtctgctggtaccgggctgattgaattattgtgttcaatcattcttcctccagtacatcaatatcttctagcctggtagcttatgcctcggctatgctttcgaaggtcaaccttggcgccccgaatatgaggtcgacaggtagcactgcttctgaaccataaaccataaagaacggggtatttccatgcagagctcgactaggttgagttcttaagctccaaaccacatatggcagctctctgatccactttcctgcaagcttttcattctagtcaaacactttcttcctgagcacttccagtatcattccgttggccctttccacttggccattggctctcggatgcgctactgatgcatacttaatctggatgcttcgttgttcgcagaaatcgaagaattcagagctggtgaagttggatcccagatcagttataatgcta

SEQ ID NO: 154824 - DNA, 1117 bp, Zea Mays
tgacaagcggggccaggggcgtcagcggcagagggggagggcgcactgaccgagcgggcccagctctagaggacttgggcgctgacaggcgggccagggcgtcagggcacgcgtgcgcgaagcgttatccgtggtccgagccattcgatctgaatcggacagaggggaccagaccagggggaaacaggcggctgcgggcggcgccgctcctctccgcggcggtgaggtcgccggagttgaggctggcgcgagctagggtggctccggggtcgccggagttgggcagagagggagagggcaccacggcgaacttaatggcggggaagaggccatgaatccacgggcagagaagggagaacggcggtgaaaaagtctcgggcgggccggagtaactccggtgagccattccggccacgaggaggggacttaaggcgtgctaaggcctgggctagctacaggagaggcaggggtgacagagggacctactccggggaactagaccgggctaaatcgatcggccaccgcgcgagcacggcggaccgccacggccgagcaccggcgaaggcaaaattggccgagcacatggcgcaataaggaaaattaggcacgaggacgagcgtctcacctcggggcgaagctcagagagggttggagcggtctccggtgagctggatggccaggaacgcgggcgcgggtctccgacggcggctggcagcatgggcagagcacgagagagggcgaagctacacgtaatgaggtgaggggtgtgcgcggggcactggcggggctctaagaagggagctaggcacgtgggcgggcgtcgtggccgagaaatccggcgacgtgcgcgagtgcgcacgtgctggtccacggcgagcgcggagggggcggaaatgacaggtagggtccacggcgcagagagaggagaaggggcgtgcggggcaatgactcggtgattggccgaccgggcccgcgagacagagagagagggagcgcgcggggaagaaaactggcgccgataggctggccccactgggcggcgagcgagggagggagggcgcgcgcgagggagaattgccgctgacaggcggggtccgcctgtcagacggcgcgggca

SEQ ID NO: 154825 - DNA, 580 bp, Zea Mays
gcacgcgcgccgcaacggatagcccacgggctttgcatcccatcgcattgaatcccacctgggggtcacatgtcccatccggttaacgcatccaacgggcgctgctctgtctcttcaaggtaggtgcctaaaaaggtgtctctctctcctcttctccttctccacaggtgacaggaaagagacacttcttcggattgccaacctagtgatggaaatgagacccgagcctcttactgatcatgggttagaaggttggcccctcagtggggttcgataaacgccctagagcacacgggctccaagccctttactgattaggggtttgaaggttggcccctcaatagggttcgacaactgccccagagcatagagttagggatgaccatgggtacatactgtgggggacagatatcccccgagtccactagaaggctagaaggcctcgcgaaaggccttgggcccattgtctcgcaaggccatccctttgtgggcctggggaggaatgtctggcagaatggatcgacgcaagattggatcaactcgagcctaggcggcccaatgaattcaagcattatccaca

SEQ ID NO: 154826 - DNA, 379 bp, Zea Mays
gagaactaagtggatggctgatgaatgacctatttttgatggggtgccccctaggccttatatatccgactgtaggacacttacatgcgtgtatgataacgatgtatgcctaagtaatagtgaaccgaccgaacttatcttcctacaatgttgccgacttattctcacttggttccgatgtccaaggtggtcgcgcaggagaatcggatcagagctgtggataacgctcaaaccccacgagccgcattggcccgcgttcgctcattccctgcgtcagcccattctgccagcagttcttccctggcccacgaagggatggccttgcaaaataataggcccaaagcctttcgcgaggccttctagccttctagtggacccg

SEQ ID NO: 154827 - DNA, 687 bp, Zea Mays
cgcccgacgcaacatgttcggtgaaggcagccgcctggcacaaaaaccgtcaatcacaatcgtatacgaacaataaattgccgaagcccaaggcgactttcatgctgcagctactgcgtcgcatgcttcagctgctgctcaactgagcccaccacgtctttggcggctgcggtcgacgcaatctcgccgctggcacaaaacttggaccaggaatcctgcgcagaccccttcgtctcagcagtcgccacgaccgacgcagccgccactggcgccgagacaactgccagctgcccaacatcgggtcctgcatcattatcttgtcaaaggcccagaccaaaaaacaaacaaaaactcaccaacaagtcccccgccctgtgcgagcgtcgaacatcatgacaccgcccacaaggtagtcatccacgcaaacatccatggagacatcggcctcagcagtccgcggcggggttgatagcctttgctcctccgtggcctcagcaggagtcggcttgccggagctagaagcggcgagctgcgcgcccgacaaaggtttgatgtggctaggggcggtgggtttcgcagccggcggtggcttgctgctgccaggggcggcagactttgcgagtccccgtgccttcttggcctcgcgaccagggtccccgaccctagtgaatgctcggcgcttccgcg

SEQ ID NO: 154828 - DNA, 425 bp, Zea Mays
aaccgaagaattggactgccggtggagatcctcgccgccgtcgggcatttgggggatttggtcggaggaggacgatgggatgtggacggttgatcaatggagcaacggtcccgatcatatcgctggttgggtgatgtctgtgccgctggattactgatggacgacgctgactcggtcttagaattgtgaggcgcggaattagtcaccgccgttggatgcgatctatgcggggaggatttgatttcatgactttaaaatcacggccgtcgatcactgatcggagggcccagggagaataccggttcgatgtagtatggatctaatctcgcgcgtctaatttggatcgtgcggctcataacgcaccgtaccctttcggcttggcgattttgcaaaagagaccccagggatagacataataaacccgc

SEQ ID NO: 154829 - DNA, 435 bp, Zea Mays
gagaaatctttggagcacatccgaatagtgtgtgaatacccagacatatttccagaagaattaccaggtatgccacctgatcgtgatatacaattttctattgaactattacccgaaactacaccaatttcaaaaagagattaccgaatggatgtcaaagatttaattgaactgaagaaacaaatagaagaattactagaaaaaggttttattcgccccagttcatctccatggggagccccagttctatttgtgaacaagaaatatggttcaaggagaatgtgtgtcgactatagaagcttgaacgaagtaacaattaagaacaaatacccgttacctcagattgaagatatgtttgatcagatgagaggagctaaagtattctcaaaaatagatctaagatcatgctatcatcagttgaagattcgaaccgaa

SEQ ID NO: 154830 - DNA, 609 bp, Zea Mays
cagagtagacccaacaaggtgctagagccacacgaaatgattgttgcactctacagtcgactgcagaggaacccatctcccatgtccatctaaaagcgggaaagaagtgggtaagcgagaaagaagtggcgtcaatagatcggggtccaaggctacctgagtcctccttggtatgccacctccgtcagcactactcgccccattatatactactcccttatacaacgagcctccttccatgtctgccacgtcccccaacgtgactcgcctccgctatacttttcccttgccatggctcctctgccctagcacgaacaagcatatcttagtccatgagagtgaggaagagaaaatgatagagaataatggcaattacgtcccatgtatatcggtgtcaattgaattggacttaagggccttgatttgagagcttctgctgtggtagataaaaaagtttaccctcaaaaagtagagaagccctcaaatcaagatcataaaccatgaattgagggctcctgctcaagttggtcttagttcttttagagcaagtataataatagattgtaaacaagctaaatgttaaagtggaggagagagagaataggagag

SEQ ID NO: 154831 - DNA, 905 bp, Zea Mays
tccgattttagggcaaacttgtagaaattccagaggacgcgtcattacacaaaaaaaatctgaaacttggtgtgttttcttcttatgtgctgctgctacaaaagagaaaaatagaaaaaatatttgaaaaaatcgcaaaaaagagagaaaaaagaaaagagtagcacataaacagaaacgccagtgttctgtgcacctctgtgattattttgccccaagcctgttttcttgctgcaactagatacttgtacctcctttcttgtgccttggtctaactgttttattacattttctaggccagcaactaggacgagtacttggaacacttattcagcattgctatctgttactgacttgtgtgccacatatatatatttagtcagccttcctagaactccagctttctctcgagcagaacaggtactcctttgcaatcacacccacgctcgttggacagtcacaccggtcaccgtttgccacctgcagtgctggtaagaaccttgtaagagcggggtaagacgcttcataatttgtattccaccaccctgagagatagttatagggttcacattgttgcatttttgtctctgttttgtgctaacaatgataggaccaaagaatcaaatggacaaggataaggggcctaagcttaacgacgatgagtgtgtctctcagatggaattgaaggagatgatgcgcgcgatgactgaagcttttaaaaaataccaggactctgcggcgacatcctatgagcagcttgatcgacgagttgctgaacttgttacacgcatggacgtactggaggctcatccccccaccaactccagccccagctcactctcttgtggatgacgacgacgatgacgacgatgactaacccagtgttcttccaggcaagccccggt

SEQ ID NO: 154832 - DNA, 417 bp, Zea Mays
gacggagcgagagagcacagcagcgcaacggtggccaccgcaggagccgcagaagataacgccaccgccgtcgtctgctttcttccgcatacggcacagctagacagcttgtttggagccgcttcgtgccggctttacggtggaaaaaagcggacgaactctcccaaacggcggccaattgtcccgggcatgccttttgtcccgcctgcgattcttctccccgcggtgttcaacgtgcaaggctgcaaacggaatcggcaaggcgaggcgcagtggggaaaatcccatcgattcgctcggccctcgcccctccgctcgctccagaggcaccggcgccgccgactccggactactactccccgcgacgcaggcgctgtctccctcctcgcgcggcggccgccaccgcctcccagacgg

SEQ ID NO: 154833 - DNA, 534 bp, Zea Mays
aaaataaataaatacaaaaaagggcacctcataatgaaattcttgtatttgtattcaaatttgtgaaacaagtttgagtttaaaaaaaatattagaatttgaaaataaaaagggaacagaaaagaaaaggatgggaatttaaaggaaatcatttatttccccctaaataaatgacaagggaaaacaataaataaaatattggaaataatagatgttatattttcttcaagagtgtgtttgatatttgaaaacttgggagttcataacatgagttgaattgaatttaaagggagggattataaatgggagaagaatatagaaaggaaaaagagaaaatagagaaatcccggctgggccgttttcctcttcggccggcccaactcagcttctctccccgctcagcccatggcgctcactgtcgttcatgtatatggcttacgtgtggggcccactatccagaatcgtcatctccaaccaacgcggcgggctcctgtacagcaaaacggactccgtaacaaactcaagcgaatcccg

SEQ ID NO: 154834 - DNA, 459 bp, Zea Mays
caaacacaaaaattgattaaggaaatgttgaggccatttccctttcaaattccaagagggcaatgatcatgtaaagactagactctttaatacatacaggcaggagtatgagaactttgtgcagttggctggagagaccattaatacaacattttcttagttccgatcaattatgaacaagatgcgcgccaataaggtgcaactactatatgatgatcatgagatggtacttaagcttatacatgctctagatcaaaggatttgggaagtaaaagtctcggcgatcatcgagtcacccaattatgaaactctcaccgtggacgagctcttcagcatgctcaagtccacaaaatcgatcactagacgcgggcaaagtttgagaacccttgtgcacccaccatggccctggtctctggaagtggctcttcttctaacccttcacctgcattgttcgctttg

SEQ ID NO: 154835 - DNA, 279 bp, Zea Mays
ctccataaagaactggcgagtactggagagaaggaatggtatttctactgtccaagggataggaagtatcggaacagcacaagaccaaacagggtaactggagcaggcttctggaaggctactggaactgacaggccaatctactcttctgatgggagcaagtgcataggcttgaagaaatctcttgtcttctacaaaggtagagcagccaaaggtgtcaaaaccgactggatgatgcatgaattcaggttgccatcactcactgacccaacactgctg

SEQ ID NO: 154836 - DNA, 993 bp, Zea Mays
ctaccgcctccgggattggagcagggtttcccctgagagctgaaagggaagccggtagagaggaaagtgagacccacctccctgcacctccagaactacccttagatctagcacaagttctagccaaccaaacccgactcatcgaggtcctcactcgaagtctggaaaatcaacgtcccaatggtggaagaccacaagactggatgggagacttcctaaggctcaagcctcccacgtttgccggatctagcaatcccctcgatgctgatgattggctgcgcacaattaaaagaaagctggaagcaatcggatgcccggaaaatcagcgtgttcaactggctgctcatcaactttccgggatggccttagcctggtgggataccttcaatgtcaccatcagagatgctacctgggcggagtttgaaacggctttccgggagcaccatgtgccccaagggatcgttcagctcaaggaagatgaattccgggaactgactcaagacggaagatctgtcagtgaatatgtgcacaagttcacagagttggcccgctacgcgccggatgacgtcagcaccgaagtcaagaagatggcccgcttcctgaaagggctcagaccagaactcaagaccatcctagccagccaagacttcctcagtttctcgcacctctccaacaaagccatgcaagtagaaagggcaaaagaagaagaaaaaggccatctcaagaggaaattccaagtcctccgagctcagcagcaagaccggcaccagaaaactcgatcctttggatttccacccaagggaccaagcttcagtagaccagctggacccgccccgtcacaattcagtcagcagagtcagagctcctttcatgccccctcagttgcaagcaaccaacccctggcgaatgcatgttggcactgcggagatcccagtcacttcaagaacaactgtccccagctgaagccatcaggacttgcctactccaactcgg

SEQ ID NO: 154837 - DNA, 291 bp, Zea Mays
cggcctgtaaacacgtaatgtagccaataataacatcgaaagtaattagtttgctaggttctatagtcacgttgtagctaataaccatgcatgcactcatgagcaacaacggccagcattcagacaaggcagaatgtacctcgctctaagcagcgatcgatcgagtgtcctggctgtaggtgctctgcaaaacaccaagtggaaaggtacgcagatattcaatgagatgtgatcaaaccttgaacagaaaacgagtcagaactggtttctggatgtacaaggaactgaagc

SEQ ID NO: 154838 - DNA, 798 bp, Zea Mays
aaccctagatttgaatttgagatttaaatggagaaggagaaagaaataccataaaatacaaaataaattcataaatgagcaaatgtcgcactagtattttcaaggtgaataattaatctaagtacaaattcacctcaagtttgaaattcaaatggggatttgaaattaagaaaattaagagagaaaggaaaagagaaagtaaaaatataaaagggaaatgaataaaacccctaactgggcctcagcaccccgtttcggcccactcccgaaccccaaccgcgcggcccattcaccacttcacacgcgcttgatccagcctctgttcgcccggccccgcttgccagcttgtaccgcgcgcgccagtgtcgctgtgtccctgggccatgctgtcaggagcttcttctccttcgtaacagagtgcgtgatactcgccgcgaagaccgcgccgtccgcgtaacagactccacgcacggagttctctagcaccataaagcgtgggcgataaaagctgtgtaccggacccctcctccatcgctcctatttccctcgtcccgagttgcccaccagcaccgccaccatcgctgagagaaatcggacccgccgccatccaactcgtggttatggagcgctcagacatccgtggggcgttccagagttatgtcggtgttcctggtaacctcagcggtcattaattttgctgggggcgttgcggcgccagtgcaattgcacgtcggagttccgcgccgccgcaaatccacgtcagttcgtgggcgcgcatcaccttcacttcggcaccgg

SEQ ID NO: 154839 - DNA, 367 bp, Zea Mays
ggccagccgactgaggtgtaccaggggctcttgcgtgaggggggccatggcagtagcaacagatcgcctgcgaccgcgccttgctgcatcgaggggaggggatggggaacctagtgttgcacgcaggggaagcacacgacatgggaaggcagtggggatttcgggcgtccattctcacatgtggacgaccaacagcgcaacggacacgtagaggcctacgctaggaggaggtcacgcctggagaggggtgttcacgcctgggcaactcgacagtaggaagaaaggccgaagggagagaactcacatgtgtgtgaggatcggcggcggttctttgggcacgatggctagatcgacatgcactccggcg

SEQ ID NO: 154840 - DNA, 845 bp, Zea Mays
caagaaggaatggtttcaatgatggaaagtgctttgagtgtggggaactcgaacacattgccatgaattgtccaagcaagaagaaggacaagggtgtggaaaataagaaaaaggagatctataagaaaaagaaggatgcccaagcctatctagttgaatgggattcgaatgcaagcatggatgatgatgatacttcgtccaagctcaatggcgacatcaccatcaaggagaccccttaacttttttcatctccacattgaatcatggcgaagggtggcacgaaggtaaaagtcataaatgatttgaatgatgttgttgatgatgatgatgtagatgatcttgatgatgatggctattcttatgatgatttagtaaaaatgttgggtgaggccgacgactacatgcacaaagagaaagagaagtttaggaccttgaaggatctatataaaaaccttcaagtgtcttttgaggagctaaagacctttcacaacaatctaaaaaagagttgtgggaaggttatggaagctcaaaactcctctcatgtgcatgaagtcatggtggtcaccatggatgttggagtcaattgtgacttacttgatagtcctacaagtggaccacctactactaacactctttgtagcaaatgcaatacttctctcatgaattataatgatgtctgtgatgacccacaaattgtcgttatgaatgatgtgttagtaagaaaggtcaatgctttaactctagatttggagaaggctgtgatggtaatgctaagtttgactttattttgggaagccaacggtgctcacttaaccatgagggccttgggtatgtcccaaagaagg

SEQ ID NO: 154841 - DNA, 836 bp, Zea Mays
tgagctatggcacaaacacgcttatttattgtgtgtaggggcaggggtacttgtaggagtaagtgaagaagtggcggagacatggtggggttagttgacctatggagaggttgatcgaccacttagatccaccatccttcaatccaattgctcatataactccttgatggaggttgataattattccaatggtaattggcttctgatcacatgtgcaaagctccatgtgggtcctctaatccttctattgatatgtttcaaccataggatgaatcgaccttgcactaatgattgcattggtcccaaagtgtggttcttctgaatggagtggatcagtgacatgggtgaggtggggccaggttaggttaaataaaagaatacatttgtaaccatattaattgaaaacataatatcactatgatgttggttgcaccctaactttggtgcaatgttgatggtcaacaatggtatttagtgaccatcaacaataactaaacaattcaatgagtggtaatgactcacttgcatgagaaacaccctctttgtaaagacactccaatgcccctatttgaaatctctcatgtgtccaaactcactatgaccaaacttcaatgctaacatgtttggttctactagaaggtaaggacatttttgttgtttctactattggttatgtcacttctaaaagctctaatggaagtaaaaataatccactgagctccttttctcaaacattttcaaattactaactccaacatgtctcccatagaatgaccattacctttagcatcgaattaggatttcacaaacatcttaagttttctacttgataatgc

SEQ ID NO: 154842 - DNA, 446 bp, Zea Mays
aggaggagtgcgctgcctgcatgcctctccaccaaatttgagcctctcccttcagcagctgagtgccaaagcgaacccgatctccatatgcaatctcgaagacattcatcttatcctccacataagtcaaccaatataccgcctcgaccggagtaccactgccatcaaaagaatccaacttcatgcccatccactgcatcagagaaagaccactaactggaagaggcacctcggccccgccacctggaacagcacccgcagggatagcgcccccgggcacttctccaccaccagcaccctgagcagcacccgcaggggcaacaggaatggcttgcctcagaagggccaactcctgctgcatggcctgcatcgcggataacattgccgccggactcaacgagaccccactaggagcctgcggactaccccgagccctacgaggcggc

SEQ ID NO: 154843 - DNA, 339 bp, Zea Mays
gtacgaagctgtagcagccaaaattgttatggtattgctctttcccagtcgccttcgtctgatatgataactcgtggatactgcagaaacacctagcatctggctctaacccttggcttctcatggcccatataaaaacccctactttgataatagcttcgggggtaagttgatgaagataaatttcaaaagcttttagaatatcgaccaacatcttatccagggggaaccgaattccagctttcatgaagcttctgaaaattaccacttcgtcagcttcgggaagaggaacattattctcccctccggccctcacgattgaaatgtcacgaaagtatc

SEQ ID NO: 154844 - DNA, 355 bp, Zea Mays
ttcgtctccaccttcttcttcgtcgtcatcctcgtcatcgtcatctccagagtcgtcggggtcgtcgcctctgggtgcaggtgcttggaaggctggtgcaggcggggccgatgtcgaggacccagctgcaaagtccaaggactctgccaacagggtgggcgtcggcagctgttcctccgagctgtcctccaggatgactacattctccactcggatgggagggagatccgccggaacttcctcgactaccactgggtagaccaggatctaccggggctgaggggcgtagctggtgttgatgcgggtagtttggagggtacgaaccatctacaagagaaatgtcaactcagttgaa

SEQ ID NO: 154845 - DNA, 1006 bp, Zea Mays
gaagtcatgactcttcatccctaagactcgcatagtagataagttcacccctactcaggttagctgcatacccatcagggaacatcaacatcttgatccactgaagtactttcttcctctgggccctgcttaggacaaaatcggccttaggccttctccatgtcttttcgccacttagcggcttcatctcttggtttggtctatcacacaacgctgccagatccactcttgccttttacgttatcctttgacttatcaggaatgtccataattgttgcccacagtgcctcggcaacattcttttcagtgtgcatcacgtcaatgttgtgtggaaggagtaggttgtcataataggggagccgagtcaagccagacttatgtgtccacatatgctgctcaccatatcccacaaaaccaccttctgtattggccacgagcccatctatctgttgatgaatttcggcaccagtcatcgttgcagatgggcggtctgtcactacgacaccttgcataaagttcttgatgtctaagcggaatggatggtcaagagggagaaattatcgatgtttatcgaaggacgaatatttgccaccctttttcaaccaaatgaacctaagagcttccttgcaaattaggcatgggaacttaccgtgaacacaccaggcgcagaatagcccatacaccggtaagtcatgcatggagtactagtaccaaacatgcattctgaagtttgtcttcgtacctcggtcatacgtccataccccttcctcccagggatgacatccacacataattcaacggcacgatgaccgacaatcacatctatatgtattcaatattaactcatattaacttaatcatacacgaatataaatttaacacaacaagactacatattaacctaatcatacacgtatataattaactcaatattaaacctaatcatttcatataaatcatacacgtagaacataaagctttttaattacaatatcacaaaacgaaa

SEQ ID NO: 154846 - DNA, 356 bp, Zea Mays
gcgagggcaggatggctgcggcgcatgaagaactcactcgagtattgggtgatagaatcaatgcccagatgatggagttgcatgggtcgcagatgaatcgcatcgtcgacctggccgcacaagctactacacgcgtagctgctctggaaaatgccacatcagtgttcgaattgtggaggcccaaggtggagagttccatcgatgttgtgcggacttcagttgatacaatgcggtcagaactcgctcgcatcacacaactgctggaaggaggagcttcaagcagtcaagatggtcggccgagcattctggggccatatgtgccagtggcagagcgcccacctgtggccgcagtcaac

SEQ ID NO: 154847 - DNA, 568 bp, Zea Mays
ggtagccacagaaagtcgtcagagtcttcatggctgccgcttcagtggtgtcgtccgtccctaatccaactgtctcagaatcaagagaacaccaacccggctgaaggggatgagcttccaaagtcagccagacccgacaacgaggtacccaatgctcctcatacaactgcaccgtgtacaaagggggcgtagggtaaccgctggagttaagcacttcccacaagatggagggaaagccatcgtgagaaaggaagtcagaactgaaacgagtgtctcctccactggcgggggtgggtgaattcatctatggaagggtatcaaaggtaaagattatggtggaaggaaaaaaataaaagagcccggatggtttttaaaggaagtgggttagctcaagttttaattctcttttgtgtttataatgcatgcatgctggaagtaatgtctcctctccaaataatagggtgctcttagggcatccttaaaaagtctaagtactggcccatggggcctacttaattagccacctatttctccctctatgcctaaggcctttcgtcctaggtctagc

SEQ ID NO: 154848 - DNA, 398 bp, Zea Mays
gtcgatgttcgtcgttgcccttgccagtttttgtcgatttaggttttgatgtgcaaactcatattttggccagctagtttaattatggatgaatggatggttaggtgtttgtgttgataattctcttgtgattaccaagtgtggtgtgatgtgggattcggatttaaaatgcaagattaggtgaagtatttgtgttctagacaataaaatagatgtagcctttaattgggttaagcaatttctatatatttgaggattatggtcatgctcatagaagtataattgaataagttctatgttcaccaaatatatgttgtagtaaatttaacccatttgtaagatgttggttatgaaccctgataaaaattggaatgtttgctgttaggatttgctgtttg

SEQ ID NO: 154849 - DNA, 574 bp, Zea Mays
ccgagcccgaagcccaaaacccaaaatacccgaacccgtacccatttagcccaaagcccggtactcaaattatttctgcgggtaatgaaattgaaaacccgaatttagttcgagcctaatcgggtaacgggtcgcggtacccgaagtacccataatggccgaagttaattttgttgtgcgtcttgtagcttttctataggctttcagccaaaagaagtccagttgccaagcccactaatgccccaccctggagccacgtagccactacccatgaacatccaggctccaaacatcacccaaactagcccacgcgcagcacccaaactagccaggccgcccactgtcccagctcccaaccaagcaccaggcgctcctagggctaggaaccctagccgccgcagcgccgtcgatagccggtcaaggctccaacgctcctcggctccgatggttgatgcttcctccgctctcgtcctcgttcgacactctgactgaccgtcggtgtggatcgtgctgtgctaatgcctcctctccttcattcatctgccatggtccttgaccagctagaagttccccg

SEQ ID NO: 154850 - DNA, 644 bp, Zea Mays
gtgagcaactacggtggacggcgggttcattataaaatatcttagggtttctttagcaaaatgtacccgcgaaggggtatcggtgaatcgaggccgctggattagaaaacaagggctgggattagatcttgcccacccaaaccggtacgcgaactcagccattggattgaggatctacgaccctgcaacactcacgatccgatcccgtctgatctgatcgaacggctcaaattagtcctaaccccacattcaatcccgaccgcaaaccctaagatcgacgacccacgctagttcaaatctaaaccgttcgctggtcgatcaatggtccaagggcatctctctcttctccccaacccgttcctgcatccatggacagcggtgaacaggcacagcggcggcgccatggtcgggtgatagcccgcacacccgaatgctccatttcctaatcaaacgatgctacacgaaattaggaacatgggttagcagtggagatggttcttaccgggattcgcagagtaattcctcctggccacgacacgaggcggagctgcgaccatccataacttcggcgagaaattggtcctactccggccacccacgctgcacatcaacgcgttgcggacgagcggcaagctccagctccc

SEQ ID NO: 154851 - DNA, 1752 bp, Zea Mays
ggcctaaacggatcaccagaaagaactcaagccttgataaagttgctgagatagggcacgactccatataactccagtcacttatcctacctttatttggacggtctcaaatgctgcaattgaccaaataatttggctggttttgaatggtcagggtggcatatactgtccgcatccgcaatttacatggcattgcaccgcattcgaatcattccagaccaagacgatagagtgtttttattcttctattctacttttcaaattgttggtccatgccattgtaccttgcatactagttccataaacctgcaccatccttttctacctccaccatccctgccaggattgcagtggcaacgtacggcggtcatttacccatgttccaaccgacctgatcctaccatgtgaccatacacgagctggatgatatgatatggaaatgacggccatcacgtaactacatccagagccttgaatcttgatctcttcgatcaaagcatctccttttcaccaagtgttacgatcaaaggatggcatggaccaacaatggatcgataccctttcaaaaaaatcaatggaattggtaaacaagttaataaaacgaggaaaactggaaaagttgagttggaagaataggttggagacgactgggatagatccaataagaagaacccagctaggcagctaagctaaaaaaagaagaggaggaaacagctatgaatggtacggcacggacacaataatcttaggacagtggcaccaccgttcatccaaggtaacgctttggcacttccaatgctagtaataataccagcagctataactgatcctgacttgcatcattgtacattcaactgaattaggaggcttattggtcgtccaaacagctcccgcaccttccaattcgaagtttcttgttgagtacagcatggttgacttgatactagcatctgtaatggaattccacaagctgagtaggctaaaaatatggaactgccttctgtgaatctgaaactaaatggcaatagatggcagttttgttcggtccaccttcagcttctcctatcacctttccttttttacacctttgtactgtagtacatgaaaagaaggcatacgtaatcaaatagtcactctaaataacaattattgctaattaccactgagcatatatgtttcgttataaccagcctatgaaacaataacgtaattgtggtattaccaagtgtgagataatatcaagtttagaaagtatctgggagagatgagggtaaacttgtgcgctcaactgcaggttgcacagtatgccagtttcaagcctcgtgatcatatcatcaaatacaataagacacgatccttccaaagacgcagcatgcaacatccctagggcaaacatgatgtttttaataagacgttttgtactttgtttgaaggaccagtgcatggattttgatgcaataacacaattcctcaaatcatactaatatgcttgtgacaaaggtggtgttgaattggtagtggatcaacccattccattcctcataccaaacaagaagcttaggttcagaagctatgaccaatgacccatcatcctctcagtactcaaaccaaatacccctaaatgaaacagggtttctaggccaggaatcaagagcatccacttaagggttgggagggttgaggtgtcctccaagcccacgtggcttggggtggattagagtgcagtcaaacaagccctaaacatagttatgg

SEQ ID NO: 154852 - DNA, 325 bp, Zea Mays
ggggtgatgatgtgccacgacgtctcgccgttgctgctccatgccagctgctcaggtcgactagacggccgcctcaccgctgctactccatgctaggtgctcaggtcttcatcagacctttcaccgaaagacagccaacacgtgtgcacagccctcctcttcccttctcgttgtgcgaatccgaggatcaaaccctagcttaagctgttcgccgccgtcccgccgctccacgcgaagtactcaggtcttcgtcgggtctgtagccgaaaaacaaccaacgactatgcacacctcctcccggcctccccttccttgctgtgcgaag

SEQ ID NO: 154853 - DNA, 388 bp, Zea Mays
aaataagtgcgagacatactttcggggtatgcgcaccatgaccgaagacaaggtatggctcgccactttgtccttggagggtggtcgctaaatggtattacgccttggaacacgaccatgtcatcttgtcatgtgcacacttcgtcgagttcattcacatatgctttgggcctcccatccgcaccaatagccttgcggagatgaaggccttgtaccacatatgtacggtggaggagtaccagcggcagttctccacgctgccctatcgatgtgccaacctaacgatggggcagaaggtgaatatgttcatcgcagggctaggtcagcccctcaagactggcgtcgagctccagtaccccaccaatttgcagacatccatgagtttggc

SEQ ID NO: 154854 - DNA, 295 bp, Zea Mays
gactaaacgaggtaatccagtcagcacggtatcagcagactctaaggcgccatcacgacaaggctgtgcgacaacgattcttctcagtaggggatcttgtcctccgccgaattctaacgggggagggacgacacaaattatcacccttatgggaaggacccttcatggtagcagaagtcactcggcccggatcgtatcgcctcactcagatggatggcacagaagttgggaactcctggaacatagaacacctcagaaagttttatccctagctgtacttcaaaactgctgggac

SEQ ID NO: 154855 - DNA, 805 bp, Zea Mays
ttatgctaaaattcatacatatttatgttgttttgttcacgttttatgcaaaattccgcctgagccagaacccacgcacgatcggccacgcgcgatttttacgtcgcaatttttgggccccattcgtcgttatgaaaaagatctacgatttacgctaaaatttgtatccatttacgctggtttcgttcatattttacacaaaaatccatctgagctagaacccgcgcaccgtcggacgtgcacgatttttacgccataattttttggccccattcatcgttatgaaacagatctacgatttacgctaaaatttgtactcatttacgctggttcggttcacgttttacgctaaaatccactctagccagaacccacgccgtaatttttgggtcccattcgccgttataaaatagatctacgatttacgctaatatttgttatcatttacgctgatttggatcatgttttacgctaaaatctgtctgagccaaaatcgtgcacgatcggatggacgcctacctgcgcagaggtatacctggttggggcttcccggtactaatggaagccctggctttccagtactaacatgggcatccaccacagcttcaccgtgcccccgctctcgtgatcctcgccccgtctcgcatctccccttccttcgttgtcgcgatgccctgccaccgctcgtgtctgccgccgcatcagccttgccttcctcgcccccctgctcagccccttcgtgcccccacctgcgcatgcatgcatgcccccgggctccaccctgcactacgcccgacccttcccc

SEQ ID NO: 154856 - DNA, 317 bp, Zea Mays
gtaaacaacggacttgtgggtatcctctatcaggacagtaaccccatgatagatccgccaagagcaaagctccttcggaggaagaactccgacagagacaagatggagaaggtccgactcagaaacaacagacatatgattacctgcgaaaggcaattggctgttgggattgatgggaggaataaccgtagcggcagaattctgactcttccgcttgggcgccatctcaatctcattggcgaactgagcagaagcaagatcgaagggaaacagaggaggtctggaggcagaaagtaaggctagggctcagaatgcaa

SEQ ID NO: 154857 - DNA, 397 bp, Zea Mays
caacgaacccccttcacgcgatgtgcaggtccttgggttcggctctgcagtgtaccagaacgttcctgataggtagccggactctccgtggtaggtcatcagaacgtccgtgatagggcggtggaccgtccacgatggtgtagagtgctcttgggtaacctatatctcaccttccggatgggaccttgtcagggaggagagatcatactatcgtagggttgctttggtggggttggcaggtcaaccaaagcgcctctagatgttgtagagtcatagagaggcgaagatggggatggagacctataaataaagctacgctacgtctatcctaagacatgataacgtcgatagattggttcgattggattgtgtattctcaatcggccgtaactcttca

SEQ ID NO: 154858 - DNA, 822 bp, Zea Mays
gttaaatatatacttccacttcctcacaataagaatcaacacatataacatgttcgaacaatgccctgaacatatgtaaatagtagaacatgaataccttcaaacaacaattcttaaaatggaattcgatgatgaacacatttgatattgatatgaatcaagaacaggacacataaatcaaccgaacggtataaaccatcactattttacttgccttcaccagggatttgggaaaggcactaagtacgatccggaagtccaccacttatttttgacacacatcttagtgcacgaatccacataacaaacgctcataaacaacaccgcacctacgcacaattccaacccgtcgcgagcgacaactctccccatcacccactaaactgtagcgacgctgcttgataatttcataactttaaaattatgacagcagtgataacaaacaaaaatccagaagcatctacataaaatttcccacaagttttgtattcaaaagatagttaaattctaacatctagatgcccccaaacagccgacaaggtacaaccctgcgttcagtttttggacagcaacctagctgagttcaaaatgcgatatctcctataatatacctccgaatcaaacatataagtactctatgaaaagatatgacaaagctctacatgattttcacagtaattacagctaattgcccccgcaaaaatcccaaaaactaccaatactactgctgtccgcccgccaccaaaaatcaggacaacacttctaccaattcgtctaggtgaacggataaccaaatgaattgcagcacaaatacaaaaataa

SEQ ID NO: 154859 - DNA, 1012 bp, Zea Mays
tctaggaaaaagaatgaaaacagaaataaataaaaagagaaaagcacacctgtgcgcttgggccgtttctttcccggccggcccaattgggcatttcacacccgcgcagcacatcaccctgcccttccttttccctttttccgcatgagaatggcaggtgggccccaacgaacggtgacccactggccagcctctcactttcacgcgcgtatcaaacacggtacttggtttgtgggacccactgtcagccctatcctcttcctcaagtccgaacggggggcgctaaaacagaatcccgccgagatctttgccgatgcgttcgtcgaacggtctcccccgaatcgagctctactccggtataaaatcctagaccgcctcatcctatccacatcccaagctgccaggattggagatctagcgtcatagagggcctcgccgaacggggggtgtgaccgggtgccgtggtgaagaaagagaatcgtgcgccgccgtcctagtaactcgtcacgttgccgctctgtgcaagtggtcaggtcggggaggcgccgccgcaggattctgtcgacgtcgagagttgggttcctgcaaggttatccgagggttggtcgggtctcgccatatccgggagagagtacaatcgggggtagtcggctggtgtcctcgacaattgctcgtcgtcaccgtgaacccgtcccgtgtcgtgggtaaccattcctgcgaccctattgctggtaagaatctgctctccgtgctcgccttcgctttcgttacacgtagcaattacctaggcctgatttggggcgccgaggccttagatcgccagtgctccggtggagctccgccgcagaactttgttgcgccgccgtctctgggtggtgcctggcagccgaggtggttgggggagatgagtccagggccgctaatctgctgatgaaaggataagaataggtgataacagtcagccgttggatctaatgggaacgattaagattagacgaggataccccttcgc

SEQ ID NO: 154860 - DNA, 676 bp, Zea Mays
atcaatccgaggtagtggatacttattcttgatagtaacttcatttagggatcggtaatcaatacacattctcatgcttccatcctttttggtgacaaacaatactggtgctccccaaggtgatgaggtgggacgaataaaccctttatgttgaagttcggtgatctgaagcttcagttctgccaattttgtgggtgccatgcgggacgatctctttacaattggtgcggtgcctgggaggaggtcaatgtagaattctacttctctttacagaggcattcctgacaactcttcaggaaacacatccatgaattcttctaccacagatatgccttctgctgccaggctgaacaccattggatcttgggtcggcggccgagctttacacgaaactaattttccatggtggtcggtgagaacaatagtcttatctgcatagtctataatgccattgtgccgggtcaaccaatccattcctaggattagatcaattccatgggatggtggtacggctaagtctgccaagaatactaacccacttaaaagaattatgacttgggagcatttgaggtggcagagaaggtctgatcttggggtttgggtgaccagagggacttctaatggtgtagtggggatgccatgcttttccacaaaactagtagcgatgaaagaatga

SEQ ID NO: 154861 - DNA, 510 bp, Zea Mays
gccgaaccagctgacgaagaaccaaggccttcgcaggtggtggattaggggttagggatttaagtgtgaacttttgtttctgtgatactgaacctcggttgctgtgcaggttccgacgtttgggcctgcgcaagcaaccgctgctgacaatactgattttgtggtggcctcaaccgtagtgcctgccgatgataatttgtttggctctgtgtctgagtgttttgagtctgatggtgaatctgggagttcgttttcttggacggtggagtcctcagatgaaggcttggattattttgctgcgttagatgtggctgtagcagagggtggtgccggggatcttcctagtgtgagtactgggtataggcggcgaagggtggtggcgaaacacagtgtgggtgaattttcgcgaagtggtaggcgccgtcgtatggggatggagtgtggccgtcttcgagtggaccagattggtaaacaagaatttttgtcctcgccgattggggcgagcatagg

SEQ ID NO: 154862 - DNA, 1161 bp, Zea Mays
ctgaagtcgctctgtcaggcggactgaataccaaccaccatggtacagtaacgtttggggatcagaccgccagcgcggctgtcctcaccgccgacggatccctccgccgcgattcgtgtcaccggcgtttggattcgtgcaccggacttgtggataacctctcggggtaaaagatcctcaccgccgtcaagctggaagctaccccggtcggccgcggtgctcctcccctggctcaccgctcgcgggtaaagtgctcaccgtcgtcgtgccatcgccgttggccaccgcgtgtcctaacagtgccatcgcatcgccgtgactccctaccactgtcttatcaacgccggtgaggttgccacggcgttagccacgaattcaccgcgcccgccttcttcttcatttccggccgccgcgcgtcctccccaaattcaccggccaccgtcgaagccttctataaattgagcccccgggcagttgcgctaggtcataccgaagccttagcacccactcccactcgtaatcgttcacccgagctctggaatttccaactccccccaaatcaagtttccgccaccatgaactagccttaccgcgaccagtgcaattcaagccaactcacgccctctgatccctcaattgagtatcctcaggtacccgtgatgctcctcgacccctttaattggcctataccgccatgaatcgcttggaacacgcgactcctttaagtttttccgctgtcactgtgggcagagagttgtagagctccaattctgaaattgaatgaggggaaatgcctctctggggtagattttgggataaactgaagactagcgccggtcttggtcccctccggctggtttagctcgccggagttaagcttcccgtgcggagcgccgtcgtggaccatggtctgcgaaggaatagaagtctaagggccttaatgtaaaccgtcagcgactcactgaaacagtagaagaacctgtctccagatagataaaaccccgaggccctttttgcaaagccgccagggcgcgggcgcgcgctcgtgcgctttctcctttggactaggccgcttcggccgaaaccagcccaatactattcagccttttcctttttctttttcagcagagctttggaaatctgttaaaaattgtagaaaaa

SEQ ID NO: 154863 - DNA, 533 bp, Zea Mays
caatcgtaacgcatgcaaatttgggctaaaaagttccttgtgccttgtatttggatacttggttcatgccccctcccccctccctgtgacttatgttttggtaaagacagtagtttctcaagcaaaccatagttgaacataacagagattggggaactcaactgggcgaagatgcaagaggatgtggtggggaggtgtccgcgctttggatttatttatagcagtgcatgtggctcgacaacgatgtggtgtgggcaccgaggatgtaggtcgttgttgatggaaggttgcggcgacgatggaatgagattcagccgtttgctttgatggagtgagtgctctgatggtaggtcacgatggcacgggcgcagaggatggaaggggattgcgagatccagtagcaagatagggggagaatacctgtttggcagaggcatgaatggcgggggcgtgatgcgtgggattgcgtgcttccatggaaggtcgtggaggcgtgggcacagaggatggaaggagatccagtagttggacac

SEQ ID NO: 154864 - DNA, 345 bp, Zea Mays
ggcggccaaaggggtgggggagtgagagggagggggcggctatagttaggggggaactaatgggctccccaccgccggatcgagatccacggcccaaactcgctctcacgtctgctcccgaccccagcgcacaaatccaacaagtaatctactgttttactggtgaatgcttcctaaaaaactccaaccccaactacacagatcacgaaagaaaagggaaaaataaatttgacttctttttagaaaattgggtatcacactctaccccccttaaaaagaattcgacctcgaattccgatgcttctatcggaacgacaaggaaagatcaatgaatcaacaaaactc

SEQ ID NO: 154865 - DNA, 804 bp, Zea Mays
aacagcaaagcgaacaccgggattctcatgtcgctcattctttcttcagccaggaccttgggagactatatatacatactgcactgcacccccttgacccataagcgtcgtagtagatgagccgcgagcccattgaagcgagggaagagagaacagagaggtagagagagccgtcagcatcaccttgtgtacgccaccgttcggaggctagaaggcaatcgaaggagtttgcgagggcgcgagcatgcgagaaaattaacggtcgcaaagttcatctaatctgaaccacttgtgtctaatctaagaatgcacgatcgttcttctcctttcaccaacaaaacaggacgacacctcctcgccacagtggatgctaacaggcgtaaccccgatctagccatcccagcacattcatgcataaggaccggtaacgaatgtagccaagacaatcgtgaactatctgatgcactccttacccagatcgttggccgcgaggtaatttcaatcgatctggtccttccccatgctccaatgtgtcgggaacgcgtttgaggtgctccagcaaccacctgggcgccctccaatatccctgtgacgaggcagttttgggtttggtgacttatctctcccttcctctctctctacaatcgccactgggttgaattccttggctcacggctggcaacagctctagcggttatggcaacaattgcaaattgtaacaaccctaggtggaagacggttctggcaccatggccccacatgccagtgattatgctgtgcgcgtgtgaaatcttgtcgtgcggc

SEQ ID NO: 154866 - DNA, 517 bp, Zea Mays
tgaagacgtagtgccgctcaggcgtgggaaaaggaaataaaaaaactcctcgaaagcgtttgaggcctggttcgagggcaaccttatcattaatgacgacaagcagtccgtcaaagagcgatgcattagtgggatcgagaccgatgaggcgtgtctttgggaagacgagattaggcttttgtttctttggtgaagagcttgaactgctcttgttcgattatagggagcttggtctgctttcgaaaagggagcgccgagacagctgagggataaactcgtgtttcttatatgtgttgtgccgcttgtgggtggttgtgttggttttgcttgctttcttcgcatgttgccgattgacaatatagtacgtgaaatgctgcctacgccccatttagtgaccagcgaagaatgcgaaggtatggttcaggatactgtcttcgcatttttgtgttgctaatccgattgcaccattggcgacttttgctcaaatacaacttgcctttgtgcatttatcatgtcc

SEQ ID NO: 154867 - DNA, 1063 bp, Zea Mays
gcaatccagaggtggactgcgggtttattctcatattttacagggtttcatgtgtaaaacgtctacggcgaaggggtatggtgtatccctggccgcaggatcggatagcgatggtccagattaaattgcacatctccgcaaaccggtacggctcgggatccttggattataaatgaacgacctagattttatgaggcttgatctgctccaaattgtccgatctgagatccatgcacccgcttggatcccacgaagcggtacccatttctaatctacgccgtcgaattccaaaacagcggtcatcgtgccacccccacctccagccagggacggcggcggcgctccaagcagagtggcggcgccatggccggcaatagccgccaagcacccaaaaccgcaatactctaatctaattagtgctacacgtccaagaggttaaggcgaagactactggatatgacttactggtggttgtgacggaggcaagctcgaccacggcgtggcacggatcactggcacacgcaaagcaccatcgacgaacacggcgagcccagtggtgttcttcgtccgaggagtccacgcgcgcaaaacccgcggccacggaaaccctccccgattgctccaaggtcaccaaaggcgtcgaaggtagagagcgacgacgacggcagctccttttccccccgctaggtgagcagtccacggtgggcggactgggttccagggggcgcaacatcgaccaggggtttgatcacgattgtccatggtggttagttctccatcctctctgttcggccgtgcaggcaataatgctagcaccgaccggattcccccaatttcttcgcgcggcgccccccgatttctctcaccaatgctctgctccgagaagggggaatgctgattcgtccagccagggacgtatcttataggaccgaggagcgcctggccggatcgggatcccgctatccccggcgtaccggaggggagctgaccgacccgcttcaagcggccgaagtccaagcggcgagatcgacatcttgttacggccgaggtccgcggagtccgt

SEQ ID NO: 154868 - DNA, 577 bp, Zea Mays
gtcttttgtgtgtttttctgtgcatatccagttgcatccttaggcgacttttgctcggatgagtgatgcgtctgtgggacggcttcacactcttaggtgacttcgcgcacttcttgtgtgtatccgactgcacccttaggcaactttttgctcgaatagttgatgtgtctattggacgcctttgcacacttcttgtgtgtatccgactgcacccttaggcgaatttttgctagatagttgttcgtgtcaaacacgacggctgacttggttacttgccgttgcggtgactactttgttgtcgaatagggtaggctagcttggtggccgcttttcaacatgctcgggctatgctctctctttttttgttggggaggggatttcctgcttgttttactacatggcgctgcctcgttaaaaacctcgcccccagcaaggaaaagattacgggcctgagaagcaatgtatcggttgtttttacaaaggcacgatgggcctgatagtgtgatgtgctataggaagcactttctcatgttgtctacattccaagaatacttgaggtctgcccctgtctgatcta

SEQ ID NO: 154869 - DNA, 325 bp, Zea Mays
gtttcacgagggttcttttgaaagattgtttggctgaaggggtaacttgtaaccctggtcgtccagatcagatcggatggtcaagattagatcatcccacgctgaatcggtatgcaacgttagccgctggatcaccagtggacgctttagatttaaaacaccttggtcgattgatacgcgtccgatctaaatcgaagggctactatcagacctggacgaaatagtgtgtccgccagatctggaccgtttcccccaagatcaatggcccatatccaattaagtgaatccagccgccaacaggaaaatcaacgaaccacgcttcttc

SEQ ID NO: 154870 - DNA, 758 bp, Zea Mays
catacaaggacactaaactctcaaatatatgcaactttagtcatcttttaggactttgtcgacagcttcgtttagcagcttgtcgacaacttcgtcaatgacctcattagcaatcctaatcatatcgagtgcccccttcacagatggatcagtttcaagattgtatggctctggagggggagaaagctcagatgcattaaaatacaaatatctgttagtaccgaagctacaaaaatttacaaagttaagctataaaggatatacctataagtctggcccactcagtagcttcttcaactcttttagcctcttctaaggcgtcatgagactctttctcattttttctaatggcttcatcagctatttctcggccacccttcagccatacttcggaataaaacttcccacctagtgtagtagcttcggctgaagggtttctaacatcgtcagctgagatggcaaaatctggctgagctacagccttggcatgatcacaaccgaccttttccaaaatggacacaaccccgcgggcatcggcaaaggcacaaaaatccactctatcactaagaatctcttcaaaggcttcggcctcgccgttaatccattgaataaatccatcggggtcactacgaatgaatttctgctccaaagagaatgcaccaactttagaaaagttgttcttcaaattcttagtgcattccatagccacatcgtaacatttttctttagctgcacgaagctcgtcaacatttgttagt

SEQ ID NO: 154871 - DNA, 425 bp, Zea Mays
tagagcttcatctacacggttaggttccatacaagatacaaaagagaaatgttcacaaaatgaagctatacgagagcgagtttgaacacccttactcatgtcgcccacaatttgatcaattgggtgatccttcacaatagaatgatggattcttgataccatttgagaattactagttgaagcatgaggagggaccgaattacttgaagtatcttgatcataagcatccataatttcatcattttgttggctttggtgattttcttcatttagggttgaagaggatggaatgacaaccacactattatcatcatcatcttcttttggctttatttcaccaatagccattgttttcatagcatttctcaattgagctccaccaacatcatcaagattatcgttttcatcttgagacccatttgttt

SEQ ID NO: 154872 - DNA, 597 bp, Zea Mays
cgagggctgtttctacaataacgtcaaagactgcccaaaaattcttctggcaaaacattgtttgccgcttcggagtaccgtccgaactaacagttgacaacggcaagcagtttgacagccaagacttcaaggatttttgtttctccatcggcaccaagcttgccttcgcttcagtttatcatccgcagtccaacggggtcgtggaacgcgccaatgggaaaatcttcacagctgtcaagaagatgctccttgatgaaaaaagggcagatggaccgatttgttacctgaggcagtctgggcactaaacacgactaagtgcagagcgactgggtttactcccttccgccttctatacggatcggaggccatgaccccacaagaaataaagcatgggtccccgcgaacagttccgtcagccgtccccgacatggacgagccaacttcaaaggatctcattgacggagaccgagtctttgccctacaggccctaaacaaataccaagcccagaccaaagcatggcgcgaccacacagtcatcccaagggagttcagcgaaggggacctcgtactcgtccgaacagctcggacggagtccaa

SEQ ID NO: 154873 - DNA, 411 bp, Zea Mays
ggaacttagctcaactgtcgacgacctgcaggtctattgcaatacgttgcatgaggaagtccatgtactatactcgcaattacaccctagtgcacctgcacaccctgctgaggcggaagccggaccctctcacgttgcgggacgcgcgctgggtggggagttagacctttttgagccccctccttccatgaggttggttgacgtctggactcccacacctgacgatgaggctgccaagagtaatgggaagcaggactaatggtgtaatagaagtagaaggagtgtagtgtattgtaggttgtactggtgtataatgggtaatgtatcctgttatgtaatatcgagtctgtatcattactttttatagtaatgtaaaatggaaggtttctctggcatattatgtttacttcc

SEQ ID NO: 154874 - DNA, 620 bp, Zea Mays
cgcgagggaagaaaagaaagggtgcaacttctgagaaggctgctgcttcagctgcttcaagcgagcccgcaccgaagaggaaaaagttgaaggtccttactcaccgaccgtgctacattgaaccggccatagtgcctgaatttggcggtgagacctctttagctattgaagccaaaggacctgctcttacgtagaggattgaagagccggctgcaatgccgaagactgacaaaattgaagaaccgagaatcaaagggacgaaaccattagaagttctaagcccttcagcaggagtggaggtgccgaagacacaaaaaggtctaacatcgacccccaagagaaaaaggatggctagtgtactagatgtgttggagacaataaaagcttcaagctctactccagggaaagttgccaaggcttcgaaagcgcagattgaaaccaagacaaagctgaccgaagccgaagctacaatgagccgggccgacgccgaagctgggccctcagagcccaccaaggagaaatcctcagaaattggagaaaaggcagcggaggaagaagctatagaacagattttgcctgaaaaagctgccgctcctactcccgaagcgccttccgaagtc

SEQ ID NO: 154875 - DNA, 808 bp, Zea Mays
ccgagctcaagctttggaaatcccatgtttctcatcatctcctagcaaacatatatctctttattgtctggaaggcaatacaaaaaatcatcttcatcagtgtcgttgtataccaaggatccttgtggatacttcagatccctagcttattgcctagctttgacaatctgttcttccgacaattgcctccctgaagcatggcacacaataaactccatcccttcgataggtgcttcgggagcaggagacttaagtttctcaggaacactttctttttccactacaagagtagcccctgaagggcatgctttagcccccaaagggcatacttcggcgggagatgagggtccagcctcagaagtagcttgccccatacgatcttcatcagatttcttcaaggcctcgccctctgaatcaggtgctgcagtaggagtttgtactttcacagattccatgatagcgtctagtacactggccatcctcctcctctttggagttgctacaggaatccttgataccctggacagctccgtctcttgcaacagactcgaagccttcggtggttctgcatctctcttcagttctggctcttcggccgattttgtcctagcttcaacaggggtggagtgaattggctcagaaacagaagaagacccctcaataggcctcggctctttgatcgtttcaacgcgcttagggcggtgtattaaagctttaacttttttttggcttcggcgtgttagaaatcgccgaagcagcagtctttcttttcttcccttgcttttcgctaagggtaacagtaatccgg

SEQ ID NO: 154876 - DNA, 344 bp, Zea Mays
cttgaacactaaggtcctccattggtagttgctcctcaggaaccctaaggcacttctttagctaggacacatggaatacatcatgtacatctgacagatgattgggtaactccagttgatatgcaacttctcccactcgctttgagatcaagaaaggtccaatgaagcgaggggacaactttcctttaactttaaatctcctcataccccggatcggtgacaccttcagatacacgtgatcaccctccttaaactccagtagtctccttctattatcagcatagctcttttgccttgattgtgcaattctcaaattttctcttatcattcgaacttgttcttct

SEQ ID NO: 154877 - DNA, 557 bp, Zea Mays
gtttgtcgacaacttcgtcgacaacttcattagcgatttgcataacatctaaagcctctttcataaccggatcagtttcggggttgtatggctctgatgggggagagaggtcggctgacataaacatataatggtaaattttgaaggaaaaaacgagcaacaaggcaaaaaaaagtttcaagtaaaaatacctataatcatggcacgttcggcagcttcttcagcttgcttagcctcctcacaggcgtcgtgagattctttctcattctttataatggcttcgtcagccatctcacgaccaaccttcatccacacatcggagtagaatttgccgcccagtgtagaagcttcaactgaagggtccttagtgttgtcaactgagagaatagattctggttgggccacggctttgacatgctcacacccagccttttctaagatttccgcaacccctcaagcaccggaaaaagcacaaaaatctccacgatcggtaagaatctcatcgaaggcttcggcttcttcacctatccattggataactcctttggggtcaccgc

SEQ ID NO: 154878 - DNA, 821 bp, Zea Mays
cttcgaaaacttctgggtaaagatggagggatttagagaggctattcaagatgcatggtccaaacctttatgctcctcctacgcacccttgaaacgcctccatatcaagctagcacgcactgcaaaagacatcaaggcgtggcgcagaaccaaagttggagacacggaactacaactagcaattactaaagagttaatcctttggttggaaactactgaggatagattgctcatgtcgaaagaattggaattcctgaaggtgctcaaggctccttgggacttgcagtaattgatatatcgaggatttgccaacggacccgacttacccacattcggttaggtgatgcaaacactaaattctttcatctcaccgccagctccagagcaaggaataaatttatccaatacctgtagcccaccataggaaatatggtagagacccataatgacaaagaaaaaaattatttatgatcatttcaagtcacatctagggacaaccccacctagagagctcaccctcaactagtcggcgctagccttaccgtgacacgatctctcggctttggaagcgccgttctccctggatgaggtgaaggaaaccatcttctccatgccaagcgataaggccccagggccagacggttttataggaattttcttcaaggagtgctgggacatcatcaaagtggatgtgttggaggccttgaaccaactacatgccatgaatggagctgatttcaagttactcaacttttcgaatatcgtgctcagtccaaagaagccagatgctaagtcagtgggagactaccgccctatccgct

SEQ ID NO: 154879 - DNA, 861 bp, Zea Mays
acgcaattgaggatttctcaccatagatggcgcccaacagagctctgtcgacgtgggaggcacgaccacggcggatgccccagctccggcggcgaattccgagagctctggccaccaatccacgacacggaggacaccagatcaatccccgacgcacgatgagacttacagacccgaattcgtgggcgtgacggcggtgaacacaaaatcgggccggcggcggcgcgaatcaaggttttcctggcagtcgcggacataggttgggaagcaggttagggtttgggtgcacgcgctttatggtcgggtaatcgcatgtggaggagatcccgggacgtggcccgccatgctcgggatgtggttgacggggaggacggacggagtccgcgcgcacgagttcgttccgaggcttacggtgttgaagatgggcctgacagtgggccccagatgtcagcgagaaaacccgcgcgcgcttcaactgagagggaccctggcatgcgggcccttatcgtcagcaggaaacagcagggtgggctcctgggacacgcggaatgacaggtaggtcccacgaggcagccgcacaagggcgtgggattcgttggtcgggccacgcaggagcaaattcaagtgggccgatcggcgaaggtggagaagtgggccgatcggcgaaggtggagaagtgggccgaaatcgagagcagggcccagttagggttaggttttgttttattcatttcttttctactcattttctattgttttttatttattttcaaacctagagtttaaattcaaatcctgtgtccagttttttccctcaacttatattgtgaaatcatagataccaatttggggtatttttagg

SEQ ID NO: 154880 - DNA, 1161 bp, Zea Mays
gggttcagtatttttgttcaatagttcatattaattggaatccagcaaaatttgtttgactaaatttggttaaatatttctcaagttatgaatttcctaagttttctgttcatttaaaagggtattcagacatggttaaatggaaaactaacttgcatcggggcccctggcgaaagtttctaagtttccctacagaatagtcctggggttagtattcacatgagtctctgactacgcagaaaaccccctagggtgactctaaattaaacccacggttcttcccctaaataaacagtatctgcggcagaggaaagggcggaggggcttaccggtggtgagatcgctctggtgaagaggtcgagggtgtaggggaggtctcgacagtcacaccgatgtgcggatcgcctccggggatggtcggaataggccggtccacgtgtgtaggcgggtgagctcgtcagcggcgagtgttccggcctgctcaccgcgcgatagttcaattggttagctcgggaggctcgaccaggtgacatagaggcggtatacggaaggaatttgagaatggcgcagagacttacccggtccacgttcgtcggtgagcggaagaagtccggcgagggtgattcggggtctccggtgaggctctgccgggtccgaggacttggggagcttcacgggtctctggcgaagctaaccgaatagctggcgcatactagggatggctggagtgagctggccacggtggccgaggctcgggtggtttggcgggcggtggcgcgtcgtgctcaaggcaaagtccggtgaactctagcttgggcagaactgagagcgtgcgggggagtacgaccgaggccttggggctgctttataggcatgacgcgggcgagggcgcacggcggacttgaccgggcactagggcgagcgcgcgcgggttgggtgaacgctagcgcgccgaccagggtcgaacacgtgtgcgcgttcattctgcccgagttctggcgcgtgttgtcactcatccgagcctgctcttgccttggtcagtgcacaaaacctattctcctccctataagctaccgatcttgtgtggggtcataggatttggcctactggttccaaagatatgcagctctcaagtcgggtctgtctctcagcccgatcctg

SEQ ID NO: 154881 - DNA, 1328 bp, Zea Mays
gctatctttgtgttctcttatcattactttaaatggaagtttgaggtaattgatagtgatcatgtcaaacagctgattgccatttcagacggtttgtcgagtgttctttgctagaataagtttttccttatcgatgaacagcctaatgctggctatgtatgagaagtttatcggagtcacctgctcagccaacctcctcaatcttcgtatatgcatttgctgctagtctgctactgctacgtttacacaggagtaaagactaaagaatatcaccgtgcctgtctagtgtctgtaccagcttgcattgcattccaagttatgatcgtggccgtttcctgaggtagccccccctcggtttctggatcttggaccatgctatgtctgcgccttgagacttgattcttcaattgtggttcagaggcgcagcacatggaacacgtcctggcatacccaggctgtctcctacggacaccggtaaggccatctatttccaattggctgtgtaaacggtcttgtaaagtattgtttgcaccgtggattgtattatttgcataatgaagttttaaatagagagtgagatatgaaggaagataaggagtctgctgaagatagcctaagaccatcttcaacggttcccatctcgtcccccctcctctcagatagtggagacagtagccctctaaaagctacaacgatgccctctactcttgcctctacgcaagggaaatcgtctctccccctagttccagggacatgctatacactcgtgtcggtgtttggaccgcgagtccttaaccaataagtaatgtgccgcgtggccggctctagattgtgcgcgagatgacacaagcgtttatcctattttgggcttctcgaggccctacttccagcagaggggatgaggcttatactactcgcaccgtggtacctgtagtggggggtttacaagcacagtgggagaggggcagtccccaagtccctagagtgattgaggaaagtgccgatatctaagatagagtgagaaggcaagaactcgtctacgtgtgtcctcctgtcccgtggagggaccactgccctatttatacaccaagggaagcgtccgcagtgaagctgggtcctgtattcgaggagggatgtcctggcgtatgacgtgacggggatccatgcagtagattcgcgctaactgattctacgtagaatgccggggccgagggtttgtccgtacgcccgagcccctaaggcagaggccgcccatgccgtagtggctgtaaacagcgtcagggtatgggccaaaggttgcttacagggtgcgtcatcgtcctggcgcg

SEQ ID NO: 154882 - DNA, 674 bp, Zea Mays
caggagtagactgaccccggggtgaggttcatgagccaggtccgggcaggtccagacaaggccacatgaaagtatgttgccatcatagcggtgtttccacctgctgccgtgatggcggtaacgtacacctgtaagaactccgacaggttcgatgttccgtcatattttttcggcaggtgcggccggaacttgggtggccatgacgctgcgcagagatgatccgcaagggcagcgcagcccacaccggccaaggggacacctgtttgggaccgggtgcccatcggtgtctgcggtgcaaccgtagcgaaatcttgatcgaggttgcaaccatcaatgttttggcggcgctcgtgcgccctttccaaagagacccgagtatcctcacccgctcacctacggttgagctctgctcggaggtcgttggtttgtgcgccccttactgagggcgaacgcatagacgctgacgcctcgcgttggcaccgggttgaccgcgtcctcgacctggtcgaagtagaatgtgccataccgagcagtcagtcgacatcgtcccgccattgcttcatggcccctggtgaggccgtggagctcagggggtggcgcaacaattccctgtccgctgacaacgcccctggtgatgccctcgacggagtccgggacgcttgcgcagccgtgtg

SEQ ID NO: 154883 - DNA, 659 bp, Zea Mays
gcgacctcccttgcctttgcccatggtcggatggagaagaggatgtaaggagaaagaagtaacggatgatcgaaggatgagtgaagagaacaacggtgcaagaaggctatttatagagaccgggggtgaccgtccacttcctaccacgctcgccgaacagtcacaagtattcaataagtaattcaaaccgattgacaatgagtcaggcaatagacgccgcttcgcgtaacatggcaccatttggactaagatcaactgctcgggtgatatgattacatcccgcggtcacatcaagttactactccaggacaatatgctaaacgctctgcgtaccaagatgtcccttggtcacacccattggggggacggccagaaattttcaatagattttctgaacaagtcatatccgtacgatatacacaatgaatgtatcgagacagaaggaagagatcgatagagattgaaggaaatccaaatatagctactgaactgcaagtctagtcagcaaaagcattgaagcacagagtggggtgaagaccaaccaagagccatctaccagacgtccaatatgtcaccgatcaaataaatttcaaacctaacaaggcatgggcagacaacattgtttgaattcgcaagagcatgaaaaaggtaaaatgctg

SEQ ID NO: 154884 - DNA, 550 bp, Zea Mays
cgaggtcacgaacgaagcgccgatgatgcggatccagggtaacgagcttagttttatagtgctacggcggagtccgaccggtgaggtcccgcggattaagcgaggttcggtgcaacgacccgcgagctccgtgcggacattgctccctggtttgttgcgcaggtgggagaagaaatagctgacgcgatgggcccatagttcagttgaacgcgcgagcgcaccggtgttggggggtttgtccccgccagagcgggtccacggacgagtgtgaggagattgtagcggcacgagtccagagtggttgacaaggtgaccccatgatgtcagtgagcgactaagacgcgaggaagggatgacgacttgggtccacatgtcggcgccgaggctcaattgggctgcgttagtgtagcgggatgggccaaattctggcatattggcccaaaagagataattcatttttttttcttttccagccttttctttcctattttccattccaatttttcaactcaattcaaaattttgttttgcactccagatttcaaatatc

SEQ ID NO: 154885 - DNA, 565 bp, Zea Mays
cgctacacttctaatttgttgttgtttggattggtttcgtgtatctaaaataggaaaattatccataaatgttgaaccatctggctccaccaaaatatctagaacagagccacttcatcccaaccggctccggaagcaaacaatacctaattggatggtttgcttccagatccataacaatcattattatggtcacaatattctcaaaagcaatttcaccaagaatcatcagtggactggtagcaaggagataatagctttcctatgcccgctaatacttcaccaagcaaacatcccaattaagtagagctgccctaaacaatgaacatgaacgttgcaacttaaaaaccgcctacaacatgaaagccagccaaaagcccaaaaacaagcaaacatccacgagaaccttcccacccaatagttcttaggttctagcagctcgtaaaacgctaatgcaaatggtcacttcacgttaaagctcactatgtacaaaattatatacagttctggtatctaaaattagttgaacaggcaaccatacagaaatggtcacaccactactccg

SEQ ID NO: 154886 - DNA, 626 bp, Zea Mays
cacgctaaccgtaggatcaacgatcgaccgtccagatttttaaacactaagccccattcacatccgtccgatccgagatccacgtacacgatgtgatttcctcgaagcagtcccagggatctaatcccgaccgatcagaccgagattgatggctcggatacactccggacgaccaggtacgctcaccaaatcccggtcgctagcttctcatccatcggccaaccaacgccccgcgtgtttcttctccctttcagccaggaacggtggcggcgccagataccgagcggtggcgaacccgccggagctcggctccgagccaacccgacagccccgcccaaaccgaagtccctacacgcactgaggatgacaagttgagcatgcaggtagccgacttacctgccattgaagcagtggagggagcctgaccaacgtccagcggcatcgctgtccaacccagcgacgaagcgacggagggctcactgtgaagctattaacaagctctggagattccccgatgccacgaagagatgccataggcactggagatcatctcggattgcgccctgaaggctatggggcagcagggcccaggttccgcgccggtgatcccctcctttcttctctct

SEQ ID NO: 154887 - DNA, 555 bp, Zea Mays
ggacgaaatcggccttaggccttctccacgtctttccgccacttggcggcttcatctctaggtgtggtctatcacataacgctgccagatccactcttgccttcacgttatcctttgacttatcaggaatgtccataattgttgcccacagtgcctcggcaacattcttttcagtgtgcatcacgtcaatattgtgtggaaggagcaggtcgtcaaaataggggagccaagtcaagccagacttatgtgtccacatatgctgctcaccatatcccacaaaactaccttctatattagccacgagcgcatctatctgttgatgaattttggcaccagtcatcgttgcaggtgggcggtctgccactatgacaccttttgtaaagtttatgatgtctaggcggaatggatggtcaggagggagaaattgtcgatgtttatcgaaggacgaatatttgccaccctttttcaaccaaatgaacctgagagcttccttgcaaactgggcatgggaacttaccgtgaacacaccaggcgcagaatagcccatacgccggta

SEQ ID NO: 154888 - DNA, 915 bp, Zea Mays
aaatttaatccaaaagcagtagcacgaagcggtaacagtatgggatcgcgcaggatgcttcacacctggattcgcagaagtgaaccggccacccacggcgcacagcggaacccgaaatctggcgacgaattccgaacaccaccgcggtcgccacctccctggacggccacgaaaccttcaccagacaacccgcaaagctcccgaacacgacttgtgcgcctggaactttggcgaagatgataatggcgctggcgggcgattcctggccgcagttcaagcctgagccacctgttcttgccgcgattcgctagattaaagggggctatgggtacagaggttcgtggggggtcaagtcttataggctaacggctcgaatcagcgagaaaccagggcaggggcgagttcaccggagatttcggaggtcgctgcgcgaattctgttggcgtgagaccgattgacccgacggcctggtcccaccagtcacggacggagtgacgaaagcgggtgcaagaggtattgacgggtaggcccggcccgtcagtgagacaggaacccaggcgtgcgcgcgagatgggacgaactgggccgagttcaggtagtttgggcccatgtgccattttcccattttctttcccttttttctttcttttcctggttcctttttctcacattttttggaattcaagttcaaacccaaatttggttggtgattcattcctaaatttaagtttaattccaagaccctagtaaggctagagatatctacatataaaatttttcttgcacattttaaattaagattttcttttcctcttctttaccttagagttttgttttcaaatgtaggagttaaattctatgtattcattagtatcttgttaatgacacctttatttttattgtccacatatgcgc

SEQ ID NO: 154889 - DNA, 806 bp, Zea Mays
ttatctgctttcattactcgactcattctaaatcttgcacttttcttttgctgctttatcggatttggctcggcggtgctctaacattgaagagaagtattcccagagccaggctgacttaatataaacttctgctttcttggacggtgctcgctccttgaactcctctctgaatgcacagcttgactccgagaagatggaacatgaggtaaactctcatgactgctcctgttttgctcccattgcttcaatgcttagtgttgttcttgcttgtaggaggaaaaatgagcactcgttgcttgtcgagataatctagacatgctatatcgtgatgccagcacctccttgaccattctggagaggaccatcgctttaccatgtctgatttggaccatcatcgcgacgagctcgggcatctcaggatgaagtctcccgactcggcaaactgttgtccaccaaagattccgccatcaaggagctgcgcgcctccaagaagcttgtcatgctggagttggaggctgcccgcctcactatcaacgccttagaggatgaccacatcatcatgaaggcaatgtgcgacaaggccatggataaggctgttcgcgctgggcgaatcctgatgaggagacccggcgtcatggtgcatgaagacattgtcgccgatgtcgtggccgctcctgatgccgcaagccgtccatcttcttctgttgctcctgcaaacgatgcttcctgcaagaatactccagcgcaatgatttgcctgaaaaacacttgtttattgagttagcatcttttagagaaaaagtg

SEQ ID NO: 154890 - DNA, 757 bp, Zea Mays
acgcctctatgtcagctaattctcctaattgcgctaagaactggtctatgtgttcacgcgtactcttaccttggtcaccagaaaactttgcgaattcgagtatcctagttccctgtgggtatgggtgatggtcaaatcggctgtcataaggtctccgatatggctaccccctcccccggggccatgcttactctgagcttatctcggaataccctggctatttcttcccttactatatcaatagcaaccggtgggagaccactagctctttgttctaccatgggtgagattgtttggatattagtttgttgtctttcccccattggtttgggttctgtggtgcattactatttgccctatatggttcataggactgacccttcctttccagccttctaggcggagccggaaagtactcacccccatgtgcttgggatgatgtattaatgggctggtgcattgtatagtgtgatgggaagtgttgctgggacaggtgaggatttaggtaacaatcctcctcaaacaaccatgtgtcggaccttccgtcgctgtatgcggatggtccgactgggtagtttagggcttgcatagcatgtggtggcttggacgcatatctcggtaactcattaaaaatgggaccggtcgttgctgacccgaacggtccacgctcacgtgcagacggtctggacatgcgcagatcggctaatttatcgctgatgtgtgtaggaggttgtggttgctcaaggtatgtatcaat

SEQ ID NO: 154891 - DNA, 548 bp, Zea Mays
gtattttcgcagtgtcgtacggatgatgtgctcccgctcacctggcggaatcggcggcttgggcgagctaatctcctcgccgtcgtggatattgcgccatcgtcgacacttcaccgtggctgggccgctcggacttcgtcgccggtaagtgtttggtcccatggtgtttgccttggcctccgaaatgcgtagcataatcgggatgggagttctcgagtctgtgtggggatgggactgtctccgtcaatggcaccgccgtgcctcagccttgcgccgtcgaactagcatcggtgggagagaagggaacaagggaggaaagcctttagccgttagatcaacgttatgcggtttggattagattctgggtaatgcttcgcccgtacagatcctggccatcgatctcttgatgaacgattcaaattagatcggcgataacatttaagatcggatggtgtggaccgttgaatggtgatcgaaccgttctaattgggttagggcgtggcgagtcaccggccgtagatcccagatccaatggccctagctgcgta

SEQ ID NO: 154892 - DNA, 503 bp, Zea Mays
gaaggttgtatggaacagcaaagacggaccaacatgagtaggacattgcagttagattgaaaggcgagaaaccatctgttgctaaaccgaagcggacattccgcacttcatcagcaaagctggaatcaaaagcatctagtgccttccatgcatctgtatcagctgggtgtgccatgacatttggattctcatgtaccccttctttgtgccatctcatgtgtctggctgtatttttggagatgaacaaacgtttcaaccgaggtataagaggcatgtaacgaagctgcttacgtgcaatcttcgttgtcacggtcaaaccatcatcattttcaacctcaacgaatctacgctcaccacatacagtacacttcttctcactcgcggtctccttccagaaaagcatgcagttattgtcacagacatcaattttttcgtagtccataccgagcctaaaaagcaactttttggactgatacatgtcctttggcatcttgtgattctcc

SEQ ID NO: 154893 - DNA, 505 bp, Zea Mays
ataatcttggatttttgtttgtgcataataatgatatgaacaaagataaaataataatgggaagaagaagggaggagaaatcaccgccgtccaccgtagcacaagcacccttaagtcgaccaccatcagatcctcctcgctctcctctccgttctccatggtgccgtatgcgggtttggggcattgggggctgaccgaccgtgtcaccggtgggcgcgccgccggggtgttttctctatcaccgtggctggggttgggggatgaagaagggcgcgtgaccattgatccgggatcggacggatctcgattgctgaactgatgaccgttgatttcagaacaagcgatccagattagactgcgtgcataccctttggtgatcgaatccgtgccgttggattttctatggatggatcggatgggatgatcgggtattttaatatgggccatggatctccaatctgacggccataataacataccgattcgcgtcgaaaatagatttaat

SEQ ID NO: 154894 - DNA, 724 bp, Zea Mays
gtcgaatgttacggcgcctgttcctgcattggtgtgcctcacgctgtgggggcttctcccctagtatagtgggctcatcatcggagatgagagtgtactctcctcttccctaaataaagaggacatccatgaagaaagagcttggggcacgtctcgtactccggtcatctcccccacgggtagagcggccggtgtagccgtcggtattgttcccgcgaccacgctagtgccaaggcggtccactccttttcaccaagtgatctgagtccacacacgggtgggtgaggtggacagaggagtttgccgcgacaggggcataacttcagtcggtcggaccgcatgtgttgttatggtcctgggcccacccgacgcgggcgcaatcctgcgtggggtgtaggttggttgaggtgttcgtaccttcgagtttgtcagggttgttccatctgagatcgagtgggacgagcctgcctctgcgatcggtgccctcgaagaaggcctcttcttggaaggaaccatgatgcggtgcacaacatcttctcgatccgcgatgcaggagagggatctaaagcggaaaacctccccagcgttgaagataatcggagtattgaagatgatagccatggagttgttgggaatcaatgtcgcaccccctacctagcgcgctagctgtcggcgtttatgacccaactgcgcaccacaaggttccccacatagtgcttttgag

SEQ ID NO: 154895 - DNA, 502 bp, Zea Mays
cgacgatgaggatgacgaggaaaacgtcaacgaggaggccaacgatgcttagcaggactaattcatggggtttgggcttgtcaccaaacattacacatcaatgttcgagacggggcacttccccaacctgctgcaagacgtactacatgcattgggaacctacgttcgacccttggacaaaacaaggggagggtgcgagcctccccgggcttgctactgcatcactcgcatccacgtcagggtgatggatgaaggggatagggggttcaggactctatcagctcatgagtccctgacaccgctatccacctacgctgcttcggtcagcgatgctgccagatggactctgtggtccctcagccacacctaccggcaacatctgcatgacacgaggttcaggcatcttcatctgtgtctgagtggaagaagccagaccagcatcgttccaagtggagctggtgaggattgcctcaacaccctagctagtgtagtggccgatctt

SEQ ID NO: 154896 - DNA, 542 bp, Zea Mays
taggcatataaatagaaacccatagtggcagcatttgctacgccatttctgttgcttgtgttattttctcaaatttttaacccttgcgcatcagctctcgcttgattttcgagcttcgtgataaagacaagtgcttgttccatgtctgaagagaagaagatgtctgaagagaagaagatatccgaggaggagaagttgtatgaggagaagaaagttgcagacccttttcttgctaggttttacgaatctatggcaaaaacaaatacataaaagatcacaaagaaaataatggcggatttgtctgaagattctgatgatagcgatgactatgatgtgcaaagtggggatgaagattctgaggaccggccctggcgaccaagccataccatcttcgaaaagtcaaccattaagcaaagtcatattgacgccatgaagggaagatatttttgtgacatgtctattgtgagggttggaggaggcagcactgcccctgctcatgaagaaaatgaggttgttgtctacaaaagctttttgaaggcagg

SEQ ID NO: 154897 - DNA, 441 bp, Zea Mays
aaaacggttaatgggggcaagcacctccattgcaaatttgattctgaactgtgcaacacgcaaggtgtatgaagatgcaaaagaccaaacctcttgagaaaatttttcggcatttttgtacaatcagtagatccattaggtatagtctttcacactgacaataatttgtagttctttctgaacccctacttttattcaactaggtggactataatggtcttccgttatgtcttaagatctttgaaataacctgctaaacatggttctttgaaataacaatggttaaattatcaatcttgatgttctttcttgtccttaggattatttcatgataagaaaatggaatgaaggagatctcctgccatattttcattagttttatttccttgacatctacattgatctgccagggcattttactactacatgaatattcatgat

SEQ ID NO: 154898 - DNA, 732 bp, Zea Mays
ttctcaccatcgctgtcgtccgtcggcctcttcattgatggcgacttgtgtgacatggtgatggcggagaactggctctgataccaaatgttagaactccggcgaggaggatgacacacgcgaaatgaacacagaggacctgatgggtttcgtgctgttaatcagacagcgttttctgtttgttctctatctctatataaagaaattacacgcagtagtatatggtaagtaaatcacaatacctggaaggtgattatgtgctaatctacttgctaagaaagaaacactaatcctgggcttactataacagcagcagcctgtattccggcgacacgttggggtcaccaccgtgccggcgtccaggacgccgctgacgctgctcgttggggcggtctgcagcaaggtcgccatgctgaggttgtggtagtggtagtacacgtcccgcgatgctggcgtagctttcgcctccggagaccctgtagtggaaggatccggcgaggtaagtggagaagggcgcgaacgggaggacaaggcagctcgcagctgcaggggaaaatagacgtttacgtggctgccgacttggatgtagtccagggaggctggggtagcctgtgttgtagggcgtgagattctggttcggcgtgatgtggtatgagcccagtgcgaggtcgcagcccatgccgacggtgcagttggctccgacgccggggaggaaggggaggaggaggggaa

SEQ ID NO: 154899 - DNA, 399 bp, Zea Mays
aatttttcaagacttcccctatcatctcattcagaggaagtcgcagtcctgctctgaaaaagctcttgaaaaccactacttcatcattcttcggtgctggggtggtctcttcttcggcaaatcggacaagtttcctttcagcttccccaaagtaacccagcttcatcatcatgggcatgtcaacttcagacacaatagatttctcaaaatctagatggctgggttttgatgggatcaaaatactataatcttcttcatcctcttcaatatcttcttcttcagcaacggtctgttcagcttcggtaacaggggtaccttcgtcagtcacaactagacctgattgtttcatgacttcaaaaattggtgctgtctcaatgacctcggtctcttctccttcac

SEQ ID NO: 154900 - DNA, 321 bp, Zea Mays
tcacggacgttccactgccgcgtggggcccatctgtcgggccgtctccgtcttccacgcgtggccggttctcttcctcctgagctccacatgcgccgcacgggactattgcaaacaaaccggccgagatcgccggagcgcacccctgctcggactttcccccaccttagctcttaaatcgtgcgacctgatcctctccgcggttcttgcggggatcctgatttgggctgctcacttgaacagatgcggcgaaatccgcggcgagctgcccggccaaacctttccccgtcctcgggtgccttgcgcctataaataatcgccg

SEQ ID NO: 154901 - DNA, 506 bp, Zea Mays
cgtgtttgtcttaatcctatccgcccgatcaaagttctgcggcacgaatttaattcattcgaaggggtatgctaggtttaatctcggccgcctgattactcatccacggcacagattttaaattcctaagatctatttgcattcgtttgatatcgcatcaacgaccagcacgtaccctggtcgaacaggtaaactcaactgaatcctagtcgtccaaacaggatctaacggtccaacttcacctatcccgtgatctaaatcaatgcttttggatccaaatccaacggtcgccattcattagactctacacaaatcctgtctacacgatctaaactggatggcctggatcgactgaccgaagtggtacgctctggtacgatctgaaccgtccatcgccccttttttacggtgggaaggactttcttccagcccggcacacggctaaccgcagaagacacaccacggcggcgccatgaacagtggatcacgcgcgagcgccgacgaac

SEQ ID NO: 154902 - DNA, 724 bp, Zea Mays
cggtgaaagccacccatcccgagcaccagtatccctgtttccctccggccgccagcacaacctcgggaaattggacaccaccgatgatgggaagtataaattgccacctccgcccgctccgctaggtaactgcgcagccggtgaagcaatccgcaccttgaatcctcccctagaatttaccaatttcggatttccccaagctgctcaagaacaccgcgtgtcttgacttcgccacggttcgctcaattcaggtccgattttgccatttatgttcttgttttagcacccatgcttacccttgatgctcatcgacccgtccaattgaactagaacgcccttagtcaccgggaacgcattcagttatccgcgatgtccacggtcaccgtggccagagcaaaccaggaagccattagtaaaattaagtgggggaaacactcattggaccttgaattcagtctcagtcgaagtatggcgccagtcgccgcgtgagtcggccggtgtacgggctcgctggagctctgcgctacgccgctcgacatcggggacttatttggagaagagatgaagtttcagggacctcggtgtaagatgtcagtgactcttagaaaattctgtagaacgttttgcaaattagttaagacctcgggggcattttcgtaaagtctacaggcgcgcgcacgtgggcagtttccttcgggcctggactatactgggccggtttaag

SEQ ID NO: 154903 - DNA, 298 bp, Zea Mays
aagcagactgacttgctgcaagatagcaatagttccaaaatctctttctttagtgcctctatggcacggctccaagaaccgctccagctccagcttcacgtgaagctgacccaaacgccttgttgaaaaacaactctcgtcctccttgggaccagtcacctttgggagctggttttgacccggccggcccggtggcacgctccccgtacgagcacgcaactacgcaaggccaccccgccggtctctccttccgccgccagatcctccgctccttcgcccacagccgccgcggccgcgg

SEQ ID NO: 154904 - DNA, 447 bp, Zea Mays
cgggccactgctcggggatcctataaattgagcgtaccctcagctccacaaggtattcaagcactcagcgcacccacttgtgtcccaaatcgttcaccagagaccccaatttagggttcccccaaattggtccaaaacaccacgcgaagtgagctcgccgtggccagcgtgcttcagttccgttcatgctctctactctcccgtttcagtgcccttatcttctcctaatgctcctcgacccgttcaattaagctagaccacgctagatcatcgggaacacctctgttcatccgtagttcgcgctgtcaccgtggacagtgtgattaagagctcggattgtgcaattgagcgaggggaaacgattattaggtgttgaattaggtgtcagccaagttagagcaccggccattgcgtgtcttggccggtacaggttcgctggagctcggt

SEQ ID NO: 154905 - DNA, 788 bp, Zea Mays
gttatattggctcaactttggagccttgtaactttcaaactatagagtttttgccctaggtcaccacatcaaaattataacctaatcataggagaacaactttgcttaaaggtgtgagcattgttgttaagggaaaactggagataattgagcctgaagttggactgtcagactgcctgaagtctgaaattcagattaacagtgtgatgggatgaactttgagtatgaattccaccttgatttagtgatcaaatgagctcagttcctatagtcgaattgtagatggtttatagctctacaactttgctataggtcactggatgtgttgccatttgaaaatcagagaaaaagtggcttaaacttgctctgtcaggcaactgaatggggggatcgccatggtacagtagctcgagtggatcaggacgccagcgcggcttactcgccgccgatgaccctcccccgtgcaaggattcgcgtcgccgcgttaaaattaacgttcgctggcaaccggataacgctgcatggttaaaagatcgtcgtcgccgtcgagctggaagccaccccggtcagccgcggtaccccttccctttgctcaccgccgtagataaagtcgctcgccgtcgtcatgccatctctgtgcccgctgcgtgtccgagcctttccacggcaccgccgtgattctctactgtcgtcccatcatcgccgatgaggttgccacgcctctggacacgtattcaccgcgcccaaggttcttccctatctccggccgccgcacatcttcattcaaa

SEQ ID NO: 154906 - DNA, 373 bp, Zea Mays
tcacaaatgaaaatactgcattatgcatatacaatatatgaacatattttttggtaggttgtaaacttatttttataagacacgataggtcagtatggcaaagagaagtcaagtgagtaagtagaagattcaataaacacatgactgaagatctctgtgaggtaagccttagcttatgtagtttagtgttccccataacataacacattagtaagagtagtcctggtcattgcaagaactgtttgcatattaaataaactaatttctatgcaaatttataggcagttgtattagcaaggaaggcaaataacatgtagagaagccgtcatgaaccattttttgtctctcgaacaaacgcaggagagctgcgcat

SEQ ID NO: 154907 - DNA, 799 bp, Zea Mays
gacgagagcccgacgacgtctagatagtgtttttcgtattacttctctgatgtccttattacataggtattgtcttttatatataactactggatcaaaaacagcccacaggcagacgacttcccactacttggcccacatcggccagtaactttagcatttggacgacggactcgcatgccctgtagcttgttcctgccgtctgccgccttgagcttgtcgtccccgtcagcattgctgacatccgcctcccctttagagcctgcttgtccccaattaggtgcatttgggaatcgttccttgagagccatcacatcttcccaggacaatgctgcgtcgaggccggaccaaatgaccttcgcctgtgcaaccatgttgcctccatgctgaaccaggcgtcgctacaggatacaaagagggacctgcaatggattagtaccagatggtagtgatgaaagtggctggtgattggttccaatagctgccttgagttgggacacatgaaatacgggatggatggaagatgtgtccggtaatttgagcttgtaagcgactggattgatctgcttgacgatctgaaaggatccgaagaattttgaatgaaagcttgtggttggctctggtggctacaaatgtttgcatataaggctacagcttcaggaagacccaatcgtgaacaacaaaaacacgctcagatcgcttcttgtcagcctgcttcttcattcgatcttgggcacgagtgagatgttgttgaataagtttctgcatgagttccctcttttgcagccatgttttcagg

SEQ ID NO: 154908 - DNA, 550 bp, Zea Mays
acatgattgcaggcaattgaagtggaaataaacagtaaccatgtttactgcacaactttgttcttattacataaagtagataaaaataaataaagagcacattaatcaattttatataactcagaatggttttgccacaagtgctcgatcaggtctgccttaagctgatagtgggtttccttgttcttgatattttttgtatttttgaatgaatgcatcaagttcaggtgaagaattgtgtgacactgtcaccctttgtcccatgtcgtcgtagttgcaaagatattatcccatatcgtcgaagttgtaaacttgttctccttcgtactcatcccgttcgtcttcaacaatcatattatgcggtatgatgcaagccatcataatatcatggagtgtgtcttcatcccacaaacgagccaacccacgaactatagcaaagcgagattgtagaaccccaaatgccctttcaacatcctttcgacaggcttcttgtgcctttgcaaaatattttttcttattaccttgtggctctggaatggtcttaacaaaa

SEQ ID NO: 154909 - DNA, 502 bp, Zea Mays
tgcaagcagatagaatatgctcaaatataagggtggaaataagggggatagggttccccagtgatctaatagtaatagacacccttggggtggatgtcatcctagggatgaattggttaatgaaatatgaagcgaatgttagctgtgacaagaggaccgtaacgttgaagtctccactcggagagaaagtagtggctgagctaaggatgcctaaatcagcggagggagattgtcaccagattttagttgatagtaaggaggccaaaccgcttgaggctatcaaggttgtgtcagactttccggatgtgtttcccgaggagctaacgggtatgccacccgagagaaaagtcgaatttgccatagagcttatccctggtaccgcccccatttccaaaagagcctatcgagtgtctggaccagaattggtggaactcaagaagcagattgatgagctattagaaaagggttacatcaggccaagcacctcgccttgggccgctcc

SEQ ID NO: 154910 - DNA, 1120 bp, Zea Mays
atcatgtctttgttggagccgtcgccgaagaaagcgcgtgctttcgactcatcaaggtggaggagtgtcgttgcggccggtgccgctagagatagctcgatgcttgcatgcgctaggagcagagcctcctcctccgcctccgcctgtgcgacgttggcctggccacgtcgtggctgtcgacagtccctggcccagtcgccaagcttaccgcagttgtgacagccgtcgtctcgtgccggcttcttgttgccgacggcgctgccttgggcacctccacgggcaccaccctcagcatgtcctcgcgccccggcttgggcgcctccacgcgccttgcgcggcttgccgcgtttgcggcctcgtgtcgaggaggactcccccttcttcttgtcaccctggcagacctcccactgctcccgagtcagatgtaacttcccaccgatagtgataggcccagagggagcctgtggttcgtcgtcgtcgaccaccttgagacgacctatcgcctcttcgattgtcatcatggagaagtctagcagagactcgatcgagcgagcaatctgcttgtacttctcggggatgcaacggaagagcttctcaatagctctctcctcatcgtaggtgtcgccgccgaaccgcaccatcttttgcaacagagtgttgaggcggagagcaaagtcatcaacatcctcacctggcttgaaggccaggttctcccactccttgcgaagtgcctgcagtgtggtcttgcgggcacggtcgctcccgatgtgggtcgcagcgatggcgtcccaggcctccttggcagtccgtttcttggaaagcaaaaactgcatctcaggcgggactgcagtaatgagggcatccagcgcccgtcgatcctcgtggtagtcgacatcgctgtaccgaactgctttccacatgtggcgaacctggagacgtaccctcatcatcgcggcccactcgacgtagttgttcttggtgatggtaggccacccaccgctgggaccgatgtccctgacaatggcctgggccatgcggcgaccatggtaccgatccaaggagggagagccacgccgcctgtagaggccacgatctccgtcgactcggtcgcggccgtcgg

SEQ ID NO: 154911 - DNA, 551 bp, Zea Mays
accgtctataggggctcggcctcgcctcctcaccatacgcggccaacctcggcactcctggcagccctcttcgaggctataaataggggagtccacaacttcaggcaggggcaaacacttcacagttttcacctccactgcgatattggcacttgccttaatcaaccccagggacttgggatcctcccctctcccgacctgcttgtactccctactgcaagcacttagatgcaagtaatataagtctcatcctccctctactgaaagtagggttttctctcgcccgaactaggataaacgacttgtgtcaccttgcatcacccatctgggccagggcacgtaacatcatttcgctagttagtgagatcctcggatcaatacactaacagttggtgcgccaggttggggcttgctgcatgcaaaacatcacgtttccatcaaggctccagatagccaacctccaacacctttgaggctcggcacggtgatctagttcggtagtctggagttcatgtcgctcgacatcgaatacaacatggtgctcctcccac

SEQ ID NO: 154912 - DNA, 339 bp, Zea Mays
gctaaatgcatgtctgggagacaacggtagcctggaagtcaagccaatgctagaagatctcatatgcaaggctcaacgcctggacgctgagacagccagacttatggaaagagctcgcaaggagcaacttccggatcttaggacagatgaacaaggagtcctttggttcaagaaccgtctgtgtgtaccaatgggagaggcacgagaagtcctactcaacgaagcccacaactcagcttactccatccacccaggaaccaccaagatgtacctggacctcaaagccagatactggtggagaggaatgaagaaggagatagcacagtatgtggcccggtg

SEQ ID NO: 154913 - DNA, 524 bp, Zea Mays
ttgtaggtggaaattgtatttgcttaaatagagaggtggtgacatgccgaagtagtcatcgcttcctctatgtttatatgtcgagtcaaaatgtggggtactcgtggtacgctaggcgatgtccaaataaattaaccggtcgatgtggtagtggtcgtgcgtgatttattgttagtgagtagttggaattccgagctatatgaggattgtgttaaaaactagtaggcggcgtgtaactgcgttcgtatggtaaataataggtcggtagatattgttgatgccagtagcaaatgtagtcttatggagttttacgccgtgtgtaaatgcctccgcgatagaccccaaaaatgagctatttaggtgacttgtgtgttaactagttcaagttgagcaatggttgagaaacactgatcaatcggctccaacccatgttcttgagttacgatgtctaaaatggttcgctaggtcttctactgtgattagccaactcatgttaaacaggagtcgatttcgttaagtgtttg

SEQ ID NO: 154914 - DNA, 1068 bp, Zea Mays
ctgcgaaggatcgatgtcgtatggccttgtcatgatagcgccttagagtttgctgataccgagctgactgaatcaccgtattcaatcgttcttcttctagtatatcaacattctccagtctagtagcttcagcttctgctatgttttcaaagattaacctcggtgccccaaacttgagatcagcttgtagcactgactctgaaccatagaccatgaagaaaggagtgtttccatgcagagctcggctaggttgagttctcaggctctaaacaacatacggcagctctctgatccactttcctgcgaacttttcattcttgtcgaagactttctttctgagcgcttccaatatcatcccgttggctctttctacttgcccgttggctcttgggtgcgccaccgaggcatatttgatctgaatgcttttttgttcgcagaaatcgaagaactctgagcttgtgaaattggatcccaggtcggttatgatactatttggtatcccgaacctgaatattatgtcttgtatgaattccactgctttagctgaagttagagaagcaatgagtttgaactctatccatttagtgaatttgtcgatagcaaccagtacatgagtgtatcctccttgagctttcttgaagggtccgatcatatccagtccccacacgcgaacgaccaggttacaggtatggtttgcagttgctgtgctggtagatgctgctgttttgctaagtactgacaggcttcgcacctctagactaactcggcgtcatcactcttggctgttggccagtagaaaccagacctgaagaccttgccaaccagagtccttgatgtcgcgtgtatcccacattgtccagcatggacctcatccagaagttgtttcccagtagtcgaaagaatgcatttcatgaggactcctgatgcgccccttctatatagtgtttccccaatgagagtataatgagctgattgcctttcaatgcgttttgctgcatttctgtcatctggttcttcctcattctttatgtacctgatgatcggctccctctagtcatcagaatctga

SEQ ID NO: 154915 - DNA, 759 bp, Zea Mays
gtgctgtcagtaaatggagccccattctgttaccctctctgctcggcgtgtaaaaatctgcttcaaccagtccctgtgtttgggggtcacatggacgatttttacagaccaaggggggaaaggttttggattggatcaacctacagcctagcagcaatgactcacctgcttgtactgtgctggtttgctgtccatgggagactttaccacctctgcagtgtccctgtacatctacccttacgtggtggtcatgcatagtattatggtcatgttggcaccggttattctccctgaaagcctaaatgaagtctcaaccaagccgttaactctggtgctctctcatagtgtaacaaagttcaacgcatgaactccctcatgtttcggctgtccccatagactcttcactgtatcataccgttcctctaaacttaaattacttcctggacgttttctcaaccccttggctccgttgctttaactgaaccacaaagttctgggcgtgtgtggtgaccaccaccacaaaattccccatctcctagtggccggtcttttctggaaggtaatatgctcgatttgcttacgtttcttagtacatgtatggtagtgatggtaatggcgttgctcgtttgaaagttaccgtagtaccccggccagaacgccgtcgagtctatctttcatgccgccgcggaccagcttcgcgtgggctgattaaactgtgctctccctggataaatctatgtgggcatagtgcactagacc

SEQ ID NO: 154916 - DNA, 1327 bp, Zea Mays
gcggtggtcagctagtcagctgtgggcgctagctgtttggtaaaaaccgtatggcgactgtctgcttgccggcttgcttgcttgccggttgcgaattgaggcgcagacatgtgctagtggtgcattgcggaagtttctttttagagcatgatgttctcgctttgtagctgctgtcttaagcaacgggggaacatgtgttggctagttaacagcctaatggagacgacatagccacatataggtgagactgtgtgtgtgagagagggagaggcaaaagaaggggggcaggatcggatcctctgttccagtatcaccggctctctctccggacagtcacatggcttgcatgcgtctgtccctgggcaagcccacaggacatccctatgttctgctcgctggtcatatgctgttggattggagctcaccaacactaatcagcctctgattctgtggcctcactgccctgctctcctcctccattttcccatgcctgtactgtagaggatcagttccatggtgacccggccggccatcgttgttgagcttgagctgtgagctcagcttgtccgtctgggaattgattgacaggttggagttggagagcagctagcagacaccaggggtcctcacaagttagtttctggaaatctaatagcatccgggtgatggcaacttgggcacacatgcgcgaccacttctgtggtacgacttggaccgtcgcgtttgctgccgcctttccccttcctctgcgtatgtttgcatgtggaagacgaggcatacatacgcacacatgcgtacgcggcacaccaagctcgtgtcgattctgtgtggacgccatggagtccagatcgacgacgtcgcggaggatagcctactggagccgaacgcaagcagcggcggatcgtccgagcaagtcaagcagagcagcagattgctattgctagctggtcagtcagaacactcgtgacttgtagggctgagccgatgatgtcgctcgctgttggtgtcaaggaatttatgctagtgcagaggtgaaaccgacacgatggacaccggcagacggcaacgcatcgggatgcgaccaagtggttcggtccgttccgttccgttcctgtgcggcggagcggagcactaggcgatggagctagctggagcaggaagcaagcgaaggggacggagcccatgcgtcgtcgtcggggtggaggcagggaggccacttcgaccgtccatcctgtccgcgcgcatgcattactttgcctggtactggtaggcagactccacaacggagattcttgtccactctccacctcatccgtgccaaaactta

SEQ ID NO: 154917 - DNA, 1397 bp, Zea Mays
ttgtgggtctttcggactgctgagtcgagaatctttattggcttttcccggtactggagatctttttgaatctgaattgtctctgcctcgatgtggttctctggtacttgcaggcatttacggagctgggacacatgaaacacattgtgaatatctgacatggattctggtagctcaaggcggtatgctgcgggtcccactctgctaatgacgggataggggccgacgaaatgcggtgctagctttcctttcatttggaaccttttgacaccacgcatcgggagaccatgaggtatacgaaatctgcttcctcaaatctgagttctctccgtctgttgtcggcataacttttctgtcgactctgagcttcaagtaacctcttgcggatcagggcaactttctcttcggcttctttaacaaagtcgggtccttctagtatcctttcccctacattggaccacattaggggggtctggcactttcgtccatacaatgcttcgaacggtgacatcttgatactggcctcccaattcttgttgaacgtcaacacacaagctcttagtaaatcttcgaggaccttgttgaccctctccgtttgaccatctgactgagggtgataagcggtgctgaaatctaacttggtgcccatagcttgctgaaggctcttccaaaattttgaggtgaactgcgtccctctatctgacactatcttccgaggaataccatggatcctgactatctctttaagatatatccgggcaagggtggctcctccaaaagtggtttttactggaatgaagtgggccaccttggtgagacggtcgattattacccagatagagtcattccctttttgtgtctggggcagtccggttacaaaatccatgcctatttcctcccacttccattcaggcactgggaggggttgtagtaggcctacaggtttctggtgttcggcctttgttcgttggcaggtgtcacaccaggcaaaatactgtgctatctctttcttcatccctctccaccagtatctggctttgaggtctaggtacatcttggtggttcctggttggatggagtaagctgagttgtgagcttcattgagcaggacttcccgtgcctctccttttggtacacacagacggttcttgaaccaaagaactccttattcatctgccctaaggtccggaagttgctttttgcgagctttttccataagccttgttgtctccgtgtccaggcgttgagccttgcatatgaggtcttctagtattggcttgacttccaggctatcgttgtctcccagacatgcatttagttgagctgattccttcttccaatcttctaaaaagttggtcccctttatcccgaaaggttttcggctgagggcgtctgct

SEQ ID NO: 154918 - DNA, 487 bp, Zea Mays
cgcgtgaggacgccgagcaaccgcgagaggctgtcggtgctgttcgggtcgtcgctgaagcacggcgccgtggtgggcgcgctggaggagctcgtggaccacggccgccaccccttgcgtttcaggccctgcgacttcgacgaatacgtcaagttccgcttcgggcagcagaggcccggattgaacagtgcgctccaggagttctgcggaattggcaccggcaccaagtgaattacgctcagctatctgcctatctgtactactactcctatatgtgttgtcgtcattcgtgcacgtactctgtacatcatgcatgtagtgacccagtcaggcagtccgtaggctcggtcgttctgcttgggtcttgttgggacacctgtccgtgtgacgctcgactattggtttgaacacgttttttctctattattaaagcatcagttttaacggtcatcatacgtcattttttagaataaacctatcgttctgc

SEQ ID NO: 154919 - DNA, 448 bp, Zea Mays
ccaaccacaacgctcaagaggaaccaatagaatatagcgtgagcgatacttctttgctttaggaggtgagattcgttgatccaataacttgcctcaggcatcctcagattgaaggtcaccggttttggaatttattcaatgttgatttctacaacaccgtgatcttagcaaagaagcatcaatcgattatcaagcaaagggctattgattggaatgaatgtgagaaaatgggagacaagaatacaaccaaagctttgaaaacttgtgaagctcaaaaggtgaagaatatcatgaccatgcgatatgattggaacaatgaggtgattgttgagttctactccaccctttgagtgaagcgggttgatgaggaatcagatggctatggacaccccgtgatgtatttttatctcgacgatatctagcacaaggtgagctaccgtagatttgc

SEQ ID NO: 154920 - DNA, 341 bp, Zea Mays
aatttttcagattgtgttatttctcattcttgcttgtgtctttgatttgcaggcaaggattagccctcgtggcgaggtcaatcgagcagcgcacggtttataaccagaggagaagtggtgttgcgattgcggggttctagtcttgttgattggaagctggatcgtctgtatgacatctccaccaaatcgatagttaccttcacttgatggaagatcgggcacccccgttcctatcactatggatgctcctcgatccatttgattcatcactaccatcgttacctcattggaacagctcttcgacgccggaatacatcgccgtctggcatctcatcatggac

SEQ ID NO: 154921 - DNA, 1404 bp, Zea Mays
gaaaattggtttcacaattttagcatttttctacatttttctataattgttttggctctggggataaaagaaaaagaaaaacactagaacagcgctgggccgaattcagcccaggcggcccagttaaggcagaaaggcgcccgcgcgcgcgcccgcgctggcagacttgcgcagaggcccttggggttttaacaaactgtgaacgagcccaaacactatttaacatagtcactgacgatttgcagaaatgcccctgaagttctatttcttcacccgatacgcccacgacgccgttcacgcacggccgcgctccggcgaggtcctagaccggccgattggagctacggctgggttctccgagcggcggacatgaaattggggctagcctaaccatttcccctaactcaatttgaagaatggcactctactttgccctgtccacggtgaccgagaaatattacagagggatgaaggtgttcccggcgagcggcggtgatctagttcaattggacggttcgaggagttcacggggtgtctacgggtgctagaacaagcaacagaaggacacgaactaaccggaatcgagctggccgcggcgagctgttcttcacggcggcggagaccggatttggggagaatgggaaattcgcgcgtgctggtggaggattgagggtgggagcgggtgcaatagctgcttggatacatggcggagctaggggtacggtcaatttatagcgcctgcaggcggtggtgctcaatttggccgagccacgcggcggtcggaggggaagaagaaacacttgccgcgtgagttcgtggccaacggcgtggcagtaactccggtgagccacggagacttcagagaaggtcacggcgacacggtaaaagagttgagccacgcggcgcacggccgggaggcggcggtcaccggcgaggtaatccactcggccgcaaagagggagagagagccacggaggtcaccggagtgatcgccagcgcacgggcggtgaagatcttttaccccgcgaagttatccattagttacgagcgcgaatccgacggcggcagcacgaatcacggtggaggaagccgtcggcggtgaggacagctgcgctggcggtctgatcctttcaggttactgtaccatggagcatcggcttcagtcgcctgacagacaaggtttaggaccaaatctctctaaagtttctctagtaactcactccactctctgtagcaaagtttcaaagctacaaaccagctacaattcgactatagggatggaactcgtttgagcactggatcgaggtcaaactggctctcaaacttgggtctaggccactgttagtctgaaattcagacaatactagcctgacagcctgacttcaggcttgattatctccaaaa

SEQ ID NO: 154922 - DNA, 538 bp, Zea Mays
ggaggatcgcccacgatcccgacgaaggcggtgacccgcgcggcggacaccttaaagcaaggaggggaggggaggtccgtgacttgcgtgcgacggagcaggccccaacggccgagtggcagcttcgggtggcgaaggatccgcgtagagggggtagcgggccacggaaggctgcccaagttgttacgggaccgaaggaatcgcagccacgagcaccgagcatggcggcctcggaagcggtcttcggttgacggaggaagaataccgcgccgcgcgcccaagcctaggttgctgctgtcccgggggtcccactccacagaggtcacgggtgcatggagtgtgcggagacggacacccaggaggtcgacccgaggaatcccgcaatggtgacccgattccccacggcgccgcgtatctcggattgctctattgcgagggagaagatcgatagcgccgttgccgcagagactgacaagttaaccccacaggccataggctcagcgcgtttgagcggacaagtaaccacggccccgtggtg

SEQ ID NO: 154923 - DNA, 487 bp, Zea Mays
aagcaatcgtcagtggaaagagatgaacaagacaacagaaacagacgcgacagaagagaaggcacaagcgcagcggaggagatcagagtgcgccaggaagccaaatatgaatgtggttgggccacattgggacatgtaatatagacctcaatactgatacacttgtgtgaccgcgtccatatataaatggcgtgtatctgtacagaagagggtatcgaagaacaaaaataacaattctattatcgtctaccctgctatcttcttcttccccatgtcatatcttcccgttctccacacctctagcgactgttgttcgtgccctagccgacagagttgttaacaggaggggaggaggagagagtagatgcgctagggtttggggcctcccgtgtcgctcgagtggaagacgacgcgagggtgttactatccaacagattgacgttagaatttatccaaactcttgaaccacttatggttcacttattcc

SEQ ID NO: 154924 - DNA, 539 bp, Zea Mays
tgtcatgatgaacttgtaatggagttgaatctttgtaacgattatcatcaaggtgtgggcatctcctgcaacttggtgtagttattaagaaagccagttgtttagttgggcaacctatttatttccactttcctctttatctgagaagctgtttcaagagtcagtgaaaatgatcaattgttcagtgctataaagattttcatatatcttttcttatgctgaaagactgcagagtcagatctgatatgtgtgtgctttctacagatgtctgagaacaagtgcagaggtggaaggtgtgctcagcaggagcagcaggcaccctaggaggaggcagctcagcagcagttgccaccggcacccccgatgactattgagcagatgttcctgatacaaacccaagcagtccaagcaattggtcagactttagcaacaatgcagcaagtgcagtagcagcaacccccacctcaacctcagttgcaagttcagatgccataggtgcccagagacaagcgggcataattcatgagggccatccccct

SEQ ID NO: 154925 - DNA, 655 bp, Zea Mays
tgctacgaagtccaatcccacgatgcctcccaggaagaccacttgtgtcggttcactagcggatgatgacatagcgagggctgcccttgcctccaaaaagggcaaggttgccttcactgacgatgtgccaccagttgatccaagagccactaccgagccacaagacgcaggtcaagccgcaaaataaaaacagctagccaccaccactaaactcgacgatgaagtccacacctctagcttgaacaccccaccaaatgatcccccaatccaaaaagccaaccctaccaggccacaatttggccagacctaacaaaaacatgtcatatgtcccccagacttctacatagcgacaatccaccagcaccacctgctgggaatgccccaccaagatgtcgacgaagacttctaggattgtctagacctcgacataaacaccgagcaacaactttaactcaggagcctctgcatgcccaatagcaatctacaaaagcaaagaaatacctacatagccaacaaacatcaaagtgaagtccaaaccatgataaatgacttgatccaacaagaaaaagagcacctataggctttatagaaagaaatctctcaactacaggcccaacaggaaccaacccacccacacagcagagcaggactgaac

SEQ ID NO: 154926 - DNA, 963 bp, Zea Mays
aattgctggtcaaagttctgaaaaccttcaaaatttaccttcatcaacttactcccgaaactatcatcaaagtggggatctttatatgggccatgaggagccaaggactagaaccagatgcaagatgcttttgcaacattcatgagtagtcttatgagacgaaggctaccggaaaggagcaatatcacaacaactttggttgttatggttttgtgcctcggtctgaagtgaactatccagttcccacattttggaagaggtggctgggctcctggttgcaggaatgggtttacatgaaaaatgacctaagtcaaagggaggatgtgagagggattattcaacgccctatatggtctcgcttcggcactaggaggccagccactgcccttgggaatgataaacaagcatgccagacgactttcaatacaatgtgtacttacataggctttcaatatcgatggagtcgtccagtggatcagcggagtcgaagcctttgacgaaattttaagagaccggggagacttctgcgcgttcgctggcgcgcaaggggtcgcggtgatctcagagagagtcggttgtgaacatgttaaggctgcagctcagccgggatttgctttctcagtggatgacaccaaagacccctcggctgaagcttcttcactgggtgggagattctactccgatgtgtggatgaagggtggacgtgagatggttgacgaagcaattagaaaaaaatgaaaaagaatctcatgacgctcaagaagaaaccaagtgagctgaagaagttgccgagcgcgcaaggcttataggtacctttaatgaggttcaacttcaaagttcattttcagcttcggaactaacaaacattttttatgatgtagctgaactttcacctccaccagagccatataaccacgaagctgacctggccatgaaggaagcattagatatgataagaatcgc

SEQ ID NO: 154927 - DNA, 977 bp, Zea Mays
attttgtgatgtcgcaacgtacgagcgttgaactagtaggctttggatgtaggtcgctcgatcgacggccttgtcagagagtaaactcaagccatgtgccagaatacacctacctaatcctaagaatatggagttgcctatggtttttctgatgagatagatgaacatatgaacacaataatttagaatggtttggtccgccggagcataataccctacttcgctgcgagttgttctgtcaagagcttgagaaaacctaggtctaagtagagatgcctccaagggagttcaaatgagcatgtcaccgtggagagcccgatagagcttccagggttcaagtatatctccctctttgcaacgcatgtgcccttatttctatagaaaaggggagcacgtaaagggggttggccctgtcaggtgagtctagtaatactgaaaatgcaaagccctgagcgacaaacagagctggtggaccaagatcttctctcgtggattctcttggtcatcgtgcgggctcctctagccagactcgtctttgccttgtcttgttggcatgtgggtgaaggctctagcgtaggctagacgtaggccgacttgtcaacttgcataagagagtatgtggacggtgtcattctgtcccttctgcttgttttcgtcgcctacctccgcaccgggaatagtagaaatcacgatgagagttgcccacacgtggcgtagtgggtcaatggtctttgcctcggtaacgtgcaagttactggcgtgcccctgaccttgtggactgcacatgtcgcatgcatttaatgcagggtgcacgccgcctgtcccaacagcatcatcatagttgtcatatctagatcctaaatattcaacatcatcacatatcttaaatttggatccaaaatactgttgttgataatggagacacgaagaagatataaaataccagtttttcaataaaggtgtaatcaataggtccg

SEQ ID NO: 154928 - DNA, 721 bp, Zea Mays
ttcatttcagaatgtgctaggcaacagcagtgcggttgtgtatggtgtggctctcttggcttgtggaataagctcttccatcactggtacttacgctgggcaatacatcatgcaggtagcgcttcttggcctgttgaagatgcatagaggatctgtatttgtcctagccagcaatcatcgttaaactaacagattataatatcatattctttccaacatttacatacttgtacacagattgttatacttgaagcacggtttgcatgtgtttggctccttgctcagggtttcttggacatcaagatgagacagtggctgaggaacctgatgactcgcagcattgccattataccaagcttaatcgtcgccatcatcggcggatccagcggtgcgggccgcctcgtcatcattgcatcggtacagttgttccaccttctggtgcatcgattattgtctgttcaattacataagcatcatttacaggatctgtaaatacaacttatcggtagtttaattgtatgaactaatagcaaattcattggcttaaactcgtgattgtatatagaaaatccttctggcgattggtctggctgacttgctgtaaattttgtgcagatgatactgtcttttgagctgccatttgctctcatccctctcctcaagtttagcagtagtagcagcacgatgggccaacataaaaactctatatttgtaagtgcaa

SEQ ID NO: 154929 - DNA, 366 bp, Zea Mays
gaagtattcaaggacgcatattcagacagtcagtatgatgatgcagggagaaaacgtggttcatcaagctggaagtcagtggtcagagtcaagacatgttgaagggagcaagagcaaatccacctctctgtctataatctgcgtgttgtttcatctacaaatgaggcaggctcctcttcagatgcttcagctccagttccagaggtgcacttgaggagaggtctcggcttctctggtgctcaccaagaaacgacttctcccaaagtgtttggcaggacgtagaagcgtctgctggaagccttgccaacaaaacggagccgaatttttttccagtccgatcggcctgcattgcttgcctaacccccc

SEQ ID NO: 154930 - DNA, 604 bp, Zea Mays
tccgttagtagggtatagtggtcaccctgagttaagtaagcgcgagcatgttgcaccgtcttaagtcattgccgacttaagccgattcctccgttagtagggtatagtggtcaccctgagttaagtaagcgtgagcatgttgcaccgtcttaagtcatcgccgacttaagccgattgctccgttagtagggtatagtggtcaccctgagttaagtaagaatgcaggtcgacaatgaatgatttgagcgcccttgaagtctttttattgatgatatatttcccagtttacagagtacattgtcgtcccaatagcttttgaaatacggctaggggtaaaacttcctgaggtgttctatgttccatgagttcccaatttccgtgccgtccatctgagtgaggtgatatgatcccggccgagtgacttctgctactatgaacggtccttcccatagaggtgacaacttgtgtcgtccttcccccgttagaattcggcggaggacgagatctcctactgtgaaggatcgatgtcgcatggtcttatcgtgatagcgcctcagagtttgttggtaccgtgctgattggattatcgtgtccagccgttctt

SEQ ID NO: 154931 - DNA, 468 bp, Zea Mays
caatgatccgttcagcatgtccaaatgtatgttgaaattgaagagtttgcctctaactcaaactgaactactcaaggcaatcaattttctgaaaggggacaaagaagctagagagatattcatttgctgtgaagagcagtctcttgcagaagcttacatcattgggtctatttctgactaatgcaaggtaatcagtttactgctactagttgtttgcaacatgttctagataatctgtccacatagcctgtgcaatctgatttcttttgaaattccctgcacgccttcgttcattgcatgacatcacatcttcaatgcagttttcatctccttctggaatatccactatgtcggcaggattaacttgcatgttatcttcattaagccattgttcagaaccatcattgaatttaatgaaattgtgtagtacacaaccagccagtacaatatctctttgagtctctatag

SEQ ID NO: 154932 - DNA, 471 bp, Zea Mays
ggagatccttgcgggacttggcgatcatgagatattgagaaactcattcggtcttcctggccatgtgagagagggaaaaggttgaaagaaacacatgctttgtggactcctcaatggggacgtaaactcttcagagttgaacctcgggaaacaaatcacccttgtctttatgttgaccgcaatctttgcgatttggttctccctctcccctctctctagttctcttgcttgcgatcgttttgagttggcttccaataatcacaattgattgagcaactctaagcaagaagagtcactctttcgcactctgatttcatttatactcattctaatgccgcaagaagagtcactctaagcaagaaaatttcaggttccacctattcaccccttctaggcgactttcaaatagtaaataaacatatgaataaaaggttatacaaatttaaggggcgtcctggtccactttgtccc

SEQ ID NO: 154933 - DNA, 823 bp, Zea Mays
gatggctttgcaaactttggatgaggtggagcctttgtaggtgtaagaagtgattaattcttatgtcactgatgaggaggcacaagagttgttggctcaactagttttgcatagtcctaatgaacatggcttttctgtacaccagggagttatcagaaaaggctctcaaatttggatagcacaaaactctgctcttagaactaaaatcatttatgctctacatgatagtgtgattggaggacattctaggagtatggcaacctatcatagagtgaagaagttgttctggtggaagagtttaaagaatgatgtggttgtgtttgtccaacaatgtgaagtatgtcaacatgctaaagcagaaagagtggtttctccagggttattgtagccttcgtcagtttctcaaggtgcctggcaagacttaaccatggattttgtagagggtcttcccaaatcagaaggttacaacactattttggtggtggtggataggtattccaagtatgcccacttctttcctttgagacgcccattttcagatgctactgtggcccaattttttctggataatgtggtgaaattgcctggcaatcctaagactttagtgtctgacagagacaaaatttactagtcatttttggaaagctttatttcagtctttgaataccaagttggctttaacaactgcttatcacccacaatcagatgggcagtctgaaagggtgaaccaatgtgtggaaatgtatttgagatgtgccattcaagacaaccctgctaagtggaaaagatggttacctctatcagagttttggtataatacttc

SEQ ID NO: 154934 - DNA, 1003 bp, Zea Mays
ccaactcgtcaatgcctccgggctataaaagcgagccctggcgaccaccttcctcctcgaaccggggcaccaaaacgactctgcagagcatcacatcgacgaccagcgtgggggtgggcgcagccgtgcatggaatcagtgtgcagcgtcgttgtccacctaaatatagtatgggaagaatcggtcgcgccaaccacgcatcctggtgacctcctctgacgggggaattggccggagtgccggcaattgctcaccagatttcaagaaattgcctcggaccgcccttcatcgtcggcgtagcggcctgctacttattccacggtgagttacccttagatcgattcgccttgctctcctcttcgcgtgggtccggatagttctgtaggagtgaagaccgtaccgccaggccacctatctcgacgaaagcgccgccgtgacatcaccctccgctgtcgtgcctcggtaccgatggggggaagatagggcttctgtcgtccgttgccagatgtgtggcggggaataggcggggagcatacctcttcggtcacttaatccaagccactggatctttggccaattgccaagattagatcaccgcgtaatgagttagtaccattagatttagatctgatggatctcgtggcgtactggttcagtattttggccgatctaatcctaacccttggtttctaatccagcagcctagatcctagcaaagcataccccttcgtcgagccttatttgcaaaagaaaccccgcataacttaataactaacccgccatccctcaatagtatgagtatttcacaattaagtccctggaattagcaaatgaacccctggaagtattatttaggtataaatttaataataaaatacctagaaactatttaatccatatctcgtctggtttaactccgatttcactcgttccagttgtgttaacttcataataatattgcctacacaataacaatatcatttgatcatgtcccatagctttt

SEQ ID NO: 154935 - DNA, 2173 bp, Zea Mays
tgaggtttcaaagtagccctaaataccactagcgtccattcaatattgacacttctgctgggcattatacactgaaataagtcgaattatgcaaacagcctttgattagaaagcctatatccatttctctgatctctgtttcgttaaaaccaaagcgtcgccgtcgtcgtcgtctatgttgcgcacaccattctgcactgaattcgtctagaacctgcaatcgtcagcgtccatctcatccacaccacaaaagggtcaaagaccacacggcgaacaatttttccccgttggccattgacggacaaacgcgttctccctgaaaagcatgctgtgaggctcgatatcgctgcggctgtcgtgctcccgcagcgcacaggaaggtgagtgaggaggaagaaaccgcatgcaaggggacgggagtacgggaccggcgggcggaagacgaacgggattccaaaaaaacgacttgtcgtggcggagcggaatccacaatagcgacgagccgtcggggtctgccggcctggatgcaaaccagtctcgtcgtcacggactcccggaataaatactccctcctgcgtatagctcttccctgtcctctcatacactttctctgctcgcgcaaagctcttcctcgtgtaaagacgacgagaaatttatgtactctcgcaccacctcacaaacagacctgatcctctccgtttctttttgtttcccttttccctcttccgcgattccgtcgcccggttcaatttggacgcgcgcggcgtagggcgcccggcggaaaccgccgaattcccctcttcctcgcgcgtgctcagcgattcgaggtaacagccttttatcttcttccccttcatctccgcgatttcttgggggtcggggtctgaatccccgccgtgtgttgcgattgccggagtggggtttgccactttgagcggttgcacggccggttccggtgtaatctccgctcccctttgggcgttacatctggttcttgcctcgattttgcgttgggattacgggtacgggtgcctaccgaaggggttggggttggtgaggaaatgactcgttcgatcaggctaacgcgtctttatgcggtattgtataaatttccttctgtttcttgcgcactagaccgcactagtggagattgattgtgcgtgcatggggcctttgatgatcaagtaaagcagttgaaacagcgtccccttggtgttggaatcatgcgaaagatcatggttcgcccctccaactggcaccttccggcttccgggccttgtactgttcctcagcttaacaagtaggattgctcgaatcatgctgttcatgtgttgttcagcggcttggaattcggggggcgtgcttctgtactgttcttgactcttgtggtgttgattgtggaagcggcgtgcttgatgatgcagacgtcgttcccgtggtgttttcttgtgtcctgtccttgagcgagcttcagtggtccccgcacgtcaaattttacaggccagggattttgcgagctgttgtgacggtttcctgaattatgatgggaaaagttgcaacacgtgggagaccctgcggggagtgaggacaaggtcaaggttttgaagctgcgatttgtccatgtgtaatgctcacatttttcagatgcaactgttgcatttctgggtgtgttgtctggtaaactagctacttgctcatctcattggcatgccacttaatacacgacgtgggaggctcgaacccttttcagttatggttttgtagttctcttttgcactccatcctcagtttatctcacataaatggtagctgtcatgttaatctgattatcatgtcaattgtcaagtcattatctatttatctctgaataattgtctgacaacgagccagactaatatgagtgagtcctttcttttgctgtttgtttatttacttcatacttagttgatttagcataaatgtaacctgttataatctcattggcaagccacttaatatgcagcgtgggaggctcgaattcttttcagttatggttttgtagttctcttctgcactccgtcctcagtttatctcacataaatggtagctgtcatgttaatctgattatcatgtcaagtcattatctatttatctctgaataattgtctgacagcgagccggactaatatgaggg

SEQ ID NO: 154936 - DNA, 658 bp, Zea Mays
gccctgagcttccaataatagaggaagcccaggctagtcaatatgctcatttgggttgaaccagacctggtcaacagttttcagtcacggcgccgttacaccgttgcccacgtcagtcccagccacgatcccttgtttcccagtttctaaaaccgtcttcgcgcaaacagcccagggaaacccgcgtcgataggaaggaaaccccactgaccgcgccgtccttccttgcgtctgaggcgactcgccagcgatttccgccgctccaatccagcgccgttcgaatcgagctgagctccttcaatctccgagcattggagcccgattcaagagccaatgctttcccagaagttccaggtaatccaacttgaaatacatcgtgttttccattgattcttgaagcatttttcgttgattgaagtggatttgattgtaacccttattcttcacctaaatgtgtgatttgtatccgattatacatctctctaatctgcttattgcgtcgctcattgcatctatcttttgttcaggagccctgatcttagggcatctgcatttcttctagatccagtgtatctctcgacattcatagacctagacgaaggcagtggatcaggtatttattcatgagtttgcagagagtacctttatacaacattag

SEQ ID NO: 154937 - DNA, 518 bp, Zea Mays
ccgcaggagtgggcggggatgaagaagcgggcgtgggcgcgcagaagagtatgaggatggggacgggccaccaaacgcagatctaacctgacccaagtgcgtacagcggtggagatcacgggcgaggatggttaagacacggcggcggagatccggggcgagcatgggcgggggcgtgcggatgaggatgaggatggggatgggccaccaaatgcagatctgacctgacccaagtgcggacggcggcggagatcacgggcttgggtggtgaagacgcggcggcgaagatcgcgggagagcgtgggcgggggcatgacgcgcgtggttgacgggggcgggggcacggtgtagttgtggacgccctcgttaggctcatatagaatagtagagaataggtatatgctcatgcattgctacaaaatcgatatgataaaatagagcaaaaaaatatgcatgtgtttcctcaatgtagattactacattattcagaaaaccaatttgataagggcatggtacca

SEQ ID NO: 154938 - DNA, 372 bp, Zea Mays
aagagcttttatgcttcgtgaaaaatcctccaatcgtcgcaaaaacattaatgcttcgtcaacaataggttttttcctccacatcagagtgcttcgtaaaaaatcctccaagcgtcgccaaaacattaacgcttcgtcaacaatagatttttcctccacatcagagctgatgaagttgtatttcttcaaaacttattttgtgccttaccacaatttcactttttcgaagcattctctgaaggtcaacattgtatccccttcttgtgccattgatgcaatatgatgtataatgttatgctatgcaaaatgatatttgtgccgaagacacacactcacatacccatagtgaaatacacaatgtctttgtcgttt

SEQ ID NO: 154939 - DNA, 382 bp, Zea Mays
atatgttaagtctggttctaaggcaacatccgtcacttcaatggttccatctggaacccgaagacacttcttcaattgggatacgtggaacacattgtgcactgcagacaatgtttcgggtagttggagtcggtatgccactggtccacatctttcaaggataggaaaaggaccaatgtaccggggtgcaagcttcccttttaccccaaaacgagatacacccttcattggtgagactttcaggtagacataatcttcaacttgaaagtacaagggttggcgtcgttggtctgcataactcttttagcgagcttgggcttctttcaaattatgtataattcgttgaactatttcttccatttctttaaccatatcaggtctg

SEQ ID NO: 154940 - DNA, 682 bp, Zea Mays
gtgattaagcattgttgttatgcaaaaagtggagataattagccctaaagtctagctgtcagaccactctgagactgaacattgattgacagtaagttctaaggaactttgggctcaattcttgtgcaaggagttaagcaaatgggcaagatccctatagcaaaattgtagctggtatatagggctacaagtttgttacagatggattggcatgttcgtgcacaaaaatccaagatctaggcgttgcaattctgtctatcaggcgctctgaatcaagttttcaatggtacagtgttcggatcagatcgccgggttcagttcatctcgccgccggtgatcccgcgccgagatcctcgtcgacgttgcgattcgtgctctgtggggtgcagataactcctaagggtaagaaatatcacatcgtggatgaactcaggccactgttcactgtctggtgcgtaccacgtcagcacgcccgtggatgaactcagaccttatgaatttggcgccagcaactaagtgaacatctctgatctttagaagagggctgatttttgacttagagaaaatttgggttgctctatagtgctctccacttgggggctgaatttgggggttttgtgggacctttttgggataatttccttactctttcttgtagatatataaatgtacttcaactttg

SEQ ID NO: 154941 - DNA, 429 bp, Zea Mays
gtgcttgataccaggttgaggcgtcaagcggggaaagtccagaatcagcttttgattcaatggagtggatggcatccgacattggccacctgggagggagaaagcgacatcaagcggcgttttccattcgctccagcttggggacaagctggcgtttcaggaggggaaaatgtcagcgtaccggcggatggagatgcaagcgtcagtgtgggagagagatggggaatggagccaggtgtgcgcgctgatgggcctaggagaagccaacgggtgacacggcccaacgtccggctctcgggccatgaatgggtgaaatgatttaggcccagatggtttagcagctaacagagagaagaatatacactgccgtggagaggaggaaaggattggactggaacttggaactggacccggctgcgtccggcgaac

SEQ ID NO: 154942 - DNA, 603 bp, Zea Mays
gcaatgttgcggggcacaagatccaaactccgacgagcagatcagtgatgaactctaggcgcggttaggaactcggtaacggggacagcaccgacaacaagtacagtaccggcggcgagagtcaacaatgtcacggtgcaaacagcaggacgctggggaagcagaaggagcaccgatgaagaaggacgaagctccagcaagggcaacagggactcgtcgtcatgcgcgcacgagaaacagcgacaagacggcgagcggacctaggtagcaggggtgagtacatggcgcaggtatcaacaacgaggggcagagcgagctgagcacgtagtgcactacagcgagcgggagggcgagagcgctggagaaaaggtagagcagagaggcaggagggcggtttcattttatagacgatcagggagaacgatatgacacatagggtgatgacggagaacgatatgacacatagggtgatgaccatcaatggccatgaacggaggaaataaaggtcggcagcgaaccacatgtcagccatagggaaaggaacatgggaggcaagagcgtcttgggctttgagtggaccgaacgaagggagggccggtcgag

SEQ ID NO: 154943 - DNA, 668 bp, Zea Mays
aacaaatccacggctttccttggtctgacctctatggctatacaagtcaagaagtgcgcttggttcacgaagtccttaaaaactttcttttagcgcacagttcttttgggacaactaagacccattgtaatatgttttgtatccaacatttgtacattccaacttcttaacgctgcaaatatattcatgttgttacctcactcagttgaacaaacggtttggcagcatatttcaccccatctatctactatcttccttctattacttttcttagttttgtttcagttgcatcacttcactcctcaaactgtattccctcatctatgctattggaatttgtcattgcatcaatgtcatattttgtcagatgccagccagggaagtgatgtatactgcctgaattgaaactattatcaatttagatccctaactgcaacttttgtgcttgctataaaatattaccagactcctctatcaagtatcagtgtcctctcagtagcaaaagaccgggccagattataggtcacatcatgacattttttttgcataagtacttacacgacaagatattattttgttgcataataataaaaaagttgaacacatcaagtcagaacgttatattcaccacagccacctaatctattttaaaaactctgcaaaatttt

SEQ ID NO: 154944 - DNA, 1502 bp, Zea Mays
ttcatgcaataattaaaacttgatcacaagcccaactttacacatgttactaatgtcttcacaaagagatttgcaccataattctaaccctatgctatcatggaaattctaagaatgtaaatactcaaagtaaattacactaatgttgtagcaaaaagtaaaacaagggtttacaggaattctcaagtttttcctaaggtctcaaatagttagtactgcccactaatttttgttggagcatccatgcaagggtgtagatctcccttgaccgtgcaaggactaagtgctctcaacaagttgattcttcaccgctccagcacggtgaaccgctcatgactgtgtatacttctcgagttggctcactgacatcctcttcggagtgatcaccaaattttgatcgcaacaaaaccatctaggtgatgtcggtgaccgagagtgtccctcactatgcaatggctccttatctcacactatatgggttgctttggctattaaatggggattgggcacttctgttggccttttagtggggtatttatagctctcaattggccaactagctgttacaactagctcaggcaaagttagtgactgttggatcatcaaacaaccgccattggaccaaatcatagggttcaactagacacaatggtaactcttatacttttgcattagtactagctatttgaaattgtcttcggcgtatggttcgaggcccgctagaaattctctggcacttcttagtgctagtcaaactcatccacttttggtctgatgaggcaactatttatagggtccaacaaccctgtagccgaaaccctagccaaagcagtgcaattcttcggtccaacaaatgttgtcaggctaatcttacacactcttggaactctctgatatgattacaaagatcgacagacccaacacattgttttgatgagatattattcatagggtctcgtgattatcgctcttaggttgtctatgaggaggagttggaccaacactcttggaactctctgatatgattacatagatcgacagacccaacacattgttttgatgagatattattcatagggactgatgattatcgctcttaggttgtctatgaggaggagttggaccaatccactatggtttgacaaccgtaaaacatagggtcccacccataaaaaacccttctaacttgtcccaaaaataaaatttcagaattgagttgtgattcttacttgttatgggcatattctaagccacctagagataaagataagtagtgtgccccacactaaacttataagatttatctagttcaagttactagttaatacccctttatagcatggtcaaaagaaaaggttctaaactgttctaagtgtctctcaactctaatttacatttagaactagtccatccttaaccttgtcttccatgcttccaaaagtcacaataaaattcataacaagggcatggaaaccatacacatgaataagagtggatttgga

SEQ ID NO: 154945 - DNA, 493 bp, Zea Mays
gccagagaacttactaacatctgctctaatcttgtcccatctgctgctaagggctctgttaactctacaaggaaacttccccctctgttcgttgtatcttttttcaattcgagcccaaagcccctccctacgttggccagtgtgcacaacagggtcactgcttatttgcaaccaggttgtgcaaaggagaagatcttcaggtccagtaaagttttgttccttagacttcttaggtttctgcacaggagctgcattcttttctggactattgatgtcatgaacactgtgttcagcatctgagtccaagttcacaggtaatgaaggtatagtattggaaccctgcaatggtgtactagtattggaaggtggaatggaatcaggaaaaggattgacttcacctgacccaagaggattcctgacaaagttcaagtaatgattccagtacatagctgattgtgaggccggaatcatggtagattgggaagtactatgt

SEQ ID NO: 154946 - DNA, 469 bp, Zea Mays
caaagagttaaggctgaacaccagaggctagccgaaatactgcatccactaaagatacccgagtggaagtgggaagagattggtatgaacttcattactggattgcctcgcacctcgaaaggatatgattctatatgggttattgtggatagattgactaaagtagctcacttcattcctgtcaagactacttacaagtgatctcaactgggtgagttatatatggcttggattatgtctctacatggtgtaccgaagaagatcgttttggatagaggatcacagtttacctctagattttggaaaagttttcatgagaatatggttacgaagttgaatgttagttcagcctaccatcgtcagactaatggacaaactgaagggactaatcaagtattggaggacatgttgagcgcttatgcccttcagcatggtagtagttgggacaagagtctaccttatgctgagt

SEQ ID NO: 154947 - DNA, 346 bp, Zea Mays
tcacatagatatctgctgaatggaatgaagaacaacaagaggaccagaaaattgtttgggtacaagattaaaccgcctcaaccgcaagcagaagcgccaaagctcgtgaatacccaaacaggagaatcaaatcaagctcagctattcaacatgcaggcaactgatcaactatcatctgctggcaatcaagcaaagctgactcgtagagaggtcaaagtaagaggtgattgtttctactacaaggaagaagggcacttcatttgccaatgccccaagaagtgtctagaccagctcgcgaagaaggccttcaagcaaaactcaaccagtgataatgcagaagaaattg

SEQ ID NO: 154948 - DNA, 1056 bp, Zea Mays
gtgctatccccctgccattccaggccgacaatgatacaaatacttccagaggccaaagtgggggagaatcccgaggtaggcctcacacagatgaacaaagatggaaacttgcaagacagaattagggttcaagtgggtcaaattcaattcgtagaaatcaaggaggccgcagaagaagggagagatgggaagagcaaggccgcgaatgaggaaagggacatagatgacggattcatgggtgtcttctgttggaactgtgaccccgcgacaaattcacctagagcagatctctttcggcagtaaaaccccaacatcgacaaggtgaagaagatcgaactctgagataatggacatatggttacccacgaaaggcaactactgttggggtcaatggggggaatgatggccacggcggaactttgcctcttccgcttcagtgccatcgcaatcttgacgacggaacggataggagcaatatcctagggaagtagatgagtggttcgaggcgaaaatatgaaattagggcacagaaatcaaaatgcacatcagcgcgagtataaatggggctttcccgggtcaggtgctatttctaaaagtgccaagtcatcactcgggaaagtaaaacttcaggcatggctcgacagttacctctaaaactccagcaacatctaactcggctcggcgttacctctaaaacaccggcagtatcaagcaccactcgacgttacctctaaaacgctggtagtgtcaagtgtcacttggtggttacctctaaaacaccagtatcatgagctatcgcccaatggttacctctaaaacaccggcagatttaaatatgactcgacggctacctctaaaaacgccgatgtcatcagctgtcgctcggtggttatttctaaaaacgtcggcggcactagatgcaaggatgaactgtcaagcggttataaagaagaagtagcaaaagggcaaatctgcactcggggtaaccagagtccttcattacataaaggagggaagtttcacaaactcaaagactgactcattatgagtcagcct

SEQ ID NO: 154949 - DNA, 545 bp, Zea Mays
gatgaccctcctcggtatgttgcgcccaaccgtgaccaattttgcgccacggctttgattcggccgttcaccggcgtacctcgtcgcgcggcagcaccaccatctctaggaggtgcctggctgccggggtgtagttgggggcgatgcggtggcccttggttcagcgatgaacgccccagattaagccacacgtaccggttcgaccgtgagctttgagaccgttggatcttaatgggtggttcggattggatctgggcgataaaactcgggccatttgatctccatccaacggtggaaatcgagtaccggttcacgggactttgatctgatctgggccactgatcgtggacggacgagcgagatcgtttctgggttgttttaaatctgggacgtcaatcgctcgttgggtggctcggattgcatacaggttcggtatgagtaacttctaatctgtgccgttgaatctgatcggacggcagatattcatccataccccttcgtcgtgcacttctttcaaaagagaccctttgttttattaaaactaa

SEQ ID NO: 154950 - DNA, 1170 bp, Zea Mays
ccttgtcaaaaagtattttattctagcatggtctatacttctctcagtctattagaacttatctcactcttgtgcttgcgacacctttgtagatgccccctggccatagcctttagtcttttgggactctttcctcgtccattatgaaattgctactatttgacctctattccattttgttattgacatgctcgtatccttacatttttaatacccttatcccttgatctaaagtacttacccttgtatctctgttgcctatttaaacagtttagtttatgtgtccatgaccttcttgtcttctgagatcctttcttattttgttgttaagtcgctatcttttggcaatttctatgtccttggccttagtatgctcgtatccttggaatcttgtatactcttatattcttatgtatgcttattttcataccccaataactgttcaagacatttcagttaacatgtccttgaccacccgttttttaatggtccatgagcgatcattttatgttgcccatccttggtgatctcgttgtttccttgtaactccactcggtaatgaatctttacttcaacccttctgttggaaccttatcgatcttacccttgattgttttctccactttgtcgttttgcgagtcttgtcttaactatatcctttgttacgcttttttttaattattatcatatgcacccttgacacctctatatcctacaatgatgtttgtctcatacctgctctttaaaattgcctctcttccatctcataccttctttctcttggtcgtatcctcttttttggctcgcgagtttgtaacctcatcctttgttgcctgtacccttctcatctctcaatcttaccttggtgattacgctatgttcgttatctaaaacctccaatctcccaccttagttcaagcgtggtctcttacttatctcacccgtggttatatcctatactttacctcttgcaagacttatcttatctctattcttgattgtacctagattcctggggtttttatgcacatttacctcttcctttatatccttgcctattatcacctttgacccttgacctctctccatatttaccatgatgtttacctattattttttttgcctcacttattccatttcaatccgagagtgttgttttccctatcccgc

SEQ ID NO: 154951 - DNA, 569 bp, Zea Mays
gtccggtgcgccaatggtgcaccaacggtgcgctctaaacgactaattctgacaactagttgttgctcagagtcgcaccggacacagcacaatgcatgtccagtgcacaacggatagttcggtgcctggctaaaaatcggctgactcgaactgcttgttctcgggttgctggtgctcttggagttttctcttgggtgctctctggcctgctgcccaggcaccatcgaacactctagtgcccccagggaagcaacacttctttcttttcttgggtttttctaaaccgatttcgattctaacttgtgagtgagatcttgagtgacacctagcactagtttagagtgtgaacatgcaccgacactacactagttatctcttggtcaaactactcatccacaacccctatttatagtgcagctaaaataaaaatagaagtcctaactctagaccacgtgtcccacaactccttcgacacttaggatatgaagagcttcatcttttgattcgcctttttaagccatcgcttcatgttctcatctgagggattgtttacacggttggagcgcaac

SEQ ID NO: 154952 - DNA, 748 bp, Zea Mays
tcgggccgaaggattcaacatttaagggctgagatttaatatgtatgcgatctgctcccatcccagcatccgcgatccaacggtcgagcattacccaccccgaaccggtagctttgaccagatccacaccactcctcacagatctaacggtcactgattcatcctacatcatcttctcccactagccacccagtacggcggcgcctcccacctacggcggcgccatcgccggtgactcccgaatcggcgcccggacacataatacacgaatctaataggtgctacgcaagaagaaggtgagtgcaaacgctaggaacgatctcttaccgactaatgatgcgctagaatccccgtccgtggtgacccgtggatccgcgacggcgatggagctacgacgagtaattgctgctcctcccgtcgcccacagctccaggaaccgaaacgcgcgcatcaggtactcctctccaacctccctggcggcggaaccttcaacctgcccagctatggcgaggaaaggtgcagcggatgagacgactgacggtggtgcacaggcttctgggatctacgattcagcgcgcacaagaccccggaattgattctgggcgcagaatagaggagggaaagggccacaccgtcggcgaccgcaatttcacacctcgcccaccactagctcactcagctctcaattgctcccgatggcggtggtgcttcctgagccctttttttcttttgcgcagaacgattcagg

SEQ ID NO: 154953 - DNA, 369 bp, Zea Mays
cccagctgagatcttgtggtgccactgttccgaagcaagctctatctctaatgcagtggaacccattattgctccagaaacagatcgatgacttgaaggcgtcgaacgctggttagtaaccttacagcttccttagttgtttttattgatcaacttgttcttagtcatgcatcccctttcagctgtgttgtcggatatgccccggcggtgctctgaccttgaggagaagtactctcgaagtcaagctgacttgacccaacggtgctctgaccttcaggagaagtattctcaaagccaactcgacttggcccaaacctctacttctttagatggtgcgcgttctttgcattcctccctcagtgcccagct

SEQ ID NO: 154954 - DNA, 566 bp, Zea Mays
gagtgacagtgtgtaccatgatttcccggtgatcaacttgttgcgccacaaaaccatgagggaggaatggagcgggatcaactctgtggaatgccattccttcagagtcgtgaggagggggtcgcgagcgtgaagaacactctccgcgcagaagagggcttgaaggcgacgggttcttccatggtagcgaagaggaagagggttttgtaaacagtgcaagttccatggaaggcgaggagccacttctcgttagaaccgcctgcgcgaactcaccaaaattattaaaaaagggcgagggaagaggcccaccagcagacgagagacgagcagccctgaaccacagtcgcggagagtactcctaggagacattctcaaacttactagggaaggaaagaaaatccctcctgcaattctgaccagaaatttcgaataattgacgattattgcctgaaatagaatttccccaggaaaaacgagagtcagtcgtcacagggtcggaagtgccattaatgctatggacaaacttatgcccagaaatctcctggtgttgcttcaatatcttcttg

SEQ ID NO: 154955 - DNA, 426 bp, Zea Mays
ggaattagagaggtttgggccacgagagcataatacactgcgtccttttttgggtggtcagtattgcttggaaatggctaagtgccgataggtaggattttcgtgagagtctaagagcgggaaaagagaactagaaagaagtccgagtgtgtgagaagaggccctacgcatgggccaccctttccctttttatagaccaagggagagagggttacagctaacaagtagaaccaggctggtagcctgacccaccctatttttatggagaccctattgacattagtcttaggtcctatagaagcacactctacacatcgtggatgtcccatacacgtgtagggcattcacacgttgtggaagacagaggacatgacaggttgtggcacacgtcatccacgctaccacaatttcccacctatgccacac

SEQ ID NO: 154956 - DNA, 423 bp, Zea Mays
tccgaagccatctgccatgggaagagagtcactattatgcacatgcctttttttaactagtattttattcattacatcaagccattacattacatagcatactgctaccacaagttcatcacacatgagtgctacctagggtacccccaaactctttctctaaagtgtccccaaattccttgagaaggtcatcaaggctggccagggacatgttctcggtgtcggactggttcctaggagggttctcttcctgctgctcagtctgacatccttggcttttggtcttcttgcggatttttcttgcgggggcgagcttcttcagtttcttgtcgtagtccattttgagggtgcggtaagcttcacgggtattggtctcttcgccttcagctatcgagaggctctcttgaagggacgctttttctt

SEQ ID NO: 154957 - DNA, 372 bp, Zea Mays
gaaatctcggacgacccagattaaatcccaggataacccttcgcgaaatcgaatccgagccgtcaatgcgatcacaagaggatcagatgccgccgtgttgtgggccgtagatcccagatcgggtggctacggtcgcgtaccgcttcggtctgtacataatctaatctgcaccgctcgtgctggatcggacggatctcatttgatcataccccttcgccttgacatttattctaaagacccccttggcttttctcaaatcaacccgccacccgagtcagtgttaagatcattacagagaagacctcggatttacaaaatgaaccccgaactcctgttaaattgtgcctgcagtacacttattcgctggaatta

SEQ ID NO: 154958 - DNA, 482 bp, Zea Mays
caccttccgaagaccaagactcaacatcagattcatcagatgcgtcactactaagaatcactacacttccacataccaacgattcatcattctcgttatcatcaaggtttgcttgcgcaggcccagacgccggaacctgcataacaaccgatcttaagtatcatgtacaaagcgaacactgtcaaaccactcctattacattctttcaacccgcacagaagcactcgtcgctgcaggaccctcagcgtcgccttccttaaacaaggtttgctcctccgctcccgcttccactgcatcatccttctgggccaccgagctctcaaggccagcgaggtcttccacctcttcatccctcattgcctgcgaagacagcacaacaacgtttcagacaacgaacacacacaccaccatcgccaaaaccaaaacatacttgtgtcagcgctcggtcggccctctctcgacgacgtcgcggcagtgaggac

SEQ ID NO: 154959 - DNA, 635 bp, Zea Mays
cacaggcacacggcatgcccggcacacggcgcacaatcctaatttattctaagcgctaattgaagcctagatgatagcggatccgagaaggaggtcctcacccgcgattgaagcgaagtcaagttggccaacgacgcgaggcggctctgcgacgatgaacaactcgacgagaaattgatgttgatctggggcctcccacggtgagggactccaacgcaccccttcccccgctccctacgctccctttttggtctggtttacagggtcaaatcggtggtcggatggaatttccctcaaggcggcgctctgctctcctttcctctttttctggcgagcacatccaggaacaacgatcctacgcaggtgtcgggggtcacggtcttaatggctgggtcatcgagccaccagtaggcggagcggtaagttgaaactgccactgagattcctgggactggatcgggctgagcttcgccgcgcgcaaggtttctgtcggagttacaccatgcagggacagacgacaggggcccgctgatcagcgttggcgcgagaacgcgagtggctgccagtaggacccaccggtcggaatcagaggtgatgaggcgcgcgtgatatggtcactggcaagtgggtccggc

SEQ ID NO: 154960 - DNA, 535 bp, Zea Mays
tcgcaagtctattatggtggtgaatgaaaactggaaagtttctaggtgagctgaatattgtctcgtatgcaatccgtcatcagatctgggtccttgggtgaactatttggtgtactattttggagatggacaagaacttgaaagtttctaggtgaaaatatggttttgccaacgaactgactgcacccctatggcgaactatacaccctttatttcaaaaggggatacaaactagtaatttcttggcgtgctaattttggccgacagactatctgccagtcacttatgtgttatctaacacacttttatttgaaatatagttgtgggagttctattgcatactatccatgatttgtactatggattgtccatgagtgcatagattctttgaaaaggcgcgataatgactagttggtccctattttctataaatagaggggtgttcggtcatttgaaaaaagagtgcaccttggagatgtgtttcccatgtgttgtacttagctttggcccttatatatgtttgatagagaacaca

SEQ ID NO: 154961 - DNA, 378 bp, Zea Mays
gtagctcgatggtacatgcggaacatatcagaacacaagaagttgtgcaggttcggactgttagtgagcatagtcccctacgtggtttctggtcgtggaattgttcgatgcctctcctcgttacaagtggtttctagatgtagaagatgaatgtggcgtgtgtctgtcattttttagtaggggtctcctattcagccttcgtaggggtcttctattcagccttatcatcgattgaatcagagttacagagatagaactagtgcatgatctccacgacccaccttgtccgtgtcacattgcgtccatccatggtcaacgagtcgttcgtcgattttcccgtatgtcgcatgtgcagggcacgatcagactcctttccgc

SEQ ID NO: 154962 - DNA, 723 bp, Zea Mays
tctaggatggccctatcctggtgggataccttcagcgctgtcgtcaaatatgctacctaggcagaatttgaagccgcctttcgagaacatcatgtgccccaagggatcgttcagcttaaggaagatgaatttcgggaattaactcaaggtggaaaatctgtcagtgagtatgtgcacaaattcacagaattggctcgctatgcgcctgacgatgtcagcacagaagccaagaagatggctcgtttcttgaaggggttaagaccagaactcaagactatccttgccagccaagatttcctcagcttttcgcatgtctctaacaaggccatacaagtagaaagggctagggaagaagaaaagggtcacctcaagaggaaattccaagtcctccgagctcagtaacaggacaggcaccagagaattcaatcctttgggtttccacccaagggaccaagcttcaataagccagctggacccactccgtcacgtttcagttagcaaggtcaaagatcttttccaggcccccttcgttgcaagcaaccaacctccagccaatgcctgttggcactgcggagaccccaatcattacaagaataattgtcctcagttgaaggcatccgttcctacttactccaactcggtgaatggccccaagagtgccctagcacccacctccaaggcaccttcctccaacagccaacaaagcaagacccagtatcatgg

SEQ ID NO: 154963 - DNA, 917 bp, Zea Mays
tctcattcctcattcacttgcctgcaatctctctgctagggtttcgcttgctcggttccctatccgcactatcgccgtcggtcatggtccgacacctatttacacttgtgcctctcttgttcctcattcaatcgcctgcaatctctctgctagggtttcgcctgctcggttccctatccgcactgccgccgtcgttcatggtccggcacacgctatggcggttggtcgcggtgcactgcctgggccacgtccctgtcggtgaggctagcgtgtttgtggtcgcggcgcactgctagagggaatatggggtctaggaggttgacgttgatggacgacggcacctgggtcttctcttgctccatcatggtcgcgatccatgggattggcccagtgagggtatcatgaaatcctctatgctactcgatctcctcctgatatagtaaacaacaacctctgctatttccttctccctcgcacatcacccactatacgtagaagaacctcgattcgatcttgcctcacccatgtcaggccgaccgacgacggccgcaccctctctctccttcccagtcctcctgctcgcctctacctacacctttctcttataggaggggttggagcccttacatgaggaatttattgataaagaaagtgttatagggagtttcggtctgtttgtgggtgatgtttgtgctaatgtagctgattcaagtttcgttttttgtgcagtctctatggtttttagggagagattttgtgttccttggtattacggtttgatgatagacagtagtactatttctccaagaaagcaggtgcagagcgatctcaaggtccgcctagcaatgctaaagccggcaaaggtggagaggatggtggtcattacgacttgcagccacatctgcacaccgcaaaaa

SEQ ID NO: 154964 - DNA, 288 bp, Zea Mays
attaaatcgggaccgtcggattgtcatcttagggttcgcgctgtgcggttggcgagatctaatctcgtgcgcccatctccgatcgggcgactcagatttaatgataccccttcgccctgtcgtttttacacaagaaccctcggaaaactaagaaaacaacccgccgtccacattcattattcactgagtcttagaaaacttcggtttaggcccctgaattttccaggatttgtcacccagtccagataattaatgaaacagggaaaatcatttaaaaaaatagttttt

SEQ ID NO: 154965 - DNA, 592 bp, Zea Mays
ttaaagattttgcaaaatctttgcggatcaagttattgaattcgtcgccgtattatgcgcaagctaatgggcaggccgaatctagcaacaaggtgttgatcaggttgataaagaagaaaattgcagatcagccgaagaggtggcatgaagtgttgtcagaggcgttatgggctcatcgagtatctcagcatggagcaactaaagtgacaccatttgaattggtttatggacaagaggcggtgcttcctattgaggtgaatctacaggcttgtagagtagcttgtcagaattcgttatcggctgaggtatatggtgagctaatgctagacagaattgatggaaatattgaaagccgattaacagccttaagggaaatagaaaaagaaaagttgagagtggcgagagcttataataaaaaggtgaagaagaaatcgtttcagattggagagttggtatggaaaacgattttgcctgtaggatctaagaataataaattcggcaaatggtcgccgaactgggaaggcccattcaaggtggtaggcattgtacatggaaacgcatattttgttgaagatttacaagggaaaaagtt

SEQ ID NO: 154966 - DNA, 448 bp, Zea Mays
gtaaaactaggagtacaaaatgaagggtgcaagtgctctaagccaaaagaaatggttgtctataatagcctacccatatatttaaagagggttatttatatttcgtaaactacctctagatacatagagcctatccacttagtcaggggtgaaatggaccaactcctaggattttcatcttatggccacacactccacgtgaagttgctttgcctcgatgcaccctttgtgatgactccacgtgcctcctccgatcctcaccggaaccgcaccaccgagttttgaggcccaaactcagcaaaaccagtagctgggtgtttttgaggctcaaccataaaaccaccgtgagtagcgcactacatgtgcatccccaacgtcctagacacttgttctaccagtccttgaccgtgctagcgacaagacccactcggtcatatcctcgtgctcg

SEQ ID NO: 154967 - DNA, 732 bp, Zea Mays
cttcaatcccttcacaaattggttgacaaagaaaatctcatccatcccgggttgtgaacagaagtggcataccttgcttcttcaaactcttgagcgtattattcaactcccttcatctgatacaggttcagaagatgtctcatcaccttgggatattcttccacgccaaatttggctcgaacaactttgccaaattgcatccacttccctagtccctgcctcatcttgtacacttgaagccacatcgcaacatttccctccatgtgcatggatgctaagtttgcccatagagcttcaggaacctgatagatggtgaagtagtcctggcacttggctagccaaattccgggttccttcccttgaaatatgggaaacaagtatttgggcaaggatggatgtcctcgccctcccataacttgatcttcctcttctcttattctctcctgttgtggttctcctcttcggtttggatcaccagtaccctcccttgatgatctagaaccatcgtcttccaagtccttctccatcatctccaaacgcaactgcgccaccaccttgcccgtctgctccatatgcctcaccaaaatagtacattctgtttattccttccttgccaccgtagctgagagctcggcttgtcctttcaaccgatgttgcccagcttccaccgtatccaacttcttcatcacccggtccatcatcttcatcatatgttcccacttctcctctccc

SEQ ID NO: 154968 - DNA, 317 bp, Zea Mays
cccggacgacgaggacagcaaatctcgttggtcatcccgatctagccgaaggcgggttcgttccatccccatccaacgacgcatattacttcgcgacgtacggccaacattatgcttcgccaccacccttcaccggcgggactccccggtcctcgcctcagccgaggactcgaatgctccacgcgcttccatccgcagcacggactccgccgcggccacatccaacacagcaaaataatccaaatcctcagccgaagactcctctgtccacgaaaacgggctcccaaactcacccccatcagatgaccaagacccag

SEQ ID NO: 154969 - DNA, 1534 bp, Zea Mays
catttttctacatttttctataattgttttaactctggagtaaaaagaaaaagaaaaacagatgaatagtattggaccaaaaccagcccaggtcggcccactaccagcagaaacacgtccacgcgcgcgcgcccgcgcccgccgtggagtttttgcaacagggtccttgcagtttcggttatccgttaagaaccccaggcgactgtttaacgtctcactgacagtttgcagaaacatccccgtgcttctaacctttctcagtctgagtccacagcggcgaaccgtgctgggagctgagctccggcgagctagaccggccggatgacgcgacggctggagctcccgaaagacaggaacacaattgaactcctaccgatcatttcccccaaatcaattttattgttggcactacaaatcaatcggtccacggtgaccgagcggaggggtaagaggatgaacacattccgagcaaacgacggcgaggacgaccgaattaaggctggggaaaggttcacgggtgcaccagggtctacgaacattctttgatttaggtagaacaacacccgaagagcgggtcgacggtgagggggggggttacggcggcgttttacagagcaaccgcacgttccggtgaaaggtttcggcttaagttcgattggttggtactgggagcaatagggggctaatagcaagcaagaacatgaaacaattgggtaagtactcactcgaggaaagctggccacggagatgttcttcgcggcggagttaagaacaagggagcgagggatttggggactgcgtgggttttctggtgatcttgagtcgggcgcttagttgctgagatgtgggatacagtgaagaagcaacgctcgccctcaatttatagtctaccggccggaatcggatgagcttcaccggcggtaatcgtgctggcgagctcacccgcacggcagagccacggcacaagtccggtggccgccgtttaaccgggttgcgccacctcagtaacttttggccacgtcaccaggaatcctttaccgcacacgccggcgacccatcccacgccgcggtggcgtccttatcgctggcgaggggctgatctttatcccccccccaagtactgtaccatggccagtttcattcagatgaacctgatagtgcaactttaggtcctattttctccagatttcctattgtaccaagcccaaacatctatagcaaagttgttctattataaaggatctacaactttgttatattatcttggggcaaattccttgaagttcctgatctgtagagctccaaagatgtttcagtaccactgttaatctgaacttcagaatccaatagcctgacagtctgactttgggtgtgattatctccaaaatcttcataacaactgtgcttacactcttaagcaaagttgttctcctttgtttgctctatagtttttatgtggtgacctggggcaaaaaccctaaattttgaaagatccaacgctccaaagttgagcaaaaactctgaaattcagact

SEQ ID NO: 154970 - DNA, 471 bp, Zea Mays
cttttaattgcacaaatatagcttgtaaatgatgagccaccaagtttgaatttaaattgaaatttaaattgagattcaaataagaggaaaatggattggaaaagaaaaagaaaaaaaagataaaagataaaaaccttacctgggcctcggatacttattttagcccatcaggagacaccgtccagcctagtgtccgcgcaggcacggtctcgtttcccagtcactgctctgtgggctcacacccggggggtcttcttctttcccccgcatgactcgctcgctcgccagcaggccctccgcgcgtggtgacttcgtcccctgatgggtgggggccagcaccggagtcgaaccaggctcacccgtcagctaaatggtccgcttccactggagcgtcttccccggaaggttgttactgctgcaccgaactccccgaaatctgctctgcgaaccgaccctgccttcggctcttcc

SEQ ID NO: 154971 - DNA, 594 bp, Zea Mays
actgttgcattataatagtagagatacagatgttccgcacccactcgtcaatgcgcagtctgggtcgttgtttcccgtatctatctattgacaaaactacaaagacaaatacctgtagctgtagctgctactctactcaagtgggcagcaaatgaaatgtaaaccctcgtacctgacgcgcgcggcgctatagatacgggcggcgcacacttcgtccttgtttcttctttctcaggtcgtcttcttcgtcaggatgtccccagccggccgggcagccccgcccacgctgccctcgatgatgtgtgcgctgcttcagttagcaggacacacacgcccgatcgattaggaatctgcccacacaaacacacacattttctctttggttctccaggcgcacgccggtgccatgcctaccttctttctctctcacctcattgtgccagtggcgttgcagcggtgagcgagaacaccgcgagcacgggcacggctcagaaccacagaagagcgtgagcgcgtcaagcggctgcccgtgcccggtacacgcattattgccggtacttgcctcgtttatttatggcaaccggcactcatcta

SEQ ID NO: 154972 - DNA, 551 bp, Zea Mays
ggcgcgcactgaccagtgggccagggcggtcagcgaccgtgggcgggaggtggactgattggtcggacctagtgccaggggcacaggcggccgacagatggggccaaagggctgggcgcgcttgcgcgaagcggtatccgaagatctagaccacacgatcgagatcgggcagttgagatcaatgccagggcgtttacggctgcgggtagcgccgctcctgctcctcggcgatgaagttgccggagctagggctggtgtgggctacaggggctccgaggtcaccggagttggccaggatcggcgagaaggacctgacaaactcactggtgggattccggccacgagaccgggaccagagacgagagaacgatggagggaaagctctgggtgggtcgaggtaactccggcgagtaatcccgaccgtggggaggggcaatcaggtgcgctaaggctcagactagcttcaacgagggtagggaagtgctatgggccaacacagaggcacgacacggggccaatttggccagaaaccgtgcgtgtgacaaaacctc

SEQ ID NO: 154973 - DNA, 298 bp, Zea Mays
cccgggcagtaataagatgtatcatgatctcagatccttatactggtggaccagaatgaagagagaaattgccaagtatgtatccgagtgtgacacctgccagagaatcaaggccagtcatttgaaggcagcaggccctttgcaaccccttcccataccaccttggaaatgcgaggacatttgcatggatttcatcgtgggattgcccaatacctcccggcaccatgattctatttgggttatcgtggatagattgaccaagacagctcatttcttgccggtacacaccactcacaag

SEQ ID NO: 154974 - DNA, 656 bp, Zea Mays
gtaagtttctcaaccgaaggggtatgcatggatcacgaccgttggatcacaagcctacggtcatgattagatctgcagacatctgaactagtatgctactcaggtccttggatctagatctaacggtccgtgttttatgaaaacatgatctattctcagccaccgaccaatcatccaacagtggaggttttaaaacaagcgctctctctttccatccgttcatacattgatctacgactcgtattgcaccaaggtaacacattagcgcctatctaatctaagtcgtctccttacgatctagagccgcacaaggcatccaccgttcacgacggcagaggatgggggcgccgccgccacgcacggtggagactcgtcggaaccgcaggttcttatgaccccgaaccttatttccctcatatgacgtgtaatatcccaaaaaatgttgaccaaaagttgattttcggtgtgtggatgagggaaagggttgtgggccgttggatgcaaagtcagaagccatctgaggcgtcgtttctttctcccacaaaaccctaagtggccaccccttttccctttttccctctcttggccgccacccccctttttctcccttggcttggacacccctccctttcccccttggctggacgcccctctcc

SEQ ID NO: 154975 - DNA, 337 bp, Zea Mays
caagacaagaccatagaagtatgcccaccgcaatagttgagccctctcttgaagcccaacaaagagagcaaatttctctttcttcttcactgtcatcaatagtagtatttagttgatcttcaccagaatcccctgagcaccattgatttgacccttcatgcgtaaatccccatagcctctgacagaaactgcatggtcctcagatacatcccaaagaaccaacaacccgctctcatatgcaattagcaacatgcataaatgctattattcttaagtgcctatgaatgagacctacccagacgtcctcctcgcgcttcggataccgcctcctctcccg

SEQ ID NO: 154976 - DNA, 893 bp, Zea Mays
aagaggtgttattgttaaccatagtgcccctcagtcttactctgtgtggaatctggttcctgctatgagttctgaccgctttgcccttctattgttattcgccgagttattctatgggtttttgtgttagcattagcgttttctcgttacgaagttctttctctgagtttgtgtccaaccctcctatcactgatgattacggtggctctgtttataaggcacggccgtctgctgctgaaattgaggccatagttgctgctcactagggtctgcctgaggaagactaacagacccacattttcatacaatgcccggatgatgattatgaaattgaagatgtctttggcatgctagctggggagtcttttgagtcggtggagctcgtgttagggagtgcagcccccgagcaatcaggcattgctacaacgaaagtgtatgtacttgtaagtcctcggcgcaagcggcatagttgactagatgcccaggtcgttgtttcgaaggctaagcaaaagaagaggattcttcggcatacattagatatccaacaagtgtctgctcaaaccgagtcagtcactactgatgaaattatggatgattatctggttgatcaggtgggggtggtggtgcgtttaggtcggcttggtatgttgtggaggaggtggaggaggaagaagaggaggaggaagaagaactcccactggttcgtcgtgagtggcaatccaaagcttgaagtgatacttccagtcttgctgccctaacgaggatggtgagagtttaggctctagcaatatccgttgtggagtgccaccttgaagaagccgttctagctagaggcgttgctgtgcgaactacctgagatcaatgttgtcaatgttgatgttgttcgttcaaat

SEQ ID NO: 154977 - DNA, 1440 bp, Zea Mays
ggaaccacttctgctgggggtgtgccttcaaacttcttgaggagggcgacatgaaagacgtcatggttccgggccttggccggaagcttcaacctgtaggagacctccccaatgcattgctggatttgataaggaccgtaaaactttggtcccagtttggaatgagctgcagacattacaccaaccgccgaacgttgttgtagccgcagccaaacccagtcccctactgcatattggactgccctgcggttcttgtcgtgtgcgtgcatcatggtaacttgggcctggagcagacggttcttgatctccttcaaaaattcatcccgagccaacagttggtgatctactgcagcgacacaagctgttcccggctgataggacagcagggttggagggtcacgcccatacacaattctgaaaggagtgcacttagcagccgtctggtaggaagaattgtaacaaaactcggcccaaggaagccattgtaaccaagtctttggcctgtcacctgccaagcagcgaagatacatgacaatgaccctattgaccacctctgactgaccatccgtctgtggatggaatgctgagctcaggagaagcttgacgccagcaaggcggaacagttctgtccaaaagagactagtaaagaccgtatcccggtcgcttactatggagcatggaatgccatgaagtcgcacaatctcctcaaagaatgccttggctaccgatgcagctgtgtatgggtgaccaagcggaataaaatgtgcaaacttggagaatctgtctaccacagtgagaattactgatttaccgccaactttgggaaatccttccacaaagtccattgcaatgtcactccaaacttctgacgggactggtagaggctggagcagccctgctggatgtaaatgttcagttttgttcttctggcaaatggtgcagcccttgacaaactccctgacccgacgtgctgcttgagggttgaagaatgatgctcgccaccgatgtaatgttttctcactgccttcatgaccactgttgtgagcatcctaagggcactggccaaactgatgatgctgctggcacaaacacttttccttgaaattggagcagaccatccctaagcgcccacccttccttggcggttcctgctgtgagtttgttgcgtagttccgacacttgagggtcactgtcggcttctgctctcagagtctcaaacaagtgaaactgcggagtggatatgacgttgagagctgcatcttcctcattacgccgagataacgcatctgctgcaccattcaatttgctcggtctgtactcaacagtgatgtcatagccaaacaacttactaacccatgtatgttggggaatggtggatagacgctgatcaagaaggaacttgaggctatagtgatcagtccttactgtgaatggacgccc

SEQ ID NO: 154978 - DNA, 719 bp, Zea Mays
gtgatatatccatcattattctataggtttattagagcaactccaagagattagctaaaaagactagtcaaatgtactgatttagctactctctaaaatcaaattttcagaaaaagtgtaggttaatccaatagactcggtaaacttacagattgaatggagagtgaagcaggttatccaaaaatagagagcgaaggtggaggaatagagagccactaaatttgaagagtcatttacaaaatctattagatatagctaaatttacctttaaaaacccatataactagtctcttgaagttgatcttaatttgacatagtttacgagtcggctcatgagccaaaacaagccgactcagcttgctacatcaacgagcttgaaaatccagttcgactcagcttgtttgagcctcgcgagccgctttgagccaagcagttcgtgagcttccgtttttttttcaagccctaggaggaatgaaagggagagtgaaggcttgaaaaaatatagtacaagtgttttatctggatgttgcaaaaatatactcgaatattgtataatgatgcaacgagtatatagatatagttaagtcgcatcaatccgggcagagtatcgcaaactaaatcagtacccaacagcctttaaaacagatcggagcagctgacctcgccgtcacagtcacaccatggagacggcggcgccgccgcggccgtccccgtccccg

SEQ ID NO: 154979 - DNA, 496 bp, Zea Mays
ttcactggagactctgactccggtgacgacggcgaccgctgcaagaagctgtacgtgatgtacggcgggagctaggagctcacctcccacaggaacatcaagtccctgcgtcgagaggtcctttcggcggtctcgggggtcccaaaggctgctccacatcagcggtggaggagcaccactatctccttcgaggcatccgactgccccgaaaacatggcaggggccggtgtactaccgctcatcaccgcccctgtcatcgccaacatgcggctgcaccatgttctgattgacggaggggccggcctcaacgtcatcagtcatgctgcattcaagcagctgcagatcccagggtcccgaatgggaccctctctcccattctctggagtgggcccacaaccggtgtatccccttgggagcatcacactcccggtaacattcgggaccgaggagaacttccacacggagaacgtccagttcgacgtcgcgaaggttaacc

SEQ ID NO: 154980 - DNA, 697 bp, Zea Mays
ccaagccattgcgctagtgacctctccctcctccgaccgtcgcgcgtcgccgttaaaattcccggccaccgctcgctctccctataaattgaagcccccaccagctccgcaaggtcatcatccaccccgccaccaagaatcgctagcaaccgtgcatccgagagcttgaattccggttttcccccaaatcaagcttctgccacccgaaaccaacctcatcgcggccagccccctttccggtcagttcatccctttctctccctcgtttgagcattcttatagctctgtgatgcttgccgagccaccaatttggactacgggctcaccaatcaccgggaacgcacccaattgtccgccacccattcggttcacgtggacagagcttgatagctcaccaactgtgcaattgacttaggggaaatgctcaaggcagggttgattcggtgtctgcttcttgagagcgccagtcttggctccctccggccggtccaggtgctcgccggagtacgtccctatgcggttcgccgtcgtggacttcgaacggagaaaggatagaagcgcgaggttgtttttgtagatgtcagtgagacgttgaacagtagccagggattcttagcggatatccaaaactgtgagggcttctgtgcaaacctgcctccgcgggcgcgggcgcgggcgcatttctgccctagttggg

SEQ ID NO: 154981 - DNA, 820 bp, Zea Mays
cctcgacggagaaactctgagccagaagcacctctcatcatggaccgtgggcagtgagaggaagagagttcgacgtcgtcgccatcatcggatcgcatctgcaccagcaattcagggtcgggggtagggttgatcgcctggtatcctagaaggcgattggtgtggtggcatgcgtggttggtgaccggtgctgcgccaatcgctcgccgggcttcgttcccgccgtggagtcattgtgcgtcgtggtcagctcttgtcgctgcccatctctggtatggctgtctcccatcgcttcgctttccttcccgtcgtgtctagagtcgttcgtagtggtggagcagtcattggtgcatgagtgtgggtaactccgacggacccgcgttgtcgcggttgtacgccgccgggcgagctctgtttctcgcgcggggtgttccgtcgatggcgtggggcgtatcctccgtcgatctgtgaacgaacgggcgcgattagttcattttactggtgcgagggggacgaagtttggtcgttggatcgtagatgaaggagtgggatcggatctcgcgcgtattaaatctggggccttggatctagatccaacgatccctggcacatacagattcctcgacggcaggatctaatcctggccgcaggacttagatcgtgtggctcgggttatcccatacccccttcagccgttcacttttgtaaaagagcccctgaactactaataaataaacccaccatccatcctaagccaaaacaaattgcagccgagcccagaaaattatgctttcgcccctgcattccgagaaaattatgt

SEQ ID NO: 154982 - DNA, 770 bp, Zea Mays
atcatagtcacacttaaaagagcacggagggcgtaggttgctaacacaagcatagggaaattttagataaagaatggctgtggcaacacgaatctacgaatatgaatattagccagaacatatgtccctgcttatgtgctttatgccgccaatgttcactatgatctttcctcaaacaacttctgctatgatctccaaatatttctctgtcagcactcagtacactacttcactagctctatatggatcatcttaaaattagcatcctaactcttagcacttactagcaacattgaccttctattttttttcttgtaactagcatacctcccagtagacggactgtttggattcatactcctaatttttagttgctatgagcagcatagaggataccaagtagggcatgtttggatccatgttgctaatagctagcaactaaaaattagtagaccaagatccaaataggtgtgctagctaatagaaagaattagcaagatcgatgttgctagcaagtgctaaaagagttatgaatagcacactaattttggcaggatccataaataccctagtacgacctattaactgctaattccttcaactttgtaactcatttaatacaggcaaagctcatccactttcataacagccaaatatgcatttctcctttctaaattttacaaaactttagacaaagttgttgaggtgtgttagcaactacatgccagttgccatacaatgctaccagccgtgcaattcttagatttcag

SEQ ID NO: 154983 - DNA, 385 bp, Zea Mays
tctatagatagatagatagatatagattctggtcaggcaggggacagacacaaaggggtgggcaatgggggccatggctcacctcaattttaataaactcttgtacctagacttagatatacaataaaataaacaaggtcggactagattttgataaactcttggcaccacaacgctacctgcccttgctatctcactggattccaccacgtcgtcgcaacgcgacaattaatatgggtgccgcttgccggcgccggcgcatcgtcacctgcacctcgatccctagtacctatccccgttgtcgcctcaccgtcgctatctcgcagtggactcgccgactcgccacaccaatgtgtcaatgcagccgctctgccctatcgtctcg

SEQ ID NO: 154984 - DNA, 665 bp, Zea Mays
cactttctgcggccttcggaagccgggaaaagaaaagattaaatagggtttttgatgctattggatttgtgtaccctgactatcgctacccaccacgggggcagaaaagaaagggtgtatcctctgaaaaggttgctgcttcggctgctccaagcgagcctgcgccgaagggtaagaaattgaaggtccttacccaccaaccacgctacattgaatcgaccgcagtgccagaatttggcggggagacatcttcagctactgagccgaaggaacctgttcctcccacgcagaagattgaaaagccggctgcagtgccgaaggctccttcgaattggttgattgaaacaaaaactgtcaaagataagactgaaaggtcaaaaattgaaaaaacaacaagtgcgtcagggattctaagtccttcgacagaagcaacaatgctgacagcagagaaaagttttgccataactcccagaaggagaaggatggtgaatgtattggatattttagaaacaccagattccaaatgcccctcttcttcaaagaagactgccgaagctgtcaaaacgcaagacaaagctgatcctaggcaaatagaagccgaagctataacgacccaggatgaaactggggcagggcccaaagtgcctgctgaggcgaagcttgca

SEQ ID NO: 154985 - DNA, 1855 bp, Zea Mays
aaacttcactgtaacctacaaaacctggtttctagcatactgcttgccgacgtggcagccacggtggaccgcattacatacataattactcgtttcttccccatggaagaaccgtagcctcctctgttcaaatcgattccctagcagctctgccccctcccctagatctaacccgcatcgcacccattaatggaacatccacctccatatgtgaccgatgcagtacaagaaaggtgattgcactcagggccaagacaagcggaaactatggacggtacttctacatctgcccgacatacaaggtcatattgggatttaagtgtgtttggactgtaaactcatgtgtggatttgattttttttgattgatttgtatatgtttgcagcgtgatggtagtggttgtgacttctggtactaggaagatgactatgagcaatatttgatggagaatggccatgttctacataatcatctaccaatattcagccaagcagagaagatgattactggtgaagctgatgttttaggaagttgtggaatgaagagggaagatagaaaagcagatggcctgatggttcaaaagctagatttagtagtagggttacttagttaagattgttgtgccactaaaaataatatcagtcttatgtgtgtgcatttttctgattaatctatatgtaaggattgtttgatgtgagttatggtggtaatgaatgaaaagagtactcagattcattaagcatttgtaaacctcatccccagttcacagaagcattattgttgccatttaagttcatataggcaacatacaaaagcattcatgtttagctagcatttttgttgccctctgtagataacacacacaaaagactgatcaagagcatcagtgcatcatacaaaaacattcatgctcaactattatagttaaaggcattcatcggccttgatcaaactgcatacatctacttcaattcttattattcttggtccttgtttctcccttatttgttggtggttttgcaatcctctttcttgttgtgttccttccttctttggttgctgatgtgaggactataggtcttggcacaggaatgtttgctatgatgaatttacattcgacacagcttgtttaggttcctgtgaaagtagttgactaggaccaacctaccaaaaaatagtgattagtttagttgttaaggtgactatgggtggaaagtgcatttggcagtagctgacctgttccatcatttgaagtagcatcgttgagctcatttctatcatcaaattgcaataatggggttcatcaccatcttgtgtcatctggtccattggtggccccttgactgttatcttgggtgacaacttgattgtcatctagcatttcgttgtaatcaggttgttcatcaggttgtgcctcaggatgagcaggttacacctcaagatgattaggttttggactgacacctagcttcttgatggggaagcctttgtcattatggtcgtcccctttacaatagttgcaagtcattttcacaccatgccttgatagagttgggccatactttccaattttttcatgaggctgcttccttctgcatctcttcggccttccaggttttctaacatagataggaggtgagactgtaggggcatcaactttctcccaactggtcatatctttgcatggcatgatgtttgtaccatgctggcatagaattccagtcaaattccactctctacaatcacaagtcttagctgcaaggtctactatatactggtgatctctgtccacaacttggaaaatcacacttccagaaggtaacacatagcacacattcgctagatccgcaaattt

SEQ ID NO: 154986 - DNA, 594 bp, Zea Mays
gccgagcggccaccgtcatattgtacgtcgttcgccgtgatcatgccatgccttgaccatctcaccacctcactgctagccgtaacaactcaccagtgaccgtcgtagctcctcaactagtgatcgccacggtagatcgccgcggtgactcctcccctctctccggtcgccagcgcacctttgtgaaattggacaccaccgtcctcgggtcctataaattgagcgtgccatcagctccgctaggtagtcacgcatccagcgcacccactcgtacctcggattgtgcaccagagagctctaatttgggatttcccccaaatcagtcaaaactccgccgtgtgtgagctcgccgtggccagctctccacaggtccaatcatgccttcctcgttctcgtttcaacatccctgtgtgctgtagatgcttagcagcccgaccaattaaagtagatcacgctagatcaccgggaacacttcggattgtccttgttttgcgttgtcactgtgggcagagagattaggagctagaaccttgcaattgatcgaggggaaatgatcgtcaggggtagaattgtgtgtcagccaagccagagcac

SEQ ID NO: 154987 - DNA, 380 bp, Zea Mays
taaggttatctacaactcttttatatgacttttctacagaaaacatgattcagttcatcaaacatacagcacaactaaaacagtgcgtgcagtccaaaacaacaatcaataaatttcagctcctatataattcaagaatcgccgcgttcgagagacttgaattaccctaacactttactatttattcgagttaagacaatcaaattagaaccaacaagtcgacttgcaaattttattcaagtcatttagtgcactaaaattactacaatcaattaacaacgtattctccacgataatcacccaacaatttgcgttttaaattagacatcacatgagcactactactttttacccgcgaccgtaaccatacacatttagac

SEQ ID NO: 154988 - DNA, 431 bp, Zea Mays
ccaggtgaagttgaccaacggacgcggagccagtggcagttacgagtcatggagcgccattgccaacaataatataagatggactagaaggtgagggtgggtgggaaattgagagaataccagggtggctggccatgtgggatgtggcacccgagtccatgtaccaatcatcgtaaggagctggtggagtgagaggcacagtgctgaaagcaccagtcgaagcattttggtcccaggacccaagaccccccaactgcctgcactagtagggggcaggcgtgggaggtgctggtagtccactagcagacgtcatgtgcaggaccagccttggagcaccagtgatgggccagcccacgggagaggaccaaggagaaggccaaaccctaggagcggcaacggcaaaagctgtcggcggcccaacctagagagac

SEQ ID NO: 154989 - DNA, 372 bp, Zea Mays
attggtgagtccaggccgctggattcaaatcgaagagttcagattagatcacgaaggggtatgggacagggaccgtgggatcacagatcgacggccacgatcaacacacgtgaatcgttattactcttccaatccagcccgtctacgcaatgatcaacggcccataacaatccgccacatgttttaaactacaccgttcactagaaatcaacggcacccaggtcatcacccaccctggcggcaaaaacggcggcgcacgcgttcccccacgacggaggccatggccaggccacaccgttcgccgatctcgggcccgaaacacaaatctgaggtgtgatatacgtaggtaagacataggggaactggatgagg

SEQ ID NO: 154990 - DNA, 653 bp, Zea Mays
ttctcgtcccagtgcggcgggatgctcgccaggatctgctgcttggtcacgcgccgtatcgtgccggccggggccgtcgccgtggcgtggcacgggagcagaaaggctaacgcgagacacacgacaacctgcggcggaacgctgagctgcatctgcatggctgctggtttgggtctcgccactcgcggcgtgtgcctgtgcgctgctctctgcaggtggagctggaagggctctgtgtgttttgtgcttgtgcatggactggcgacctggcgtgtcatttatatagacatatagttagagataccgatggagtggtagagcgtgatgatggtgtaaaggcaacgttgagtggttgacgataccggctccaatgttccattaggagattaggaaagaaagcgagcacaggactttgctaggggatttgttatgctattggggttgaccggcgtgcgacgtgcatcagctggtcgatgaggattatgagccatacacattgatttgaatcgattgaacacaggatcaggctgagcatttcagtgtttgctcttgatgcaacgcagagtatgtcgtgctggtcaacttcacttgaagttgtttatccttcaacttagctaatccaccgatagttcaaattcgatttatcatgtcga

SEQ ID NO: 154991 - DNA, 415 bp, Zea Mays
cacgctaggacgatgactcaccccgtaagcagcctttgacccataccctgggcgctgttacaaccactatggcatgggcggcctctcccttgggggctcgggcatacgaacaacccctcgagcttggcctcgactctatacaggaagtcagcaggcacaaatctactacacagtacgttgtcacgtagatgccatgcagctcttcttcgaatacaagacccggcttccctaaagacgctccctttggtgtataaatagggtcgtggtccctccatggatgggggatcgatcgacatcgacgacatcaacatgcacacgacactcatagacgaacactcgctctcccattctgtcttagatattggcacttgcctcaatcatctctagggacttgaggacttcccctctcctattg

SEQ ID NO: 154992 - DNA, 497 bp, Zea Mays
gtcgtggtttctgaaaccggaggacaataagatttggtttagggtttagggtttagggatgttagcgcagactcactccgaatggtgagctactggggctcgaaggtgaatctgaggcgaaaggcttatactggttcaggccagagctctagttcagacagtgttgacagtggtattacttgaagcgtgttacagttgggtgcttgtggaaagctgcgggatgtctctgtataggggttgtcttgcccttttatagctcaagggtacttgctcttttatagctcaagggtagacgttacaatgagaacttgtattctactggggaggagttcaacctcctccttctagacctcgtagcccctatagtctcgtctactgggtcgcgcttctaggcctcgtagcccctatggagtcgtttgagggtcgtgcgccgccgtacctctggtatggcatcgtgtcccgtccgccttcatataaccactctgatttagacaagg

SEQ ID NO: 154993 - DNA, 755 bp, Zea Mays
caaaataatttgcccaaatcctgtagaattgagccctccttttcctttccatgtgaattaggaaaaccggatctggctgccaatcctgagcaaacatataattcatctccacattattgaaatcattgttcatttgctcccccggttgggcatctgggagcaggatatcctccacttcttggtggtccccttgattaagtgggccatcaacctctagaggcccattcggaggtgcaacacccagagcaaggatagcaggaacattattatgcaccaccagcccaaccaagcccaggtcatccaaaatttgcccattctgcactagagcgccctggttgggaccaatagaactgtctgaagacaagccaaagagatgattactgatttgctgctcgtcaggtggcaagtcctgctgaaactgctgagcaggtggatcattaacaatccactggtcccagtccccctgaatatcatctgcaggttgaacctgaacatcctcccctggcgggaagttaaggtcccatcccgcagcgggcaaaggttggcccagaccaaagaacgcgaggggaagctgccgaccacctttagggaccaccggaactgggtcttcgtcttggggctgaccacccagcaagttttgttgaatgatctcgcattgcacagtccaagaatctccgaggaaaccatctgcttcagaaaatacaatgaactgagggacttcctcaagagatgtgacccgaaccctaagcatagtc

SEQ ID NO: 154994 - DNA, 793 bp, Zea Mays
tttcactcgatctgttggtttgttagacgacgacgttacatgcagatctagctagagtcttattatagttattagaacacactagcaggtagctattttccatgtgcgttatatatacatataactgaccagaccatgcatgtgcgcatggtcaacaacaccaccccacatatatagcatccattcgtttcttcatcttcttgctagcctttaatttccttttaaaagaaacactagcaaagactataacatgtgctcgtctattttcaaaatgcatctggggatacgactacgacctcgagccataagaggtcgacaacaaaagagggtttttccatatatcaatcttcttgttgtgtttccatacatcaacctagcttcttgcgttttttctttcttctcaagaatatcgcaacaatacaaggggttcctgaatagtaaaaagtaagtttcattcctcaatttgttcggtttaatttagactatacccttattttgaattgaggattagagccattattctctaccctttttttatgccaacttctatacatacatcaaagcaattagtgtttaattaacattgggatctgaacattcgcatactaatggttatttttgattcaacaattcatctctactaccaatgcagtcgcatggcaaatgcagataaaaaaccggatggagcgaggcaaatgtggagttgacgtgaaaaaagagcagagatgatgaatatatagagtgcggtccatgcatgcatcatcgactgtcaggcaatttctgatccattgag

SEQ ID NO: 154995 - DNA, 558 bp, Zea Mays
cggcggtgaggtcaccggagttaaggcagacgtgagctagggtggctctggggtcgccggagttgggcacagaggaagagggtgccacgacgaactcgatggcggggaaagggccatgaatccacgggcagagaggggagaacagcggtgagaaagccttgggcgggccggagcaactccagtgagccattccggccacggggaggggtcctaaggcgcgctaaggcctgggctagctttagcagaggcaggggtgacacagggacctactccagggaactagaccgggctaaattggccggccaccgcgcgagcacggcggactaccgcgtccgagcaccggtgaaggcgaaattggccgagcacagggcgcaataagggaaattgggcacggggacgggtgtctcaccttggggcggagctcagggaggcttggagcggtctctagcgagctggatggccgggaacgcgggcgcgggtctcaagcggcgactggcggtgtgggcagagcgcgagagagggcgaagctgtgtgaaatgaggtgagggggtgtgtgcg

SEQ ID NO: 154996 - DNA, 938 bp, Zea Mays
ttgtatgtgtgggtatgtgtggttttgctgaaggagtgtgttgttgctgcagatggcgcatgccgaagacgtcgaggaccttgggggtctagacggggcgccacccgaggccgcggaggtcgatccggtgccgccatctgatgccggcgagggcccctcggcgacccccgcgtcgactgcagccggcgaagactccgcactagcccctgcgccgacgtgtgaggacgcctcaaagacggtggtcgaggcagctaccgaagaccccgcgacggcggccgagccttcgcaggtggcgggataggggttagggattgtatgtgaattttttgcctgtgtgatactaaacctcggttgctgcgcaggttccgacgtttgggcctgcgcaagcaaccactactgacaataccgattttgcggcggagactccaattgtagtgtccgccgatgataatgtgcctggctctgtgtctgagtgttttgagtccgacggtgagtctgggagttcgtttccttggacggaggagtcctcggacgaaggcttagattattttgttgcgttagatgtggctgcagcggagccttcgctgcgcgtggtgggttccgaggggctcccaggtgcgagtactatgtataggcggcgaagggcggtggcgaaatggagagtgagtgaatttccgcgaagtggtaggcgtcatcgtagtgagatggagagtggtcgtcttcgcgtggacgggactagtaaacgggaattgttgtcctcgccgattggggcgagtgtaggtgaggggagctacgaaatctttttgagggtgaggaattgaggataatgttgttcaactacagggagatgggtatcatcccgaaggttgagccaatgtaatatatgatgccctcgctgtgtgtatgtaaccgtaatttgtatgataaggctgcgcgct

SEQ ID NO: 154997 - DNA, 545 bp, Zea Mays
ggatagaagaaagaggttgtgctcgattgatgagtgtaagggaatgtgcgaactacatcacctaccaactatgccgtacttagcgacatgaactcacgtattagctattgcatgacaacatgttcaccactatgacacttacgaagcgtgtaccacttacgaatcaacaaatgcgacaagatagtagtagataagtctatgcaagatggggcccaccattctcgaataaatataacgctccacttccttatgctataaagggaggggaaaacaatattggaagcggttagggggactaaatgacttttgggttttctaagttgacctcttttaggctgaatttttccacttgttttttcacacccccatacatctatacatgaatacatccaccatatagaggatgtagagtattgtgctcatatagtacaaacctaattatatgtgttctatctatcatgatatgtgccttaatctaacttgagccatacttacgctcatttcttattattatttcgatttgttctattgttattggtaccttg

SEQ ID NO: 154998 - DNA, 637 bp, Zea Mays
cgcgagcaccggccgggccgttttggttcagcgcgcggatctgggaggtaggaggaggcgcgcgcaccaggtggagatctccatggcgctgatggcttggtttgtgcggatatgtgatgcggcgaggggagtaacgcaccagccgaggggatagatgtgggctcggagtttgttgccgggaatagcggaggcagcccaggatctcggcaatgctggtgtggttctgttgcgagttcaacggtgaccgaaggatggggattccgttggccgagcctgcgcgctgattgagggatgggcggactcagtcaagcaggatggggaagaagatgagcccgaccgagggggcccacacggcggtgtccagctgagatggtgaataatggggaggaggcagctgacgtgctgggcccaatagtcattcacaggcgaggagacaagaaggctcgccagtgggccggttggtggccaagttgggctggctgaggaggaaaatggcccaagcgcgctggttcattctcttttatttatttatttatttattttctatcttgggatttcaaatttaaactcctccctaaatttaaatatcgagaatttgaattccattttatgttggggatttcacacagtaattgag

SEQ ID NO: 154999 - DNA, 481 bp, Zea Mays
tttgggtgcaaggaacatgttctattctgtgaaatacctaggggaccatatttggttgattcctgtcaaactctgggcacatttgtctccattcctttcatgtatgccatgggagatcttgactttacaagtatgccagtcatgctgacactcctgcttgtcattgtacacttaatatctgtttgactatctgtagttggcatcagtgcttacaatcataagctttgagtgaacatgcgtgctgggaaggaatgctgatatgcttagctgtgcatgagtattgctgttgcaagctttagatatgcagtgttgtagtctttagtgcatgtattttctagaatagcaacacttctatattgcagaatgcaatctgatagtttatataggaacaaataaagttgattgctctttggcattatagtacagcaagtgcaacaccttgcgaagtaattttctacctcattgacatttataggctggc

SEQ ID NO: 155000 - DNA, 877 bp, Zea Mays
ctgatctttgcattgctctggtttgcatgctacagagggtgcaagtgagaaggagatgtcgagggagaggagaattgctactcaatgctccattttttcctgccttgttcgtgtttagccaccccctattatagcccaagggttggccttctataaagatatgagaggcctgaagtagggcgggacatgttatatacgagagggagttcttctgacatagctccactgacgtcgcctcctgacacacgcgtaagcgcacttccggtatggagggttgctccgtcctgtcctatacatggattactgtagagactccggtgctaaggcttcccatagcggagcttggttggtcccacagtgcagagtcaggggacgttaagggacgtggatgatgacacctcgtctcgttgatggagactccccttcactcgcctgacatgtcgtggcgttagtcaagatatttggtggcaacatgccttatcgtggttggcgtgggtcagcaattcacactagaacatagtcatgacataggtctctcacacaatcacactagaatcactgatgtaagcatcttatacccattgatcttgtgtgtgcctcatgttttgcttgtgaaagaggtttcatcaatggatctgcaacatttgaattcgtgtgcaccttgaaaatcttcacatcacctcattctatgatctctcgaatgagatgatagcgacgtagtatatgtttggtcttttggtgtgatctaggctccttttcctgtgcaatggatccactattatcacaatagagatccactagactggacgcactagcaataacacctaactcagaaacaaaatttatgatccaaacaacctcttttgtagcttctgaa

SEQ ID NO: 155001 - DNA, 419 bp, Zea Mays
ccggaagctgctagacgctggcttcatcgaagaggttcatcacccagtgtggctggccaacccagtcaccgtccctaaggcgaatgggaagcttcgaatgtgcatcgactacacgagcctgaataaggcctgtcccaaggacccgtatccacttccacgtatagatcaaatcgtggattctacctctgggtgcgacctattgtcattcttagatgcttactctggtttccatcaaatccagatgtctagggaagataggaagcataccgcttttgtaacagtggacaggctttactgctatgttgttatgccttacggtctgaaaaacgccttgccaacatttgtgcgggcgatgagtaagactttcgaggacctaattagggacaaagtggaagtctacgtcgatgacatcatggtca

SEQ ID NO: 155002 - DNA, 432 bp, Zea Mays
caggtattgtgaaaacagaaatggcccaagattgcatggtagcatttaatgttgtgtgcagttgtattagcaccagagatttggtccaagagcatatagcttttaaagtttggccccttatcgatgaatgggaaataccgaaggaggttgatgacggttcaagccaaagtgctgaaaaggtggtttggtatatctaaaatatacatatcgatacagaaattattttggtgaacttgatgactaatggcttgaagctattgaggcaacttgtgatgaaatgttggaggtttatacgaaggcagaagatgaagctatgaataccgcttttggtgcccgaggaaagaaaaggttgaacaaggagtttgatattattggttttatttaccctaactactgctttcctgcccgaaggaaaggtgaaaagaggaaaag

SEQ ID NO: 155003 - DNA, 512 bp, Zea Mays
tgatattgtagtaaaatcgactgagtttagttctcatttagctgatttgcgcaaagcctttgataagatgcgtcggtatggtttgaaaatgaacccacataaatatacttttggagtgtcggttggtaagtttttatgatttgtcatccatgaacatggtatagagatagaccctgaccgaatcaagtctatttggaatgtgggacctccgacctgtaaggtcgaagtgcagaagtttctcggcaaagtaaattatttacgaaggtttatttctaacctagccgggaagattgacgccttcacccctatccttcggcttaagaatgatgccgaattcgcttgggggcagagcagcaggaagcatttgatctcattaaaaaatacttgtcttcagctcccgtattaaaagcaccacaagcaggagtaccattccgattatacattgcagctgaagataaggtcattggggctgttctgacacaagaaactgaaggaaaggagcatgtggtgac

SEQ ID NO: 155004 - DNA, 300 bp, Zea Mays
cgatccggtagatgagtgttgccctgtacgggcaacctaccttttcatattaaccattgtgtgaatgtctccagatcccagtcgccgaccatctgatctttttctggtctggcagggatggaccattgcatgcatgcatgatcttgtacagatggtgcgggatctgcatgcaatctgttgtgaaacatcacctcttcgccaaaagagatctcatttattcaagcactagattagtggttaggattaggtagtcagatttacccctagaaggtatgcccttttagaactgttatatgtttg

SEQ ID NO: 155005 - DNA, 1035 bp, Zea Mays
tcgagattcagactgggcttgagaaaaggtaagggtattccctcctcaaagagtcctcactctcccagtcagcttcctcttctccttctctgctccactgaactttacagagtctcacttctgagtttcaggtctttcggatggctgagtcaagaatcttcactggcttttctcagtactgcagatccttctgaatctgaattgcctcttctttgatgtgacttcctagcactttcaggcatttgcggagttgggatacgtgaaacacattgtggatatctgacatggattgtggcaattcgaggcggtaggctgcgggtcttattctgccaatgataggataggggccaacgaatcacggagctagcttccctttcacttgaaatcttttgactccgcacattggggatactttgaggtagacgaagtctccttccttgaacctgagttctctccgcttgttgtctgcgtaactcttctgtcgactctgagcttcgagtagtcttttgcggactagggcaactttctcttctgcctccttaataaaagaaggcccttctagtgtcttttcccctacgttggaccacatcagaggggtctggcaccttcgtccatacaaggcttcaaacggtgacatcttgatactggcctgatagctgttgttatatgagaactctgcatacggtaaactggactcccaattcctgtcaaaagtcaacacacaagctctcgacaaatcctcgaggactttgttgaccctttctgttgaagttctgggatctggagttttagttctgccaattcggtgggagccatgttgtatggtctttttgcgattggtgcggtgccgggaattagatcaatgtagaactctacttctctttctggcggcattcctggcaattcttctggaaacacatccctgaattcttctactacagatatgctttctgctgctaggttaaacaccattggatcttaggcgggtggctgagcctgacatgaaaccgacttccttggtggtcagtgagaaga

SEQ ID NO: 155006 - DNA, 303 bp, Zea Mays
taggagctaggcatgctccaggaagatattccacatcaccagagttatgaaaacaattacttagcgcgtcacccatatccatctatgcagttcaaacttggaatataatacactatcttatacagacaccaacatcgttctcttatcacctctctctaggtcttatctctttactctcggttatgatgcttgtttctataacctctattaccaagggcatcttttttgatcttctattcgcttggtttattgcagtcatatcatttcacccttagttcttgcagcatattatttttatgctca

SEQ ID NO: 155007 - DNA, 685 bp, Zea Mays
gttgaagttgcaacagttatatctctccttgggagctataaatagaatcccaatcagctattaaagaaatatgagagttgaggaacatatcaagggagttgaggctcatctttagtagctatagacatcctagtgctcaaagaattgctcggtgattagcgtaggtgcattgtgatgtgtttaggttacaccaccactcatagggtttatgtgaggttaggatacctcttatcccattttagttgtactagaggggtttgtagtcttatgcgatcacatcaactatgtttgtggtgtggctaccatcgtgtactagaggggatgaggcccacgatgtttcgatcaaaaactcgatagtgaagaccacggcgagtgctccaagcgatgctattctagagacccacttatgtgtggggaaggtatggagttatccatggagttacccaaccaagagtttggtcctaatgtgggcatcattgcaaggggttctaacgaggattagggagatgctttcatgcttctcgataccctagtaaatatatgagagtcatcgatgggagtttgtatctctattgcctttcaacttctacatttatattatgtatcttggttgtgtgccttaccttcctaacttagttgatcgactagttgatgggtctagatcctaggttccataactctttgt

SEQ ID NO: 155008 - DNA, 331 bp, Zea Mays
acgacgcggtagttcacggtgtgcggaaaaccaatttggggaaaagaagaaattggagctctctggtggctaatcggaggtaggagtgggtgctctggcttcgtgattacctaacggagctgatggcactcttagtttatagggcccgagggcggtggctcttgaaattggaatggcgcgctggtggccggagagaggggagagccctggcgcaagatatgcgtgcctttcactgtggcaggcttaccggcgacgaaccagctatctaaagcggcttactacgacgtggtaaagcttcaaggcacgtggccatcgcgcggcaggcggccaa

SEQ ID NO: 155009 - DNA, 761 bp, Zea Mays
gatcagggcattgctgatgcctttcggctgcctcgccggtcgggccaaattgggaggacagggagcttcaccgacacccacctcgtgtttgcgtgacctttcggggtggggaatggcgggactcgttgggaattcgtcgccaaacctggtggcgccgccgcggagccacctataccgtgggcggggtacgtaggcgtcctatatccatgtaaaagtcccctggcactttcgattcgtactccatgcgatgttgcagcattcggatttgagcttggggccctggcgcgcaatgtggacaacatcggccatggcgccaccgtccctgctcgagggccaccatgcgtggccgggttacgtggggaaggaacccccggcgccgttggtcgattgatggacggctcggatttcctcaggggtaccgctttggtagaattgaaatcgcgaccgttcgattctgatcctgcgtgggtgaaacattggcgctgttttgaaatagtgaccgtccgatcggaatcggacagtctaggctgcgtaccggttcagagttgtaaaaatctaatctggagtgtatccttttaatccaacggctctggttgttccttacctcttcgccgttggctttttgcttaagagccccttgggttatggggaatcaacccgccatcctgtgtggagttctctgtgtctgggggatttcacgtgttagcccccgagttttcgaaaaatagtggccgccgtccagagtctgggaatttcaggaa

SEQ ID NO: 155010 - DNA, 653 bp, Zea Mays
gcctcaacgagttctatgatcacctccaaacttggatcactcactcggtcccattcatatccttctataaggtccataatggcctcatccttgaggggctcacaaagtgggcatctcattgctttgatgctgctactactctctatagattcacctcctagggctatcccacacactcactctcctccactcttgcctttaagggtttatcattgcactcgtctattccttcgatgtttggctccacgtgcactccctccgagatcaagccctaaggggtacgcgatccagtggtgatggccaccgtcgtggaacgatggtcatgggggtggggtgtacatggggacgctccttggtcctctctctacaacccatggaccagttgcatcatgtggcttggccgattcctaggtggacattcctcatgcttgtctcaacctcagctggcttacttgatgatgcatgaccaaggatatcctcttggaccacttccctctgtgccacaagcacctcaactaccgctaccacccccgccacccactttgtcacttgctagcttgtttagcatggtgaccctaaccccctgttgttactaactgggttgctacttttggtgcttcctatcacaccactctagatgctgatatactttc

SEQ ID NO: 155011 - DNA, 875 bp, Zea Mays
aaagaattctgacttgggagcatttgagctggcatagaaggtctgaccctggggttcgggtgaccatgggaatttctagatgggtagaggggatgccatgcttttccacaaaaccaatggctataaaagaatgggatgctcctgaatcaaaaggtacagtagcgggagtaaattcaacaaggaactcaccgagcactactcccggagcttgctgagcctcctgagcatcgacgtggttcactcgtgcccttccctgataatgggtcttgttctgctggctgatggaggagggtgccttgggggtgggtgctaaggtattcttggggccattcaccgagttggagtaagcaggtcctgatgccttcaactaggggtagttgttcttgaagtgactggggtctccgcagtgccaacaagaatttgttggcggttggttgcttgcaaccgagggggcctgaaaggagctctgactctgctagctgaaacgtgatagagtgggtacagctggtctattgaagcttggtcccttgggtggaaacccaaaggatccagttctctggtgtcggtcttgctgctgagctcggaggacttggaatttcctcttgaggtgacatttttcttcttcccttgccctttccacttgtatagctttgtttgagaggtgcgagaagctgaggaaatcttggctagctaggatggtcttgagttctggtctgagccccttcaaaaagtgggccatcttcttggcttctgtgctgacgtcatcaggcgcgtagcgagccaattctgtgaatttgtgcacgtattcactgacagatcttccaccttgagttagttccagaaattcatcttccttgagctgaacgttcccttgg

SEQ ID NO: 155012 - DNA, 345 bp, Zea Mays
cactcgtggtccgtcacatcccatgcatgttttgaatgtattgaagacccactcgaatgtatcaactgtctcgtctcctagtaaagcaaacccaaatattgtgcattgtaggtggtggttcgagccaacaaacatgcctaatggcttatcatacatattagtcttatgtgtagtatcaaaggtaactgcatcaccaaaatcaatgtactcggcttgctggctagcatgggaccaaaatatgcttaaaatcttcccttctttgtccagttgaaagtcagaaaaaaattgtggattatctttcttgcataatgaaaaaaagataatagcttcgacacatcatttgca

SEQ ID NO: 155013 - DNA, 790 bp, Zea Mays
cggcaggaggcggcattgcaggtggcaccaaagccatcaaagccaaggagatggagccacagcacggctcgcttcccgccccaaagagttgggggccacgagggatagagccgtggctcagcctgctgttcacctccacgaggctggtaatcatccttcccccccgaatgctggaggaagaagcgggaaggagtgtcgcctccacggacatcccgcggaggtagacaatgatggccgcctaaaagatgaagcaggacgccatgggtggagatcggaagccaagcccctccagcagctgcacgaagaaagatgggatcggcagagccaacccgctgaggaatttgagaacacagactcttcggcggagaggtcgctgagaggagggacaccagcacaagtcctcccggcaaataccgggacatcccattcaagcaggcggtataccatttcgagcacttactcagtcccagctcgctcgggatgaagtcacaaggccatggtaaactatggcgacacaaagcagaaaccttgaaggcaaaggggcgcagaaagctcgaaggcaaaagggcaccacgagtgggagagaagcaagacatggctgctatctgaggggtgaacccctttttaaaggcagatttcccggctcgcgccccaaagcgtcacgggcaaggtctcccccgatgcgcaccagggttcccatcctatgacatgggggccaggccccacatgtcatacaagctggcccgaagcgcgaagaaggcgaatcgtcgcacagggagcgtgcaaccgc

SEQ ID NO: 155014 - DNA, 667 bp, Zea Mays
ccttggggagcgccttggtaccggaggttgaggggttcttccctccatcgtccaggcgagcagtctctgccgccagggtgtgcagcttctctacggccgcaagtgcggtggcacggtcaccccacatggtgaggaccccagtcggggatggcatcttgaggaccaaatacccgtaataggcaatggccatgaaccggcacagggccggcctgccaatgatggtgttaaaggggaggttgacctccgcgacatcgaacatgacgttctccgtgcggaagttctcctcggtctcgaatgtaaccgggagtgcgatgctcccaaggggatacaccggctaagggcccactccagagaatgggcgtgagggtcccagacgggaccccgggatttgcagctgcttgaacgcaacatggctgatgacgttgaggcctgccccgccgtcaatcaacacatggtgcagccgcatgttggcgatgataggggcggtgatgagtggcagtatgctggcccctgccatgttgtcggggcagtcggatgccccgaaggagatggtggtgcttctccatcgttgatgtgagtagccttctggacccctggagttgccgacaggacctcacgacgcagggacttgacgttcctgcgggaggtgagttcccagctcccaccg

SEQ ID NO: 155015 - DNA, 559 bp, Zea Mays
cctagcctccctgtgcccgctccgccatagtggagcagtcccaccgcacctgtttgtccctcttcctccctctcctcgcgaccagccaagcatcaccctctctctttatttgttacggccattgatagagtttaaacggctgccgttttccgaatgattaatgtagcgcttaaccattcatcaaaggagcattaatctagacttaaatctctccctttcctctctataaaacccacacagagccctctccctgctcaattctctccatgccgcactgctgagtactctgctccgtgccagcgccccaacttccgtgcccacgccgacactgctcacactggtacgctacagctcagctccgccgtgtccaagcctcaacgtcgcgtagccgcctcgccatttactgctctgctcgtgcgccactgctcgccgtggacgtcgtcagtccctgatcaccggagtctgtcgtttgccgacgctgcgctcatgctcatgtgctgcgccgtcaaagtttgtcggtcctcgacaccaccgttcttcttcccagtgtcacctcggt

SEQ ID NO: 155016 - DNA, 864 bp, Zea Mays
gcgcacccgcgctagctattttgcaccagggaccctgactgttcgaatatctgatgaagagtccctagttactattcactgtctcactgacaagtgcaccgagccccttctttcttatctttgcaaacttgggtccccgacgatggacgacggcgtgcgtactccagcgaactcacaccggccatgatacacaataatcagtgccctaatatggtctatgcctaattcagaccttggcgactaactgggaatcactcactaatttaacctgaatgctgctctaaagcttggtctacatgcacccgcggagatggagtctttcccatcgtgttcctgacgatatagtaaaacaacatccaaattaagggcacagtaagctttagcgacgttccagagctcaagaacgacatctaggaaggcggttgaagggacaagacagtgggtcgacggaggggtgctcacggcggtgcggaaaacggaatttgggggaagtttgaaattcgcgagctacagtgactaatcggaggcaagagctagtgttctgagctcgtaataagttggcgaagcaggccgaggcatcaatttatagcagatcaaagcggtggctccgaatttggaaggagagcggagcacggctgtgacaagacattgtactggcgggtccgtcgtggcgctcaacggcatacaaacgcagggacagtaattctgagcgtgccacggttacgactacatggtaaaggatctcagcgtggcgcaattgagctcaccggcgacccacgatgacattggtcgttcggccacgtcgcacggtcatgagatgcatccgataagcccctgcccgcgaccgaatccatcccctgccag

SEQ ID NO: 155017 - DNA, 640 bp, Zea Mays
ctgttgcagcagaggaagggtgagtgcaggggccatcctcagccaccaaggaggttcttagccatgggagacagcaagagagggcgctggtgtctagggcaccatggaaaaactaggctagggtttgagggagggcgagctcaccatggtgaagctgcaggcgaccataggaaggggtggagcagtgagaggcgactggaggtgagggcgccatggcaggcctgctgtagggggggcgtagaggtgcagcagggaggggcggccatgggagattgggcgagctccagggcagggaggagagggcgctgaacagggacgcatgtgggacagagagcagggcgcggcgacaagcgccatggctgagggcagggagaagacgccggcagaggagggagatgagggagggagaggagcgcgtgtgagggagccgctcggctgggcacgctggtgacgatgaagatggcgaccagagattttgccctgctgcccgagcggatgaggctggcacacgcggtgggagaagatttttcttttagagatttttttactgtgcgagatgacgaggatcggctggatatttcccctctcccatttctttacacaacttgctttcaatcctaatcacactggtctggtctat

SEQ ID NO: 155018 - DNA, 1857 bp, Zea Mays
attgaggtgcctataatcaacacaaaatctgtacgtgctgtcctttttcttgactaggatgaccggagaagaaaattcactttggctcctttgtatgatgcctgaggacaacatttcctccacctgttgttctatttcggtcttgagtgctggcgcataccgataaggcctgatgtggaacgggtgggctccaggcaacaactgaatgtgatgatcacaatcacgctgtggaggcaagccagtgggcaaggcaaataccgactgaaatttctggactagtgactgcagctcgactgacaatccagcaattatcgactggtccttctccggcaggtcctgtaactgacacagctcaataacagaacactgacccttcgatgactgtaatccatacagcttgagacaggttttctcataaggaataacaagccacttgtcagcccagtgtaccaacatagggctaaacatttccaaccaatccatgcctataatcaagtcatatgtttgtaatggtaacacccgcaggttggacttaaactcataacctgaaagcgaccacgcagctcccaacaactcctgtgtacaagagagtagagaaccatttgccactcttactgacagtgctttgggcaacatagagagacctgtcacatgatcagccacctgtgtactcaagaaggaatgtgagctgcccgaatccaacaggaccaacaaatccattccctgaatgtgtccaacaaactgcatggttttaggagcagccttgccactaacagcagcttgggacaaccatagggcatttatctcttctgacgaattgtcctcctctgttacctgcccttgcaatatttgccacagctcttcaaccacatgaagctgcacattatcagcacacctgtgaccccgtatataaggaagaccacacttgtagcacagtcctttcgcctttcgataggctatcagagatgccaatttatcatcagtagaacccatcttggacacaccaatatttgatgcactatcaggcttggactgctgagatgtcttgggaggcggtggcagcggcagaggtgattttggatatattttggaaggatatgacccatcatactttttagaatcacgcctcttgtcgccgacttcttcctgcaattgagccaaaaccacagcagtatccaaatctcttggtcgttgcaccataactactgatctaacatcctccctaagaccatccataaatctcattgtgtaatatagtgggtcagcatgtggactataggcatgtaactgatctataagctgagtaaatcgttctgcataatcagtgacagtagtggtttgttgtatgtgaaataattgtcgaataaggactgcatgctgatctttgccgaagcgatcaacaaccatgtggccaaattccacccaagagattcgactcaactggcattctactgactgaagccagcgtgccgcagcccccgtgaaatgcatcgtagagattttgatccaaacacgagggtcgaccgagtacatggtaaagtaatcgtgacaccttcgctgccacaacttcggattgtcaccgtcaaaccccggaaatgggaccttgggaaggttgcccaaaccatgaacgaattggtcacgtgtgctatccccaaaaccatctggtggaaaggactgcaccatgggaacaaaaggaggaggaggaccatcaaacataccattgttcgggagtggaccttgggtataggcatacccatggccacccccccgacgataaggttcggtgcggtgccctcgcgggccttcgacgttgaacgtaggagcaggtgggcgcccccctgtcgttgcgtatggacc

SEQ ID NO: 155019 - DNA, 831 bp, Zea Mays
cggctgtataactgatgaggaagaacttaaaaaccatataacaaggtattacaaaaacctctttgggaagcctgacatatcatcgaccaaacttaatgaatctattatccaagacattcctcaagtctcggatgtagagaatgaaattctaaccgctgagtttactatagaggaagttaaaaaggtggtatttagtatggagcataataaagctcctggaccggatggctttccagcagagttttatcaagttttctgggaagttattaaggatgatctatttgcgttgtttgtggactttcatcaaaattcccttccggttcacagtttaaattttggagtaattactctaattccaaagaaggataacgcaaataaaatccaggattatagactatttgcttgcttaatgtttcgttcaaaatcataactaaagttctcacaaatagaataggtctagtggctgacaaaatagtaagcccctctcagacagcctttatgcccggtcggaatattcttgaaggggttattattctccatgaatcaattcatgaattacagaggaaaaaattagatggagttattcttaaattagactttgagaaggcctatgataaagtcaaatgggagtttctccggcaagcgttgcgtatgaagggtttctccccttcctggtgtgcttggatccatacaatagtctcaggaggccatgttagagttaaagtgaacgatggacgaggtccatttttcagtactttcaagggccttcgtcaaggggaccctttatcgccaatattattcaatattgttgtagatatgttagcaattcta

SEQ ID NO: 155020 - DNA, 623 bp, Zea Mays
ttttctgtgactttaatgaagtcatcccaaacagcagatcgacgcttaccagtgcttgaagaagtcaatgaatcaagttcattagagccagcagcatcactaaccggcccgacaggtgccccctcagggtcgacgatagtatgactgctaccgacaccgaacaaggcagcaacaacatctcccatgttgtcgacgtcatcgggaagctgccctaactcaacgagctcgtcgttgatggttctagggtaccgaccgttgttgtcatcgtcatccatgtcccccttctcggcaccgtacctcaatggccctggtggcactagcacgaccacgacgtagtcggccggcgacctaccaaagcccacaagcaagcagcgaagaggagattagggttagggttagggattgccgactggggagggagagccggagagggacgtacctgccaagccggagcctggagtcggagacgagagtcgagtgcacgacgacacgcgacgagccgacaactgacgatgacgtgattagggttagggatttccggattggggagggaccgagggagagccgaagaggggcgagccacatggaaggagagtaggagactcgccgatgtcgccggtgac

SEQ ID NO: 155021 - DNA, 741 bp, Zea Mays
ggaacagagggtatgaacggacatgtagcgcgctggccactgcgagctcactcagtacggtgttccggaccgatttgggggaagtctcaaattggggcgcactggtggatgatctggggcacgtgttggtgtattgggtgcgtgactacctagcggagtcgatggcacgctcaatttataggactcaagggcggtggcccgtgaatttgagatggcgcggtggcgaccggagagaggggagagcactgacgcaaggaattggtggctttaccgtggcgaggtcaccggcgaccaacggacttgcttaatacgagttactgcgacgtggtagagcacctaggcacgtggcacgcggtcgataggcggccacctccggcgagcttatctgaactgaccgtgagttaggcggacacggcggccggggctgaacagtggcctaagttcatcctcaatgcgatatttcctaccccgagcagttattagtactccattgagcacgaatcacggcgcctagcgcaaacccgagcatagggtcctcggcggcgaggttcactgaaccagcagatctttttgctactgtaccatcaagaactgctttagtcgttctgacagagccttttgtagcacgatttgcttcaaattttatgtagtgacttgaccagctctctgtatcaaagttgtagctctacaaaccagctacaaatcgactatagagacctgactcatttacccactcctttg

SEQ ID NO: 155022 - DNA, 601 bp, Zea Mays
gagagccctggcatagattggtgacaagagggttcaagtcattaagaaaatgctcgaacaaaaggtggataagtacaaatgtttttgttaggacaacaagggagttctatggtttgaagaccgatcggttgttcctaaaaacctagaactcaggaagaaaatattggacgaagctcatctctcaaaattttccatgcaccccggcagtagcaagatgtatcatgacctcagatccttgtattggtggaccagaatgaagagagaaattgctaagtatgtatctgagtgcgacacttgccaaagaatcaaagctagtcatttgaaggtagcaggtaccttacaacctctccccataccatcttggaaatgggaggaactcagcatggatttcattgtgggtttgcccaacacctcccaacgccacgattctaattgggtcatggtggatatgctaaccaagacaactcatttcttgccagtgcataccacccacagagcagaaaagtatgcagaaatatatattaaccaaatagtgcatttgcatggaataccaaggactatagtgtcagacagaggagcaccgttcgtagcacgtttctgg

SEQ ID NO: 155023 - DNA, 700 bp, Zea Mays
ggggtataatctggtgccccatactgtcacacttcggcatcagaaggccatcgatcgcaagtgggaatgaagtgcaagcatgcttaatggcctttaacacaatatgtacatacattggcaccagggatttagttcaagagcatattgcctataaggtatggcttcttgttaatgactgggagatgccgaaggagaccgctgttgggttcagcgaatgttgtctggtgtaccttagatacacctaccactataggagtcaatttgatgagccgaatgatgattagcttgaggctgtcgaggctaccagcggcgaactgttaggagcttatacgaaggcagaggacgaagctatgaccactgcattcggcgctcgtgacaagaggaggctaaacatggtctttgatgtggttggattttttatcctgagtactactttcctaaaccctaaatggcaacttcatcttgttcctctgtgcctaagccaaagaagtttaaggttttaactcgcaggtcgagtccacattctttagaggacggttgcagtgcttggtacagagaagagagagattgttgaacaggtcgaagctaccgccttggcttcagagacaattcctgatgtgatagtggaagctaatgttgatccaaaagaagagatggaatcaaagagttcattgacagaagcgcatccaaatctgcagag

SEQ ID NO: 155024 - DNA, 541 bp, Zea Mays
gacggagctgaccacgatagacaatggcttggcggcggagttcaaaacccggcgagcaattggtgcatcaatggtggatctcctcgcctagaaaggtcttgacaacgtgcggataatactagtggtcctccaataccgcctaccgaggacccgacgttgccatctgcacgaatcaaccacggcggcacgatttgtcctttcggtgcgctcactgcttcacgacggcaactacttctgcgactggcccgatcactgaggcgcgggagggcttggtctccatttatctactagcacgagggaaactcggcatatggttggaacggcccgcgacatgcgcgcggagatccccggagtccgctgaacatgcaagcgcgaggggaagagacgagcctgaccgtcgaggcctgcgtgccgttcagacggcaccgcgcacaagaagtgaccgactcccgggcccatgtgtcatccacccggggaaaaaaggggtgagctttggtgggctagggtgcggattaaaggcagaaatgggcttttattttct

SEQ ID NO: 155025 - DNA, 449 bp, Zea Mays
aaagcacatatgttttatattgttcttttgcaggctgctgcttcaataatgcggaaggttgatcgacccccaaccaatccgaagcgtttaatcattgagtcaagtcaagaatgtttcagtgttgacattccgcgctcgactgacatggcagaccctacaaatacgcggtctgatggtgatcctccatagcatagaaagaggggtgttgcagctgatgctaaaaacattgctatgcctaatgtggatgatgatgatgactttgagccaccaaaaaagaagtgcaatatctcaatggatgccccaaataagacacaggtgagtttacaacattgcagaaattaattgtttccaatattgtaatcatgcatctaatctcaatacataccttatgtgctgaaagatatagctttctacattaccttagctcattaatccaaaatagtcatagt

SEQ ID NO: 155026 - DNA, 676 bp, Zea Mays
tgcactggcaagaaatgagctgtcttggtcaatctatccacgatgacccaaatagaatcgtggtgtcgggaggtattgggcaatcccataatgaaatccatgcaaatatcctcccatttccacgaaggtatgggaaggcgctgtaaggtgcctgccaccttcaaatgactggccttgactctttggcaagtgtcgcattccgatatatacttagcaatttccctcttcattcgggtccactagtacaaggatctgagatcatggtacatcttgttactgcctgggtgcatggagaatttggaaaggtgagcttcatctattattttctttctgagctcggggttcttgggaacaaccaatcggtctccaaaccatagaattcctttgctgtcctgacggaaacatttgtatttgtccaccttctgttcgatcatttccttaatgacttgaacacccttgtcaccaatctgtgccctgactatttgctcatgtaaggtgggctccactgaaatataacttaaagcaccggaggaaacaacctctatgttcagcttgcacaactcatcacacagggtggtgatttttgcatccataatcacacagttgcactgggccttccgacttaaggcatctgccacaacattggctttgccaggatggtaatgcacttccaaat

SEQ ID NO: 155027 - DNA, 839 bp, Zea Mays
ctcgaaaccctaactcgcctgttcgacttccctcctagctccccttcccaccagcccctcgtcggctatcactccggtaccggcgactacccccttgatttccacctcctcggcgtctgcgtcctggccgtcccagtggttgagctcccaggatgggcggtccaaggcccagcgctggcgcgacgactcttcagctggaggttccattccatcttctcgatcctttaaagatgcactcctctccagctcggtttgcgtcgctggtctctctcccttggcaagccatgtctccccctccccttctgcgttagctgcttctgctttccccgccaaggtgtcgactggtgcggcccttctggttgaagaaatgggctggcaggtggtttagcgtagacagaggacccgtggtgtgcacctccctcgtcgaggatcccgtgtggatctccgaggtcggtgttacaactgcctttctacttctcaccgggttgctacctgtcggcgtccaacaaggtgttttcggtgtctcagctttggacattgagtggcagactgctcgtctctgtcggccgattatcagaaacagccagtgtggcagtgcctgggcaacgtcaagcaacatcttctgggaagacaggatacctcccagcgtgccttggtgaggccgaggattccagtgcggcctccggtgtggcagaggttatctgggatggacaaggctcattctctggagggcgcgtgcaagacctcggtctggagacgtcttgcttcgtcgcatgatcatgccgtgatggagcctgtcatggatctagagaggcagtcgcccttatagcccatgcgta

SEQ ID NO: 155028 - DNA, 420 bp, Zea Mays
gttgcaaagggcctgttgccttcaaatgactggctttgattctctggcaggtatcgcactcggatatgtacttggcaatttccctcttcattctggtccaccagtataaggatctgatatcatgatacatcttgttactgccggggtgcatggagaattttgaaaggtgggcttcatccaatatcttctttctgagctcagggtccttgggaacaaccaatcagtctccaaaccatagaatttccttgctgtcctgacggaagcatttgtatttttctgctttctgcttgatcatttccttgataacctgaacacccttgtcttcaatctgtgcccgggctatttgctcttgtaaggtgggctccaccgagatgtaacttaaggcacctgaagaaacaacttccaggttcagcttgcaca

SEQ ID NO: 155029 - DNA, 750 bp, Zea Mays
acaaactcaacactttgtacggtaaaagaatattgtctcagcaagacagtagcattagaactcagctgttgggcttaagcttaaatcacctttcatgttgtcgctctgttagattattcaattttgcgcgcgcatatacacaatagtctctggaagatggtatatgttatatcttcgttacattgtgcacagcggactagcagaggagaagagggcaactgttacattaccgttgttttcctgcaggcaggccacacacaacagaatctgcaaagctaggccccaagactggtcaagattaaatggcaaactgagccatcagcagcaaggcaactagtaggatcggagccgattgctcttatatatggtgctatcagctacgccgaggcaagcgagagcgagtcgatgtcatgtggctgacgcagtatgagccgctcactggacactggtgagtctgacgaggctccaacgttgatagctagcgactgcacgaaggctaaggacaaaacgagatgaagagcagagctgcagaggcgtcgttcagaggttgccatcgccgcttgtgtactgacaagtttggatccccgtagttgcggttgggttgccttgcctgccggcgacatattcctaaatccctaccttctactgtcgtggctgctagtaatacatgctttgcggcattgtttatgtcagttggtgcatttggagtcgcgtttgtgtgtgtcttatacatacgagcatctactttat

SEQ ID NO: 155030 - DNA, 312 bp, Zea Mays
aatgaaaagaacaaagtaggtatgctcaaaaatgatgatcggctacaaagagacctacaaagggacttactgcaagggtccctgccaaagggataccctcggtagaatctaggtggaggtaatgagttccacaatcatttgtaggctcacttaatgggatcatactggggggcagattgagcatcaggcacggttggcacgacctcaacaccacgatcatagttttcgtcttcagggcgagtggcaactaacaaacatcgtaccactacatccatgacttgcttttgtgtcttcatagctgatttaacataa

SEQ ID NO: 155031 - DNA, 360 bp, Zea Mays
gctgtgttctgaaaacactggatgggagcgggagaagaggacggctgagtctaaaagccggtgactcggtgagaaggtgacacaactcgatatcatggtggaccaagcaaaggtagaagttgaaattagcagagcagaaactactaccgctcgcgaggaattggcgaagttgtcttctaagctagagacattgaaggtgaagacaatagagtctgatgcgcagatgtgtgggggagtaagtcgggcgcgtgcgctattgtgtgacggttatcgtgggtttggggcgtccattgctttgtttgatgaggagaaaactggtgtttgtgatctgtttattggctggattggatatgaacttgg

SEQ ID NO: 155032 - DNA, 597 bp, Zea Mays
ctcttatccaaattagagaacgcaatttagtactatgtacttgttgagcccaagatcctaaaaatctaataaatctttcggagtctgtaaagcaaatgcaacctgaacaacctaaaaacattttgcaagatgagaatcgaaaaacatgtgttgtatagtttctttgttgttaagaaacaacaataagcatcgtcttttcattttccctttgaaccatgtcatccctttgtcctcaaacaacaactagaaattgtttttgttatctaaggctgtcgaccggagacctcccaacaaccctacaactaccttgttgatcctagttgttgcaatttctataaaaaaattgaaaactcatatttagtagacaaattggcctatatctatattgttgaattccgattgcttcttgacatttggagagtaaagttataatcccaaagttaaggctaaaaataagtgattttccatcgttgaaatcatggaacatatcaaaacaaaatggatttaattactcccgaaacatatgatagaacttagttggaaaaccatatagatcttggtgctttgttattgttgacgctgatctggacgccaatc

SEQ ID NO: 155033 - DNA, 411 bp, Zea Mays
ggcctctagatcctccacagtaatggtggagaaaggccacgggtcgcgcggcggaacgacggtcaccttgtcagccatcgccgaatggaggtggtggaggcggaggggatgaggtgcgcggttttctcttctctggctattctcttaggttgcagaaaccaaagcagaaggcaagcgcaaatggcagggtaaagaaccaccgccggcccctctcccgggtatataagggcccgagcgagatccacccaaaacttcgctcgaacccgtcgcgaaattcaaactcgaaggtgaaacagtttttctattcctcaaacgactcacgcacgcgcaacggatgccccgcgaatcgcccgtcccatcgcattaactccttggcagagcaagcgacagttctggcaggcgaagtgggcg

SEQ ID NO: 155034 - DNA, 1240 bp, Zea Mays
gttcccagtcgctagcatttacgacactccgttatagatggccaacaatgcctggttaaccgagcctacacggagcacagcacgacctgtagtgcccaagcatcgcacgacacgatcggttccgggcccatgccggcacaacctgatcccaagtgtcgtgtttgggctggcgagggggcacgttgggccggcacaagcacgacctgattagggttaaagcacgtttagccatgacacccataaacacacataccccccacgcccacaccctgtccccgcctcctctctcagtctctctctcacgctcctctctcactcggtctctcccaaaccctctggtgatttggaaagcgcccctcccccgccgcctcatccagtgctatgggcctctagcttaggtaagatggtaagttgttcctctattggtgttctctagatctggttcgaaaccctaagtttggtgctctgatctccaacttttgttcttcttccggtctccatccaacttcggttgcgctaatcctctacaactctatgtatcagtgcctaattgttctttaaccctaatcgtcgtgccatcggggttagatctagtgcttcgtctttggtaagttgctaatcttttgtttgtgcttgtgatttgtgtttgtcgcctctggatctgtggttgaacggacaaaccctaatctagtgccttatgttctgtgttcgcagccgtgagggaccgatttgagtttgaaccctaatctagtgccttcttgttccgtgtttgtagccttgagggaaggatctggtgctccagctttggtgagttgctaatcttgtgcttgtccttgtgatctttgtttgtgctccctaatctaatgcctttttgttctgtgtttgtagccatgagggaccgatctagtgctccggctttggtaagttcttaatctggtgcttgttcttgtgatctgtgcttgtgatatgtgtttgaaccctaatctagggccttcttgttatgtgtttgtagccatgagggactgatatagtgccccgactttggtatgttcttaatttggtgcttgttcatgtgatctgtgcttgtgatctgtgttcgaaccttaatctagtgccttcttgttctgtgtttgtagccgtgagggaccgatctagtgctcggggtttggtaagttcttaatctagtgcttgtgatctgtgcttgatggccgtcgacgacactgtggctggccaaactggc

SEQ ID NO: 155035 - DNA, 460 bp, Zea Mays
gtacctttgaatttttggcggtatgtgcaatagtgctggctgctatctgcgttttgtcctagatgtgacatgttaacctggttgggattgagaacactattttgaccaataaaaaaagagaactttgatggtactcattttattagggagaacatatgggaagttggttcaagctacacatcatcttaggcactttcaaatgagtcaatttccagcttctcatgccatgtttggctctttcccagatatgaaactccataaaacttgtggctttgtcgtcactctaaacttcaagcgtatgatttcattttagaatgtaagtatccatgcatagtttgagagaactttggtacatacatatttgttggcatcaagcaagcgtaacaaataatcgctagaaagcttttggattgtgacccccctgcagacaactcaatcactgttcaaatgttctagtgta

SEQ ID NO: 155036 - DNA, 809 bp, Zea Mays
ctaaattcaaggtttgttttcctagcatagttgtcctctgaccaatcaccaaaatggaaaatccggccacgatacgagaccgatctcctatctagcgcccatagcttcgaccttggatccgggaagatgataaagaattgctcaggaaagtgcttgactagttgatactgaccgtagtgaaggttgaacttctccctcagcatgtctcctgcagataatgtgtcaacctcatgactgttgccgtcgaaggagcaaactacagccttgtcaatcaggtcgtctctgcggcgacggatggagccggtcgccgagaccgaacagaaggcacgcgatgtccttccccgaggatctctagggtagcgagcctccattcattggccttcctgaacagcctggaggaaggatttcttgtgtatgaggggcagttgactgagcggagccttccggggttgctcctggtacttatggaggtcgtcgggccatagcagcagctcatggtaggtagagctctttgatggatgctcggatggtttaggattatagcgagcaacattgaatgtcccctgggagcttttctggttgcaggacctcgcccggtgtccaaattgtaggcaatgccagcagcgcgtaggagccgagcagcaaaaagcgagatgttctggtgagagacagttgtagcatttacccttgagattcaatttgaaaagactggtgcccttcatgtcaaattgatgtttttgcggagctctctcaggagccatcaagttcttgcgccaccagtaccgcggcctgaccacagaccaaccccc

SEQ ID NO: 155037 - DNA, 789 bp, Zea Mays
cgcggtcggagcaggatttggttgcgggtgatggctgtgtcgccgagagattcatcgaaccgtcgagaggagcaaacggatgtggtggcggcgcccaggtcggagctggcagcgccgaaggaccctgcattgttttggcgcacgacgacatgtcatctaggctgttgcgcgatgttgcctgctaaaggcgaacgtaacaggcggcggcgttgcgaaatcagggccagggcgtcggctgtgggatcggagctatggttcctgggggatcgtggctaggggttgcagccttgcaggggatggaggcgttggtttggacgcgcaggatcgttctgatggtgggcgaatctgacgacttagattgcataatggcacaacagagggctcagattgcgtaacggcagaatgacaggatacccttagaggcttaatatgtagtagagataagactcattgttggagtaaaattaattttattgggtcatataactttaaccaaatcctaattggattgttaggacgcgaatatataaaataggtgcccacgtgtagaacatgaataaagatgtgtaagaagggcacactattctcgtattctaattttatagattcatctttctcccgtctttattttgtgcgtccctatgcgtgcactgatacaatagcatcattcttcagtagcccagtttgcacatccatatgtgtggattgctagacacaacgacattctggtccacgcattaacgagccgcacgcccgcaaacctgttccgtccatacggatatatggttt

SEQ ID NO: 155038 - DNA, 569 bp, Zea Mays
aacaaagaattataatgagtcttctcaaactctccttaatattgtcatgaatcttaaggaaggaatactctcaaaccctaattaatcctaagtgaaccatttaagcataaagggtaattgggagaaaatcttgggagaaaaatacaaattttggtaaaacccaaattccaaggttttagttcactaattaaccaacaaagcatagtacggaagttttgccatttgaacttttcaaaatccccaaaacagcccctaaactaatgcacttgggggaattcagaaattcataaatcttaatttcagcccctttccaaagatcaatcgcgttctctgtttttcaaaacccaaatcaaacaagtccaaatatcaaagtggcgccaaattcccttgaacatgccgtggcaaagtttggaaacctctctccaccgtttgacacgctcttgacatggttttacctcgagactcaaccttgtgacactgccacctttgtgacatggcaactctctgtacactgccccaaaccgctcgacttccacacacaaacgacaaagctctgtcggggagcaaat

SEQ ID NO: 155039 - DNA, 442 bp, Zea Mays
cccgcataactcattctcatgttctgtcatcgttacctgttctgtcattctcatttattgttctgtctttcccattccgcccattctgtaaagcccattcacattctcatcccccatacagcccacgtctagctgaaattaaaaaacacatatggctccaaatagattctcatttcttgttctgcctttcctattccccctccacgcataacaattcacatgttctgtcattcccactcttgttctagcattctcatttcttgttctgtctttctcgttccgccctccccgtaaagcccattcacattctcgttcccccatacagcccacgtctagctgaaattaaaaggcacacatggctccaaagggattctcattccttgttctgtctttcctatccccctccccgcataattattctcatgttctaccaccattcttt

SEQ ID NO: 155040 - DNA, 638 bp, Zea Mays
aggagacgcttctagaacaggaggctgaagctgtctgtcatcaagaacatgattctcatatgcttttggtggcttttcttcttctattatttcagcttgagctctagtgcattcctaagaagagtcatcagatacagcaaaacaatgttgctcactggctgagacatcagtcccatttgatgctagctgatccaacaaatcatcatgtccagtttcctcatcccggatctcattgccagaccttgcatggaacactttatcattagctaattgttgccgcaaatcattatgtgaattgaagtcatgtagcatgttctcattacaaatcacatcttcagacaattcatcgaacacttcatctgcagctccaattgaccccactggattcaccctcgactgctcatcttgaaatggcatctcaactaacttctccaacgaaacaccttgcaagccatgtccatccagcgagtctccaccccaaatcacagcagcaggaggcacctcgtccagggtagcaaccttcgatgccataacattgacgacatgactcaagcaatacaaagaacagttgaagggcgcacagctctcgaagccgctcgactctagatcgatgagaggctcctcaacgaacacaggcc

SEQ ID NO: 155041 - DNA, 305 bp, Zea Mays
tgtgtatgcaccttttccaccttttgcaaattcttcaaattcctgtgaaatcttgtgaatccagttggtggaatgcattcaattatccctattgtgtatccctgcaggctcttggctccttcgggagggttttcactcctcatatggccatttctctgaaaccctaatatcacgcccaccacgtgttcggtaaaatgcccaaaccagccaaaaatgctccaattgaacccaaatttttcaggcaccttcacaacacttccagtaacctacttgccaaatttcacgccaatccgagattccaggct

SEQ ID NO: 155042 - DNA, 989 bp, Zea Mays
gtggactcgagctcctcaagcaggaagtcgctgcggacctgctcgaaagtggggaacgactgctgtcctctagatgctaaagagactacagaggacagtcaagctgtcctctagatgctaaaggactacagaggacagtcaaaagcgactgctgtcctttagatgctcaagacttattccatcacttttggacctaagtgcaacaaccatggaattagggtaccttaagtcatatggttcacatatttgaagatttgcaaaagaaaccatgagatttgggccaaattgcaaaaaggccactctagtgttcaaatggttaagtctgaaatatagttgaacagagctgactttagagctctgtagttctaaaaataccaggaatttgcctagggtcaatacatcaaaagtctagagttactataggagaacaactttgctataaggattaagccttggtgttatgagaactttggagataattagatccaaagtcgggctgtcaggcaaccctaagtctgaatcctcactagcagtgaagtaggatgaacttagagctcgatttagagttagattcattgctcgattggggatagttgccatagtcgatttgtagttggatcatagggctacaagtttgctgcagacggattggcatgttctggcacaaaaatccgagatctaggcgttgcaagttgctctatcaggcgtttgaagggagtctgattgtacagtgaactaaacatgatcccaggttcagccccctcatcgccggcggcctttgcgcccggattcgcgccggccgtcgcgattcgtgcctcgggcgagtggatttcgcttagccgtgaaaaaatctcgccgcggatgggtttgggttactgtggcctcgctgtccctcgaccacttgcaccggcgacgtggccttgcggccgtcaccggagtttgcgtccttcaccgccattatgccacgtcttaggccattaaccacgtcg

SEQ ID NO: 155043 - DNA, 340 bp, Zea Mays
cacatagttcagtacttgtttgatgagaccagagactacctcatttaaatgctgccaccaatcaccaaaggaaacaactctaggttcagggtagagagactggaggccaaacttctgaagaagctggaaccagaactgtcgggagaagacacaggaagcaagcaggtgatcaatggtctcaagttcctggtcacaaaggaggcatctaggatgatgttgcagccctctccgatcaagccggtcggccgtccaacatctatcctgagcaaccaaccacatgaagaagcggcaattacccggtgcccaggatttctaaatgcgctcccaagggtcaaagagg

SEQ ID NO: 155044 - DNA, 418 bp, Zea Mays
tttgtcgggggctctttagcaatttgcacacgcgaaggggtatcttctattgtgggccggacgatccagattctgcgacctggattgaatctagtcttaatgaaacggtacgcaccgaggatcgtcgatcacgaaatcgacggtcacgatctaatgcgcgaaggaggtatactaccgtttgatctgaaccgcacaacatccatcccacggtccaaaccccatctgaccctggaccgttcatcccgagaacaacgacactggtgcattctcccttcttccgcaccacggcgaaaaatggcgaacagggccgcggcgccagactacactccggcgagaacaactccgaccccggagcgcccaatcctcaatcactaccgcgtacacgcacagggggatgtattgaaccgactgggagaat

SEQ ID NO: 155045 - DNA, 814 bp, Zea Mays
cactctatcaacaatggcctgaacctggtcccttgagagtttcttgggaaacaaaggcaaaccgaggtacttacatggaaaatctgaaatattacatggcaacaagtcctgtaaacaattcacctcttcttccccacaacagattgggaacacactactcttctggatattagtccttagacctgaagctgagccaaatagatgaagaatatccataggcacactgatgtccggggcagtaggacttagaaataacactgcgtcatccgcgtacagcgagatacggtgctgcatattccttgaagagagaggttgaagaaacccttcctcagaggctcgctgcacgagcagattcaagacatccattacaagaataaacaacataggtgatagaggatcaccctgcctcagcccgcgttgatgcccaatacattccccgggcagaccattcagtaaaatcttggtagaagaggtagctaacagcccgcttattatatcacaccagatctgtccaaaaccaagttttttcaagacctcgagaaggaaggcccacgataccgagtcaaaagcctttgaaatgtctagcttgagaaggatacgagcctgcttctgacaatgtaagaatctggtcgtctgctggactagcataaagttgtcaagaataaaccgtttcttaataaaagcggtttgattgggggaaaccatattttgcagctggcctgctaacctgttagccaacaatttagtcaccaacttcgcgaaactatgaaccagactgattgggcggaaatctctcacactagtggccccctcc

SEQ ID NO: 155046 - DNA, 473 bp, Zea Mays
atggactgttagctttatgccttggaatcgcctccgcatggaaccacttagcctgctgctgaccaacaaaatggaccgcattcttccccgcctttgagaacggacccgtatcaatccttgcctgcatcatatgtggcttcttcctagaatctattctcccaaacgcggcacggagaccaccatgggacgagccaccacccgtctcatacgtgccaccgcagacatgaaagtataccaaaatcaccctttctctctttctagaatgaaatatgctcaattgaaactcctatatactcattggcgtggaattccatcccggcacttctctgaaggaccagcaaacacgatgtgcagtggcgcattcaaaagcaatggtcacaagcccctctctcagtctcagcccgcataacttgcaattttgctcgcccggccaattgcggctaaccagttgaactgctgattgtgaacacggg

SEQ ID NO: 155047 - DNA, 543 bp, Zea Mays
agctcccagcagtagccttctcacagtatgtttcgtccatcggctccaagagggggagagggaggctaaagctttggcgacaggttcaatgcacctccaaggaagtcgttctgcttattttgtggtgaagataagggccacataacaagaacttgccaccacgccattaacaagcagaaagagattgcttcgccagcatctcaaccctcttagtcgaaggaggtgttcagtacatcttcatacttctcaccatacattccacggtacgtccatcctcaatcacaagagcctaggctgcttcaacctttagccttaaacgcttcgagtaaccctgtgatgatcgtgtggtagccgtctactatcttcatcccaagaccacccccttatgattaggtccctgttgatcatcccaaattcccaatgcaagacatgcaacaaagggatagaagggaagtctccgaagcttgtactatcaatagcacggtcctagagaccaagcgcatatactcaaaaaccctaaggggctgggtaggcaaacccgaa

SEQ ID NO: 155048 - DNA, 606 bp, Zea Mays
tgacggtccctccgactcctaccgcgcgtggtgacccactttgtaggtaccaccagtggggctacggaagtcgggcggtcttcatcctcctcatcgttgagggactcttcttcgctgctcgcaggggaacttaagtctgagtccgtgtagagcacatcgaagatgaggtctctcccgccgtcgaccatccctgcgaactctaggtcgtcgaaggtggggagatggccacgagccatgagggccacgatcaccgccgagtatggcgcagtcgaggcgggaaggcgtcgcggccgctgttagagccatcatggtaggacaacgtttccgcgtcgtataacgcagaaagttccacgtaggacgcgaagaaagttgacagatcgtcatatgaggggtcgggcaccatatggatcgtgacctgttgggtacccagaaacagggtacccatagcgaggcccataaaactctttctagcccatccatcgagcaaatctgtgagacgggatgagcgattaagtctccaccgagaaagcccgcgaggtgggcgagcaaccaagtccccgctgaacaagcccacgagacggggcgagcgactaagtcctcgtcgat

SEQ ID NO: 155049 - DNA, 513 bp, Zea Mays
ggcagtttactttggagaaagtcgaagctacccaaatcaccctccctttcagatcaccgctactggccaccgcttcctagatacctgccagaatgctgcccaaaaagccctccgccagctatgccaaaactacagcagggaggtctttgagacaccccttcgctactttccacctagcaacaaaaatactcctgcttggaggaaaagactacaggccttatcaaggagagatcctaatgaagatgacccaaccatagtctacatggtcggatatctccacacccttgacaaccactttgacgaacttttctcccactgcacccacctaaactcccgggtggaaagcctagagcaacaaatcaaggaattgaaggaagaaaaggcggctcttcaagacagtctcgagatggcagaaggcgaagaagccaacactcgtgaggcataccggaccctgaagatggactatgctaggaggctgaagaagctcacccccgtcaagaagatccaaaagtg

SEQ ID NO: 155050 - DNA, 464 bp, Zea Mays
tggtggcgcaatcatcgaagacgaggcagaccggggtttctaggggcgctgggtagccagagaggttggggaggactcggcgagcactatggctaagtcagggtcgctggaacggggctgagatgggcagacgacagagagggggacctcgggcgaaccaaaggccacaccggcgaaccgaacatgcccactgtgagaaggaatcagtgcagaagaaggttgggggaaggttacttgcccagagacggcgctcatggcagcttggcatgacacgaggggactccggttggtcgaacaacgagaaaccatggcggcggtgaactccgacctacacaggggaggggttgagcgcggaccgggcagagggatcaatgagagggaaaaccacagtgggttcccggtacacaaggctctgacgaagctcaccgtggtcgagacaacgatagaggcccgacgaggacggc

SEQ ID NO: 155051 - DNA, 501 bp, Zea Mays
cataatgtgatgagtgcgctctacacatgtcgaatatcacaactttctagaccaagtaaccgccaccttgctagatgagtgcaacaagttgaggtccaaatctatcttgttaggtgtgtgtaccgcttgtcatggcttgcagactgagctagtagagacaaacgccaggatagccttgcttgagaaggctagctcagtgagtgcccctacacttgtgcagtgtgcactttgtgagggtttgcagtcagctcttgagtcctacgacacaacaagacccgaatcgaggaagaaaatgcataccttcagtcggtcttgagctaggtgtcgtgccgtgagccccagttgggcatggtggttagctagttcaagagggaaactagtggaccgggaataagctttgcttataggtctggtagtgacactaagcttggccaggttggtgagtggagtggattgaaaccatcagtgaaaccttaagccactcacgagcttataaaaatc

SEQ ID NO: 155052 - DNA, 890 bp, Zea Mays
accgaagcttcctgaaggcaggccttcagtttccgctgagcaagtttgtggttgaggtattgaagatatttcaaatctttctttaacagattacgcccgaagctataattaggatgggaatgtttgtctgggctgtaagaagctaggggctagagccgagcgcaaagtgcttctgcaatatgcacgagcttttatacgagacgaaggctaccggcaaagaacaatatcgcaacaacttcagttgttacgggttcattgcccgctctgatgcaagttacccaatgccgacgtaccggaaaaggtggccccgggcctagatggaggagtggttttatgttaaaaatgatctaattaaaaaggaagacatcaaggaaattatccagcgccccatctggtctcgcttctgccttcgaaggccaaaggtcactattggaagtgacgtcgaagcatgccagaaggcatttagcaatgtttgtgccttcattggcacaagagatatagtccaagagcacatagcctatagggtgtggccacttgtggagagctgggatatgccgaaggagactactgccgaatccagtgaaaatggcttagtttgattgaagtataccttcaggtttagagagaagtttgatgaaccaaatgatgactggttgaaatgcattgaagctaccagcgacgaactactcgagacatattctaaggccgaagatgatgccttgtccatagccttcgagggccaggggaagaaaagattgaacatggtatttgatgcaatcggcttcgtataccctaactatcactactcgttgcgaaggcaagggaagaagagaaaaattgtcgcttcggccaccactgctatgccgaaaggcaagaaaatgaaggttttg

SEQ ID NO: 155053 - DNA, 716 bp, Zea Mays
aacacaagagaatcatgtgatattccatagaaagatcagtcatgattattgatcatggatatcacaagaaggatttgatacaagttcaacactcaaattagatagtcaagaattcaatgtacactcaaagtggtatggcttaagaaaagcttgatagagtgaagataacaaggaaaagggcattaagggactaagcaaagaagaaagtcaagatgactaaggtaccaaggctaaggtgaagaagtaagtatttgcatttagtcgagggactaatcaagctcaggagaagtcttgcaatgtttgtgcgatccttgttgaagaagatgaggagaagaatggacattgattaagttggttttcaatgtgatatacttggagacagtctgatagggtgaagacaaacaaggaaaaggctttaagggactaagcaaacatgaatgtcaagcaaatggcttatggaccgaggtaccatggctagggtgaagaagagaatacttgcaagatgtcgacagactaatcagattttgaagagttatgttgtgttagatatcacaacattagaatacatgattggatgccatcggattaactcatatttattgtgatggttcaagtcataaggattaagggatgcaaactcaagggatcaagcatggtcacaagtccaagcagaaggtatcaaagatagaacctggtagggctcacttgttgtgtag

SEQ ID NO: 155054 - DNA, 1048 bp, Zea Mays
ggttatctttctgaagatgtgtatatgcgccaacccccgggttttattgattccaagtaccctgatcatatatgcaaactggataaagcattgtatggcctcaaacaagctcctcgtgcttggttctcccggttgaccaacaagttagttgatcttggtttttctccatccaaggctgatgtctctttattcatctataacaaaaatggcatacaattgtacatgcttatttatgttgatgacattattattattggctcttcaagctcagcggtttctcatcttattgctcagcttcgggatgattttgctgtcaaggatttagggtctctcagttatttcttggggattcaagtatgtcatacctccaaaggtctgctattatctcaacagaaatatattactgatctgttgactcgtaccaacatgatccattccaagggcgttcctactcctatgctccccaaggagaagttatcactgcatgccggtacacccctctcacctgaagatgctactcgctatcgcagtgtggtcgattctcttcagtatctttcgcatacaaggcctgatatttctttctcggtgaaccgtgtgtgccaatttctctccaaacctaccactgaacactggtcggtggttaaaaggattttgaggtatcttcacgaaacgattgatatgagcttatgcttcaacaaatctggtgcccctttgcttagtgcattctcggatgcggattgggccggtgatgcggatgatagaagaagtacaggcggttttgctgtattttttggtggcaatcttatttcctggagttcacgcaagcaatcaacagtctctcggtccagtaccgaggccgagtataaagctattgcggatgccactgctgaagtcatatggcttcaagttcttctgaaggagctgggtatcaaactctcccgaccaccggtgctttggtgtgataatattggggccacatatttatctgctaatccaattttccatcgtcggtctaagcatattgaggttgattatcacttcgttcgcg

SEQ ID NO: 155055 - DNA, 308 bp, Zea Mays
acctaatcaagtgccccttttcaaagcattcactacacctcttaatgtgaagtgtggcttgatcattaccttggatgttaccttttgtagaggcgtggttgaggcttttggaggaggtattgaatttcatcttttgcttcttcctcttggtaatcctcaaatccttgacattttcctcaagggttttagtgcatgccacggttgttctcgtctcaagcttcttcaccatgtggtcacggttatcttgagaaggttgagcaatgcacttcccttttagttgtgtcaagctcatcttcagcctctcattt

SEQ ID NO: 155056 - DNA, 419 bp, Zea Mays
tgaatacttttcttcaagatcagagcaccgctgggccatatctgacaatgcagctgaaaggggacgcgtgattaagaacaaggatgatcgataaaaacatctaagaaaactgtaaggtcgctaaccatcgttcgatgccttcaagtcagcaatctgtttctaaagcagcaaggggttccattgcattagaggcagagcttcttccataacagcggcaccgcacgacctcagctgggcagacattccatcaaccaaagcctacgattgcagacagatgagcagaaggaagataattcactaatatgggcaatataaggcaataggatgactcatctgaagattgcagaagaacgatggcagacccaaggcagaagaagctacatcatggcttgacgagggaagatcagcaggaataattt

SEQ ID NO: 155057 - DNA, 658 bp, Zea Mays
tgtcaatctgtttgatcacagtttttgggagcttcagggtgcatatgtaataggttggaagggaagaaaataccgcgttaaccatttgtaatctgccagcctgagataggaaaatagaagttgaagcaagtcttctttcaatcttctgaatgagaggaatgaaagcttccaaattgggttttttgagccccaaaggaagcccaagatacgtgaagggcaaagccccaaccttgcagtgaaatgtatttgctagcattgccattttctgctctgaaacattgatgggataaatattagatttgttataattcacatgaagccctgtagagtcagcaaatgaattgagcatcgctttttttgaagtaaattaagcatcgctttaagaaagaagagttgtctagggcacgcttccagaatcagaattgtatcatctgcgtattggataatcgggaagtcagatccacaggagagcgggatcgggagcttgatgatgccacaatccttggccttgttaataattgactgaagcagattagcagctaagacaaagagaaaggggaataggggatccccctgccgaaccccacgcctgcaatgaaaacgtctgcccgggaccccatttaaaagaacttgtgacgtgtcggagccaggaatcaaa

SEQ ID NO: 155058 - DNA, 405 bp, Zea Mays
aaagttttgatgtagaaagtgggaatcaagatgccgaagatcggccctagagaccaagccatgttgtcttcgggaaatcaactattaagcaagggcagattgatgcaatgagggggaggtactttcgtgatatctcaattgtgagggctagaggggaaaataatgtccctctgcccgaagctgacgaagtggtagtttacagaagcttcatgaaggcagggctttggttccctctggataaattgctggtcgaagtcctgaaaaccttcgaaatttaccttcatcaacttactcccgaagctgtcatcaaggtggggatctttatatgggccatgaggagccagggactggaaccaaatgcaaaatgtttctgcaacatccatgagctatctaatgagacaaagg

SEQ ID NO: 155059 - DNA, 993 bp, Zea Mays
gttgctgattgggctggtgaccaagatgacagacgtagcactagaggatatgttgtctattttggctcaaaccttgtctcttggaattctcgtaagcaatcaaccgtatctcgatcaagcactgaggctgaatacaaatcaattgctgatgctactgctgaattgatttggttgcaagtactgctaagagagcttcgaatttcttagcctcgagctgcacaactgtggtgtgataacattggtgcaacatatctatgtgccaatcctatttttcatcgccgatctaaacacattgaggtggattatcattttgttcgggagcgtgtggctactagacagttggatgttcgtattgtttcaacgaaagatcaagttgctgatgtgatgacaaaagccttgctagcttcatcgttttcattgtttaggaccaatctgaacgtcacttccctgcgtccagattgagggggtattggaagatattagatattgtgcttatcagataagctaggattgttatcctcttcgagctgcatctccatctctatctcttcccctgattttctccaaccgtgtaacagccatgcatggctcatctatataaagaatacatcggcaccatcttcaggtgtcgagtcttgagccatacctaccccacgccatggcaacaggagcacggtggataacaagacaacagacatatctagacgcaacaacatgattacaccccccgctatagtacatgcacgccggctgccatcccctgttgggacatttaatacgacgggtgaagcagaccaaccctcgggcgcaaatctctgcctcgcctgacgctgaatccggccctcgggcgcaatctccgtctcgctgatgctgagttcagccttgggtgatttctccatctcgctcgagctcagcctcagctacctgctctaccacgaatcccgcgggcggccactccgctgactgcggcacacgtcaaaggatggctcgacc

SEQ ID NO: 155060 - DNA, 695 bp, Zea Mays
tttcttcgagaattttttaggcattgctaagggtagaactttctgaggtgttctatgttccacgagttccctacttctgtgccgtccatctgagtaagtcgatatgatcccggctgcgtgacctctgctacaatgaacggtctttcccatggtggtgacaacttgtgctgcccctcccccgttagaattcgacggaggaccaagtctcccactgcaaaagatcggtgtcgcacagctttgtcgtggtagcgcctcaaggtctgctggtacctggccgactgaattactgtgttcaatcgttcttcctccagcacatcaatgtcttccagcctagttgcttctgcctcagctatgtttttgaaagtcaaccttggcgccccgaagatcagatcagcaggcagcactgcatctgacccataaaccatgaagaacaaggtatttccatgcagagctcaactgggttgagttcgcaggctccagaccacgtatgtcagttctctgatccattttcctgcaagcttttcgctcttatcgaataccttttttctgagtgcttccagtatcatttcgttggctctttccacttggccattggctcttggatgtgccactgatgcgtacttgatccggatgctcctttgctcgcagaaatcgaagaactcagggctggtgaagttggaccctaggtcagtgat

SEQ ID NO: 155061 - DNA, 581 bp, Zea Mays
gcccttgagaatgaagtctttttattgatgatgtattttccaattacagaatacaatgctgcccgatagcttttgaaatcttgctaagggtaaaacttcctgagatgctctatattccatgaattccctactttcgtgccatccatttgagtaagccgatatgatcctggccgagtgacttctgttaccacaaatggcccttcccatagtggtgacaatttgtgccatctctcccccgttagaattcggcggaggaccaagtctcccactgcgaaagatcgatgtcgtataactttatcatgatagcgcctcagggtttgctggtatctagctgactgaattactgtactcaatcgctcttcttccaatacgtcaatatcctctagtctggtagcttctacttcggctatgttttcgaagactagccttggtgccccaaacctgagatcagcaggtagcactgcctccaaaccatagaccatgaagaaaggagtatttccatgctgagctcgactaggttgagttcttaagctccaaaccacatacgacaactctctgatccattttcccgcgaacttttc

SEQ ID NO: 155062 - DNA, 518 bp, Zea Mays
aggtgggtgattggttgagtcaacagcgactgctcgccagatttgtcttacgtcgttgccgatccatggctcgtcgtgggtagcttgactgatgcccagggtcgtggtaatatttctatctcgggttcgctttgccctcctgttcaagtagtgatggtcggatcgaagttcttgccttggggtcgccgatttgtttgcgccagttagggcgtcgctgcggctcaaaccgcgccgccacggtggggtcgggagatggaagcagggctggtagccgttggatagggagtggatgggcaggattataggtagtctgccatttgggaggatttgatttgaaccatatatctttgatcgtaggtttgagagtgatcgggaattcaataaatcctggtcgtcggatcttgatccgatggcagttcctgcgtgtcgctgcggtgagagtgtgatctaatctggggcgtatgtccgtaatcgggcggctcaagattcaagataccccttcggccatggtattttga

SEQ ID NO: 155063 - DNA, 700 bp, Zea Mays
tgaggcagaagcaaccaggctggaagacattgatgtgctggaggaggaacgactaaacacggtaattcagtcggccagataccagcagaccttgaggcgctaccacgacaaagctgtgcggcaccgatcctttgcagtgggagacttggtcctccgccgagttctaacgggggagggacgacacaagctgtcaccaccatgggaaggaccgttcatcatggcagaggtcacacggccaggatcctatcggcttactcagatggacgacacagaagtgggaaactcatggaatattgagcacctcagaaagttctacccttagtgatgcctcaaaagtctcgaaggaaagttgtactctataaccagaaggtttcatcatcaataaagatttcatcttttaaaggcattcaaactcttgattgacaactgacttagattggtctcgactcgaaatcggcatgacatgacttagggtgatcactatgccctactaacggagcaatcggcttaagtcgggaacgccttaagtcggtgcgacatgctcacgcttccatgacttagggtgatcactatgccctactaacggagcaatcggcttaagtcgggaacgccttaagtcggtgcgacatgctcacgcttacatgacttagggtgatcactatgacctactaacagagcaatcggcataagtcgggaacgc

SEQ ID NO: 155064 - DNA, 582 bp, Zea Mays
tgttcgaggtcttcgcctacttgtgttgcgagtctgtaggcgtttggtgatattttgtttttgatgatgaaaggcccttcccatttaggttcgagttttcctcgggattctattctactagttctgatgaggacgaggtccccctcctcgaactctttgggagtaatagcgttgtcttgccagaccttcgtttgtgcttgatatttgttcaatgcttcaagggcgtcgacacgatccccattgaggagatattttgttgttggctcgtcaatatctggtatggtcgtgttgtttgttcggggtgatccctgcttgagttcttgcggagtcatggcctctaatccatacattagtctgaagggagtgaatccagtggcacatgatttggttgtgttaagtgcccaaatgacttcgggtagttgctcgacccacttgccctttgtgtcgtctaaaagtatcttttttatggcactaaaatttttgctattggcgcgctctactaccccattggattgtgggtgatagacatacgcgaatacttccttcatgccgattgagtcgtagaattccctgaaatcctga

SEQ ID NO: 155065 - DNA, 516 bp, Zea Mays
gctctgtgaggttatcaatccggaggggcagggcagcggcccaccgacgatgaccctcgccgaacactaaccccggttcttctctctcctaccggcgggtacgactgagtaattcacagcgcgcagctacggctcgaggtgtagggaagagaagaggcggcagcctgggccttaaatcaagggcgcccggtattcggttggagcaaaaccgtggagtcgcgcgaggtggtcatcattccggtcggcgcggcgcttctcgcgcaatgacgaagaccggaaggtagaaggatgggtccacgcgcagtgaaacggtgaagatgagcgcgctagagagagaccgcccggtggggccctcaagtcggcacacacgctcgtgtgaggggctgacggcgtgggcccgcctgtcggcgcccgcgaccgcagtttgagccgcgcgggaggggagatgctccatgggccagaatggtggtgcgaggcccatttagttgggtttgttttattcttttattttctatt

SEQ ID NO: 155066 - DNA, 601 bp, Zea Mays
atattaggggaaccaccctaaagcctagttcaaaagctgttacgaaaagctaagcttacgtgggtttcccgtcctcctaacatgtttaattctaacccgtctaaccgtagttggtagaggcaacactagatccaggtgaagggggcactccggagggagccgcgttcggaccgaaagctagctctatttcctcgggatcctcctctccctcactgcctgcctcattagcgttcatctcttggtggtgcatttataggtgaacgttggcctccgcaagctcttcctgcacatcatggagctagttttccaggatatcgatggtgttgtcccggatttccacctgctgctccaatgcttggatgcagtttctcatctgttccacctgtagatctttctccaccaattctgaagacaggtcgaccatgaagtcctccctatcatcgagggtgatctttgccgcttgagcgagtccggtaaggtgcatcatggcgtcgctttgcaaggccttcaggtggtacagtgcactcatgcactggacgatgattctcccaaccagatcgggatgcatggcccacacatccttcatgtggctcactctgtt

SEQ ID NO: 155067 - DNA, 684 bp, Zea Mays
cctccttcgtctcttcaactgtcacatcaatgtcgaggcatgtgggagcatcaaggctgttaaatacctgttcaagtacatatacaaaggtcatgatcgtgtgtctgttgtaatgagagatgcgagcaaggcagccgatgatgttgatgagatcaagcagtatagagatgcaaggtgggtgactcctccagaagccttgtggaggatatacggctttgagcttagtcagatatctccacctattatgcagctgcaactccatcttccaaacatgcacatggtggcgtttcacgagcgtcaaatggtcgagcgagtcatcaaccgtccaggtgttgataggtcgatgctcacagcatatatattttgaggcgaataggctacacgaggaggcttgtggcatcctatatcgtgacttccctgagtggtacacttggcagagtggtaagggcaaagtatggcaacggaggaaacaagatacaggtggacaagtcggtaggatagtctctgctcatccggccgagggggagcgctactatcttcgtgttctcctaaaccacgtgactcgcgccgcctcctatgtggatctaaggacagttgatggtgtcaccctaccgacttttcgtgaggtagcagagagaaggggactacttgagtcggagaacacactggatgagtgtctcactg

SEQ ID NO: 155068 - DNA, 660 bp, Zea Mays
gcatcactcagggaaacctcatctccatcagcaggcggcggattcctagcatctgagtcactggcctctaaggtgactggaccgacgagagcagtagataaattcgtcaccacgggttcctcagattgaaccagtggcggtccaacgtcaacatccatggaggcagccgaagaggagcctggcccagtatccttgggggctgggtcatcctcagcaccaccctcaagggttggatcgtccttagcaacaccctcagaagctgaagcaccctcggtcatacccaaaggagcccgatgactttgactagcaacgtcaagggccagcatgttctcatgaactagactgccttccaaggtcgacgaagcgtgagaaactgtctcggttatctcttgcccgacaggatcaccagccaaagggacatcatccgggacctctaaacggacgatagaactttcaacctcaagaggctctgataaaaggtcctcaaggataatttcttctaatgcatggtcaatggtagacattgttaacccctgcaggctaacaagtcctgataaagcctgcattgggatgtcactattcctgctcctgcgactgttcatgcaaatcaaggggacctttcctcctcctcctcttcatcctcatcaagcacaagaccgc

SEQ ID NO: 155069 - DNA, 306 bp, Zea Mays
gaaacttctattagcattgtcagctagacgcccaatcggctaaacaattttttacagatttgggtaatgacatctatggtggtcttactgcgactacttttacagattactgtgactactttacgcctaaagtcattggacaaaccgagacatgtcctttctaaataaaatttgccgtatgcaaaaccttattcattcacgtccctctggccacagctaatcaccctcgatatgatgtcaatacgccattatcataccgataaaagcaatacaaaagcaaaatgctcctacaataataattaaaaa

SEQ ID NO: 155070 - DNA, 816 bp, Zea Mays
cttattacaaaattttagaaattggaatggctcaatttggagctagaatgaattttctatgcattttacaagtttctagatttgtttttgtattaaaaacgaatttctaatattatttctctagttttaatccactctgaactgggcgccaattttcagaaagtccaggggtctcggcgcaagtttccagagactcagaccatagtgactacggattgcgggttgttttctgtaaacaataggggttctttagcaaaatgtgtcgcaaaggggtatccgtagatgtgagccgttggattagatccggacggcgcagatgaatctatcatcataccgaacccatatgctacgttagccattggatctaggatcgatgattcggatttaattatccccagatcaaggcccaactgtacgatgcgagatcaacggctcggatcgaaacgaagtgaaacggtatcgctattctaatccgggccaccgatcgctcatccaacgactgaaatccttttccccaactccggtcagacaacggcggtgccctgggttgccagcggtggagccatcgccggagcaaggccgacaaccgttctggtgcgctaaactcaaaaggaataggtgctatacaaaggtgaggcaatgcgaacaagcatggggaacatttcaccttcaatcccggtgcagaaatcccaggcgatgacggggcgcggcttcacggtggagggactataccggtgagcaattcacgccgtgatacgggtctcccccccaatcgccgatgtggacgccctcctcagacgcaggcgttcctcctcg

SEQ ID NO: 155071 - DNA, 407 bp, Zea Mays
ggagtgcgcaaagcccaggatttatatcctacagagagggtggagtccgcacggaaggagagagcggtcgatccaatcctggcggcgaactcttaggaagacgctagtggagtttgttgagatcccatgtctgcgggtcttattctccaagcctgggaagtccgaggaggggggagaaagaaccaggccagcagaactccccggcaatcgcgggtgagcgcgcggcggtcttcacggtgttctgttgaggaagaagctgacaactggggcccacccaacagagatacgacgcgctgggagtaaagagggacggggctgggttgtgggcccttccggacagccgcacagaaggagaaatgtgcggtggtttaagtgggctgcgcaggggttaggctaggaatgggccg

SEQ ID NO: 155072 - DNA, 786 bp, Zea Mays
ggttgctgactttggggatcagggttatgaaagagctgttaagagcagtcaactgaacttggccactgaaaaatttatcacacaattggtatatgtcatgcttaatgatttcccaacaactcttgtaaaaggcaccgttaaagccgtctggaccaggtgctttatttgctggcatttccttgaccactttgtcaatctcatcatgagtgtaggactgcggaagggaggttaagtctcttggggcaatgagatgatgcagatcgaagagcatcggtggcgttgtggtagacccaagtctgttattgaactcatcccagataattgcttctttacaacgatggtccgttatgagcgtaccattctgatcctcaagcccagttatggtgttaaacctaaaccgctctgttgctgccgcatgaaagaaactcgtgttttcatctccaaatttggtccatctgacagtgtacctttgtctccaaaaaatcttttttctttccagtagattcagggtgtgcttcttcaaaatatttctgaagttgaactcttgtgtatataggggtctgatctcttctaatctatccaatacaaggagaacattgttgcaggagcttatggtgttattaatcgtagatagactttttccccagcgttttagcactcgtcgcaaaagcttgaatttagctgcaattcttgaggcgatattgttagctctttggttaatgttccagacctgctgaaccaactcagagaatccaggttgttggatccaatggttttcaaaacgga

SEQ ID NO: 155073 - DNA, 905 bp, Zea Mays
tgaagtctgaatttcagactgatagtgtagttacagagactttgggcatgaattcaagcttgattcaataggaatttggctactgctgctatggcaaaattatagctggtttgtagctctacaactttggtgcagagggatgataaagttgtcatgcgaaatctagagagaattttccctgaagttgctctgtcaggttaactgaagtggaatgccatgctacagtaactgaagaagaatctcaggttcatcccctcgccgtcgacgaccctcgcgccacgattcccaccggtgaggtgattcgtgctcatcagtgcttggataacgctcgaggtcacgtaaatatcgccgctgttgataagtccggccagtaaacaacttcggccaccgtacaggttgccacggtcgctttggataagctcgccggtgactgccgccttccggccttgtgccacgtgccctggcacctccatcgcgtcgccctgacccgctgtaaccttctgtccatcgccggggagatggccacggtaaccgtacaccaatccactgcgccagtagctccttgtttccccggccgccgcgcgtcatcgctcgaattcccgaccaccactcactaggcctataaattgagcacccccttggctctgccatgtattcaagcagctaacgcacccactcgcacctcaaatcctccaccagagagctctaattttggattctccccaaatcacgtccgaactccgctcggtttagcctcaccgcggccagctcgattcaggttagctcataccctcttctccctcatttgactgttctcatgtactcgtgatgctcatagactcgcctaattggactagaagcccactgaccgccgggaacgcgttcatctgaccgcaatgtccacg

SEQ ID NO: 155074 - DNA, 336 bp, Zea Mays
cctcactctcccaggtagcttcctcctctccttctatgctccactgaactttacagagcttcacctctgaggtgcgggtctttctgactgctgaatcaagaatcttcactggcttctcacggtattgaaggtctttctgaatctgcactgtctcttcttcgaggtgactttctggtgcttgtaggcatttgcggagctgggatacgtgaaacacattgtggatgtcggacatggattccagtaattctagacggtatgctgcgggtcctaccctgccaatgatgggatagggacctatgaatcgcggtgctagctttccttttacctggaacctcc

SEQ ID NO: 155075 - DNA, 1122 bp, Zea Mays
cttgttagctctgatcctagaggacttagcatcgtgaaaggctagggttcatacgttacctctaaatttctatcacgccaatagaagttgtcgaaggggtctctgcaaattgcttcggcgaagaatatctttcttcttcttcgcgactcgatgatataatctttatttttttagatgttgaaggttttggcattaacttcggttttttgttaaccttttctttttgtccttctcgacagatctttgtgcttgtatttttagaatactcacaactcttttctttttcactcccccggcctcttcgtcaagtctatcatggttaggatactcaaagctaagggcatccatcactcgatgtagccttcatttctctcatgtgccaaaggcagcggtcattacacattgtctcaatgacctccaaccattcaacacaagggccgctgaaggttttctgaaatttaaagcgatatggaagtctaacaagctcaaatttctttccttcgtctttcttcttcaacaatccccacccacctgatgtgggaaaagttttgtatgccaagtattcttgaaccaagtcccgagtactgatatgctcggccacaaccctgaattctacttcggcaagttggcatggggagtcgagttgcatgttgcataatggcctcgtcatgccgaagtttagtttcaagggaatcatcaccatatgcataatcttctcccttctctgctcatcagcttccatataaaatcattcacttgtccagctgatggaccacttggtgcggtatccaatcacaagggcttcgtaatatttcgctatgcaaaattgtagcatctgaagttcttgtgcagaccatctgctctcgccttggtctggtaatggagttcatagactctgcagaatcctttcagcattagcactccttccctggcttcggagagcccatatgtacacgctaagcctgactatagcgtttggagtcaattgatgaagatagatttcaaatttcttcaaaacttcaccgatcatttaatacatagggaactgaagccctactctgaagaagctcttaaaaacaacaatttcatcatcttttggctctagaaccacttcgtctccgg

SEQ ID NO: 155076 - DNA, 722 bp, Zea Mays
tatgtataaaaacctagcaagctgtccttcggttagttgctgccttgaaaggatcatccggacattaatgacccacgaccgatgaattttattccacctgattacagatggaacaaggatattaaatcagcagatgattccagagccaagagatgcatggacggcagatgggactggccccttttttttatgaaacgacaagagacgcgtaaatccaatagtaggacaagtgttgctatgccagatattaacacaggattaactgattaagcaatgaggttcagagacatatatggcaactgaatcacgcagacattaattaagaaaccacgccaacatcgttctgccacattgcctatattcaactgaattatgcacccaagccagtacatgctgctgttcataaggataaaatttatgtccagcttcacagcgaagactcagaattcaggtagcttctaaggaagagatttagaatcatatcaaaacatttaatcatctagttcgacaacattatcacctgtaattatataggacaaagatattttttggtgtaagacgaaacaataatccagaatgttttcctttatgcaacatcaaaacataaatgcaatcataaacactacattttttacattcagggtgactgggtagacaatcaaatcacagcagcacaacaccctcttcatgatgaaccaaatattgtccccataatgtgactc

SEQ ID NO: 155077 - DNA, 702 bp, Zea Mays
gccagtggtgaagctcaattgagtggggaggggctagggtggtcagaccacggtggtcgaggctcgggtgatctcgcgggcgaagctgggctcggttctcaggcgatcgcagtggttggggccttggtgaaggtgaaaggcgtgcaggagagtgaggttgagggcttgggctatcttctaggcatggtgtagttatgggcgcagggttgggtgggggtcgtgccgaccgacgcttggggcgtgcgcagggagcagccattgcgcgctcggcattgccaacagaggtcgaactcgtggaggtttgcttctgctcttgtccaagcgtccgtttggtcaccttaatgtgcaaatcttgacaagaatcacttgtaaggtctcttctctatgccaaatcctatcttttctatgtgagtcccaagtgtagattggcttggaacttggaaaaaaagttgggtcaagtcgggtctgcctcttagcccaacccgagagaaaagccaggccaaatcatgccaaacgattttggtttgattttaaactttactagtgtgtgcctagggtattttggcaccactttgtccattggggcatgtggttttgggttttggaactaggtgaacacggatgatctttgcaaggggctgaaaatgaacttagagaaaagttgatttttcttttgagctctccacttgagtgatctttttg

SEQ ID NO: 155078 - DNA, 428 bp, Zea Mays
cagccttaccgtgggtggcggtggtgacagtgttgttctcagtcacgcgcggtttcgcggcggaggtgaactgcggtgagaaattgccggcaccctggtcaccgttctcgcatgaggagaccacgaatgcgaccgacgtgctctggagactcgcccagaccgcatgcgcagcccggagcgacgatgcaggtgagatgcccgcgcggcggctgcctcctttctcttctctctgctctccggcgcatggtcccatgacaaatttgctcagagcgatctaattcatctacgccacgatggattaagggcatcccccggcaagtatttatacccgcgaggcttaactgaaaaccccagcatgcacggaatcgaatccacgcgatcttctcgaacgatattcggttgaggatgaactgcctgacgacttggcc

SEQ ID NO: 155079 - DNA, 313 bp, Zea Mays
cactttttgatgaagattctcctttatgatttgcactcccttgccactgagctgggccataattatctggtcttgcaaggttggctcgacggagaggtgagacaaggtaccagaaggaattacctcaatactcatcttactcaactcgtcacacatggtattgatgtgagaatccatcatcacacagttgcattgtgacttccgactcaaggcatcagctaccacattggctttccccgggtggtagtgtacttccaagtcgtagtccttgatcaattctagccatcttctctgtctcatgttgagatcaacc

SEQ ID NO: 155080 - DNA, 699 bp, Zea Mays
cacattggaacttgtcatggcacaatataatctaaggataaatttgtcataagtttgaatttaaactagaatttacatttgaatttggaaaagaaggaaaggaaaatgaaaatataaaaagaaaaacagaactgggcgcagttgggcctaagaaaccaaatctggcccacttctattcttcttctgcgcagcccaagccttactcctccgcgcactcaccgctggcaaacggaccccaccgtccaactctcctccacgcggtgctgtctcactggctctcgggcccgcgggtcagcctccctcacgcgcgcgttcgtgctggtctgtcgctgatgtcgtggcctcgccttgtcattcacggccaaccatcctcacacattccgtcgtcctcgggttgttacaccgtgccacctctctcgccgtgaaacgctcaccgtccatccgttgactctcctgcgtggatgtgcggctcggatcccgggaccctataagtacgaaccctcgccacggtcgcgccgtctaccccaagtcgccacctcaaattgcgtggagaacctgtgccaccacgggtcggcatagtggaaccagtcactcatcgctgctgcctcctctgtgtcgtgtctggtgctttcgccagagcgtagggaaggtgccggtggcctcggcgcacgggatttgttgacggggaccccagaattg

SEQ ID NO: 155081 - DNA, 667 bp, Zea Mays
cagaaaacaagcaggcacaagtcaacaacgaagtacaagaccataccgtctatagggcacaaagacatcccttcacaatgtgtagtcggctcgcgtcctctaggcactccccttaggcctataaataggatagtctaaggcttgtcaaggggcggatgaatacttcaaaagtcttcacctccattcgatattggcacttgtctcgattatcccctaggacttgggacccttccctctccggttgtgcttgtaaaccctactacgagcacttaggtgcgaataatataagtctcatccccctctactggaagtagggcatctcctagctcgaatcaggataaatgacttgtgtcaacttgcatcaccttctgggtctggggcacacgacgctatttcactagttggttaggtccacggatccaaacaccgatagttggcgcgccaggtaggggctgtcgtgtgctaacactcagttcccatcaagactccagatggctggctttcaccaccccttgaggcttggcacggtgatcgggtttgggagtctggagttcatgtcgctcaggatcaagtacgacatggtgctcctcccccgggtcccctggctgacactcaggaacgttcaagcgtttgtcctcgtccttctcgttgtaggacaagagacgga

SEQ ID NO: 155082 - DNA, 580 bp, Zea Mays
tgccaacaggcatttgctggcggctggttgcttgcaatagagggtgcctgaagggagctctgactctgctgactgtagcgtgatggagtgggtccagatggtttattgaagcttggtcccctgggtggaagcccaaaggatcgagctctctggtgacgttcttgctgttgagctcggagaacttggaatttcctcttgatgtgccctttttcttcctcttttgccctttccacttggatagctttgttggagaggtgagagaagctgtggaagtcttggctggcgaggatggtcttaagctcgggtcttaatcctctcagaaaacgggccatttttctggactcggtgctgacatcctcaggcgcgtagcgggccagctctgtgaacttgtgcacatattcactgactattctcccgccttgagttagctcctggaattcatcctccttgagttggactatcccctggggtacgtggtgctcacggaaagctgcttcgaattctgcccaggtagcatctctgacggcttcactgaaagtgtcccaccatgctaaagccattcctgaaagctgatgagctg

SEQ ID NO: 155083 - DNA, 496 bp, Zea Mays
ctggacggagtagagatcgctggccgggggccacgatcgctgtgacgagcacgccggaatggagagaaagagaggtcgtcgcggggaaaagaaagaggaggaaggggttcacctctggacggtgcacgactgggagggatcgtggatgtagcttgctccggcgtgcagtgcttcgatggtgagctcaatggggctccgcgcgcgggagttcaactgcgcatgacaacgacgacgtgtgtggcacgaccttctttgcttgacgatggtgggcgtagcatagcttcctctgcacactatgacaagtgcggcgcaacggcgatggtcgcgagggagaaaactgaagaggagaggttgtcgacgttgacgggagcacaagcagaggtgttgggggcatggctgctccatgtcagtagttgccatggctagtgctactgcgcacgggaaagaggtgcaagaaagaggtctcatgagctgcacgaaactgcataggacatga

SEQ ID NO: 155084 - DNA, 455 bp, Zea Mays
cgtggacataggagtcttcagatgaggacttggattattttgcggtgttggatgtggctgcagcggagccttcaccgtgcgcggagggttccgaggaactcccaggcgcgagtactgggtataggcggcggagggcggtggcaaagcggagagtgagtgaattgtcgcgaagtggtaggcgttatcgtagcgaggtggagagaggtcgtcttcgcgtggatggggctgggaagcgagaattgttgtcctcgctgattggggtgagtgtaggtgagggggagctgcgaaatctgttcgagggtgaggaactgaggataatgctgttcaactacagggagatgggtatcatcctgaaggttgagccaatgtaatatgtgatgccctcgctatgtgtatgtaaccataattttgtgtgatgaagctgcgcgctttcgttgatcaggccgctcccttag

SEQ ID NO: 155085 - DNA, 558 bp, Zea Mays
gctgcgcgcgcccctgcctgaccgcacccaggacgacgcgacccgaagaccttgccgcgaccgcgcagcagcccaggagccgagcaaggaccccgccatcccgatgccccgtcgagcagcgcaccgaccgcgacccgagtccccaagccggaaacggctgccgtttcttctccccttttccctccccacgtcctctctccttcaatggaggtaacggccgccattgatggccattgatgaagaccagccaccgtttcttcttcccccggctcgctctctcctcgcccctataaatcatcgttcccgcgccacgccgacccatcccagccttccctctcccacgcctcaagtctgctgcccccgcgaggaaccgttactgccaactctatgtctgccacctgcgtcgcatgccagttcctcgtcggccgccggagcttcgtcgaaacgtggccgtggagttcgcagcaccacacgctcgtcgccaaggcctgatcgttccatctgttggtggagacctgcccctcaacgccagcaaccgtgtttgattacccgtcgtcg

SEQ ID NO: 155086 - DNA, 371 bp, Zea Mays
acaactgggttcttctccataacaaattcagctagcgtcgcaacaaagctaggtaccacgggtctccaacaccgcccaactgaaccctcaccagccgccgagaaccgcggtcttggccccgcgcaagctcggactctccctgccttatataatctgaccgctcccgcgacgtcatttatctcgattaacggtgccatcgcgactgcttttggccaacatcgccatttaagctcgtacaagtgtcctgggaggttcgccatggtgcatcggtgtcgtgcgtagtctctccgtactcggatttggtgcgggcgtaggacgattgctcgccggagtggaagctttgcagtcaagccgccattagccgtgaaaag

SEQ ID NO: 155087 - DNA, 670 bp, Zea Mays
ctattattacccagatggagtcattccctttttgcgtccggggcagtccggttacgaagtccatgcctatttcttcccacttccattcaggtatcgggaggggttgtaataggcctgcaggtttttggtgttcggccttcgtccgttggcagatgtcacatcgggccacatactgagctatttctttcttcatccctttccaccagtatctggttttaaggtccaggtacatcttggtagttccggggtggatggagtaggccgagtcgtgagcttccttgagtaggacttctcgggcttccccttttggtacacacagacgatgtttgaaccaaaggactccttggtcatctgtcctgaggtccaggagttgttccttgcgggctttctccacaagccttgccgtctctgggtctagacgttgagctttgcagatgaggtcttctagcattggtttgacttcgagactgtcgttgttccccagacatgcatttagttgtgctgattctttcttccagtcttctagaaagttggttccttttattctgaatggttttcgactgagggcgtcggctaccacgttggccttcccggggtgatagtgaatttctaggtcgtaatccttgatcagctctaaccatcttcgctgacgttggttggttgcctccat

SEQ ID NO: 155088 - DNA, 333 bp, Zea Mays
atttaatgacacacatccgcagtacctaccactgcaaaagaggtggaggccaaaggccgttgaaataaatccaacggccacgaagacggaaaatgagatggcaactttatcgctctctgctagtacggcggatagttcggctataaaggtcggaccgttcatggatgaaatggaccgtctgtctctcgagtccggaccattcgctctatgccaggacacctccaaggacgcgccaatacctatgggaggaggaggacctgctggaagaggacttggtcgattacggagctacgctggaacactcaggtatggacgtaaatgatattatgttct

SEQ ID NO: 155089 - DNA, 486 bp, Zea Mays
ggatgaggctcacctttcaaaattctccatgcacccgggcagcaacaagatgtatcatgatctcagatccttttactggtggacaagaatgaagagagaaattgccaagtacatatccgaatgtgacacctaccagagaatcaaggccagtcatttgaaggcagcaggccctttacaaccccttcccataccattttggaaatgggaggacacctgtatggattttatcgtgggattgcccaatacctcccggcaccatgattccatttgggtcattgtggacagattgaccaagtcagctcatttcttgccggtacacaccacccacaggacggagaagtatgcagaaatctacactgaccagatagttcgtttgcatggaataccaaggactatagtatcggacagaggagcacccttcatggcacgattttgggagcaattgcaggaatcacttgggacccatgtaatacgaagctcagcata

SEQ ID NO: 155090 - DNA, 284 bp, Zea Mays
gtgaagtcctgggtccctagaagaagaaataccctcaagttcagaaactattgtatgcagtacttctaactgcacgcaagctctgtcactacttcgacgatcaccaagtcatagtagtcactggatttccaataggggatattctccacaataaagaagccattggaagaatagccaagtgggcctatgaactaggagctcatgacattgagtttcgacctcgcaccgcaatcaagactcaagcactagttgacttcgtatcagagtggaccgagcaacaagtg

SEQ ID NO: 155091 - DNA, 638 bp, Zea Mays
cctgccacagacaatccgacgccgtgaagccacgtcagatgtcaaggtgggcccaaccggacacagctgtgcactgcgtatgtctctgggggtatctgtgctcctctggctttacggagagatgagatctgtctgctgtgcctagcttgtgcaaagctgcaccagtaagctcatggtgtctccatcttccgtccaccactacactgccccagatactgtgagatcttttctccaccgtccggccggcgtgattcttcgtcgctgctggcgattaacccgaacgatccgacgctacagctagctagctagccttcaagctccatatagctaccactgcgcgcgccctctgtgaagagcgctagctcgatctggactggacctctccctcggcgacaacggctataaatacctgctgctcgccaacccttcatccatcaaccatagcagctaagctagtgatttccgagcttcacatcaccagtagagctccacacgtactgctcacccagccagtcttgttgctgctgctagctgctagcttgctcgagctagttaggtcgagcgagggcgcagtgagccaacttagctagtgaggcatatggcggccatggccaggtctgatgatcagtgcgaccgtc

SEQ ID NO: 155092 - DNA, 443 bp, Zea Mays
gggctgctatcactacacaacaagtcaaatctccatcagacgcacctattaaatctgaaataaagttgaatgctcctattttacttgctacacgtgctgattttgatgatttacatgagactcatatgccctgttatgcacttgtatgcttgcgtatgcttgttccgcttgatgatgcaccgtctttagatataccccctgctgtggttaactttttgctggagtatgttgatgtcgttcccacggacttaccacagggtcttccatcgctccgtggcatcgagcatcagatcgatctcatccccagcacttcgcttccgaaccacaccccatgccgtataaatctagatgagactaaggagatctagcactaggtgcagacgctgcttgataaaggatacatttatgagtctcttacttgttccaaagaaggatggatcatg

SEQ ID NO: 155093 - DNA, 1090 bp, Zea Mays
tagtggttgccctaagatgagtagacgtgagcatgtcgcaccgtcttaagtcgttgccgacttaagccgattgctccgttagtagggtatagtggtcaccctatgtctagtaagcgcgagcatgttgcaccgtcttaagtccttgctgacttaagccaattattccgttagtagggtatagtggtcaccctaagtcgagtaagcgcgagcatgtcacaacgtcttaagtcattgccgatttaagtcgattgctccgttagtagggtgtagtggtcaccctaagtcaagtaagcgcgagcatgtcgcaccgtcttaagtcattgccgacttaagtcgattgctccgttagtagggtatagtggtcaccctaagtcaagtaagcacgagcatgttgcaccgtcttaagtcattgtcgacttaagccgattgctccgttagtagggtataatggtcaccctaagtcgagtaagcacgagcatgttgcaccgtcttaagtcattgccgacttaagccgattgctccgttagtagggtatagtggtcgccataagtcgagtaagcgtgagcatgttggaccgtcttaagtcattgccgacttaagccgattgctctgttagtagggtatagtagtcaccctaagtcgagtaagcgtgagcatgttgcaccgtcttaagtcattgccgacttaagccgattgctccgttagtagggtatagtggtcaccataagtcgagtaagtgcgttgattccaagtttaatcaaatcgaagtcaattgataaccaatagtttgaatgcctttgagaatgaaatcttttattgatgacgtattttccaattacagagtacaacattgctctgatagcttttgaagtcttgctaaggataaaactttctgaggtgctctatattccatgagttccccacttccgtgccatccatttgagtaagccgatatgatcgtggccgagtgacctccgataccacaaatggcccttcccatagtggtgacaatttgtgtcgtccttctcccgttagaattcggcgaaggaccaagtctcccactgttggtgacttgttctcaaatgctaag

SEQ ID NO: 155094 - DNA, 398 bp, Zea Mays
ttcagcttctatataattcaagaatttgcagcattctagagacttgaatcattctagcactttaccacttcttagagttaaattaattacatgaggactagcaagtagccttacaaatttttatccaaatcattcagtgcactaaagttactacaatcaattaacaacgcattcttcacgacaatcactcaacaatttgcattttaaattagacatcacatgagcactattacttttcatccgcgaccataaacatacacatttagactacaataagcaaatcatcgtgactacgagcttaaccaagtcatctattaattcggctaactagcgcaacaacataggccgctatacatcctacatgtcggcttgcctcttatcatcgcaatccgagacaa

SEQ ID NO: 155095 - DNA, 876 bp, Zea Mays
gagaggaatttggtcctaaactgcgactgtcaggcacactgaagaagtatcccatggtacagtgctctcgggtggatcaggttgccagcgctgcttgctcgtcgacggcgacctccctgcgcgaagattcgtgctgccaccgcccggattcgcgcgtgtggctaccggataatatcgcggggcaagtaaattttcgccgccggtgagctggactccactccggctagccgcgatacccctcccctttctcaccgccctcggattggaatctcatcgccgtcgtgccatcgccgttgtccaccgcgtgtccgagcctcgccaccgcatcgccatgaacccatgtgcctcttcgtggctcatcggagtgactgccacggtttcacgtgcgccagtgctttcttctacctccgaccgccgcgcgtccttcttcaaattcccggccaccgtctaagccgcctataaattgagccctcccctagctgcgcaacatcattgcgcacccccacacctagtattgctcccagccgatcaccagcaagctccaattttgtattcccctcaaatcagtcgaagaacaccgtgaaaccaagttcaatgtggccagagcaaaacacttgatcattagtgaaattaagttaggggaaaggcttgggatggattcaattaggtgttagtcgctcggagaccctagtcgttgccccaatcggccggcgtatgagctcgttggagctcggccgtgttcaccgccgtcggggacctccctctgcgaaggaatagaagtttgaggactcttctgcaaagcgtcagtgactcaagaaaacagtgaaagaacccgttcctagttagccagaacaccgagggtttttctgcaaagta

SEQ ID NO: 155096 - DNA, 857 bp, Zea Mays
atttgatgccccatcatacccttgtccacgcaatctggatattgacaacccatgaaaagcaagcatagaatccaaagcttgctttagagaatacgatgtcgtgtcagcaacctcttcaataccaagaaatctttcaataacttgacctcgtgcattaacatacctcaatataacagtcatttgttcctttatagatgcatctcgggcctcatcaacaagaactgaaaagtttctacctccaatatcttcaataataactttgctggttaaatcagcacaagctttgcacaagtctttttgaattgacggtgaagtcatttgattagtacggagcaaatgtgcaacatttttatccttgctcttataccattctatcatctctaaaaaatttcccttgttgctcgaggaagaggactcatcatgtccacgaaatgcaagagcctgaagcaaaagaaatctgataacttcaagtataacaatcatacgacttttatattcattatccaccttattggcaccagatgtcatagcatatggcacactttgcctttgatttttgtaatcttcataatgccttctatcattattatgagcaacacctttatcatgtccctcaattaatttgcgaccatccttccatccacggaacccaacatttgtgaaggaatcaacacataattttcagctcttggttgcttaaagaggtagcaataaaaacaaaaggttgcatccttggcaatactgtactccaaccatgcatgattattaaaccaatcttcctgaaatcgtcgattgcgcccacatattattctttgtggataactatgaccttttggttgacatggacccatcaaaat

SEQ ID NO: 155097 - DNA, 749 bp, Zea Mays
tccagttcctccataaccagaaacaaaaaagaaccctggcatatcagagagtacagtttgtacaatagaatgaaaggcattcatttgttgtgtattcaatttgcattgcaattcatgggattgagtcaacatgtcattgatattataaaacaattcttcttcgatgaaacgatttccatgcaaagtttcggaagatacactttttgaaggtaggtcgtggtttttaatgtttccaccacattttttgaatagaactgtgagctggtctattaggtgatcttttatttgatgttcttccatttgatatgcaggatgatttagtgttttgcgcatattgtattgaatatcatctgctagtaatttccaaactttttcaaagaatgaatgttcatctccaacttcgcaaaaaagtaacatagtcacaaaaagttgtcgaagttggttcgaagttgcccatctagctgcttcatcgaacgcagtataccactcttgatcatcatttagaagaccacgagctttgcatgcttctttgaaggtacggtataacacaccattatattttcgtagatcttcgtagctttgtgcacctttgacagtcagtagcaacattctaagataatatctttctcctgttgatggatgaacatagtagatacgaccaatttttccttcctttgttcatcttggcttccaacttcttgtttgttcttcccagcgccatttggatgggaattctatgtaagttagct

SEQ ID NO: 155098 - DNA, 586 bp, Zea Mays
gcaagagaagaaataaatctataaattggggaaataaatatgaggaagatgaaaggaattcatgtcaatcggggaaacagatatggggaagatgaaaggaattcacgtacaagggaaggagatcgaaaaaagggattcacttacaagggaaggaccgaaggagatcggaaaaaaggaaaacaaacctggcggatgctacattccctacggacgttggctacaggcattgacacacatataaacaaaccaagtgctcgggtatcatgacatggccatgggcttccctgttccctgcccttccccgtcactacttggcacaccaaagagaggcaacctcacgatcgacctacatctctttgtttagataacaacaggcgagttgaggcccaacacatatatatttgatatgctctcgttattattacttttagttaaaagttacacgggaatgctgcacggagagcgtttcacgcgagttcatccgcttaagcagcgacgcgtgtgtgtgcggtacagtggtcccgtttagctgttggtcggcgtgggtgtgggcccgcagccgtctcctctcaggtcgtcccatctg

SEQ ID NO: 155099 - DNA, 279 bp, Zea Mays
ttggacgtccagctcgtgggcgcaaggctcgcggcggcctggatgcgcagggatcctctctctccgtatctccacgcgtacaaactgacacaacaaaaagccactaagttgcatcggtgcatgcaagctcttctccatacatacaacccaccaatcatcggttaagtgtggtaaacggaacgtggagggcctggacgcacgtggctaggtatccaatcacgcggattgtttcccattgctgcatgtacgacccagtttggacatatgagaagagcacac

SEQ ID NO: 155100 - DNA, 909 bp, Zea Mays
gtagtcgccggtgaacatgaattccgcccccggtgatttatcaaggtattgaacgggcgtaaagcaaaaggaggcgacggcgaatgcaagggttggtttcttaccggggtcaacaccgcagatacacgcattcatgacgaggagtggaaccagagcgttgcacaacggtagcgagggattcccccgcacctggttgatctccatgctttatcgaggccacccgagactcagtgtgccaccccgaagcaccgccatcgcattccgagaattgggcagtagcacatcccgtgttcgacggcggcggcttgagttcctccacgacggcgtagactggagtcaagcacagaggcggcacaagtcctagctgacctggagagcgaagggaaaggtcggggctttatatcagagcagcgtccggattgcgaggccggccggcgcggttagttgtaacagctcgcgattcacgcgcatctgttgaagctttgcaagtgtggaggaagaagatgaccagtggggcctaggtgatagtgacattagggttcatgagtgtcaggccagtggtccaacggtgaggcccagcgtggaggtatttgagcccactttggcccaggccgggtgcaggggaagaagagaatgtcggtgggcccgcgcaccagtgtgccatagtcatgaccacgcgcgcaagggtgagtgcctgcccatggggcccgcatgttggtgacccacacgcaccgaggtgagcgcggttggttatatgggctgaggtgttggctgggcgggggtggtccagttgggccgaaatgagaacgtgacccacttatgttttcttctatttttcttttatctccgtttatcttttccatccctttggttttctattccccttttattttcaaatactaattcttc

SEQ ID NO: 155101 - DNA, 553 bp, Zea Mays
caaggtgggacccgtgcaatgcttccttcgagctcgaaaggtcaccgcgacgtggcatcgtttgccattggcgtagatgcggcatagcggttggtctctggttcatgacactgggacatggagctcttggcttgttgttacacaacaagatcgaggaggtcccagatctcttggtgggtcttccattcgcttggtgtttaggccttgggagattgtctagaagagcagcagcagcgacgacgttttggctcacccgggggaaacacggcgctgcgcccctgccataaaccaaacaacgatgtgcttttattatcgtgttgtgttgccgcctcaccacttgtgtggtctcctcgtccccccacagccttccttgtctttttgtcatggggtgctactcgctctatgagaggctcgagctcaatgacatctcctagggaggctggctgagctaaggcagggaggacatcatggtgcactccatgatgttggacgagttctcgtccgggatccccacatggggaaatgatctcccatggtgttggctgcaaggcat

SEQ ID NO: 155102 - DNA, 574 bp, Zea Mays
ggccatctctgttgtgccgaagggcaagaaaatcaaagttttgacccatcgaccgagatatattgaaacggtcgtagtgccaaaatttggcgaaggaacattttccactgctaagggaaaacaattcaatttgccgaaggtgcctatagctgagccaatcgaaacaccagaaaatgctgccgaagccaaagaaaaggcggtcaaaaaaccagagctagaagaaacaattatgccgctagaaatcttgagtccaccggcagaagtagaattgcggaaggtggcaaaggctcccgcaacaactcccaagagaaggagaatggctagcgtatgagacgctatcatggagaccacggatgcattaactcctgcccctgcacagaaagttgccgaagctgccataagtcacactgaaaccgaagctgggccctcagtgcctacttacgtgaagcctgccacaactgaggataaggctgagcaagaatctccaaatgctagcttagctgtggagcaggatgcgacagaaaaagctaaatctcctattttcgaagcaccgtccgaggatgttgactttatt

SEQ ID NO: 155103 - DNA, 481 bp, Zea Mays
gtttaatctagttaaaaccaatctaatctagatcttatctaatctaatgtgatctaatttagtgtgagttacttaacggactagttaatactagtgaaataaattagaccctgttggccatgttctaacttaaaattagtacatcagaccaaaccacccatgaacaaataacttaccagcatattcatgatgaccatccctcccatcctagatgttgccacaatacacttatcttatgccaccagcctgttaaccatcttatcctaactacatgtccctaattcggataaagacttcaagaacgaagatcgaagatgatcgagctcatcaaatcaaggaaggataagattcaagctagatcttcaaaagtaatcaagatccacaatcttggatagagtctttcctagctctaccctttcataacctatctatgctctaaagatatcttctatcctacataataaaatggacatacatatac

SEQ ID NO: 155104 - DNA, 763 bp, Zea Mays
tttgaaacctgtatattgaaaccagaattcgaattaagtttgaatttttgatttggaaataaaacagaaattataaaagaaataaaacaaaaatggaaaatgcacatggactgatttcttccctggctcggcccagctccggtcttcctcggcccattcccgcgtggcccaaaccccccttctgcttgacttgcgcgcgctggtcagccgctggcgtgtgggccatcgctgtctgatccatctcccaccctgatccgatgcaacagactacaaatccttcgccaaaaatctcgccgctatctcagccaacctcatctcctttctcgggctcggacttcgccttcggagtataaatagcgtgcacctgtgaccccattgctgtgcgcggtcaatcgggaccgtgggatagccggggcccccttcgccgatgacgcagagaaccgcgggcggggtcaggaggattgtcgccgcccagggaactcgccctcactgcctgtctgtgcgcatggtcgggccgaggaacatagagagtggaaagtaacggcgttcgctggctcggtgggaaggattgatcatcagggcgtcatgaattgctcaccggagctcttcgctgttgcagtgccgctcttcgccgtgggcgtggttctatgctacactaaaccacggtgagttggccctatagctttcacaatgagttctgcgttgagttgcactagttggcacgtgggatggtccaccggagcaccgagatggtgattgccgg

SEQ ID NO: 155105 - DNA, 840 bp, Zea Mays
cgcagaggcggcgcttctatccccgcggtggaggacctgccggagtcggccaagccgccaccccagagccatgcccccccaatccgattggtcctacacggtctacagagggaaacgaatcaattgagaagatccctaccaggtttcgtgaagcagatacgggtgaccacgccgatgtacgaggccgcgatgatgtgtctgtcctccgagcaattcatggcgccccatggttcctccttcccacgcgatgctagaaaccctcctagagatcaggagaaacacccagagccaaagacgagcccatgaagacggcgcaggcgcatatccatgacatcgacttcatcatcgacggcggatccccttttctccctctcatgcactcacaatgtcgcccacccagacaacccgctagaccacgcagaaggtctgagtgactgcgcagacgagatctggttgcagtggttccatccaacttgccctttccactcggtggcactgctacgaggcgaaagaagctgcggcacaaggtagatggcgagaggggggcagcatgggttttatacccagggtagcggccaaagtccgagtcagagcaagctgcgagatccacgatggtttgttgaaccacctgcgctgattccgcgcgagcggtggaggtttaccgtggagcttggttggggaaggatctgaaagcgagggcccaccgaccggtgagaaggcaagcagagcgcgacagagttggagccaggcgtggaagggaattggtgggccacgcgagctgagcgaatttgggccgactgagggtttgagcccaatacgggtacatcctctttttctttt

SEQ ID NO: 155106 - DNA, 566 bp, Zea Mays
atttaattcaaaactctataaaacattacaggaactatggggtttattatttttgcctgaaagtttatatttcacaaagtctagcaaaattggtttgactaattttgaatgattattcttcaagttatgcatttattaagttctctgcaatatttaaaagaaaagtaaattcgaaatggaaaagaaatacagatttgcgctgaagtccctgggttttctcccccttttctctcacaaaacagccctcggtctactatttgcatgagtcactgaccttgcacaaaaccccctggacttaacctaaatctaacccgcgatccctggctggctgaaacagtaaccggggcaaagatcacggcggcgaggcttaccggcggcagtagagctccggtggggtggtcggtgacgtcgggggaggtcacggcagtcacgtcggtgtgcgggtcggcgtctgaggtggctggagctgctctggccacgagcgtaggcggcggaggtcgtcggcggctcctgctccggccaaaccacggcagtggggttcaattaaagtgcacgaggagctccac

SEQ ID NO: 155107 - DNA, 1023 bp, Zea Mays
cgccaatccttcaactgtggcgcgcacgtctacgaatcctagagcaggctcggtcgcgacctcgggtggacttccgcctcactcgatcccgactccagcctcgatatccgcaacggaaaggtgcccaacgtcaccatataccgcagaggtgatgtattacttaagggctttttttcatactcagcattgtgtcaaccactacgacataggcaacctccttggcagaaaggctcgggtacgtcatcgaaccctcggccctggcctcggctctcagtagaaatcggacgggcacaagtcaacaacaagtataagactcatgctctgggccataccttctataggggctcggctacgcctcctcaccgtacgcggccaactccagtactcctggcagcactccttgaggctataaatagggcagcttacaacttgagggaggcgggcgaacgcttcacaattttctcctccaccatgatattggcacttgcatgaatcaaccccacgaacttgggatccttttctctcctgctcagcttgtattccctactgcaagcacttaggtgcaagtaatataagtctcatccccctatattggaagtagggccttctcttgcccgaacgaggataaagaattgtgtcatcttgcatcacccatctgggttagggcacacaacattatttcactagttggtaagaccctcgggtctagacaccaacagttggcgcgccaggcagaggatcgatgcgtgcaaaacatcaagttcccatcaagactctagatggctaacttccagcacactttaaggctcgacacgatgatcaggtttggaggtttggagttcatgtcgctcgacatcgagtacgacatggtgctcctcccacctggtcccctggctaacactcaggggcaactagatgtccatcctcgtccttccagtcacaggaggcggagacggagcaaccgcaccacgtgcagcaccccatgtcctatcgacgctcttgaactggctaacgatgtagact

SEQ ID NO: 155108 - DNA, 4950 bp, Zea Mays
cttttattccttatatgctgactgactaaatatagaaacttatctgttgtctcttttattccttatctgatgtttcctttattcctggcgattccttctctggtatacctttcctacaaatgcatcggtatcatttcccccctcccccaaaaacaggtcgtccgcgacctggacaccaggaaaacggcgacgaaagtcctccagctgaacccaagttgcatcagctgctgattgtcccagccattgcacgagcagtcccacacgcctcagttcttgcgtgccttagtaaccttctcaggctgaggtaggactctgccatgtaatattgggggtagaggaactattgcagccgggggagccccagtatatttctttagtaaagagacatgaaacacattatggatgcgggcgtgagatggcagggcaagcctgtaagatactgtcccaatttcctccagaacctgatagggaccatagaagcgaggcccaagcttagagtaggcggctggtgtgattcctaaagttgtacgctgttgcagtcgaacccacacccaatccccggtagtgaactgcacttcccttcgagacttatcctggaattgtttcattgtgagctgagcctgtatgaggcgttccttgatctgagctaaaaattcatcccgatcttgtaactgagtgtcaatagcagctacaggggaaagtcccggttggtaagagataatagctggagggtctcgtccatacacaactcgaaatggtgaacaacgaagggctgtttgaaatgaagtgttataacagtactccgcctaggacaaccactgtaaccatgtgtggggtcgatccccagctaagcatcgcaagtacatcaagatgatccggttagtaacttcagattggccatcagactgtgggtggaacgctgaactcatctgcaacttgacccctgtcctggtgaacagctcagtccaaaatgtactagtgaaaactggatcacgatcactgacgatggagcaaggaataccatggtgacgagcaatatgatcaaagaaagccttagctaccgaagatgctgtatagggatggctgagaggcacgaaatgagcatactttgagaagcggtccaccacggtaagaataactgatttgcctccaacctttggaaacccctccacgaaatccatggctatatcgctccaaacccctgaaggaaccggaagtggttgtaacaaacctgccggatgaaggtgttcggacttattacgttgacagactgaacagcccttgacaaaatctcttatgcggctggcagcaaggggactatggaaggaagccctccagcggttgagggacttttcgatgccctcgtggccttcttcatgaactgaagctaacaacaggggccacatggatgaggcatctggcacaaaaaattttcccttgaacagtaagagaccatcaacctcggaccacccttccttcgcagttccagccaccaactgttgcctgagcgccaccgcgatcccatctcagcccgtagagtgtcaaacagagcaaatgtgggggtggaaatactgtgtaggttctgcaggacttcatctctgcgagacaacgcatcagcagctccattgagtttgcctggcttgtactcaactgtcatgtcatacccaaataatttgctgacccatgtatgttgagggatggtggataacgttggtctaggatgaatttcaagctgtagtgatcagtctgaactgtgaacggtcgccccagagatatggacgccaatacctgacagctttaaccaagccaatcaattcccgttcatatgctggcagcttttgatgatgaggggctactggcctactgaagaaagctatggcgccctcaccttgatgtaagacagccccaaacccaactccagaagcatcactatcaacaataaagtgacgagtgaagtctggcatctgcacaaatggtgttgtgatgagggtttgtttgagcaatgtaaaagcctcggctgcttccggtgtccaatggaaagactcccttttcaataaggcggtgagaggtgctgctattgttccatatccagcaataaacttctgataatatccggttagtcccaaaaatcctctgagagctcgcaaactattaggaagtggccaggtttccacagcagaaactttgtcgggatccatggcgacccctgttgcagatatgatatgtccgaaataggctactgtagcagccccgaacaagcatttggagcgtttcagggctagttgatggtcacggagggtctgtagaaccaacttgacatgctgcagatgggctgtccagctattactgtaaatgaggatatcatcaaaaaataccagcacgaactttctgataaatggtttcaatatgtcattcatcaagctctgaaatgtagatggggcgttagtgagcccaaagggcatgacaaggaactcaaaatggccacgatgggtgcggaacgctgttttttccacatctgctgggtacatgcgtacttgatggtagccacttcttaaatctaacttggtaaagaatacagcaccacggagttcatccaataattcatcgaccactgggattggaaatttgtcctttactgttttgtcattaagggcgcgataatccacacaaaacctccaggaaccatcaaactttttcacaagaagcactggggatgaaaaagcggaggtgcattctctaatgataccttgctgtaacatagcgtcacactgctgctctatttcatccttcaacaattgagggtaccgatatggtcgtactgccacaggtggagtaccgggcagtaatctgatcttgtggtcatggcggcgagatggagggaggccgtgaggttccctgaaaatatcctcaaaggaatggagcaaagcctccatgagatcacctcctgatgctaaagctgcacactatggtggcagagcaccaattccagtccactgaatgttactgcctcgatataagaatgacatggagagggcctcaaaattccacaaaattgttccgagagtgcgaagccaatggacacctaatacaatgtcaaatccatccagtggtagggtatagaaggatatcgagaaatcagcttctccaataaccagaggcagttgagtgcacacacccgcagtagttacccgatctccgttggccaccttcaccgtcagacctggacgaggttcaacttgaagctgcagctgactgaccacagaatcattgatgaaggaatgtgtcgaaccagtgtccacgagggccactaactgacggccatacaaacaaacagaaagtttcatggtagtgccaatatcaataccggtgagagcatggagagagatgccaacatcatccaatgtttcaccaccctcatcatcttctgttaattccagcaagaaaacccctttgtttgcacatctgtgatcggcagtatacttttcagtacaatggtagcactcaccactagcccgctttgctgctaattcttcactggaaagacgcttgaaccgagggcgttggttgccaacaactgatttaataggcgtactcacgccacgggctgcagggcgcgccgtggagtgtgtgcttacagccagctccatgcgacgctcatatgctcgagcaaggttgattgctgactgcaaattagttggcccttggagttcgacgtctgtcctcaatggctcacccaagccagcggtgaagaggttggtctgttgacgctgtgaaagattgtcacaacggcaagcaacaaggaaaattgacgtgtataatcatccactgttccagtgcgatagagatccttgaggtcagcgaggccattcatgcgcagtggggggccgaacctaagattgatcaattcggagaaacggccccaggtaatgtcgccgtagtcgcgctcgatggtgtagtaccattcagcggcaactccgtcgaggtgcagggacgccatccagacccgttcctcgcgcagtgtcctcatgccgcggaagtagatatcacattttgtcagccacgccagggggtccgattcaccgtcataggacggaaaattgggcctgggccaatgtgagctgtcctcccgacggaaggggccatccccgccgccgccgccgcgcagcccctccttgaagcggccgccgtcgttgggggattttggaacccctgaagatgcttcctccgtgggtggaatttccacgcgggcaaggcgacgatcatgagattcgaggcgtgtgttgatggtggtgatttgggctagcatttgggtttggtgatcaaggatttggcgtagggagtcagcgagtccacgcccatcaggattctgtccagtgccggacttttgggtttggtgatcaaggatttggcgtagggagtcaagcgagtccacgcccatcaggattctgtccagtgccggactcggaagtcatggcgctggctgtctctgataccaaatgatgcggactccctgctttcgatggaggctcagtaggaggttgtggacaagaacgcaggaaataggagtgggaagggggaggaggattcctggtggcgttctggacgctggagagttcctccagtgcgccccaggtaacctcctaagactaggagatttatttcttcttttgataatccctagtacaagctacccctggtctcttatagactgagcccaggttaatatagaaacaaatcatatcactctcaacttgctagaaaacaaactgactaaatatagaaacttatgtgctgtctcttttattccttatatgctgactgactaaatatagaaacttatctgctgtctcttttattccttgtctgctgtttcctttgttcctggcgattccttctctggtatacctttcctacaaatgcatcggtatcataggtacccaacgcagggca

SEQ ID NO: 155109 - DNA, 424 bp, Zea Mays
agtgttgtcatgccatgccttcgtttgcgtttggtatttgttcaatgcttccagggcaagaacacgatctccatcgataaggtccttggaggttgactcatcgacatcgggagtagctatggagtttgctcgtggagatccatgctacagctcttgtgacatcattgcttcggatccatacatcaagcaaaaaggtgtgaacccagtagctctggattctattgtgttcagcgcccatatgacttcgggaagttggtctgcccatttgcctttcttgtcttcgagtagccttttcttgatggtgctgaaaatcttactgttggcacattcaactacaccattggattgtgggtggtagacagatgcgaacactgccttcgtgtcgatggagttgcaaatttcctggaaatcttggttgtcgaat

SEQ ID NO: 155110 - DNA, 1251 bp, Zea Mays
ccggatcagcacaatacatgcgtaacaacacctaccgggtgcgaagtcgtctatggcacgcacacgtctatccacgccaaagtcgtctaagggtgcagcaaactcacaataagcacaacaaaaacacgaagtcgtcacaaaataacatcaatatatcaatataaagggcacaaagacgccaccaagtgcaattcagcgcacaacacacgttacaactacacggtgtacactatacacaggatattcacccatcacaaatgtccccattgcagttctttggcaaagagggagggcagcattttcgctcatcgtcgccaaagaacggcgatggcaatactcatcattacatcggctcttccttcaggataagatcagcttcccagaaattaaacagcatcaacttcaactcttccccttcaaaaaggtcccacagatccccttccccaatacacgacccagacgtcgacaccagtaatccgtgacgggcaccttgatctagtcgtggtccgatccgaagatgtgatctctccatgcccattttgctatgtcttctaacaccttgtgaagactcaccgactctttgttttgacacccccatcttttttcgcccccgcaagtcgcccgggaatgcacctatcgaagtcaacagtgctttgcggggggcggtcctcaatggagacttcgttgcagctaaatccaacgccacaaaattgtctaaaaatcgtcctccgaggattcatcatccatccacgaaaaaaggctcaccaattttccacccttcgaagaccacgacccgaagtctgattccctcgacacattaccactaagagacatcacatttgcatccatcaaaatatcatcactcatagcatcatcagggtttgcttgcgcaagctcggacgtcggaacttgcgcaacaaccgatcttcagtatcatacaaaactaacactatcagtctacccccattacattctctcaacctgcgtcgaagcatctgccgtcgtaggaccctcaacgacacctcctggaagcgtcgtttgctcttcggctcccgcctccgtcgaagcatccctctaggtcaccgagctttcaaggccagcgagttcctccacatcttcttcgttcatcacctgtgaagacagcacaacaacattttcaaacaacgaacacacacaacacccctcgcaaaaccaacaacatacctgcgcagcgctcggtctgccctttcccggacaatgtcgcggccgtgg

SEQ ID NO: 155111 - DNA, 661 bp, Zea Mays
atagtagtcagtcgaacaattagattcatgcaaaaacaatcagttgtgttatgcagtagccagaaacaatcagttgtgttatgctctccagtaaacaatcagttgtgttatgcagtagccagaaacaatcagttgtgttatgctctccagaaataatccagtaatgttgtttaggttgcaaccagcgcactggttccatttgcaactggtctattcatctagttgttatcgtactctaaactgcagtttccaatattgtttgaaaaatctcagtcattgcagttgcaaccagtgtatgttttagagttccaactggattataatcgtacttgcaaaacagtgtatggttttgcagttgcaaccagtgtatatgttggtgttctgtacccaccggcgaggtggagcccttccatgtgaggcagttgcaaccagcgtatatgttacagttgcaactgaaattgtaatcgtagttgcaactgaccatgaccactcctttttattttctatgtttgtaaccagcatgatggcaaactttgcaaacctgtttatgagtagtagcaactgttatatgataataaaacaagatatattttaattatatgtcgagacgtaaacagataacacagattcatgtattattcagtgtatacatacagttgca

SEQ ID NO: 155112 - DNA, 761 bp, Zea Mays
ctaggatttcatcaattccgtgggatggtagtacgactaagtctgccaggaatactacaccacttaaaagaattctgacttgggagcacctgaggtggcacagaaggtctgaccctatggttcggatgatcagaggttcttctaatggtgtagtgggaatgccatgcctttccacaaaactagtggcaatgaaagaatgagatgctccagaataaaaaagtactgcggcaggggcaaattcgactaggaactcacctagtactactctaggggtttgctgagcttcctgggcatcgacgtggttcactcaagccgtgctgtggaactgcgacctgcttaactgactgttggtggagggtgccttggaggtgggtgttgtaacattcttggggccattcactaagttggagtaggcaggtgcggtcggcttcagttgtggacaattattcttgaagtgaccggggtcaccacagtgccaacaagcattggttggaggttggctgcttgcgacggactgagtgtggaaggaactctgaccaagatggttgaaacgcgacagagaagatcctgctggcttgctgagatttgaccccttgggaggaaacccaaaagatcgaaccctctggtgcctgtcttcttgttgagctcggagaatctgaaactttctcttgaggtgacctctttccttttctcgagctctttccacctagatggccttgtttgagaggtgagagaagctgaggaagtcttggctagcaagg

SEQ ID NO: 155113 - DNA, 742 bp, Zea Mays
cgccgccaactcgccaagcacccagcagccctctaatggagactcctacatctccattatcctacagcagccaactcgccgcaccgagttattctatttatcaactgtttcactgtcaggtgtatattatcctacatctccattaatgatgcatgctgttattgaaattactgctcacctaaatcgttttgaaaatgatagtaaacttagacaagttatcgtgcctatgaaatccaagtttctaaaatattgggagaagataccattgttgtattcttttgcattcattttggatcctagagctaaactcactaattttaataatgcattgcatgttctttctgattcacttcatcttgattactctagttattccattgaagttaaaactcaattgtcaattctatatgccaaatatgagtctaaatttggttctgtacgtttgcaaagaccccaacctgcaactattggtcctggtaatgtattgtcttcatggaaaaggtttgtgaggactaatccatcatcagcaccatctgtttctactggaactgtttttaacacacctatttctagcacaatttctgagttatcatcttatctagatagtgatcctcttactgagtttgatgattcatttagcgtacttagttggtggcgtgatcataaaagaacttatccaattttatcaattctagctaaagatgtcttaactgtccctgtatccactatttcttctgagtcg

SEQ ID NO: 155114 - DNA, 592 bp, Zea Mays
cgggttgattggccagaagaagagcggctcgtttgcaatttttatcagccgaagcggtatgagccacctctggccgtccaatcagaatcagacgcgccagatcataacgcgaaccgatacgagctcgcgagcacaggatcccgatccaacggtctacaatcatggtttcctttcgcccgcacatccgatgatcaccggccgagatcgacatggctgaatcagtacgctggctcacatcgtggacgttgataatgaatctaacggttgcgcatcaatccggctgaacgactacggtcatccgatccccactgtacagcacgggatcaacggttgtcggcattcttctacctcaccggtcctctctctcttctttttttcttcctccagctaatccaccgcggccgagcaccatggacgcgacaacgaactgttctgagctcgtcattcgagccctatctaccgctcggacacctctgctcataccttacacggccacgcattcatcttctttcctacccccatgactagacctgacggcgctacccgacacacttgttgatagaccaaagcccgagcctacgaactgctaccg

SEQ ID NO: 155115 - DNA, 1938 bp, Zea Mays
gacgtggtacaggagcgaccctcgggcggtcccccgcgcgtccagctccgtcagggcggccgcgtcgcacctcacctcgcagcggtcctacgcgcagtccaggggcaccgacctgcacccgagctcgtcggccgccagcgccagcaacgccaaccccaggtacaatcggctcgacgtcgcggagccggccagcggcgtgggccgccccggctcctcctcccaccagaaggacttcggcatgagggacgcgtccgccgtgagtgccagccagagccactcgatcttgcaaatcttgatcacagttaaacagttcggttcacgcagcgctaatcgcatttggaaacatttttttttccttccctctttttgccagggtttcggagggaggaacaagaggatgcattactcggggccgctggtgccgcccggcggcaacatggatgacatgctcaaggagcacgagaggcagatccagcaggccgtgcgcaaggcgcgggtcgagaaggagaagaccaacaggcaccattactaaacgatgagggaaaaaaaacaattggcatcaagtaagcgaatgaatcccatggtctcagaccaccagagcattcgttacctctccatggaaatggaatggaacaggggccgcgagaccatcggtgaccgcagccttgcgctcggggcagctacgctacggctcgggctcgggcttttcttggtccatcggagaggcagcatgacactgatagggaggatactgtaaagacaccccaaaaggaaatgtgttcgactttaacagcgtagttatcatagctccaggcttacaaggtttgcaagattcagaacaaactctgcatgcgccaaacgtgtagtgtagcagaatagttgcaaaatgctggtcaaacagtgcgcgtagacgtcggtggccgccagcagagttcagaacacaagtctatatgttcagtgaggactggaacccatcacaaaatcttccaaaatcacaacaaaataagaaccactaatgttttaccaaacccattagcggcatctgagaagtgcaagagtccgctgccttccttgaatttgacagacaattcaattaaactaaacaagtcgtgcaagggactagtgtttcaccatctgcaagttatctaattctatgcatgaaaccaattgaataatatgaacatgattgcatcacatttgaaacttacgttgcctcagtataagcatggataaccaccattcaactgctataatgatattatcaaatggccctacaaggtgctattcatgagttgcagcctacatttccaaacaaaaagcatactaaatgcttgcttaaccaaagagagctatacagtctacactatgcataggaaagacaaggtagccggaggatgaagaaaaagaaaaaagggcgacgccatgctcccgccttccttcttccgctgacggcccgtactgaggatggtgtggctgctgggccgtcttctccgcgccccgggcgcgcggtcgcgttggagggaggcccattgctacaggtgcacgtcgaggcttgcaagggacggcgtccttcaggttcacaggtaggtttgcctcttgacttccttgggtcgcactcctttccccatctcgcttcgcgtctttctcgcctctggtcgcttccgtgttcgtcgcgagaaagtttctgtggagggtgggtatcctctccgcttcgcccgccttcgcttggtgaggagtggcctcttccgggtcgctctggtgtgtcggttctgatggattcgaaaaatcgaaaccctaactgggatcgatggggtccgaaggagacgccgcagggatctcagtcgtggggaaagaatcggaaccttagctggcgtttgaagactggatctggtaaatctgaggtcaaagatgatattcccgtctccgctcccggtgatt

SEQ ID NO: 155116 - DNA, 320 bp, Zea Mays
gttggaataagataagaaattgtggtgagtactagactgcaacacatcatcaaaagtgattgtggaacattgttgacgcgcaaaattatcctaggaaggaaatggcgtaatctttccaaagtcaaccatccccctttacacggccaggctgtgtatctaatgctgattaggttgcccctagaacccgcctaggctagcttcctctattcggccgactatagtggtcggcttccccgtgaaactcagtatagccgacttttgctagtctatgaaccaattcgtttctaagtcaatttttaaaattgaaaacttgttgcacg

SEQ ID NO: 155117 - DNA, 898 bp, Zea Mays
cttgccagaggtgtactcccgcttgcccttgcgtcgaccagagtggtggtcgtgtgggccagccttctgcttgcccttcatgggggcaattggaaacaaagtggtcgggtcgccgtagttgaagtatccatcttttgacccccacgtcgctggttcaggcagttgttgtgaaactgcgtgaactgactggccataagcgccagcttcttatccccaaggctttccacctgctcctctatgatagacagcaaagaagcaaaatcaaacatagcaggtgagggttagaggaggaaccacctccagagactagggccatgttgggtgcaccagggttctcaatcttggctgagtctggtggtcaatcatggtggacgtgagcttgctgaacaactcatccatagtgagagcctcgtagttgagtgactcgatgatcgccgagaccttcacttcccaaacccttcgatccagatcatgaagtagcttgagtgctctctcgtgattatcataaggttactgtgccttgttggcacgcatcttgttcacgccgagtaaacatagtgtctatggtctctctagtaaactgaacaaagttctcatactctccttggtacgtctcaaagagtctggttttcacattatcattgccctcatggaatttttgagggtggatcatatctcgtgagccatagacaaatatccaactcattcaaactcactcagagtgaggcacgagaataaagcattgcgagctttgttgtctgaatcacggatcaccacttgaattggagtgttttgttcacttacaacaatgaatgcaacattgaggaaaatctcccaaacttgatatccaatacttttaagaaacatagacatacgaatcttctagtatgggtagttg

SEQ ID NO: 155118 - DNA, 598 bp, Zea Mays
acccttgccagtctcgatcgcgccttctctaacacatgaatgctcgcccttttctcctccatctccctgaatgctctccctcgccccacttcagatcacacacccatcctagtctccatctccacaacaattccaaagtccaaaatcttttgctttgaaaatgcttggcttctcaaccaattcttcctccccgtcgtgctcccggcttggcactccgcccctgtcctccctgacgctgccgcgatgctggccgcccgcctaaaaaaactaaggcgctccttcaaacactagggctagggctggaaacgagccgagccgaacccagtctggggcgtttacaccgacacaaatcctcctcggtcgctgactgcaccttcatcatcatgttgcttgacaccttggatgaagacataaacctttctcctgctgaatctcaagcccgagggctatgaagatcatggttgtcgtagtctccttgagcgagctaccaactggaaacaaaagaagcaagcagaaagccatcagagaagcagatgaaaatattgctttgcaccatgctcacgcatgtgctcgaaagaagaagtgcttcatcacccga

SEQ ID NO: 155119 - DNA, 574 bp, Zea Mays
tggagtattagtttgaggttgccattccgagatcgtgacacctctatctctaggggtaaaacttatgaaggtgctcgatgttccacaaatttctgactacagttccatgcacgtggacaacctataggaccctgaccgagtgaccttcgtgatgatgtaggcccttcccaaggaggagatagcttgtgtcattcttctcctgacagcaacctatgaagcaccaagtctccgactaaaaaagctctaaacgaactgctctatcgtgataacgccacaaagtctactgataccgagctgactggatcaccgtgttcagtcgttcttcttccagcatatcaatttcttcgagttgagttgcctctgcttctactatatccttgaacatcaaccttggtgccctgaacaccaagtctgcaggtagcattgcttccgacccctataccatgaagaatggattgttgccttggagtgcctggctcggtagagtcctaaggctccaaatgacatatgggagctctttgatctatttccctgcaagcttcttgttcttgtaaaaagccttcttactcaacgc

SEQ ID NO: 155120 - DNA, 429 bp, Zea Mays
ccccaccgtctcataactcctcgtctcgcccagatccagatcgcaggcatgaaggggagcagttactaggtacgcagacatcccacctcttgtttcccatcatcaatccacctccaatttccagagacccagatcacacgagcatgctcctttggtccctgacgacgtaggtaagccttctcctcttctcccttttccacccaggagtgtgtagcagccatttccccccaacaaatccccttccatggacgcctatctagaagcccatcaccgacagatccgtccagccaaatcccctcgtagcctcatgccctcacctcactgaagcccctagtttaagcccgatctcgggccatggcgcacggcgtccctaggcgcggcttcccttcccctgttctcggccgacggcgagagcttccctgcgcgtca

SEQ ID NO: 155121 - DNA, 459 bp, Zea Mays
gcgttgagtagacagtagagtggtagtgataatagcgtggcgggctggcggcccccgagcagagaggagcggtcgggtcagccgtgaccgtgagcgtatgagttgtggacttcgcatgtcagtgggtgtgtgctgctcagctgggcaggagcccaggagtttggcactgacgagtaggagaaatttgctatttagtcattgtcagttttgaatgtctgttattatgcttgatcgatgagaccatctatatctataatttgtggatctaataatgtactgacgacgtctaaaaatggtaatgtcaaaattgccaatgcctcgaccagtaaagtgcacacatgacaacaagtacccccacagccttgcacttgcacgtgatgtgaccaatgcaaaagtgtaaaacagggtaccttctattttgtatttcctacattggcaacggttaatcttgatctttta

SEQ ID NO: 155122 - DNA, 852 bp, Zea Mays
tagataacctcgggatttaatatgcaaatgttcccaagactcaggacctacccgcggaggactgcgggtttaatccgttaaaagctgagagctcttttgcactatttccaggccgaaggggtaaggagagattcgggccgtccgatcaggaatctagggctcaagttagatcgacgcagtacgcgaaccggtattgaatcctggctgacggatcgccatccaacgatccacattttaaatatcagaggtccccgcgatccattcgatcgacatcgaacggacgcgggcgaaacgctacccagatctaatcctacgcgatcagccgccatccgacggtccctgaaaactccacaaagggtacacggtttcctaatctagagcgtaatacgggagatcaacggctcctgtccgtcttcttccccacgcgacggcagtgaacagtggcgttgccagctgccacggcgaaggacgccgacgatgggccacccagtcattccaacggccaaaccccacataaaatagtgctaaacaatgaggggtcaacggcgaacgcgcggggagagttctcatatgtgatggcgcccaacagagttctatcgacgaggaagcacggccacggcgaaatttccagccccggcgatcgattcgcaccggcacagcgccaatccccgacccgggatacagcggacactttccactaccaccagcgtttcaccaattcgcgtttctggcggccgaacgacggtggggaagctcctgcctggtggagaatcggccgcgctcgcacggcactctcacagcgcgcaacagcgaacgccgcccccccggtagccatgcacacacccagcggcc

SEQ ID NO: 155123 - DNA, 512 bp, Zea Mays
tgccaataaggcatatcttccctatgatgatcatgagagagcgctaaaatttctacatgttctagatcggagggtttgggaggtgaaggtctcggtgatcatcgagtttcccaattacgagactctcaacgtggaagctcaagtccaccaagattgaccacaagacccaggctaagattaagaaccccggtgcacccaccatggacccagtctttggaggtggttcttcctctaaccctcacctgttatgtttgctctttcttatttgttgaccattatagaggagcgggtggagagcctcggggataaggagctggtgcttgtggctagccggttcatgtggttccacaacaaccgccagaaccgacgacatggcaagttgaaggatggatgtttcaactgttgtgaccccaaccacttcgtcgccaatttcctcaacaagggaaagtctgaggctggctcgcgcgaccaccactctagccggcgcaaggacaagcgagagcactcctctg

SEQ ID NO: 155124 - DNA, 793 bp, Zea Mays
ggatcatagggctaaaactttgacacagagagcaggtcgagtcactacatgaaattaggagcaaatttccctgcaagttgctctgtcatgctgactgaatgagaatccaatggtacagtgcactgaaagtatccccaatccactgaacctcgcctccgatgagccatgcgcccggattcgcgccagccgcggtgattcatgcccagcgcaaatggataacaaagaagggcaaaaatcttggcgctcggattactcgggctcgctcaccgttgtgcccgccgtacccacttggaccgtgactggtcgaaatcatcctcgccggtgttagccgctcaacgatcgtgcgccacgtgccttggtgtcttaccacatcgcagtagctcgtgttatgcatatccggtgatcgccggtgagttcgccacggtgaaagccaccaattgcttgtgccagtgcaccccattctctccggccgccgcgcgtgttttcccaaattagccgccaccactcatgaatcctataaattgagcgtgccctcagctcctctaggtattcaagcactcagcgcacccactcgtgtcccaaatcgttcaacagagaaccccaatttgggatttccccccaaatcggtccaaaacaccacgcgaagtgagctcgctgtggccagtgtgctacaggtccgttcatgctctctgctctcccgtttcattgcccttatgttctcctgatgctcctcgacccgttcaattaagctagaccgcgctagatcatcgggaacacctctgttcatccgtag

SEQ ID NO: 155125 - DNA, 446 bp, Zea Mays
gggaatggacaggggctcagttccacgactatgcaccggcgatgaggttcaagttggatctcttgtcgaaaacaacgtacacagcaaagcataaacagcaggatgatcgggcaagctccggcgagacggcacgatggcgtttgacttctctggtcgtaggcagcagggtgttttagacaagggctcttgacgacgggtaccgggaatttgttgtgggtaggggatgcgacgatagagcgacttcacggtgccggtgaacggagacagactctgcaagcaggaaggtcttcacgagtagcaagcaacatcaatggtacaagggaaataaggaggatgaacatgcgctagcgtttgcagcaggaggaaatgggaggggtactgcgctcttatattgaagaggagatgaggtggattaggatcaaattaatcacagattaaattgctaa

SEQ ID NO: 155126 - DNA, 348 bp, Zea Mays
ttcaagatcatgagttgggtaattcccctcatgcctcctcaactgccttgagccataagcaatcactctgccttcctgcatcaacacacagccaagaccaatacgcgaagcatccgtataaactgtgaaacgcttaccgctctcaggcaacgctaggataggggcgtccaccaacttgctctttaatgactgataactgccctcacaatcgccggaccagacgaagggaacacccttctccaagagtctagtcaaaggcttagcaatgctggaaaatttggtacgaagcgccgataatatccagcgagccccaagaaactttggatttcagagacactagaaggtctc

SEQ ID NO: 155127 - DNA, 310 bp, Zea Mays
cgctgggcaccctcccgcctcgcccgcgacgcaggcgccatcggaagcgcaagtcatcttctaggggtggttctgatccgggttggatgcaatctgatcaacccggaaatgacgaggcccctctgactgaaactgggtcagcgcatcatcagcaaccttgtgtgattggttggaacagtttgatggaaaaagcagaggaggacttgaagttcgcagtatctatctttgtggtcagtgatgtgcctgtgtcagatgctgatattgcagatgcggttgctcaaaagcttgaagtcagttctgattcgctaat

SEQ ID NO: 155128 - DNA, 1687 bp, Zea Mays
gaagatatgagagttattaaaagtaaggtatggctgatgccacactaagccataatggctcctccaccgctgttgtccggcaaaccatcacattctgtgacgcggggacgtcgagcaactcctgacttggggcactccggtcccatatgacaaaatcccccattcccattcagccattcctatcgtgcaagccatcacacactccggacgttgggcccacattgcagactacggacgcccacgtgacagccaccattagttttgcacacaccggacccacgtctgctcgcgcaaaaagttgcctcaatttgacactagcaggaacatttgaccatgattgctttctctaaagaaggaaggcttataagctggtagaagctatgttggctggccggtatggtcataaaaatgtgcaaaccgtgatgacgacataggtcgcgtgggctgtgtttctttggtgcggcccaagtagctgctaggaggcccgcacgcttcttaccctgacccagcttggctttagggtcagtctcccttgctttctctgcctagcgagccctcgccctctagcccttcctgctagcgccgtctccgtcccgtgctctcatgttcatcgtcgatctcagccatcttaggagcacccgctcactcccagacgcccacgcaaaggaatcccccatgatcttcctccaaactgccaactccctccacgatctccccctctagctcatgatccctccgcccgcccccaccccccgcctgccacgcccacgggcgcaacaagccaacaacccacactcggccccgctaccccgatccgtcgccataaatccgctacctcctcctcgagtcctgcttgatcgccccatgctcaaccggtcgaccggacggaagggcagccccgaccgtgaccacaacgcgatgtgcgacgagtgagggcagtggcgggggttgcgaccaacgacagagagccacacaaagaagcccgtcggcgatgttttcctcaaggttcgttcgctcattccttccttccttgtgctattggcgtgtgatcctagctagcgctctcttgatttcatccttatccacgtgaatcctggatcacactgtatgcagatcggattactggaaggccagaccagctgctcgcattcactggtgcacggtgtgggagctgagagctccgttcctatggccgggccccacctctcttgggcccttgtgcagatacgcagaggtagtgtcccctaatttatttgtcatgtcccctaatttgtttgtcagagctgcttgaggatgttaatgaggtatggctccgctggttcatcagtattcagtaattacaaggcattatgagttagcatgctccctcctgctaagctagctaaatgtggttatcaggtctcaataagtatccatttttaaaagtataaattgttatagccatacatgcgagtctttattttagaaataaccaaaggttctaaacctgcattgtgctaactcgtcaatcattcctgaaatgcgattcctttttttcattcagagttcggttggacaaattaagatggattgagatcttagttgttaaggtagaagtaaaagcacggtgatagcagcagttgtggtcttcgatatcttagtgtgttacttggtgatagcagcaactgcgatctccaatattctaggg

SEQ ID NO: 155129 - DNA, 541 bp, Zea Mays
aatttttgttcggtcggaatcggtaaacgggaaagtcgaaaacggataacggtcggtaaattccggtatatcgaaaacggataaatccgagcaaaatagctcgaaattgattgggaaacgataactgtaatcggaaaagctcacaataaacaaattctaaccacacatatgttcattcacatccacatataagtctcattcacaaaagtacacaaaacacaatcttgtccacatataattggtcatacactcatacatgtccactcttaaattttaacacacaacgcataagtcttaaaacacgattgctcattcacattcacatacaagtctcaaccacacaaatatacaatacatagtcatgaccacacataaatgatcatacatgttcactaaagttttaaccatatagtatataagtcttaaacacatgatacataaactagaaatcatgtagcatgtcgtctggatcacttgatatatcttctatgacatctaaaaccctaatctctaaaccctaacgggtatagttcttgcctcc

SEQ ID NO: 155130 - DNA, 588 bp, Zea Mays
gatgaggttgtcatcgaaggacatcgtatatcctaacatggacatctggatgtcggtgcaaacgacctagtcactgttagtgtagatggtgagggtcatagctgaagagcaaccgataaacaacccaagatcagtaatgtcatgatggtagcaaagaatacgcttcacgatagtgaggtgaggttctcgtggttcatgcatgtggagacaaacctctaaaccatgtaggtgatgtatggcctagtgaacgtcatgtactatagtgccccagccaagctttggtagtcagtcgggttagtggtatgagtgccgacggaaggcaaattagcctaagtatcgacaagactggtacatgacttccacatggtcatgccagtatgctctagaacctcaagaatgtactagaactatgacaaaaaaaggattggaccattggacaacgatgcttaagaagtgttgtcgaaggccgaggtccttcattaggaagtatttctagagggcgtgataaccgggcgtaataaggcactcgatgaagcaactagaatgatgtcgtccatgtagaggagcatgtacgcggtactggagcaa

SEQ ID NO: 155131 - DNA, 746 bp, Zea Mays
gcacaaccgctccgcctcgcccgaccctaggctcagccctcgggcaagttcaccgcctcgcccgagctcagcctcggcaaccaactgcgccgcgaatcccgtagacaaccactccgcccgactgtagcgcacgccgagagacggttcgactagcgtctcaagaagacttctgcatcaaccaagcagggaccctgatcttcatgagcgctgtagggaatctcgaggtcatcacgcgccagaacgatgacgtgccccgtaagtagcctttggcccataccccgacgctgttttccaaccactacagcatgggcgacctctccctaaggggctcgggcatacgaacaacccctcggactcggttctttacgggaagtcaacagacacgaatctactgcataattcgctgtcacgtcaggcgccagggcatctccccttcgaatacaagactcagtttcactgcggacactccccttggtgtataaataggatagtggtccctccacgagaaaaggggggagagaggtagatgaactctcgctttcccactctgtcttagatatcgacacttgcctcaatcatctctagggacttagggacttcccctctcctgttgtgcttgtaaacccctactaaaggcaccatgatgcgagtaatataagtctcattctctctgctggaagtagggccttgagtagcccgaatcaggataatcgtttgtgtcatctcgcacaccatctagagccagc

SEQ ID NO: 155132 - DNA, 943 bp, Zea Mays
ctaggggggaccttgctccaatcccagaggcagtaggcatggttttatccgaagccatctgccagggggagcggattactactatgcacatgccaatttttttttcaaatacgttattttattcatcacacaagttcattacaagcatacagttaccacaaatcatactacacgcgagcgctttctaaggtgcttccgaactccctttctaaggtgtccccaaattccctgagaaggtcgtcaaggctagctagggacatatcctcaacgtctgacaagttttctatcctggagggaggcagtgttggtggggcttcctattttcgttctgtctggcatccttcgctcttggtccgcttccggatcttcttagtgggggcgagcttctttaacttcttatcgtaatccatctttagggttcggtaggctttacgagtgttggcctcttcaccttctgctatttcgagactttcttggagggacgccttctcctcttttaatttcttgatttgttgctctaggctctccacccgtgagtttaggtgggtgtagtgggagaaaaggtcgtcatagtggttgtcaagggtgtggagatatccggccatgtagactatggtggggtcatcttcagtaggatctcttcctgacagggcctgaagtattttcctccaggtaggggtatttttgttgctaggtggaaagtaacgaaggggtgtctcaaagacttccctgctgtagttttggcatagctggcggagggcttttcgggcaacgttttggcaagtgcctaggaaacggtgtctagtgaaggtgacttggaaaggagggtgatttgggtagtttcggctttctcccaagtagactgccatagagcatttctcagttccattctcgcggtattctttctagacgtactccggcttcttgcggatccccatgcgaa

SEQ ID NO: 155133 - DNA, 605 bp, Zea Mays
tcaggtttatgcatgcctaattcatatgagaatgttggggcattacacttgtgatgtaaacaatctgtgacttttgtttggttttcaggtaatcagccaattatagtatgtggtcctggagttcatagttttgctactttttctggcgcgacgatgtggcggaggcgatgacagggcctagaacggattggtcgtcctgctctgtgtcggaagttatgtgaattttctgcctcctagcactagacagatgattttcttcattttgcgaactccttgctcttgctttctactgttgtttgtttattttagtgcagcaacggagcctatgaagaagccctattttctgctgctgtttgccaactccaagcagatcgctcgctgaagaagcccaccctcctcgctatagaaggtatgtgtttagcatatatgaaatgttgttttgctgtctgtgtctgcaccgcctagcaagttcagaaggtttaattttcatttttagtgttggtatggactattggcatgaggtacatgggacagagaattagcaactcatcagcacaagttgtcatccttttggctcccctcttaagcagcaagatagcagtagc

SEQ ID NO: 155134 - DNA, 800 bp, Zea Mays
aggtaccttccatccctagccttgatgaatttcttatgtcaatcactaggccgctcccagatccagtcctaggtagttgtctagtccaaacaaatcagcatgtcccctagttgactgatgctgcctccattattacaacagcagctgaggagtcttctccctatccctttcataaccttcctaccgaagatcaaacttgcaataatagtgtgcagaatttacctctgaccctgcaaactgtagatccctcttgcagtagacagtctagtggtgcttttgctggaaacccgcagctttcgagtcccattcaacgcaaaagcagcaggctagcaaaaaaggctaggaatagagtcggcaaaggagcactacaaatagctaaagatcttttggtcaaaaaattaaattcgacatctgatcgcaatgaactatctgtattatctgaacttgaggttgttgaacaactttcgcagcactttgatcgcccactgaccaaaggcaaggcggaggcaattatttcactggccaacctcggcacgaaggagacgaacaagatgaagaaatctaccagggcgacggtggcaccagtcgatgcagtggaatttgcggcgtaaggccatgtcattgggccagtggtgtgtggtagtagtttcccctatgatgtgtctctaaggaagtttgtgttcatggcttagtgtttggtggtctattattgccagtagcgagtgtttgtgtcctttgtgtttctggctttggatttgggatggcctgccttatatggggctccctgaaagggaattagg

SEQ ID NO: 155135 - DNA, 631 bp, Zea Mays
tgcaaggctatccgcaagatcgtccttcgtcatggcgcagaggccagcttcaagcttcgggaaccccatacttctggccatctccgggtagacagataattctttgttgtctgggaggcagtataagaagtcatcttcatctgtgccgttaaacactaaggcccctttcgggtacttcagttctcgggcgtagtgtttagcttcaaaaatttcctcttcagataatctttttcccgaagtgtgtcgaataatatagtcaaggacttcagaaggcgcttcgggagtaggagcggcagctttttcaggcaaaatctgttctatagcttcttcctctgctgccttttctccaatttctgaggacttctccttggcgggctccgaaggcccagcttcggcgtcagcctggctcattgtagcttcggcttcggtcagctttgttttggtttcaatctgcgctttcaaagccttggcaaccttccccagagtagagcttgaagcttttattgtctccagcacatctagtacactagccatccttttctcttgggggttgttgttagacccgaagggcttagaacttctagtgttttcgccccttcgattctcggttcttcaattttgtcagtcttcg

SEQ ID NO: 155136 - DNA, 361 bp, Zea Mays
gtcggattccaggattgggttgcaccaaatttgacgcccaaaatgcatatagactctgctttcgacgttttttatatgcaaggaaagatgagataaggttgtctccagcggagcgtgcatatgggttttacattgtatattgcactgtttacagagtggagtttgaaatagtgagtgatagggggtgggataggaagactgctagagataacataagctttccaacccagctggtcttacgtccaaattccttcaaaatcaataggaatcatcgaaacaagtcagcgtccaaaatttggtctggtgccacgtcaccaccttttgacccgttgggttatgtatcgtgttggagtccatcgag

SEQ ID NO: 155137 - DNA, 559 bp, Zea Mays
gtgggcagcaaatttctgttctatcgtcatctcccaatcaagatatccctcagcatcataatgacccgaaaaagatggtatagaaaatttaatcttagcataagggtcgtcaggagcacgattgttattaccttgctggtggtggggcataccttctgtgttttgatgaagacggcgacgtaggcacaaatctctggtggccgcttcatcataattaccttcttcatcaaacaccgcatcatcgggaagacgtggacgaggaggtggtggtggcggtgcttgttgttgcgtctccaacacagcaagtctgtcgacgatctaggacaatcgtcgatccaacctctcgtaagtcttgccaaggttcatgtcaatgaaggcatcatgcactgacttgtggaccgtctcctccatttgctccttcaggagcttgttgtttgactcaagatcttggcggctaacacattcatcgaagtcggtagggatccttgcttcttcgtcgttgcctgccatcgaaacacaaaaataagaaacaaacggtgacagttatccctaatatttt

SEQ ID NO: 155138 - DNA, 788 bp, Zea Mays
ggcgcagtgcaagagcccgccaaccaaatgtgcatgtaacaggcccaaaactagatgtaatagaggcaggtaggcgtataagagcgtgggagggtgagcagtgttcggcaagaaagaagaaacatatgtaatctacctgctactctgtgatccactagctactctgtctgagaattggagttcctcggttgctcctatctcttttgatcctgtctacttcttcatcccctctgtgtgctaatattctggtatcagattcatctcagaaagttcgtcgcccatctggaactgtcggcaggatacaactacttcacatgtttctagcaacattagagtgccatggatcctaacaccacacctcgacgagatggagaagaggttttcgaccatggagtcgcggctggaacggaagctcatcgatcacaccgcgatgaaggatgagcgcaccagcgctctagaaggcgccgctgaagagttggcgttgtggtgacccaaggtggaggcatacatggatgatatcaagttggagctgcgtcggctcaccaagcactgtgatcgctcggtgatggaggtgtcggcatcgaattttggtcttctcggcatgcctgatccgccgtcgatacgctctgcatcaggcaaattcttcgacggcccattcgggcaccgtgatgatcaattcatacgggatcatggttttaggtctatcaggaccctcctccctgacccgaccaagggtacgcatccaatacatcctccatcgaccaatattcgttttcatggtccttttt

SEQ ID NO: 155139 - DNA, 526 bp, Zea Mays
ggggagtagacctggggtcggagaacgggtcggggtacctctgtcgggtcaagggcaagcgtcggatggtcggtatctggcgggagaagtagggtagcggtcggctggactggtgtcgtgaggttgaagacgacgggatagccatggatcataggatggacgactgggatcggatcgcagtccggatggggctgctggatcatcacgatcgttggtaggaagagcaacggtcgagatcataacgtgtcataccccttcgccatgtttagtcagggccgtcgatctggatctgacggataaaatttaatctagggcaataaaatccccaccgttgaatctcaatcttgcggttctggtcgcataccgattcattcgtggcacaaccaaatctcggtcgcatgtcttggatctaacggctatcacacgcgcgtaccccccttcgctcagactttttgcttaagagcccctggggatctaaagaatcaacccgcagttcttctctggtttcgctcgagtcttagtagca

SEQ ID NO: 155140 - DNA, 384 bp, Zea Mays
caaatcttgtgcccactgcgcacaccctccggagcctggaacgtgcacaataaatttacttgtcagagcgaggttcgaaacaccgatagttggcgcaccagaaaggagacttacatgttccgcgatgaaattctctaaacttcggatggccggaaacagcgttggcatggcaggggctcccggaacgaccattcacattgggaaacccgacgaggcaataaagaaaccacgggcagggcctcgaaagccctgactccccagataggcgagtttctcgatatcgttgggagcctcgaccacctccgtctcggtcccttaggaggtagaaagatgcggtcatgcacgctgcaacccattttccctaggaccgtggaagcatcgagc

SEQ ID NO: 155141 - DNA, 399 bp, Zea Mays
ctccactagcgggggtgggtgaattcatctgcggaagggtatcaaaggtaaagattatggtggaaggaaaaaaataaaagagctcagatggtttttaaaggaagtgggttagctcaagttttaattcctttttgtgtttataatgcatgcatgatggaagtattgtctcctctccaaacaatagggtgctcttagggcatccttaaaaagtctaagtactggcccacggggcctaattaattagccacctatttctccctctatgcctaaggcctttcgtcctaggtctagcggtctagtcctgacgatccgtagcagtttctaggcaagttttaatttttgaaaatggtattcatggtttattgtccttctctgtggtggaattttctccgataccag

SEQ ID NO: 155142 - DNA, 632 bp, Zea Mays
tccgtgcaaaagtcgcctaagggtgcagccggactagcacaacaagtgcgaaaaatcgaagtcttcctcaaaaagactatccgtgcaaaagtcgcctaagggtgcagccggactagcacaacaagtgcgaaaaatcgaagtcttcctcaaaaagactatccgtgcaaaattcgcctaagggtgcagccggtctaagcacaacaagtgcggaaaatcgaagtcttcctcaagagactacccgtacagaaccccacaccaaactgtccgcgcaaagaccaactacaggcgcgccggattgacataataaacacactagaccaagtgcacaatgcctttatgagcatagccggatgcgcgaaggcgcacagcctcatcatacaagctatagttacatatgtacagcgaggacatcacaccttacatcggttcaaccttcggaatgattcccatctccctatagttaaacagcattatcctcagctcctcaccctcaaaaagacttcgcagctccccctcacctacactcgcaacggccggcaaggacaacaattcctgcttgccagccctgcccacacgaagccgaccgctgtccacctcactcaccctacgtttcgcaaccgcccttcgtcgcc

SEQ ID NO: 155143 - DNA, 519 bp, Zea Mays
caagggaaaccctaaccctagagcttctctataaatagaagtgcattcccttgcaaattgaaattttccattcccccctagctgccacagcccttcttcctcctcccggtcaccctcttcttcactgcatctccatgcttgccccccagccgagctcgccacttgcctcactagtgccggttccaccttggtcacgcctgccactatgagctccccacgtcgccatctatggcagccacttcctcaacgcctccctctcgccccagcaccagatttcctccactcggcaccccctacaggtgcagcagttgagctcctccatggctgcgtccaaggtcggctccagcccccctcctctctattccttgcgtagaggaacttcttctccaagaccagcgctttccccctccctgcacctcccctccatgccggttccctgcttccctcgaatcccaatagcgtgagcaggcgccttcctccaagcgcctccatgctccaaaatccggtgaaggccttgcc

SEQ ID NO: 155144 - DNA, 834 bp, Zea Mays
ctgccatctcttcctcagacgtgataggcttcgtcacggcgggcgctgaaggcccagcttcggttttagcccgagtttttgtagcttcgacttctgcttgcttagttatagttttggcttgcgctttggcagcttcagcaattttccttgtaggagcagggctcaaggccttcgtagtctctagcacgttggccatcctcctcctcttgggagtcgcagcagaagccttttgaatcttaggaagttttgcctctactggcgggttcaagatttctgacttttttatcgatttttcctcttgtggctcttcggccttaccatcttcagcttcggcgggcccgactctaggtatcttcagcactacagttggctcttcaatgctctgtgcaattggagcagcctgtcttgcttcagcagttgaggaggccccttcgccaagttcaggcactatggctggttcaatgtatcgcgaccggtgggtcagaacctttattttcttacttttcagctcaaccgacacaacaatgatggccgaagcggcggcttttcttgtcttctcttgccctagtaacgggtaatgatagtcagggtatacgaagccaatagcatcgaataccctatttaatcttttattgccccaacctccaaaggctacagacagagcattatcttcggccttggagtatgctccaagtagctcatcactcgtagcttcaatacacttcagccagtcgtcgtttggctcatcaaacttctccctaaatctgaaggtatacttcagtcgaactagaccacccttactagagtcagtggtggtctccttcggcatttccc

SEQ ID NO: 155145 - DNA, 874 bp, Zea Mays
cgatccttcctcggctcctcggtgaagcagctccgttgttgcttgcatggccgtcgtcgggggacgttgaagtcaattggagtaccgcgggccgctaccatcgcctcgggtacgaccaattgctcgtcggcacctagctccgccgcggaatccgccgcctcgtgaaccggccgcgccacgacccgggtgcaggtaagaaaccaccccgatattacccttattccctagaacgcgtagaaccaagaatcatagctcacgggtttgattagccaaggtaatgcgtcgctggagtggccgtgctaccttcgggccgccgatggtgaggtcatggcgtttcagtgccctaactccgagtaatgtcgacccggacaaactcagtagagagctagctacgtatagggtcaattttccattaatttagcgtgcaggatcgccgatgacctggctccggccatgtccgccgtcgtagccggcggcgttgccgccgtgctctgggtggggagaagggggtagattatggagcgtcgatctcataacggacgatcgggatcaatactctgtgtaccgattcgcgccgcgtaatctgtggcgtcgatccggtattggacagttaggatctagtcgcgtgtacgttgaacctggacccttgatcacggatccgaaggccccgtttgcgtaccgattcgggataaaaccgatctaatccgcaccgtcagcttgtgatccaacggccgagatctgactgtaccccttcgcgggtcaacattgctaaagagcccctacgcttatcagaaaacaacccgccatccactcatactgtgctctgtgtcttagaaaacttacactgagaaccctgtgcttaccagaaattgac

SEQ ID NO: 155146 - DNA, 492 bp, Zea Mays
gtcattagatggctattgatagcaaggagccagattcactcgagattatcaaggttgtgtcagaatttctagaggtgttcccggaagacttaccaggtatgccacctgagcggaaagttgagtttgctatagagcttcttcctggcaccgccctcatttctaaaagagcctacagagtttttggactagagttagttgaactcaagaagcagattgatgagctatcagagaaaggttacataaggccaagcacctcgccttgggccgcccctgtcctgttcgtgtagaagaaggatggcaccagaaggatgtgtatcgattatcgagctctgaatgaggtcacgattaagaacaagtaccccttgcccagaatagaagatctgttcgaccagttgagaggagccaacgtgttctcaaagatggatctgaggtcaggttatcatcagctcaggatccgaccttcagacattccgaagacggtattcattacca

SEQ ID NO: 155147 - DNA, 404 bp, Zea Mays
gagagctaggaggtcttgatgctcactagtgtttgcttgttggaggcagacataaaggtggagtgggactaatgggctaaaactcccaccaccagtaagagttgttggggagcgagttaagggggagctaggaggccttgatgctcactagtgtttgtgcttgcaaccttgttctccttattttggttagacctgtgagatccgagaatacacatgctctcccatagaagaattcactattcacaagaggcatgtataaaggtggagtaggaccaataggctagaacttccaccacaaacaagagttgaggggaagctaggatatcttgatgctcactgttgtttaagcttataggaggcagacataaaggtggagtaggaccaatgggctaacaaattcccac

SEQ ID NO: 155148 - DNA, 912 bp, Zea Mays
cagcaaaggaattaacatctcccaggtgaatggctctctcctgtgtatctgattgaaataacggattatcagtatgatcagacacgtgacaaagcaatgaaggaaaatttgcaaaacccttctggtgattaagtaaattaccagtagacataattagttcgtcgatcaactcgttgtccacctgggaattattactggcatcaattaaagccaaaccagcaccaccaccactaagtggctttgatgcagcctgggtctgcaaactgtcatcagccaaattcagcccgccagcaccatccgtcataccagcaagtatcgaacagcttggaaccagatcgtaaaggctgctaagattcgcatcctcgccaacattttctggtgtctgatcaagatcaccaggtgagagatcggtaaggccaatttttggttccagaacgagtgcttcggcagacttaggtactagcagagcatactgagcagaacaagaggaggaagttggcatcaaagttgtcggctcattgaaagtcgaatcttcagactcaacacctgttcctatcgttgagccataattgttctgattcccttgcagaaccaccatccccatgactaaagctccatcgtttggcttattatgatcactctgtaaggaattatcccgcatgaccgtgtcttctgctacctcctccattggaaaagaatcatttccatgcttttcagaataatcttcattctctccttgttccttatcatctccgtcccgataatccatgttatccttgtcaatccatctcccatctttgagaaccttatcaactttgaagaagatctcgtaaagcccttcaccaactattatttctgcagactccggaatatgattcacatccgtcactgccaccaaaatacggaccaccc

SEQ ID NO: 155149 - DNA, 491 bp, Zea Mays
tcgtttggttctcctattccattaggatgttgaatcaaatcatgcgagatacgagtagcagtagcttcgattcgaccaacgctctcctgcatccgctgctggttgttgttgtccccagtaccggcagcttatcatgaagttgactgcaccgacaacttcgaatcatgattgattggccaacagtaatattacaacagtggttttggttagcgttatgatggtggttaggtcagcactcgacacacagctcctgggcctggccgcctgggccattgccgcgtgatgcctacaagtacatcgacttgaataaaagggatcaagcattcgggtttgtacggctggtacacgtacaatagaggttggtgaaaccctataaatttaccttggtatgacaggaaggatgctttaacgacgtgttttaggatctggagggagtatagtgcagttgtatcctttaacttgcaagcaaggccgggatcggggtcttcaat

SEQ ID NO: 155150 - DNA, 316 bp, Zea Mays
gatgtcataatcaatctctccttcattaccatcaccctcttcaaaatctacctgctcggtttcagcagcgggtgattctttgtcagcagcgccttcagtcacagtcaatcccgaccgcctcataacttcggagatcggggcagtttcagcagcttcggcttcctctctgtcgcgagtaactctagctgttgagcgtaccctggccatttgatgttgaattttctgtgttttgacaaagttgaaaatttttatctttgccaaagcttcctcttgttacgaagctagagcaaaacgatccttcggttcagaatgcaat

SEQ ID NO: 155151 - DNA, 409 bp, Zea Mays
gcggggtcgacgcgcattataaacacacgagagtgttgaaacacgaaccagaagggtgagagcggacctggagatggctgaccacgatggggtgactcacggtggcgcggagagtggatttgggggaaattccaaattaggacgctacggtggacgatcggaggcgagggctggtgctctagcttcgtaacaacctagcagagctaacggcgcactcaatttatagcctccgagagcggtggctccgaatttgaggaaggaagctagcggtcgaagagagggggtgagtcatcggcgagcgctatcgtggcattcacagtgcaaggacttacagctatcactagctatccctcagggcttgcgacgacgtggtgaaacaaccgagagtgtggcgtaaccgagagaaatg

SEQ ID NO: 155152 - DNA, 467 bp, Zea Mays
ccttggtgtcaaatcaatgaccttgtcgtctggaccttcaaataatccagactccattcccttttacaagcttggcatcatacttgtaactcttatttgctcattccattgtttccaatgaacaatccaaaataaagaagaagaatacgtgggaaaacaaagatgaacattttaagagtgggaggcttcaggagagtacgcacaggaaaagtgacttgtttcactgcctagtcttttgtctcgtctgataattaccacgccattggaccttgaaaccattgttccataggccacaacatgcagcgtggatgcgggtagtgatgagtttgcacaattatggagtgcccgatcgatgttgtatgggagagacagaagcaaaatccggcgaaactagcccagaggtgttttactcgtcaaggcaaaacaaacattgaacatggtaacgtttgacagcataatcgtttcac

SEQ ID NO: 155153 - DNA, 641 bp, Zea Mays
agtgggagtggcaaccttttcaaacgaaatttgctctgtggccttttcttctgttgccttttcttcaaattccacaggcttcgtctcagcaggcaccgagggccccgcctcggtttcagctttgggttgcgttttgtcagctttagcaaccttccctttgggagcgagacttatagagtcggttgtttccagtacatctaatacatttaccatcgtccttcttctaggagttatggcagaactcttttgtgccctcagcgttgttgcttctgttgaaggacttaaagtccctggcatctttgttacttcttcagttgttgacctttcagccttatctttgtcaaccttcatttcaactagctcaaccgaaggtgccttcgacattatagccggttcttcagccctatgcatcggaggagcagtttctcttgattcagcagctgaagaggcctccccgccaaactcaggcaccacggccggttcaatataatgtgaccggtgggtaagtaccttcatctttttgcccgcagccttcggcacaagttcagccgaggcggccggagcagcagctttcctcttcttcccttgcccccgcagcgggtagcggtagtcggggtagacgaagccaatagcgtcaaaaa

SEQ ID NO: 155154 - DNA, 306 bp, Zea Mays
cggccgagtgacttctgctactatgaatggtccttcccatagaggtgacaacttatgtcgtccctcccccgttagaatttggcggaggacgagatctcccactgcaaaggatcgacatcgcatggccttatcgtggtaacgcctcaaagtttgctggtaccgcgctgattgaattactgtgtttagtcgttcttcttcgagtatatcaatatcctctagcctagtagcctcggcttctgctatgctttcaaagaccaaccttggcgccccaaacttgaggtcagcaggtagtactgcctctgaccc

SEQ ID NO: 155155 - DNA, 536 bp, Zea Mays
ataatagagagcataaaggtgtagagatggagagctactaaatttgaagagccatttacagtctattggagacattttccttctaataatagccaaatttatctttacaaaaggatctcgctggtcccttggagttgcttttacactcaattcacaagctaatactacattccaagaaacagagaaatcagcaagggagtttccactaaacgcacaatttttgcgagggaggggagaagagacataagcacctagacaacaagtcctatcgagtcaaccaagatcgatcttaagcgtgcaggaccaacccagtacactacatgggtgtaaacatgtacattggataattattgcaaaaaacgaatttaggcattatacaagtgtaattatatcaaatctgaatcttacattagggtttgggcgcttgcgcgcagaagaaaaggaagagaataggacatacccagctgctagccaactagccatccatcttacaaacttaaacattgtgctgaccacattaggcatctgtttggatc

SEQ ID NO: 155156 - DNA, 474 bp, Zea Mays
ggggagttgggtcgcatgagcgcatgtgacggacgaggaggaaaggatgattcacataggggctgattggttgccggtatatcaggtgtctggctcgtgcgggcctgcttccccagcgaatgtaatttttagcttctccacacatgcaggctggacactgaaaaaatcactaaattgcatctgcgaatgcagtcttgagggcatccgatggggcaaccaaacatcttctcgcgtgtagtcaacgcataccgtgagcctgggcagttaggacgcggcaaccaatcacacggatagtgttgtccatcggatttaactgagcaagagagagcagggttatctagcaactccaaccgttgaattcgaggatgtgttatgtgtgtgcaatttaattggtagatttaggggaggttatgagacgtggaggtgatttggttagctaggtgggttttaccgagtttaaactgatggttagat

SEQ ID NO: 155157 - DNA, 1456 bp, Zea Mays
ataggatcttagtttacgagtggtaagtgagaggtgtgcttgtctcaggtttcagtactaaaattatggatgaaccactgaagttcctgtttaggaagactaggaataatatttggttgttcaatgtcatctcccatgtttcagatgaacttggcttggagagggttttttccctaatagtggaatttgttggtgtgaagaatatacttgaattgttctttgagaagaatatagttggtgtagctctaaatttgtggcaccttgttaggtgttatttttattttggaaagttcacttttgtcttagttgaagttgatgctccggtgcttgagaattaggttcagtgtgtcattaagctaatattatttgttgattgacatatttaagctgtggtcctttgacatagtggctgtcttgtgttaagcttattagtcaatttttttgtatgatcagatgagtgcattcgacattttcttttgcatgttttaacctgaatcatattatagtataccaatccggtggcaagaaacaccaatgcattacgctggagttctacgcctaatggaacagtatgtaatctagcactgcaacacagttacaaacttcgtgttcttagaatatgaagaactattgacttgtctgatttgaagtagttgcagttgtatgcgttgctgaagttatgcttgtttgctgcggtttactgtggctttaatctagctatagtttgtacagtattttgtctctatagattgtagctacagtaatctgaacagctgtaccgtggccagccagtcgaacaagcagcttgaaatcatgtttatgaacactgcctagtttggggcgaaggcttgaaatcatgtttatgcacttgtttaggcgtactgtatgttcagtgttccaaatgaagctgagcctcgtcggggctcaattggtagaactggcgtgtgcgcacaaactcatccaccgccggccattcctctcgtttcagtgccaataaacgttaagaacatgaacataccatattgacaagcggaaatgggcggccacgacttgcctactcccattgatatcattatgcgacaggttctcggtgaaattggggtgcgtttatttcagataaaaataaaattttcggtgaaaacaatcagtaacttaccaaacactttagaggcggttgaaggaatcggcttttacacttgatggcataatctggaccgtgagcgttctcatgcgtttcttattattattatttttttgggaaaaatctcatacgtttcttccacctcgtttgaactttgccgtaactgccggtgcccgatcaccgttgacaaacaaaatccatgaaaaacgtttgaacaacgtaccagacaaaaggcgattgtagaggctgaagttacgaaggaatggttattacttaggtgttttttgaatgtatcctctagagctaattatttgc

SEQ ID NO: 155158 - DNA, 764 bp, Zea Mays
ggcggttcttcagcgttgccgttgtcgctctcgctgtcgtggagttcgaggaagaagatatgtttgcatatgcggttgtggcctctagcaaatttctcatcgcagttgaagcaaagtcccagacgtcgacgttcgtccatctcctctggtgagaaccggcggatggcccgcccgctactgctggaacatcgggcgcacaatgctgatgacgagttcgagctagcgggtagtggcagctggggtgttgacggtgttggaagcaaaccacgactggatcggggtggcctgttggccgacgcctgtgctgcagcaactgtctgttcccagtgttcgtaggctctgacgaggctcatggccacctccagtgtgaccgggtgttggagttggacgtcgatggagagtggttcctgtaatctcagggtgaacaacgggatcttttgatccgtgctgaatggcccagccctgggtagcagctccaggaagcgctcggtgtaggcgtccactgttcctgtgcgtcggcaactcgccagttcgccgagggggcaggctcggacggggggcccaaacctgaaattcagcagctcggcgaagcgtcgccaagggggcgtcccttcttcctggtgcaattgcatgtaccactgttgtgcagcgttttctaggtggtatgatgccatccatacttgttcctctggaacgattcgctgctggaagaagaatgactcgcatttttaggtgatgagtagcggatcctgtcggtgttttgg

SEQ ID NO: 155159 - DNA, 669 bp, Zea Mays
ccatatctttctagccttctagggggcgaaaagtactcgcccccacatgtctgggttgtcgtattatggtactgggtgtcgtggggtgttatagaaggtttggttgggacaggtgtaaggatgaggaacgataattaatattaagttttgtatactctaagacggactatccggtctgatatgcggatcgtccggttgtttgcgcgggctgtccggccgtatagccgaaccgttcggtgatgtatttggacagtccagccatatgtgcggatggtctgaaagagtttgttaggttttgcgtaaaatgtggtagccctagtgcagatttctgtaatttggttcgaaaaacggggtcgaccactgctggtccagacggtccgcactcaggcgtggacggtccggtcgtgcgcagatcggtggatttacccccaatctgtgcaggaggctacgattgttgaggatatgtgtccgccgacatcccataaagtggttgggattggtcatgccaaattgtagcgatggatcgcatgtattttccatagtcttactctcgtgtgatggaaaattagtaacattcaatttatcgaatgcacgtgctagcctcttataatcctctcacataccccctagtattagttgcatttgttcttgttgcttgtctacgtaata

SEQ ID NO: 155160 - DNA, 879 bp, Zea Mays
ggcaggcggtgtgtctcccctctgtgctgggagaccttgggagagagatccctggttggtcctgattgggtacagcagacttctgaaaaggttcgggaaattcattagaatattttggccactcagagccgtcagaagagttatgctgatgtgaggaggcgggatttggaatttgcagtgggtgaccaagtccttctcagggtatcacccactaaaggagttgttcggttcggtgtctccggaaagcttagcattggaccgttcactatcttggcccgggtgggcagcttggcttatcgcttgcaattgtcggattccatggcaggggtacacccagtttttcatgtctctatgctgaggaagttcttgcgggatccagaccatcagattgagatggaaccaattgcggtgcagcaggatttgaccttggagtgtcgtccggtgcgtatcttggaatcctcggagcgtgttttgaggaagagatcaattaagtatgtcaaggtcttatggactaatcagtctgagcgcgaggctacgtgggaacttgaggagctaatgcagcagaaatatccagaactttttgttgtgggtaagtgttgttgattcattaattttttcccttttgtagttccgatagaagcgtcagaattcgaggtcgaattctttttaagggaggtagagtgtgatacccggtttgcaaagaggagaagtggaggttattctttttgttctttttcctcattcgggtgatgcgctttgggaatttggaatttgtgaaaaatattcacctataagacagtagaatttctttggttagttgtttgcaacggggtcgggagctgtcacatgggcgagttgggccttgaaccttgattcggc

SEQ ID NO: 155161 - DNA, 342 bp, Zea Mays
tccatccacatcctagcaactactaggctgcatttcttgtttttgtatctcttttgcactaaccatggcagaggatgcaaatgcgcggcctccacattctccacgaacagcgggcaacattttgaacgtcaagtaaggttacacacagatgctctcaacgaagatgttcaagtaaccaatgagcgcattggtcaattagaaacaacacaaattgttgccaacaacatattgaccacattggaacaaacacttgctgctactaatacctctcttgcagcaattattacacgattagataggatggaacaatttgggcgtgaaggtaggcaacaaggtgataat

SEQ ID NO: 155162 - DNA, 629 bp, Zea Mays
ggcatattagcactaaggacttagtgcagaatatctagcaaacaaagctttctcaacctctagcggatgggggatgccaaagaagaaggaagaagggaaaaatatgaacttgctcgacttccctaccgcttcaaatttcagaacaaatttaaagagccatgtactgaatggttagaaatgataggaaccatgtgcaatgagatcctcagaaataatatgaagaaagaagaccagttgatgactactaccctggctcccggccgaaacgaaggttgaaccgtgttatggatgctcttaactttgaatatactgactatgaaaggcttgacgaaggggccagagggggcaaaagaaaaaggattgtcagtattctgggtaggcaagctgcccggtctgtcaaggaggaccagaaaacttcgaagaaacataagactctttcggagccgaaggattcggctcccacaaagcgaaaactcgtcatgatatcttcagctgatacaaaggtacatgatgtgctagagaagactatgagtcctccttcaccctctgctgctgaagtttcggagattctgaaggtaatgactgaatccataccatttacactactaagtccaatgaggttagatctg

SEQ ID NO: 155163 - DNA, 690 bp, Zea Mays
aagatggttttcccaagttgttgagagcatgcacagtccgcctcggaatcaggagccagctagagtatgatggtcgtgaattcgtcgagcatggcacagagaagtgtgttgtgactgtatacattggatctagtctgcaccatgtggaatggagtgtcactgctacggggcacagattcaaagacacctgccaagtcgtcgctcgcaaggcattgagggccctgtgtcaaatttatgaagaagaagtggccgacacatcgctcagattctttccgccctttcagagagaccgtcccatttggatggccaggatgcatgcattggaagggcagcaattgcttgaggacgacccctcagtcgtgtacctcactgcatacctgctcaccctggatgcacaatatgatttcttggctcggcaccaccgtcaaatgattgcccaagcagaagatgcagagaagcgcaaccgtaagctccatgtggatctcaccacagctcaagctcgtgtagctgccttggaaagtcgtgaagtcattgatgttgaagccctgaagcaagccaaggatgagcatgtccagaagttgatggaggcttacttggtaacccataaccaacgtagagccctacggatccaagagcccgcttcatccaacccagttcaactcatgagatctgaagatccccagattcttg

SEQ ID NO: 155164 - DNA, 435 bp, Zea Mays
cgaagctttatatggacgacgatgtcgtactccgttaaattggtctgaaccaggtgaaagaagcttcttcagacctgatatggtaaaagagaccgaacaaaaagttcagcaaataattcataatttgaagaaagctcaagctcatcaaaagagttatgcagacacacaccggatacccttgtactttccggtgggagattatgtctacctgaaagtttcaccaatgaagggtatatcacgtttcggggtaaaaagggaagcttgcaccccggtatattggtccttttcctatccttgaaagatacggaccagtggcataccgacttcagttacccgaaaccttgtctgcagtacataatgtgttccacgtgtctcaattgaagaagtgtcttcgggttccagatcgaaccattgaagtaacggatgttgccctag

SEQ ID NO: 155165 - DNA, 855 bp, Zea Mays
gacggattggtgagtgtttgcacaaaaattcgagatctgggcgctgaaatcctatcggtcagatgctctgaataagatttcccatggtacagtgccctgaaaatatccccagtacactgaatgtcaccaccggcgatcttcgcggttggattcacgccgccgttgtgattcgtgctcgtcggtgcccagataacgctcctaggtaaaagatcttcgccacaggatagcaccagaggctggccaccgtacccctgttgctttgcgaccggctcagataagttcaccggcgttggctgcccgtcgatcggatgccacgtgccctaaagcttcaccacgtcgctgcaacccgctctatatcactgacaagtcgctggtgagtccgccatggtgaaagccactaagcgtttgcgccagtgcccctcctcctctccggccgccgcgcgtctccatcaaattccctggccactgctcttgaacactataaattaatcacatcgctagctccgttagataatcacgaagccagagcacccgctcctgcctccgattagcccccatagctctctaatttctcgttctccccaaatcggtttccgccaccgtgaaagagccctcgtcgtggctagcccattttaggttcgatcatactctctgctcttccgtttcagcatccttaggttctcttgatgctccttgacctatttgattaagctaggaggacctagatcactgggaacacgtttactcatctgttgtctgcgctgtctccgtggactggacgatttagagctccgctagtgaaattgattgaggggaaacacttgataagggttgaattaggtctcaaccgaatta

SEQ ID NO: 155166 - DNA, 825 bp, Zea Mays
atttgtgtaaatagtataataaataaaataaattaaaacaaagcatattcatgctggaatacttttgtttgtacatttatttttgaggatgaaactcagacctaaattcaaattgtaatttggatttgaaatagaaaagggaagaacacataaatagaaaaggattaaacctaacctgggctgattttaccccctggcccaactcccagcagcctaccagcccaaccgcgcactcgctactcacgacaactgacttgtgggacccgtgctccagtcgctcaacctgggagctcctggttcctcgcccgacgttgcttacatgtggggtcccggccacctgcccctcttcctcctccgttcaccgcagctggtgctgttgggatcgaacgagatctccgctaccagattctacgaaatcctcggcctcctcactcagcgcgcatctggtcctctagttccgacctgtgggccgggcgcgtcagatgcgtctcgtccaccgcatcccaacacattccgccatctgtgcttctgggttggctcaaatctccaccggccgtgattcgcgcctaccactccgcgcggattcttccaaccggatccccctctttctctcccttgggagtatatatatgtgcacgcatggccaccgctcagatccgtcctccttgtaacaacccacgcaacaaccgcacaccactgatggatttcgcgctggagaactcggggccagcctcatcttcttgcaggtggccgggtgtataaatagtagcctccccgcatccagttcgtaggaccagcgcccttgttgactgccgcaacgctcgg

SEQ ID NO: 155167 - DNA, 1162 bp, Zea Mays
tggctgagcatttcttcccggaaggtgagatctgtctcccgcctggagagatctgtctcccacctggcgaggtccgtctcccgcctgtccaaggactgctccttcgctttaagcttctcctcggcgagggcggcatcgctggccttgccctcgagctcctgctgcaacttttgtagcctctccacaaccttggtctgctggatccgctgctcttttagggtctggtccagggcactcagcttggcccggaactctgttgcgagggcctcccgctgggacacgacctcctccctcctggccaacttcttctccctctaggccgcctccagctccctagcgcacaccttgaggtccttcttgtactccttacggtcccgctcaagttgggaccgctcagagatgaattggcgggacgccgtcctggtgcgctcctccagctgggtgcgccagtcgctgaggcgctggtgctcggcctcaagcgcctcccactcccgcaaaattgctgccctagtgtcactgaggacttggtaggcgcgagacaacatgcgggggagggggattggcgcagcttcttcctcggcacctgaccggagccgtcgcccgaacaccacctccatctcctccggtgcaggcggggggttggagctggacgcgcctccggtttcacccccaacgtcggaagtgggcgcaatgtcggaggcaggcgcggatcccccagcagggacctcctctgtcgctgcgacaccgcctgatgctgtcaccgctgcggctggacccccggctggggcatgagaagctgctggcgttgtctgagcagcggctagaggcggaccgccggcaccactcccagcagattcctgatgctgagagccggacccatcggtgggcctggtgcctgacgaagggggtgtgtcattaggagcggtggaggaagaagccctgaaaaacagacgatgggttaagacctgtcgacatgataattagacacatggaaaaaggggctacacttacttggggccctggaccttccagcgaccctggaagcggggcgacctctgctgttgctgctgctgtggttgttgttgttgttgctgctgttgcccttgggggagatcacccctagatgatggtagtggtggtggcgggaccgatggtggtggtg

SEQ ID NO: 155168 - DNA, 299 bp, Zea Mays
ctctattcaaggcatactcaaatggtgtttaagtccactcaagtaaaacaccacacttcaatttgcaacatcgtttctcaaaataaaataaagaccatgaaaattttagccaaattgcatgggagacctgtccaaacataggttaacattgtaaggcatattttttaaaccatgcaaaaagttggaatataaagaattcaatacaatagataaccttttaaactacaaatgacgtttcctgatgtcaagggcattatattagcacgagagggtattagagtacaactagtggatgaaga

SEQ ID NO: 155169 - DNA, 805 bp, Zea Mays
gccaggtgagtgcgccgcctccgcttctccagcagcgccactggggtacgggccggtgcgccgctgtagatctagggtgtccaaattcgccgtcgccgttagccaggttagtcggtactgtagatcccctgtggagctcgacgcgcgtcactgtcctccgctgcctatgcccatgacgttaggtgagggctgttcaccggatttacaaatcccacacatccgcgcattgccttgcctccatcgcctgtgcttttccaacagcgtcggctcgctgttcttctgtacttgaccatagcgcccatcacgctgctaggtaatatatagagccccttcgctgctgtcttcctctttccgtcgtcctggtacccggcggaagcgcttttctcatcctcgacttcgtcgccgtcgtccgttcctttcttcggatgctactttctgttgtttcggttccttcattgcatcatgtgtgttagctcatagtgtatgttgctcttgtagatctgctacgtaccaaaagggcagacacacgcacgtcctcaggttgtcctctcggtctcttctgcagctatttgaggtgagccactccttccaccattgctctcttttaaatgttgctttggtgtccatggatagattgtctgcatttttccagattaggtgcacatcagtttcttacaactctgcttttttggggagaaacagggtggtgtcgtgattcatttttttcctacacattttaccgctactttctcttctgcttgcatgcgtagatagttttttcacatttcactgagcaagaattgga

SEQ ID NO: 155170 - DNA, 747 bp, Zea Mays
cccaaattcgtcacccagaccctattcgaactaccctacatgacgctagaaggaaaggcgaacgaggtggttatggtccataccatgtatcggcgtctggttgatgatggccacggtggaacgcgagctcggcggagaattctacctcggcaagtagttcatcgcgcaccgatcacccgaacggcccaaaatcgacggcgaagatctacgcctttctcctccgcgcccgactgataccccacaggaccccaatttcgacggtcgcccgttccacggattagctcccttccccggcgtcacggtaaaggcgcgcccacactttagctcgcgagcgtggcaggtgtggtgaggagcttgcggttaggcaagaggagcaagggggtgtggcttaaataccctggaggccgagtccggctagaagcgagagaatcgcttggtttgttgagatttcctaccgccgcggtcgctgttccggttggggaagaagaagatccatcctgccaaagcggacccatcagtcggtgaactagcaggcgcgcacggtccggggcccacgcgccagcagcagtaacgaaggaagcgggcttgagcaggacaagcgggcagcgactggcagccgggccccacgcgtaagagagtccaggcgcggttgcgttgggctggcgggagagggaatgtggaggtgggctgaatgggatttagccggcccaaacagagttttggccttttccttttccttttccattt

SEQ ID NO: 155171 - DNA, 901 bp, Zea Mays
gtactatgaaaagttttgagaaaattgaacccaaagatgggctgtcagactgtcttaggtctgaaatcagattgacagtgtgattgagccatctttggactggaattcaaccatgatctagtgagagtttggctatggctgctatagcaaggttgtagctagatcattagacaacaactttgctactggccgatccacaagttgccatgaaaaatcaggagaaaatcgatgccaaacttggtctgtcaggctaactgaagaacaatccgatggtacagtaaccggatagaatcccaagttcagccccctcgccaccgatgagccgcgcgcggattcgtgctatcgccaccgtgattcatgcacagatcagttggatagcgccgggggtcagtaaatatcacgccgtggaaacactccggccaccgtacccgagcagaccacgactgattcggatgagttcgccagagacagccacttcacggccttgtgccacgtgccttggcacattcaccgcatcgtcgtgactcgcattagccgttcattcattgccggggagcttgccacagtgaaagccactaagcttgcgcgctagtaaacttcttccccttcggccgccagcacatcttcgtgaaattggacgccaccgcccccagatcctataaattaccgctctcgtccactccactatgtagttgtgcaaccactgaagcaacccgtgcctcgaatcatccactagaactccccaatttgggatttcccccaaatcactcaagaacaccgagcagtttgacctcgccgtggccagcgcgtctcaggtccgctcataccctctgccctcctattttagcgttcttgtgtgcccctgatactccccgaccaactcgattgagctaagttatct

SEQ ID NO: 155172 - DNA, 472 bp, Zea Mays
atttattaaaaagctatcattttgcgctatattaggcgaagagatcaatggaaaggatctaatggattccgatcataaagatgatgccaacctcgcaaatgccatgctcccccacatatagatccggcattgcatagctactgtttggttgcatcactaggtaataggtttcaaataaggcaggggctcaaacatcatgcaatcaactaatcaagcaatcaacgtaaactaaatccgaaaatgatagtttaaacaaataacagttgtaactacgactctacgagcaataaaacaataggtacaagaacaagtataagattcaagtaaccctttttctcgaatgtgcagaagagttgtgtatcattatattaagaaaaataaggtttaaaatagaccgatacaagccgccggtaaaagtgcggaaataaaataaaataaaaaggttacaagacagcaaagagaacccgaccca

SEQ ID NO: 155173 - DNA, 1745 bp, Zea Mays
ggttaataatgagtaggctcaatctagccatacaaaatgctcattgtggctaatgaggcagagttcgccagtctcctgggcaaggaaatcgagggagtcgtaggtgatctagatcctaggagaaaaagtctcgctcccagtggatgatgagtagctggccatcagagcgaaagaagacgctttggcacgtttgcagtcccctacctagcgcgccaattgtcgtggttttggaaaccgaggggcaatagatttgtgtttggtggcgatgcaagtgtggactcacggagattcaaacaaggaactgaggcacaaggtttatactggttcaggcattcaccctagtccaatgtactgctgattgtagtattgctctatggtgtgttacaactggtgtgcttctatgaagaaagaaagttgcccaacccttttatagctcaagggtggactttacagtgggaactcgtattctactgggagggagcttggcttgctgcctttggatggcgtagtcctcctgacatcgtctgtagggtcgtgcgttgtcgtacccctagtatggcgttccatcttgtccatttggtatacaaatccctatagcttgctcgacgtcagcgttacggtacctagtgggtcccacaaagtgggcttatggtaaggttcaaggtcgtgtccggtactgcttcatcttccgtcataccccttgcgtcattataaaacatgcataggtatccacccgatatggggtattgtctcgtcctttttggtgtatgggtcattgtagagactctggtgctgaggtctccgcgactggagttgatcggccccacaagtcagtgagggtatatccacgggattacatgggggtgttccatcgtgtctgcttaaggccttttggtactgtaggtacgatctagtcatggtttggtgacgttgcgttttgtcgcggaggtcgtgggccgacaacgttggcccggattcgttccttgcagatctgcttggaagaggtttgttcgttcgcccacctcgcatacttgctcggttggggcttggtcgttcgccctgccttgcagatttgctcggcagggactgggtcggtcgccctgcctcgaagacttgctcggcgggggctcattcattcgccctacctcatagaattgctcggcgggggctcgctcgttcgctttgtctcgcagacttgcttggtgggagcttggtcattcgccccacttcgcatacttgctcggcgtgggcttggtcgtttgccccggctttcagacttgctcggcaagggctcattcgttcgccctgcctcatagaattgctcggcgggggctcggtcgtttgcctcacggacttgcttggtggggcttggtcattcgccctgcctcgcagacttgcttagtgaggacttagtcggtaaatgggctagagagaggtttatgggcctcgccttaggtaccccttttctgtgtactcgacaagcccatcgtgagtcatcattgctgagctcaacacaagggacaatgagcttcaacttcccaacacagggtgcacacggccaaaggaaatcgacgacgcctatacccaaacaccggcacacaaggcagaagattgtggtgctccatcattgctcgcctcgacataccttacacgaggcaactccaattcatcaacaacgagcttggagccacaacaccgagcaccgggagcaagcagacgcacggagtgcaagggtccaagcaacc

SEQ ID NO: 155174 - DNA, 451 bp, Zea Mays
atcaagaccatccaggtcggcgtggattcctcccagaccactcgcatcgtgggcaatctggaggagaaataggaaatcgcgctcgtcaccttcctccaggcaaatgccgacgtattcgcatgggaaccgttgcagatgcctgggatccctagggaggtgatcgagcaacatctaaagatccaccctgacgccaaaccggtgagtcagaagcctcggagacagtccattgagcggcaggatttcatctgtgaggaggtccaaaagctgctgcgcgctggcttcatcgaagaggtccatgacccagtatggctggccaatctagtcatcgttcccaaggctaacgggaagccttagatgtgcatcgactacaccaacctcaataaggcctatcccaaggacgcatatccacttccatgaatagatcaaattgtggattctacctctgggtgcg

SEQ ID NO: 155175 - DNA, 499 bp, Zea Mays
gatcgatcggcgagggatcgagggagagaggtggcttgcccggccgctgctagtgctaggctgctagctagcttgtggtggtgtgttctgtctcgatttggatgaggagaggtggtgcatggcgctggggtttatatagctagcctgctggtggggagggcggcgaggtcggagaagtgaaggaacgagaacgatgaggcgccgacgcagccgacgggtgggggtacgtgggtgcggtggtcgtccgtgtggccgtgtgcgggagtttgaccgagcgagaggctagagcggacgcgggggtacaggagaatgaagcaggctgggtcagagactcggagacgacacgacaccgaccgaaaggatatgatgttgcatgcagcatgtcatgcggccggtcaaaatcaaaatcatcgctatcaaagccgtcaacagaatcgccatgatgataaatatggccgaaatgctctcccagtttcataccgcgggctgtgcgttcgtg

SEQ ID NO: 155176 - DNA, 763 bp, Zea Mays
aaactcgttcggttgtaaatcaacaaaagatctctttctcaaactagcttcttcctcattccatccttcagtttccaccttttccaccttaaaataaatgtcatataagagatgtttgactcctatctcaatgacaggtggaatcctcgcgatgctcttcacatgcactttaaatctaaccatgtcattagatttcagagaggccagatccacttcttccacagctcctaaaaccgatcccatctcacatatggcttgatagttcaacaattcttcaggcacattttcggccttaatccaaactgagtgtaatctggatttagccatagcctgtgaagtccacgcagttactacaatcttgacccctgaaatcttcatcttcaactcagtaaagttggtcagttcatcaagcctgtcctgtgatgggaattgcatcaggaaaccaagatgacacttagctgctttccaggggcgtccccatgggaaatggaagctaaaatccctctccagatcaccagcagacaccataccctccacaattttgattaatcccagcagactcctctttggttttttggaaatgttctttccaaactgagaagagtaaaaccccaaaccatctgctgccattcccactaatggcataataggtttgttcagtcttggccacacacattacgcagttacattggtctctttcatgcagatatcacaccacaaagccctagaacaatctctggcatgatgaccttcatctccacat

SEQ ID NO: 155177 - DNA, 645 bp, Zea Mays
gacacaggcgaccctgccttaggactgcgggtacaaatctggaggtctacggggtctactctgcaaattctagggccccaggcgtaacacttcctaagacaccggccacctacgctggaccgcgggtcaaattctattactcatagggtttcttttgtgaaaggtgctagccgaaaaggtatgggtttatcctggccgcgggatcaacagcggacgactaggatcatatcgctaacatgacgaaacggtacacaatgcacaccgtctgatcccgatcggacggtcatcgtacacccggcctaatcgttatctcgcttccaactgtggccgtcgatctcagatcacacggcccaccttcatcgttctcgcgcgaccgagctgaatggcggcgcagagcccgcgcggcaacgccctcgccagagcaacgcgagccaacccccaggtgtctcaaacacgaaattaaccggtgctaaacaagaaatagggaagtacgaactacctagatgagttcttacctccattgccagcgctaatgcttctgcccacggagcagggcgggaccgctacggcgttggacacacggcgagaaattgcggcaccgctggcccccaatcgcgcccggaatgtccccgtgcaccatcagtg

SEQ ID NO: 155178 - DNA, 696 bp, Zea Mays
atggtgactccattgtactttgcacatctttatcaccttattccttgtaactcgagtcaatgtatcaagaatcttgatcgagtactctgtgtaagtcaaatcaccctgaacactaagctcttccattggtaactgttcctcagggacacggagacacttctttagttgagatacgtggaacacgttatgcacatccgatagactatccggtaactcgagttggtatgccatctccccaactcgcctaaagatcaagaatggtccaatatagcgaggggacaatttgcccttaaccttgaatctcctcattccacgaagtggtgacaccttgagatacacataatctccttcttcaaattccagtggtcttcttctattatcagcataactcttttgcctggtttgagccaccctcaaattctctcgaattatatggacttgttcttctgcttcttgaatcagttcaggcccaaagaactgtcttcccctagtctgatccaatatagaggagtcctgcatttcctgccattcagtctcgaacggtgacatctttagactggcctggtaaactatcattatatgagaactcaacataaggtagactcttgtcccaaatactaccatgctgaagggtccaagctcccaacatatcttccaatacttggttagtcctttcagtctatccatcagtccgag

SEQ ID NO: 155179 - DNA, 427 bp, Zea Mays
catccaccgagttcatctccattaatggttgaccgcttcttcgcctccccacttcaacgccaaacgtttcttctcccctccccttctccattagccggtagtttcctccattaatgaagcactaatcgcgtcataagtttccacgccccgacgcttgattttacctccccagcctataaatcatgtgccatccaaccgtgctcgagttccatgcctccattcttcctcttcgtgcccgtacactgttgttgtcgtcttaatgccgcggaagctgttgtgtcgtcgccgccggagctcgtcttcgacactctttgcgtcttccccaccgccgacgaaagtgtccacggattccccttctccaccacctccgaaccccctgctcagttctccttccccgtgcaccgaagctgcgacatcgccgccgacc

SEQ ID NO: 155180 - DNA, 607 bp, Zea Mays
tcggtcggactcgtcatggaatcttgcatcaccgcgggcgagtggatctgcgctccaagtctcggtgaggcctcgctcgcgtcttcccatggttaccgcgatgattagcacctggattcgctaggaatcgagcaccgaagtactgccaggggtccggggcgctggttcgctggggtgaacgccgtctcagcctggcgtcgtgaggttgaagaaggtccctggccgctgatgttgacgccaacggttatgattagatccgggcgtggggagatttcagccgttgatctggccggagacggatacgattagatctggggatggtgggttttgcgccgttgattctctgatcgacgctccaggttacttgcaaccataccccatcgcgcataaaatctcagccgtagatctcgcatcctacgcctgtcgtcgcatacagtttcgcgtataacttgatctaatctgggcgcctcgtttcggatcccgacggcccagatccacgaataccccttcggccttggctttttattaaagaacccctgggtttattgagattcaacctgcagtccatgtagcagtaatctgagtctcgggaaatcttatatttagc

SEQ ID NO: 155181 - DNA, 843 bp, Zea Mays
gaaacaatcgtcgactgcatgcatgtataacgaacacttcagttagaaagttgagacaggcagccaaaaggggacgaaggcaatgatcaccccccgccggatcaaaattaacgcacaatctatgcatacaccttttgttaatgaaccataatggaaggaagataccacgcatgatgatcacacatgcagttgtgcgtggaacctattagaagaagatgaaaacagggcgaaagtgatcgagtcagaaattcagaactcatctgcaacaaaagctggcaggcaggaggtagggggaggggaaaaaatatgccgtagtaaagaagaaattccaaggcttccgtaatcatggccgaccgcctcccgggtgggcttttggcctttgctaacgaaaggagccgaagggccccgcggctgcctccctgtcccgtacgatccgcgtaccacctgcgacctgcctagtagctagtatgagtagcatgcagaagcacacgcctccagagtttcagcaatctgccgccgaacccggccgatgccaggcgccgccaccacctgatggcggcagcgttctgccagctgattctcagatgccttctactatgatcttcgctgtttatgctccatccggttgcgatcaatcaatacaacggaagaacggtatcatacggcgcgcccttaataatttccgtaatttcccctcatgaagaggcagacacggagaggagagagtttgaatcggcacgcacgtctcatgattcccatccgtgatccatgactgtacctatagccatggggcatgccatgattggttgtttggtggatggtcggaggagctaacccccctcc

SEQ ID NO: 155182 - DNA, 496 bp, Zea Mays
caggttccacgcagagtaagctaaaggggcaccagcattcgagaccctgcccctcagaatcatatccaaccggctcagcaaatcctcattgggagtctatctatttgtgacccgggtggaatcattgatgtcggtatacaaataagcgggatagactctgtctttcaggggttgaatgttcttgaagataaagtcagcaaccacggcctcagcagtcaaacccctatccttcaacaagcagttttcatcatgtagcactttggcctcggttatctttgaaaaggtgggagactctacccagctaggcgtacgaatgtctggttgcctccctgatcgaggggggagggatttgccgtgattctccacgatgaaccactcaagacgccatcccttaatgctgtccttaagggggatatcgagatattctactttcctccctcggtgaagctctaaacttgcactgccgacaagctgatgctgccctccagccatcccg

SEQ ID NO: 155183 - DNA, 506 bp, Zea Mays
cgacattctaatacgaatgtttcgctaacagattctaaatttcgaagacatatgaatgcaatcagactccataaaaggcagcaagtccaggttccaaaggaattccgacctccaccgagaaattgatgaagggacttcctgtgtgcttgcgtgcttcaagaccgtgaaacatcaaatgctaccgctacgactggccacttgcatcgcgtgcccccaacgtgcggcggggtcggcgaaggcgcccgagtcggagcaggaactgagacgtcaatttgcagctagagttgatggcgaggtggatggaggagcagcataatatccatccgtctacgacgatgccgcctccatggtcgttgaagcctctcttgccgctttggccggacacttccctccttcctccaccaataaaacagcgcatgaggcaaaaataacgtggggaagcagctagctgaccgcgagctgtggagattgggagacgatccacgacgcgcatatttacatgacag

SEQ ID NO: 155184 - DNA, 689 bp, Zea Mays
tgcacatcctccttgatgtgacgtcgacgggatctcatctatcttcccgtcattagaaggcgctacaacagtccatgtgttatcaggggaaatgtgaaagagactgtcatttgaagttgggatatgtcgtttcagcaatgtacagattttaaggcttccaagcctcaagcttacagttaccccctcaatgtaactgagcatttgttcattttcttggcaaatttagtgcttctgtgatcaggatttacttgtataacactacttcatgcaagcaagcttagccttctgtaaagtgaccattcaattttaggcaataatgcagtagtatggtaactatggttggtggtatttgagacattgggggtatgacaagacttgtcatcttcttttccttttttgcatggccggtaacacatgggtgaagcagtttaacttatccttttaaagctatgtacagatttaaggtctccctaatcccaagcttacagtacgccttcaatgtaacaacatatatttcatttgcttggtaacttggctgcttaccgcggtcagggttacttgtactgttgcattactccatatcagcagactttttttggtaaagctgaccattcaaaactaggcaccaatgcaatatatcatgattgaacaatttaagttatccagttttatttgctttcaacgccata

SEQ ID NO: 155185 - DNA, 517 bp, Zea Mays
atgccgacaatagtagtgtccaatctagtgacccaactactaagttcaaatgtatcaacctacctcagaacttgtgtaggactgtcttgtatcattgcataactttgtctcaatggattcccttaggtcctcttgatatatagctttttcaatatccaagactgttaaggcataactctgtccaatcacaaacctatcacaaaaacacaacttttgtttacattgccataataggaactaagaataatgcaattatgcttttagcttaacatctcttgtgggggtaatcttgcctccccactaaaaatgataaagtccaagttgagaaattcatatatagttggagtttaacgttgccaatccaactatagatttaggaaatcattggccatgaaactactaatattgatcaatttaatccattaagatggctttagatatggttttgctaatgtggttgacatgtaagtgtgtgtcaaaaatggccttaccaacaatatttctaggtgactttagt

SEQ ID NO: 155186 - DNA, 483 bp, Zea Mays
gcgaagtccgatacagaagcccggaattgctctgatcttccgaactgtgcgcgcagagatcatcatcgaagattgaggcgttcgcctggggttgttacggagtttgcgcattctgtttgaggacgaacaacctggcagacagggcccaccggcagcgaccccacgcgtcctatggcagtgtggtcgggtttcatggccagcgggccccacatggcggtggcaagcgacggtatacgcgccatgggtcggctggccgagatgggccgagggaggggggaaaatcagcccaggagcagagaacccttttttttctttttgttttcttttgttcattcatatttctggttttcaaatttgcaatttcaaactcgaatttgagttgtggtttccaatcaagtatgcacaatccaaattccataatggttgcatagaaaggtatcattttattattatcttattatttcatagttttaagtaaatgcc

SEQ ID NO: 155187 - DNA, 444 bp, Zea Mays
cagattcggtctattctacggaagaaatcaagatcctagccttgtagggtacatagatgctagttatctttcagacccccacaatggaaggtctcaaactgggtttatatttctgaatggtggaactgctatttcttggaagtcatccaagcaaactctagtaacaacatccactaatcactcagagattattgccttgtatgaagcctcacgtgaatgtgtgtggcttcaaagcgtgattaatcacattcaatcatcatatgggattcattccactgaatcaccgaccattatctatgaagataatgcagcttgtgttgctctgatgcaagaaggttatatcaagagcaatgttaccaaacatatctcccccaagttattctatcctcatcaacttcaacagagtggtgagattaaggtcatgcaaactaagtcttgtgacaa

SEQ ID NO: 155188 - DNA, 529 bp, Zea Mays
gagagggagggcgagtggagatggcgtaaacggccgaggcaacgccaaaccctagcacgcgggatccagctcaaggaagagagggagggcgagtggagatggcgtacccggccgaggcggcggcaaaccctagcatgcgggatccagctcgagggagagctcagcaaaccctagcacgcggggctgcgagagcgaatgcggctgcgagccctgcgagtgccgcgtgattgagcgtgtggagccaggctaccaagcgacgcccaaattggccgtatgagccgggcctggttgagagttgggttttgcaccaatcgagcctggctccgacccccacacagataaccaaacaacatgaaccatccgatttttgcatcccatgggtcttgcatgctcatatacatgtaaccaaacggacgacatatgattggttgcccgcattccttcgtcctgaatactggatgcgttaatttcatctaagcgtatatttggttttctgcaccctagaagacgtgtgctgcacgagtggacg

SEQ ID NO: 155189 - DNA, 495 bp, Zea Mays
gctgtccagtgctcagcatttggtgtttccataaatctactcaccattcctactgagaaggcaagatcaggtcttgtgttaaccaagtacctcaaactaccaacaagacttctgtattttgttgcatctagaatcagctcaggcttcccaggtaacaattttaggtgctgctccattggtgtatccacaggattacaaccctgcataccacaattctccagtatcttttcagcatatgcactctgacagatagtgatctcccctggtttctgctttacttgtaagcctaggtagtaactcaataggcctagatcacacatattgaaccttttcatcatctgttgcttgaagacagctatctcattgctgtttggcccacaaatgatgagatcatcaacatatacaccaactagaagtaaggttacacctgttcctcgtttgtaaacagcatgttcctccacactccttctgaaacccagccttgtcaactcctca

SEQ ID NO: 155190 - DNA, 453 bp, Zea Mays
cgatgttgaagttgacgtacttcatgtggaacatattggcggtgccaatggtcactggaaacaaaacatgtcccactgagtggacgttgctcggggagatctttgagatggggcacccataagtcagtcgattgtagcgaataggtagctggtcaaacacgtagttgatgaagccgttgaggcccgcactaccgtcgatgaggaccccgtgcaacttgatgttggcaaccatcgaggatatgatgataggaaggattttggccctagccatgttgtcaggatagtcaaaagaatcaaaggtaattcgagtggatgctaattttagaggcctagacccatgtggcttcggggcaacaacagcgatgtcccagtgtaacgtcttgatagcccacttggagaccaggctagctataccaccgaagatgatgaccatggtgtaaaaggcctcctata

SEQ ID NO: 155191 - DNA, 390 bp, Zea Mays
gtttttgactctcagaccgaggatgcagctcttcgacagtttgacactcagggtacaacagatgatgatgatgatgatgatgatgattttggggttcctcctccgcctccgcctccacgctcacatgatcatgaggctgggagttctagtgctgcccctgctcctcctcaggctatggaccctgctcttgcttcgtttctggctcacctggcggccgagcaggcccggttatccgagaggatgctctcgatgtttcagaacatgcaggacaggcaggatgcacttcagcagcagctacttcaggatcgggctgagagtagggcattcatggctcttatgcttcagcagtctggtgtctcagtacctccggttcagtctgctccacctcct

SEQ ID NO: 155192 - DNA, 596 bp, Zea Mays
ccctatggttgaagccactgccttgttccgttccaaaaaaactactacgtgttaggtactcacacgtggtcaggtgcgcccaaatactcagaggcaaagacaggaaaagtggtcaggtgggccaaacacacagaggcaaagacagggagcacgagagagcgataagacaataggtaggaactatagcttctcgttatatgtgtctcatccagctataggaagggggtatttatagccccgttcagggttaggtggcccaaagtacggtcctaccctcggctaccaactatatccagtgaatatttcatataacagggtaattctaggaccgtgcgcgcaacaggcggtgcacaccaattaacacacccacaagctacactgataggtgggcctccaaatgcgtcttctggtgaatcgatgatgtgtagatcgaggcgcaaccttcaatgccaccctcggagccatcgcgcctcggcacccttcactcaacttggacgagtcagtggcggtaaggaccatggggagaagtagtggtaaaggccttggttgctaccggtcgctctagagccttcacccgacgttatttcttgttgagg

SEQ ID NO: 155193 - DNA, 710 bp, Zea Mays
cagaaaagggggaaaatggcgtcgcgacggttctgggtggaattgggaggtgagattggggctacacggccgtaaggaactatagtttcaccgtgcactaccaattttgggagaggtggagaggattccgcgaatttggacttcaactgagctcacaggtggagatgtgaatacctcgccgtggtccatggcactatttatagccacggcggtccagctaacgatcaacgaccgcggaaggctttgctcacgcatggcaaccacatacagaagaggtatagtaagggaggagcaaggcatggatgacaccacggtggaattgaccaagccacagcggccaccggtgaataactccggccacgcctggctgaactcacgagatgatgccacgttcgaagctatcgtcccccggatcgatcccccactggatcactcgagctcatctgattcaacagtgttgtagatcttttactcgtgttcttcagatatttgcaaagtttgatcttcaggtttttcttgaaccaaccaccttccagcctctcgatctcttgattcttgttaaggacagagcaaacttcattaataaagtttgttcacctaacaaccatcttcaaacttactataggatacttgggtcaaaattgagtgaattcaaagatatggcgcatccaatttggcctcataccactgtgaccattcctgctttcaat

SEQ ID NO: 155194 - DNA, 502 bp, Zea Mays
gaagaggccgaagcttttgatgagatacttagcgatcatggggatttttgtgccttcgtcggtgcacgaggggttgcagcaatattggagaaaactggctgtgaacatgttaaggctgcaacccagacagaagccatcttatcagcagatgacacgaaggaaccttcagctgatgcttctttgataggcgggaagttctattctgatgtttggatgaagggcggccgtgagatggtcgatgaagccataaaaaagagtgaaaaagaatctcacgatgcccgagaagaggcaaagcgagctgaagaagctgctgaacgtgcaatgattataggtatccttttaaagctttcttgttgtttgtttatagcttcaaaattcaccattatgttctttattatagccagcctttcgccaccaccggagccatacaaccctgaggctgatccagtcatgaaagaagctttggatgtgatgaagattgctaacaaagtcatcgatgaag

SEQ ID NO: 155195 - DNA, 482 bp, Zea Mays
cttgttggaacactagtcacaatattgttttacatgtccttaataagttcaacatacttcgataaaactttatgtttgtccaataatatccaccatatgccatttcttggcattttgttataagccttcttcgagtcggtgaaaatcattcatatgaccttcttttgctcccatggataaccttccggacataaaactaaattggttcatagagatccttattatttctcttagacgttgcttggtaattctgtcctatagatccatagtatggtcatcaacttaatttcttgataattagtacaactttgaatacccccttatcgttgtagatcggtacaaatatacttctccttcattcgccaagcatcttgttcgatcggattatatggctgaataacttggttaaccatactatagttatgtctttgaggcatcttcatgtcttgattaagataccatcagggctcattgtcttaccc

SEQ ID NO: 155196 - DNA, 362 bp, Zea Mays
aaagatgcagtggtgaccaaagcctgaggatgcttagaatacatcctgtcctttgtcatacggtgaagctcaactgatcaggtcgttaccccttctgcatagcaatatgccatttatgacccgcacgtggcaagtgatgactatggttaaatatatatgatttcagaatgacaaatcatgaatcagttccctaaacaaatggtgtcccttaaaaagatggcctctctagacaagcatcaaaatctaaattccttgtgtgcattatttcaatatctgcaaaggctcatcgatggtgaaattctagtataaccatatccacccagctatgtgtacagtgacttattaccctggaaataacattt

SEQ ID NO: 155197 - DNA, 1035 bp, Zea Mays
ccctcggcgttttgactaaactagaacagggccgcttactgtttaagcaagtcactgacaaatcacagaaagaccctcgggtttctgtttcttcgcaggggaaggtccccgaccacggcagcgcacggagaggctccggcgagccactgtaccggccgattggggcagtgaccggcgctcccgagcggtggacaccaaatcggggcttgcccgagcatttcccctaactaaattgcacgaatggcgacctattacgctctgtccacgtgaaccgagaacattgcggatgggtgaaggtgttcccggtaatccatggtggcttggttcaatcaaaagggtcagagagcatgtggaaagcctagggatgttagaacaagcaatggtgcagcttgaactaacctgggttgagctggccgcggtgagcttgattcggcggtgcttcagaacagaattgggggaaactagaaattggagcgtgctggtggaggattgagggtggaagtggttgctacagcttcacaatttcatggcgtaactgtccccgcccttaatttataggcttccagggcggtggctctcaatttgaccgcgatgcggtggcggccggagacggggaagaagcctggcacgcgcagttacgtggccaacgacgtggcaagctccccggcgatgatgggatggcccaagggattcacggcgacacggtagaaagctaggccacgcggcgcgatgccgggaagcggcggttcaccggcgagcttatcgtgccagccgcaaagcggagagaaaagggggggggggtcgtcggagtggtggccagctcacggcggtgaagatttttactggggaaagcttatctgatgtccatggtgcacgaatcacggcgagcggtaatcgacggcgacggtcaccggcgatgggcagggggggtgaacctgtgatctttttcagtactgtaccatggcgatcccattcagacagtctgtcagccgaacttggagcatcattatctcttaatttctaatgtcaacacat

SEQ ID NO: 155198 - DNA, 680 bp, Zea Mays
aactccttctctaaagtgtccccaaattccttgagaaggtcatcaaggctggccagggacatctcctcggtgtcggacgggttccttggagggttttcttccttctgctcagtctgacatccttggcttttggtcttcttgcagatttttcttgcgggggcgagcttcttcagtttcttgtcatagtccatttttagggtgcggtaagcttcacgggtattggtctcttcgccttcagctattgagaggctctcttgaagggacgccttttcttctgaaagttccctgactttttgctccaggctttccacccgggaggttagggaggtgcagtggagggtgaggtcatcatattggttatcgagggtgtgaaggtatccagccatgtagacgatggtgggatcattctcaataggatctcctcctgacagggcctgaagtcttttcctccaggtgggggtattcttgttgctgggtggaaagtagcgaagggggtttcaaagatcactttgttgtagttctgacacagttgtcggagggcttttcgggcaatattttggcaagtatcttggaaacggtatccggtaaaagtgacttggaaggaaggatggtttggatagttttggctttctcccaggtagactatcatagagcatttttccattccgcccacgatatgc

SEQ ID NO: 155199 - DNA, 901 bp, Zea Mays
caatatggggattaaatgagttctaggtcattttatgacaaaaatcgagccctagggacttatttgcaatttccagagacccctgtgtaatattcaacttcttgggtggatggcggcttgataatccattttttcggggtctctttagtaaaagccagagtcgaaggggtacaggtgactgcgagccgctcaagttagatccaatggcccgaatttaatgtactgaaagggtaagtcacgttctaatccccaccatttatttcatgatctacgcctcacaccactccctctctcgacctctcgactttggatctacggtttggatttaaaaatcttgaaaaggtacaatccgatcacatcccgatcaataatctcccgatcaactgctacggaccattcttctccaccaggtgcccggagacggtggcgctggtcacacccacggtggcgcacgccgacgcgcaggccaaatgacaaacgaacgatctattcccctccccgatgatgctacgcatggaatgggagctagctaacacaatcaacagcttcttagcgtgaaatttgggtgccactcgagctatgtgtgcagagcagcggcacgacgacggtgtttttgctccagcgagaaattgcatggtcactggtgattttctcatcgcaccggggcaatgaccactgttgttgttccctggcgaagcattctagaagcacactgaggccagaccgacggttgaggtgggcatcaactgcggcgccacacttttctcccctcagcggaaatagcgttaggatccgccatcgattcacgccgagattgttgaggtgatggccagggccggcatgacctttatacacccaataagcgtaagattctcgggatacggggctcggtcgacagggt

SEQ ID NO: 155200 - DNA, 583 bp, Zea Mays
cattcgaccccccaaagcctgtccgcgcggctgcgactctgacatgaggggcccccctcgtcagcagctcttgcgtaatcccgtgcggttcccagacagaatggcatgtggagccaccgggtagccacgcatctacgctctctccccgtccgcagaccggtcgggcccattcttcagtgaaacgcatccacacactgatacgcgagccctctgcgtcggacgcgtgatgtctccacggatgtcgctctcgtgagactcacaaccccccctgcgcgtcagttctatcctccaaccaacccaccggtaatggcgctacgaacccaagaacatcggactcccctcctctgcttccaacccccgagccaatccatatgggctataaggcgtgtggagtgctttcgcccttttcccctttacacacatgaaccgcccttgtagtgtcgccgtgccgattgacttgtagcgaatacgccattgccgccgaccccgcgtattggcaaaacctcgcgaccgccgccatagagccatccatttgatcctgggcgctttgattcatctcgttgtaggtgtccccagactcgcc

SEQ ID NO: 155201 - DNA, 662 bp, Zea Mays
ttgcgtgaatcactgcgcataaactcgatccgtcggcacctatgtaggtctttagatcaccagtgtaggtttagagacaccactctccctatatcatctgcatggtcggttgtttttgctatatgccttcgtctgaaggacgtctcccctttataagggggtcgtagcaaccttctatattcgatctgctaaattccagtaaccacctcctgaaatctctctacgtgcaaccgcatggagttcatgcagtacacgaccattgctcctatttcacgtggcaatctaggtgaggtactcgataaccaaataaataaaatgcaaaataatcttttgtttagaacatgtcacaacgcgatcatggatcttctcaaatcacaagttaagtcacacaataatttcatgaaaaacatgaaacatgagcgagcgtgcgtgtggcaagttcataacaagcatccacaacccttttgtgtgtcttatgtaaagagtagtgcacactcacacatatatgttggttatgtcccacctagatgaggaatatagaactaaagcccccattgccatctctacatagcaccttggctttcttataagaattggcccaaccacaaatgggcttagataggccaaatttcaacatcgccttcacctagactaaagtttag

SEQ ID NO: 155202 - DNA, 507 bp, Zea Mays
agggacgctccggcgaggttctgggccggccgatcggggctatggctgggttctccgagcggcggccatgaaatcggggctatcctgaccatttcccccaacccaatttagctattgatcaactaaggagctctggccacgatggccgtgagcatggcggctatacggtcgtgttcccagcgattgggggcatctacattcaaattgatggcttggcgagcatcactgagctatgagaagacttaaacaaggtttgaatcggacagagctttaccagaatcggctggccacggtggacttgatttcacggtgttcttcgactgatttgggggaagtatgaaattggggcttgctggtgatcggctgggggcaatactagccgtgggggtgcgcaacgatgttgcgaaacgagttacggactcaatttataggcaggttcgtcggtggtactcaatttgagcgaataacgcggcggccggaggtgaagaagaaagcggcgcggtgaat

SEQ ID NO: 155203 - DNA, 900 bp, Zea Mays
gttttttatttgagctttacttcccagttatacttctcattctttgggttttgtacctaatgacctgtatcgaaacatctaaggttactaaattgttcttaatcggatcatgtacaaacttgtcatcgtggctggggacaaaacgggtgaaactgagtttgctatgtttggccggataacacagcatgtcagcatctcatgcggaaaatggctgcagcggtgtatgccctgtcaatagcatcagcggtaatagctgattgggggaaggagaaagcgttttgggctggacatgtcagttttcttgtttgaattcagtattatcagatgcaatagtcctatcctaattttgattctcgcagaactctaaggtgggtggtggaggaggaggagagcaagggaggacgacgaggctgcctggcggaggcacgaggggaaggtgagcgtcacctgcaaggccacaatcttggtgagactgccaccatgagcgtgccccacgaccgccaccaggatctcaagctcgccatcgatgaattcgacgaggagttgatcgaccctgagctacgcttctcgttccagcgcaacagcaaggtacaatcctcccctccccacccaaccgatcattctttaggtcacaacgggtgtgtatgtttttttactgttatcccgtaattggaattgtagtccattcagcaaaccttggcgctcctcacctatcgcagcctcttcggcatcgccatcagacttcctgtcatgctgctccgagataggcgtgcctgattttccgacaggtcagtcgatcatcaatcccctgccgatacaacataccgaactactccatcatcctgcacaaactaaactagattcattttccatttctgatatatacacattctgtgttaa

SEQ ID NO: 155204 - DNA, 1204 bp, Zea Mays
gcggaaaaaacctcagggtttgcactaattggaatccggtttctttactgttgcccagggtcactgacaacttacggacaggtccctctactttcttttcttccccacgagtacccttggccatggcgtgcacacagatcaaccctggtgcaacccgtactggtcatggcgggtgttgaatactacggctagcgatcgggaaggcattagcgactaacagggacctcagaacacccaacaatttggcacgaacaccctgagaacggcttgtccatgtgcacggcggaaaccgtgatcatgggcaaacgttcccgctcatccggggccggattgagtagtcgggtgtcacggtgagcatcacaagcttatggagttgcagaaacaacactcaatttaagcagagccttaccagagcggttcggccacggtggggtgggtttcacggcggcggagaccggtttggggagaactccaaattcgcaaatctcagcgaatggtcgaggctgattcgaggtggctggttagcttactaccctacggagttggtggcgcatgcaatttatatgcgcatcgagcgctggtgacgaattcggtcgaggggtgctggcggtcggagagggaaggcgagctctgtgcggggaaaacgtggctttcatcgtggcagtggttccggtgatcgccggacatgcatccggtgagtcaccgtggtgaagaccagcacagaggcacgtggcgtgcaacggaggcagcacgacggcggtgagacttatcgggtcgaccgacggccgggggggacggcaagcgtagccgcaactcgagcgcaagtggatcggacgccgagattcttactgagtcgtgcttatccgatggccatggcgcacgaatcatggcgagcaatcgatcaacggcgatgggctaccggcgacaagcagggggtggaattgggatcttttgcagttgaacatttactgtaccatggtgatctcctattagatgaactgacagagagatttggagcatgatttactcccaattttgtgtggtgactaagctagctctttgtaccaaaattatagcctgacaaactagctacaacgttgtcacagcaatcttgatcaaattctcaacaattcaagcttgaatttacacacaaagctggctctatttcactgaaaatctgaatttcagaatggaccagccagac

SEQ ID NO: 155205 - DNA, 621 bp, Zea Mays
ccacgccagaggttggtccacagtgtcgacgacctaccccgacttccttgccacgggcgtggtggatctgcaacccatgccggggtgtggtcggggacaagctagggcgtgcgcccccgcccatctcccccaccgaggctctagacctccatgcttgtgtctgctgcgggacgtctgcgccgccatcgccctcgctcggccccctccgcacgtgcaaaccactattcccccgctcactccaccgatccccctccccttcggatcctccctgcaaattagatcccatcgggtgctcgccctgcccgtgtccctcgttgcttccctacctcgtcgcatcaagcagctctagaaatcctctgcccaaaccactgccaccgctagtaccaccatcgctaccactactagcagcaggatcttcaaggggtgccatggcgctatgctgggtacacgttgcatgagttggggccaatggtcacgacgaacttgagctgcaccaaggtgcacacgctcatggcggagctcaccgctgacttcctaggaacgcctcgaccaggacgacgacttgattcgcgaacgaagccagtcatagtactcccttctcagatctgtgcagtcgtggtg

SEQ ID NO: 155206 - DNA, 450 bp, Zea Mays
ataggcaagccgacgtgtatgctgtctagcgggctgtgtcgttgctctagctagccgactcgttagatgactttggttaagctcgtagtcacgataaattacttgttgtagtctaaatgcgtatggttatggtcgcggatgaaaagtattagtgctcatgtgatgtctaagttaaaatgcaaattattgggtgaaaagcgcttcgatattgattttcgtggagaatgcgttgttaattgagtatggaaattctaggcacgaaatgacttggataaaaagtagtaagtcgacttgttgatcctaatttgattaatttaactctaacaaatggtaaagtgttcgaatacttgaagtctccaaaacatgacaattcttgaattatatagaagctgaaagttattaattgctattttggactgcacgcactgttttagttgtgctatatgtttg

SEQ ID NO: 155207 - DNA, 295 bp, Zea Mays
attaacataagcaaccattgcaatctctgaaatctgttcagaaattcgacagattcaggtgttgggcttgtgaaaagcacaactgctaaacgatcaggtttatggctgtcaaatttttgtacaagcaagataatcatgttatctacaactcttctatatgacttttctacagaaaacatgatttgatttatcaaacaaacagcacaacgaaaacaatgcgtgcagcccaaaacagcaatcaataaattccagcttctatataattcaagaattgccgcattctagagacttgaat

SEQ ID NO: 155208 - DNA, 632 bp, Zea Mays
cctttggccatgaggcaagttggagtgtaggagtcatcgtgaaggttggtggagagttgtgagcttgaagtagattggatggcgatgtttgccacctcttcctcttcttcggagctagaactttcttcatcggagttccattcttcaccaaagtgggcttgaccatatttcttcttcttgaagtatcccttgttcttgcccccctttttgagcttatcctttttgtattccttcttggcttcttgttcctttttgtttggacaatccgctatgaaatgaccggtttggccacattcataacatgccctcttctttccttttctttgatatttatcattttcctcacaaacttcttgaaggttttgatgaacatagctgtgtcttcatcacttgatgtttcgaccactttctttgtcttgtgatctttgttcttcttggaggaatcttgttcattttagatcaaggcatgagtgtctcttgtcttgattggggcttctttagactcatgttgttgaatctttgcaaatagttggtgaggtatcatttcctcatagtcatcatgatcccttatcattcttgctagactcttatccttttctttgtatgctctcataaatagtctagtgaccttg

SEQ ID NO: 155209 - DNA, 823 bp, Zea Mays
gacagcaagtacgtatcagatatgttcaacatgatcatcaagggttttattataaattagtatgtcatcaaaatagacaaaaacaaatttgccaatgaaagttctaagaacatgattcattaatctcataaatgtactaggtgcatttgttaacccgaagggcatcaccaaccattcatacaacccaaattttgttttaaaggttgttttccattcatctccctctttcatacgaatctgatgatagccacttcttaagtcaattttagtgaaaataaaagcaccactaagttcatcaagcatatcatctaatctaggaattggatgtctataccttatggtgatgttattaatagctcgacaatccacacacattctccaagatccatctttcttaggaactagaaggacagggacaacacaaggggaaagactttcttgtacgtacccttttttaatcagttcttccacttgttgctgaatctcctttgtttcttctgggttggtgcggtaggcagcgcgatttgggagggaagcaccagacacaaggtctatttgatgttcaatccctctcttgggtggtagccctggtggtacttcatcaggaaacacatcctcatattcgtgtaatgcatcaaagacaatacttggcaaagtagagggtaagtcgttagtaaaaagaaggttgtccttgtacaggagcacaaagaacatggcattaggttcactcaattcttttagatcccccttcctagtcatcatgactagtccctcttttcccggtgtcttggttattggatactgtggagttttatttggcttt

SEQ ID NO: 155210 - DNA, 696 bp, Zea Mays
ggtcatcgctaggacggcccaccgcgcaaccagtatggcgcgcctgcatggctggcgcgtggggttacctagtcagccaaattccctccatggccgccatcttcgcaatagcttcctccgggtaggtgatcaacgcagattgttcgagctagttgtgcagccatcgtcgatcggccgaactgtggcctagggcgatcacgtggagagagtgaagagtgtcgcgagtttatgcctcgctgtgtcctgcgttcgacggtcggccggcgtgccaataacagtaagaccttttccccatgcctcaattcccacagcgccacacctatgtgggatgccgatgacgcgcgtatagggaggcgggtgttagctgggggaagaagatgacacagtgcgctgtccgatcgataatcgacggtggagattagaagatagaaccttcccatctcacttggatcggggccgtagattttgggggtggtcggttgtgatcataagccacaagctggttaggttggaccattggatcccgatctggggacccaaaggggtcactagttcattaaataacagatcaaatccgggctctcaaaataaaattggacggctagggatcatggataccccttcgccaagccgttatgctgaagagcccatctgaatggttataatcaacccgtcgtccagccttatgcagagaac

SEQ ID NO: 155211 - DNA, 429 bp, Zea Mays
agaagaatttttgggcggtcttcgctgttatcgtggagactgccctagcctcgatccactttgtgaaatattcgacgggccgaaggtgaactttaggttcccttgagccgtaggcagtggcccgacgatgtccagcccccaacgttgaagtggccatgtgtgggcgatgagcttggtgaattgcgaagggttgcctgagcgaggagagaacttttggcatgccacgcatgacctggtgactcggctggcagtgcaaattatcatgggccagtaaaatccctgacgaatcaccttggctacgagggccctgtgtcctgagtgtgagccgtaggttccaccgtggacttcgtggaggatttctaggccttcggtttcggttatgcatttcagcataggttggctgatgccctttttgtacagctgaccctc

SEQ ID NO: 155212 - DNA, 809 bp, Zea Mays
ctatagagctggaccgacctcctcattgtcgtcaccgtatatcaaaactcccacgtagcacctccaccccctatcccccctaattccttcttaatggcgctaggtatgccctgagggcatcacgaccatcaccgacaatctccgctcacaccgcgttcaccctcaaatttccatccaatttgagcacacatggctataaatcgtacccctatgcaccccttgctcacctcaccctgagccctcaggcaccagaacaccctaacccgcctccagtgccatcaccatcgttgttgagcttcagtgaagcgtttcgatccaaccatatcatctctgtcttcatctcttacgttgttagcttcaccggcattcaggatacccataacacaccttgacgttaactctaccatcctctacaacctagagtacggtgactcgatatccgccatgcttccttgtcattgtcgagcgcctatggtaccatgcagtctctctctacgccacaaggagcatcgctagaaggtgctaagtcttctccctctctcagttcactcagttacaccttaagtcacattaattgctcgttagagttctacatggccgccgcgagtacccttgccactgttcgtgccctcccaattgctccctcacctccaaccatgcgtagtgagtttactgtggcctgccatggattggtggccaatgttagtcccagttgagctctttgttgcccggtctagaccatgatggtgaactcccgctgcggagcgcatcgccattgtcgcattgccacccgaacactcgttcattta

SEQ ID NO: 155213 - DNA, 341 bp, Zea Mays
cctacagtaaccttgatccgattccaaggggaaaacgacgaaaatgggcgcccaaagtcgctctgccatcacctgccacctgctggtgcagtctgacatgtccagagcttggctctataaatggcagcccaccatctcccttctcccacacaccactcccttcccttctctgttcggctgagcagggagctcctccttcttccccatggcgccctcccccagctatggccgtctcccctccctgcacctcctagcccggccccttctctccacccttgcgtggatgagatggctggaggttgaagaagacctctctgtgcctatgacgagtgggcccaagg

SEQ ID NO: 155214 - DNA, 584 bp, Zea Mays
agcccatacgccggtaagtcatgcatggagtactggtaccaaacatgcattctgaatttgtcttcgtagctcggtcatacgtccataccccttcctcccaggcacgtaccaattcatcgatcaaaggctccatgtacacgcccattttataccccgagtgtccgagaattatcaacgacacaaatatattctgcctttgaaagcacacaccagggggagattgattgggataacaaacacgggccaacatgtgtacggggcagcgctcattccatagggattgaacccatctgtggccaacacaacatgtacattacgagcctcttcggctttctcacgatgaatggcatcaaagtgtttccatgcttcaccatcggatgcgtgcaccatcttgtcaggattgtatcattttccatttttgtgccatgtcatctgtttcgcggattcctctatcatgtatagacactggatcgtcggtatgaacggaaggtgccataagattgtcaaggggatgtcgagctgcctcttctgtccatcactagagtctacctccatgaacctagatgatgtacacttgggacagt

SEQ ID NO: 155215 - DNA, 416 bp, Zea Mays
caagaaatgagcggtcttggtcaacctgtccacaataacccaaacggaatcatggtgcctggaggtattgggcaatcccactataaaatccatgcaaatgtcctcccatttccaagatggtatgggaaggggttgcaaagggcctgctgccttcaagtgactagcctttatcctctggcaagtgtcacactcggatatgtacttggcaatttccctcttcattctggtccaccaatataaagttctgagatcatggtacatcttgttgctaccagggtgcatggagaatttggaaaggtgagcttcatccagtatcttctttctgagctcagggtccttgggaacaaccaatcggtctccaaaccataaaattcccttgctgtcctgacggaagcatttgtaattctctgcctttt

SEQ ID NO: 155216 - DNA, 1164 bp, Zea Mays
ttcacaaatagaagcagaagggccagcatcctggtccaatcatgatagtcgccgaagctgcctcttcttcttcttctcctcaacaggcacagttggacggctaacctggcgaggacgttttgggcgagtaccctcaggctttcgggtgtccactattttgttaacctcttgtccaatcgtaacagccatcggttcagcatgggccgagtcagaagattctccagccaacatattgagtacaacatctatttctgcatcatccggacttgccagcatcgaaaagtgaacttgcctctcatcattgggaagatcacgaagaggagcaaccagagcttcaacgtcttcaggagagggtcgcactctaagacccaaaccactatcactagcaggagggttgaacacaaaattgaaaaatgacctaggaggtggcagattccaagcagaataagcaacatgagcaccaacatttgatacctttcccctcagaatcatatctagtcggctcaccagatcctcagtaggaattttcctgttggtgacccgagttgagtcagtaataccactgtacaagtaatctggatacgccctgtctttcgaaggctgaatattcttgaaaacaaagtcagcaaccacagcttcggcagtcagacctctctccttcagcagacagatttcagccagcagaaccctagcttccgtcacctccaaggcagtgggagactcaacccaactcggagtgcgtacatctggctatctccccgaccgagggggaggaacttgccgtggttttccataataaaccattcaaggcgccaccctttaatgctgtccttgagaggaatgtcaaggtattccatcttcctcctgcggcgcatctctagacttgcaccaccaacgagctggtgctacccccagccatcccaggccgacagtgatacaaatacttccataatctgaaatgaggaagaattccgaggtaggcctcacatagatgcacaaagatggaaatttgcaagatggaattgggattcaggtaagtcaggtttagattgtaaaaatcgaggatgtcgcggaagaagggagaaatgggaagagcaagaccgcgtatgagaaaatgaacgtagacgacggactcgtgggtatcctctatcggaacagtgaccc

SEQ ID NO: 155217 - DNA, 316 bp, Zea Mays
ccggtacggtgcacctcaccggcaccatggagctccaccgctccccttccctcgggcgcctataaaagggccgccccgagctcctccttccccgcaccggcctcagccacccctctcctccctcgtccgagctcaattcgtggaagaaccatcgtcgtcttcctccccggtgagcccttccctctcttctccctgcccctctgttggtccatcaagcgattgcttaagcctcctagcttcgccacaccgccacgaacgcagtacaccactcacccaccccgattcctcgcccaaagctcaccgacggcaaccccgc

SEQ ID NO: 155218 - DNA, 321 bp, Zea Mays
ttcgtttcaattagctcagtcgaaggtgccttcggcattgcagacgactcttcaatcttctgcgtgggaggagcagtttctttcggttcagcagctgaagaagcttccccgccaaactcaggtaccacggccggttcaatataacgtggccggtgggtaagaactttcaattttttgctcttcggcgcaggctcatctggagtggccgaagcagcagttttggccgaagcagcagttttcctcttctttccccgtcctcgcagcgggtagcagtagtcggggtaaacaaaaccaatggcatcaaaaactctgttcaatctc

SEQ ID NO: 155219 - DNA, 613 bp, Zea Mays
ttgaaataatcaactcaaaggtttttgcatcctactttcaaaagattttggagtagtttggctgtgacatctgtccacatcttggttggtttagagtcacttcgatcggaccccctgacgaattggagccccaccggttgaacacgaactagggggagcctggctggacgacactagaccgaagacttcaatgattctgctgattggacttgtgctcggtggagtctggacttccttaactttgaccaatctccccctttgtcattgtgtatatgttgcaggtcatgccgctcaagaaaatctcaaaaaatccggatggtacacccaatgggtgtacccgatgggtgtctatccactgaaaggcatccattgtcttgtctcaaaatagtaaactaatgcgacggggaggtgtaacgctgtgtctgggcggttgactttgattccttccggtgccgtgttatgtgaaacggtgccagtcgcttgacccatttcttggagacttgagcagctattgaagtcttgtgactgggtgaacgggcgggaaacgaatggtcgtctctcgactcctttaaatagcccactcacccacggttgccttcgtcacttgcacttg

SEQ ID NO: 155220 - DNA, 456 bp, Zea Mays
tcaacaaaagttctcgagaaactgaagaatagttcccgagaaactataaatagcctcagtagtacacaaacttagccatttagagccacaatatagacagattgctagtacctcattcacagaaagcgggtttctcttaaacatatgctttttagccacaacaggcacaagtacatagatttagctctgtagtacaagtgcaatgcattacctcatcactacacttaatacaaaaggaactacagtgtgtacgccgcggaactgatttcagattcataagtagatacagaaggaaaaaatacagaacaatgtgggtgtgcatgttcacacttatatagatcattacaataacaagaagctacccatcagaaagtaaacaaaagcctcccctgcccctacactaattaagtaaacaaggcccaataaacagttacaaccctgagttaaaataatggc

SEQ ID NO: 155221 - DNA, 853 bp, Zea Mays
gtcgtttggtgccttctggcctagccataccatctaaatccttttcaattaaaccacatgaacttttataaggtggcccatttaaaagccaattaatttaggccaaactaaagttctaccaaatccacatgttttgtaccctaacattttcactgctctagcgaggcatacggtcgctaccatttcttcgtctcccatcctcatcttcctcgagtgtcgccgccccgtgcgtcgccatcaaactcttcttcaccgcgtatctgggcaacagccccacccaggacggagggagaccggcatagcggcgcggcaccaggaccagccccgaccgcaccgatcgatccgccgggcaagaggcagaaccaccaccacgcctcaggtgtgggtcgagcagtgggtgactaattcggcaagattccccatcatgcatgtgtgtttgttaatctcccaaaccattattaggtcatgattaggggacacgtaaagtattaggaagagatctttgttaattgcctttagctagcatatggttttgtatccatcacttgcgggcaagacgcggttgtttacatgcattataatgtttgtgtcttcaatttcattcatcatttttatgtttttcgatcgagcaaattggagaactctgtgtggttgaatggtgatggataatcgtatatgtacagatcatgcgaaaggagaaagaccaaaaacgttcggcacctgtttgttgttttgtccaaataaatttttggtgctgcatacaatgtgagttgctgcaaatctatgccttctttgtattcacgattcagaaatcgttactcacggctactgatgcaaaacaaacaagttcatg

SEQ ID NO: 155222 - DNA, 401 bp, Zea Mays
ctgctcgctgaaacctttgaattggctccaaatctttggttgcatgttcttttcctcgaaaaatacctgagcatattcatgttgtgcagcaatgtcattatcaggagcttgctccagtatgccaggaattttctgttagaattcggctcctttagcctatttatggctggcccaattcattttatgaagctaatatggtgtgcagagatggcataggggtttagaaagctaatcggtgcgtagatatggcttaactcctcgcgacggcactgggtgtgccgttgttaacggcgtgttgcattttataatctcgggtgaataagaagaagatcaagatcagatttgtgaacacgcatgtggctttatagttctttctgctgaatgcttggatgtatcctata

SEQ ID NO: 155223 - DNA, 2394 bp, Zea Mays
cagagaaccacatgcctcatttctcttcctggatcctgatagatacgctagtagcaagcatctcaagactctcgaaaggctcaccctagctagaggatcgatcgaaactaggtgcccaaattctgccgacgaatgagcagtcctcaggctcagcagtcagcaatgcacaagtacagaggttcttccaccgaccaccgatggatcacaggatcaggccgggcccgaaaacaggaaggaacagccggtgtttattaacagcacgcataaaatactatagctgacgaccgagtgaccacggcggaacccagtccccatttcctccagattctcagaaatgctccatgcatgaagagaccagaaaggaacaaaaccacgcacacgcagcgcgcggcatgtcccttcagtccaactgcacgttcatgggtgtgggaggcagcatgaagcatcggagctccggcaactacgggcggccatggcacgctagctatattattccgagcatccatccaatccaccatgttcgcggtggggagtggggagtggacgtcacgcgccattgcggtgtgggtgtcaccaataatcccacggcaaagaaactgatctgacagctcaaggccatggaaccccctgcttgtccgggaaccgatctctgtcactgtcacaaccttcatccagttcctgaatatattatattcccggttcaaagatggagtggatggccgaattccatgtccgccgtggaaacggaaccgggtacctgaatctgaccggctagatgcaatgtgatatgatcttctccggatttttatgtctgcgcatatatacatataactatgcgttgttaacgatatactattacagttgcagccatatcgtcgtcgtaataatcttgacaagatgacaggcaataatcaagtccggcgcgcgttcagaataatggagtatacgtaaaatgatcaggtctgcaagaacaagggcctattttgtacatatttttttttctaaagagcatttctaagaatccagattcctagataatctagttgtcacgagaatctggacatcatgaggcttacatgtagaggcagataaggaggtccgtatggtttagagtttaggaggtggtggactcctctcgtcgcgaagactcgttggattctatatttacgtcgatttaggtgttattcacgttctcacatgggcgtactgagaatcgaaacgttttgctaccagaagtcgattctcacggccagaatctcagaatctggctagaagccgaaacaaataggcccaatatcatgcgaaccaaaaactagtgccaatgaatcacatttaacaacatatatatattaacgatcatcctatcaacatgtatacaaaggctaaatcgagcatccttcctctttgcaatggaacttaaaatcaacaaggtacctgtaaaatcatcatgagaagaaacacaacaattttaggaaattgaagttaaggggggacgcagatgtactcactgataggggttgtctggaagagatcgttgatggagaaagcagggaaatatgtgtggttaattttgtactagcctacctgtcggttttactgtaatcattatatataaaataacgattttttctattccttttgtactttcacagtatattagatactatatatagcaatcgttttcacgttgagattcagcatatttgcttagatttaatttgtaccgatttctactgtttttataggatttttatttctatagattaccgttgcagcagtctaaacagccggttttataaaacacatacattaaatactgtatgaatctattaaaatattaagatgactaatatcttaggatagagagtaaaaaacaaggacaaaacagaattgcagccttgagcaggggcaaccatgtacgcagtacatgtttggaggaaccagttggatttttggaaaaacatcgagtttgatagctgaaatggattatcatgcaaatcgacgctgagagccattttagattatggagcatgtcagcatggagacttcacccgacacgagagccattccaaaacgtgctcagaccatcttctatggtaccacgtaaccctccctccaccccatagtggattatggggtgacaactgacaaacacctccaaccccccactacaccataccccacatggatggatgagagaggcaacttccccatgccttgttcgtttggggcctagaatggtctggattgggatcaaaaccatatggatcaaactcacttggatgaaaacctaacccacaaaataactgtgttcatttacgccaactcaggtcttaaccccagcagttcccacctcatcccagcatagaaaaaatcctcgtctcgatggcttgg

SEQ ID NO: 155224 - DNA, 651 bp, Zea Mays
catttgtagtccttggtaggccgacgatgaaatccatactaacttcatcccatttccacacagggattggcagtggctgaagtaagccactaggcttatggtgctcagctttgattcggctgcacacatcacaatgggagatgaatctagctatatcacccttcataccattccaccaatatctctccttgaggtccaagtacatcttggtagtactagggtggatagagtaagctgaattgtgggcttcatctagaatggttttgcggaaatggccttgcttgggtacacatagtcttcttctgaaccataatgctccgtctttatcgactctaaaatccggggccttgccttctctgttacgatctttcatccacattagtcttttatcctccatctgtgctttcttgatctgatcatccaagacaggttgaatactaaggttgtagttgtaagagtggggtacaacccttaggttcaacttcctcatttcttcactcagctctggggcttgagtgaccaagtggtggcaatacgctttacgactgagcgcatccgccactacattagccttccctggatggtagtgaatttctagatcatagtctttgatcaattccagccatcttctttgtctaaggttgagatccg

SEQ ID NO: 155225 - DNA, 1056 bp, Zea Mays
tgaaatcaaaatggagatataaaagtgaaaagaaaagagaaaaggaaattcaaataagaaaaagaaaagaaaaactatgtgcctgggccgactttgtccatttcggcccattcaccttttaccctgcgcggccacttacccagcaggcaccgcgcatgtctcactcgccctggccagtgggccccgtcgtcaggatattcttctccaccgcaaccgacgtagcgatttctctgcggtctgtcgggatccttcgcagttttggtctcgcaagctcgcccgtcttcctcgcgtggtcaacgttcccgtcgggctcgccacgagacccgcgccaattcatccccactaccgtgcatggccgtgacctgcgaaactcctgctggtgccatctcccgacgacttcgccgtagatcccgcctgacctccggaccggccaactcgaccattaaatctcacccataaagtcgtgcgcttctcttctcctattctgctgttaaccaacgagaggaaccacgagcgagccatcgtagagttgaaggatttccgccgcggttgaacgtcggttgaccaccagcccccaccaaggaaccaaatcctctgtgcggagcatcgccgggccatgctgggtacgattgggtgctcgcctcagttgattggcgttctgcgcgggggaatttctcgccagattcgaagctccgtcgcgactccattcccttccgtggaccggcaatgtcgcagcgccgccgcaagtgttgactgtcctgctaggtaagcctagatcgccgtcaccatatacgctaatgcacgcttgtgttcgggcttgggttggtcgaagggcttggcgccggtgatggcctcggccgcagggagtcacacgctccgccgtcttcgtctgtcgggattgaatgcgaaacccggtcgttgatctcggtctgaacgaccgagattgggccacatgcgtagcgattgggggtgcatatctgggccgctaattttggatccaagggcatgtgccgcgtaccggttcaccggggtagttcatctaatctgggccttaga

SEQ ID NO: 155226 - DNA, 455 bp, Zea Mays
cttattacaacaaagttacattgattgtttaaaaatgtttttacaataactactagtcttccttcaggaccttctccgcaacttcatttagcaatttgttaacgacttcgtcaacaacagattcggctatattgataatctccagtgcttccttcgtctctagatcggccaggggatcaaacggttccggtggcagagataattcagctatagtagaaaaagttaattagttcaaagccataaaaacaaatgccaaagctaaaggccacgaaacaatacctaaacgtctttcgcgttctgcagcttcctcggcttgtttcgcttccactcgggcgtcatgtatatctttttcacttttcttcataatttcatgagccatttctcggccaccatttatccagatgtcattgtaaaattttccgcccattaaacttgcttcagctgagggatctttg

SEQ ID NO: 155227 - DNA, 594 bp, Zea Mays
aaattgtgttgctgctgctgcattaaatggcacaccgcattcataaaaccacaaagcccattgcatatccacataatccttctcctctttggacttcatcttggctggaattgtgggttgagaacaccctttacgcctttcatcaactacatctttaggtgatttccgaagcatctccacaattgagttttgcttgcttgcttgatttgccttggtcttgattgatgttggagtcttatacagatatgttgcacgtctttgattggctgcagtccctggacttggttgtaccttagagccttgggattctataggcgcatcttgttgaacttgaacagattcagctgttgcatccaccaccattacatcctcctcctcctcttgctgctcattatcatctaggaaaatagctcttttccttctattggatttccaataatccctcatctcctttataattgcagtagtggtctttgaacatatctttgtatcttcatagccaccttctagatgctgctttagcctttttatccctctagaaactgtggtgtcacaaaggttgcatgtcacttgatccctatttttcaaatttgc

SEQ ID NO: 155228 - DNA, 1104 bp, Zea Mays
tatatttaagaagaaaaaaagatgggccaaagcccttacaatccctgacactgaggtttaaacctcctcaaaacaggaaacaacccttgaactgccttcgaaaaaaacagaaattagccgtgagggaaattagctgctaggaaaataagccccttagcccctgccatctcccacaaccttggctcttctccaacctgctccagaatagcagcaatacttggattgccgccctcgaagacacactgactacggtgcttccataaggtccaagcaccaagcaaaacaagggagttaatcctcatcttcatttgtccagttgccatttcacttacgtcctccaccagtccaggaaactatcattttctagttgaggggacagagtatgcggtccaaattgtctcaacaaaaggaaccagcactcccttgagaaaacacaagagatcagtagatggtctattgtttcactttcttgttcacaaagagggcagctatcggggtgatccagtcctctttttgcaagacgatcagttgtccaacatcttttatgagcaactaaccacagaaaaaaccgatatttaggaggcgctcaggttttccatatcctctcatacggttcaaaaggaaccgagccaatgaaaagccctcttaggcatatttcgctgaatattttccattggcagccagcctaaaatgtgcttatcttcaacatagaccttaattcagcagttaacaataagttccaggggtgaagataatcaacaattgcccccacagataagacccctcgaatatccgacatccatgctcttccaattagggcatcttgcactgtccttgtattgatcttcctttcagaacaacttgaagaagtctcggcgcaatatcaaccaccctttgtccttgaatccatcgatccttccaaaaaatagtattagcaccgtttccaactttcgtttgcatcaccatactgaaagaaggcctaaactttgtcaggaacttggatagtcaaggatgaccaaggtcgatttctttgtgtagtagtgtcaaagtcacatctcatgtatttgattttagttctattgagtctaaaactttcggacccta

SEQ ID NO: 155229 - DNA, 387 bp, Zea Mays
caaaccacaagagtgatattgagatttagagcagtcgtaacccaacttgaaggcaccattttttgagatgaggctgcgatttacattcagaacttgaccgggaaagagggtgtctaatgcatatgttaatttgcagcaaggaaatacaaggctgatcagggagggaagtagtaacacaaaggaagatgagtataagaacctcaaactgcctgtgcccaccattttaagggatactcttcttcttgtccaccccaatgaagtggagtacgtgcttgtgcttagtctcctaaccgagctgatatatggaaaacaaggaaaagatctgctcatcggtcaaggctcaagagcgctagtcgcaatgccctattgtccaggtccaagtccaac

SEQ ID NO: 155230 - DNA, 942 bp, Zea Mays
atttagttttgactgtcagggcattcaagtggcgataatcaacacaaaatcgatacgtgttgtctttctttttaactagaatgaccgaagaagcaaattcactctaacttggctgaataattcctgtcttcaacatatcattgacttgttgttcaatctcagtcttgagggcaggagcatatcggtatggccgcatctggacaggtcgagcccctggaagcaagggcaccttgtgatcacaatcccgaacaggtggcattccctgaggcacctcaaacactgtcgaatactgatgcagaagctgctgaatatcatcaggaagtcctttaaggattgactgctccttatccgacaggtcttgaatactacagacttgaattagggcagtctgcatgaccgaagcttggattcctcgcaacatcacagtagaatttcgaagaggaatgcacagccatttatgtgcccaatggatccacatgggactatgagcttctagccaatccataccaataatgatatcataagttggcaagggcaacaccttcaatgtggatgaaaatgaaacaccactaatagaccagcatgcacccaccacctgttgcgtacactgtaattgagatccatttgcgacttggacttggaaaggcttactgattgtggtcacatttggcaaggactgagctacagtagtgctgacgaaagagtgtgagctccctgagtccaacagaactaaaacatccaagccagatatatgtcccacaaatttcatcgtacggggaacctccagaccagtgaccgctgcctgcgacaggtgcaagacattaagttctgtttccgcatcagctgtatcctccactgaatcttcctctggcagctgcaccatcttccacatctcctcaactaagtgcaactgaaccgagtcagcacacttgtgacctcgag

SEQ ID NO: 155231 - DNA, 333 bp, Zea Mays
gaagagaccgaggtcaatgagacagcgccaatttcagaagtcatggaacgatcaggactagttgtgacagagggagctattgacgaaggtactcctgatgccgaagctgaacagactgttgttgaagaagaaaatgttgatgaagttgaggaagattatagtattttgatccccacaaaacccagccatctagattttgagaaatctactgtgtccaaagacgacatgcccatgatgatgaagcttggctactttggggaaactgaaagaaaacttgtccgatttgccggagaagagactacccctgcaccgaagaatgatgaaatagtggtt

SEQ ID NO: 155232 - DNA, 463 bp, Zea Mays
cctggtccgagtgctgggcgtaggcggcgaagggcagttgcgaagcgtagagtgagtgaggtggatggcggtcggcttcgtgtgggcagggctggcaagcaggaattgttgtcctcgccggccgttgcgagtgtaggtgagggggagttgcgaagtctttttgagggtgaggagcttaggataatgttatttaactatagggagataggaatcattccgaaggctaaaccaatgtgaggtgtggtgccctcgctgtaagtatgttactatagtttgtatgatgaggccgtgtgccttcgcgcatccggctatgtctatagggacgttatgcgcttggtagggcgcatttattatgttggtctggttgcgcctgtagctggtctgtgcgcggatagtttcttggtgtagacttgtgcatggacgtaatgcgcttgcgttttggcacgcttgttgaattaatccg

SEQ ID NO: 155233 - DNA, 836 bp, Zea Mays
ttgtagatatataaatgtacttcaactttggtaaaaggtttaagtcatgaattggtcatttgcatagttttcccactaatccaatgcttggtggtctaatggctcaagaggggggtttagggtttgcatctttttccaaagtggagacacatgaaaagctagggcatgcctcctatcatgatcatcactaaattaagccatggtttctaaattttggtgcccccttcttcccacttatacacatgtgataataggccataggtgcatgtattgagctagggctttggttaacacctggggtgttacaatctgcccacaccttgttaggtctgaaatttatttgatcgatgacagaatggatgtccgactggttgaggcagatggctctcagctggacatcaccctgccctgtgcttcaatgcttctgctggttagacttgcacttcagtggccacatttggacttcctcccatctcagtcgatcttctccttttgtcgcggtacatttattgtggatattttatggatatgacttctgcaaaaaatctttaaaaattcctggcgacacacccaatgggtgtgcccaaggggtgtcttggtacgcagattgtttaccacattgtcctggagtagtaacttgatgtgacttggggtgtgtaatcatattgcctaagtagttgaccttggtccaaacggtgccgtgttacgcgaagcggtgcctattacctgactcattttcaggcggcttgaattgcttattgaattcttgtgactgtttggcgagcgtggtaggaagtggacggtcgcccccggcctctataaatagcctacttgcc

SEQ ID NO: 155234 - DNA, 730 bp, Zea Mays
cgaaaacacaggggctctttaacaactaggcacgacgaaggggtattctgcattcctggccgcacgatctgaaatcaagtgcccagatcaagtgcgcggagggttatgaagtcgtctactcccgaccgttggatcggatccgagggcaaaaattagattgtgataagctatgcgatgaagcgatcctatccgttggcatctagatctacggcttagattttaaaataaccagctccaatcctacgcgtacaatctggcatcaacggccgcgagccgaattggtgcacagatctaatcgcagcccttcatttgggattgatggtccagatcccacccctatcgccccagctgtgcaacggcggcggcgccctgcggtcacggcgggccatcgccgatgtgaagtgtaccaggcacccagttgctctaaattccaaattgaccaaagctacgcgaaattgggaacatggtttagcagtggagatggttctcaccgggattctcagagcaattcctcctggccatgacacaaggcggagccgcaaccatccacaaggcggtgagagcggactgcgtgggtccaaaggtgcagcgacatggcttctggcgcgaggtgggctgaggaaccgtggaactaggccaaggtgtgcagattcggcccaagaactcataggtttgatctttttttcttttcttttctatttctattttcctatcttattttcaatccaat

SEQ ID NO: 155235 - DNA, 939 bp, Zea Mays
tttctttccttgcttttgcaaaggatagcagtaatctgggtatacaaacccgatgacatcaaatactctattcagcctctttttgcctcgagccccgaaggccgttgtcatagcatcatcttcagccttcgagtaggcaccaagcaattcatcactggttgcttcagtggcatctagccagtcatcatttggctcgtcaaactgactcctatatttgaacgtgtacttcatgtagattaaactaccttggctagacccagcagcagcatccttctgcatctcccactcacttgcgagtggccacactctataagcaatgtgctcctcaactaagtctctggtgcctatgtaagtacatagtgtattaaaagtagactgacatgcttgtgtatcattcccaagggcaatggatggcctcctaatgtcgaagcgagaccatataggacgttgaataatccccttaatatcctctctctctctcaaccatatcatttttcacgtagaaccactcctgcatctaggcccccggccatctcttccgatatgtcagaactgggtagcttaccctagagcgagtctcgatgttgtagcaaccgaagttgttgtgatattgttcctttctggtagccttcgtctcataagatagctcatggatgttacagaaacattttgcatctggttccaatccctggctcctcatggcccatataaagatccccatcttgatgatagcttcgggagtaagctgatgaaggtaaatctcaaaagtttttaggacctcgaccagcaatttatccagagggaaccgaagccctgccttcatgaggcttctataaactactacctcatcggcttcgggcagagggacattattttcccctccagacctcacaattgagatatcacggaagtaccttcccctcattgcatcaattttcc

SEQ ID NO: 155236 - DNA, 648 bp, Zea Mays
gttaattgatcctatgacgtcaatccctcatgatttagatttattagatatgctctcctgatatttgaagttgttgttatatgatataccatgatttcttttgggctacaagttgcgaacacatgccacccaatgatattcagtgtcgtaggtcatagaaataaaataaggaacagcagtaaaacattatccacacaactaatttatattgactagaaatctggagcaccaagtatgaagtaatcttatgcattatgtgtatatttggaagctattgacggcagaatagaataggtactgggtatgtcgtgtaccttgttttcaaagggatggagatacttgatgtacgacaccttttgctcctcagcaacaggagatataagctggctcgaagtaacagttgcattccacttcactggtttatgatcacctcgtgcgctggtttgcattgtatttgtagaagcattccgttagaaaaaggcaagagcaggcaacatgtgcatatatttgataacaagaggatagaattacctggacataaggggttctgccttaggaatggatggattgatgtaccacttacatggtgagcctccagtcagacaaagcccatctaaaaaagggtagaaggtataaatgtatgggagt

SEQ ID NO: 155237 - DNA, 928 bp, Zea Mays
ggaggatatgatggagggtatgatgtgtagtcagggaagaaggtcctcatcacgtcttcctcgagtgaggagtccctagggggctcatcacccgcagaaaaaccagatgccgaagatgtacgatgatgaggaggaggtggagggtggtgatggtaaccagagccggatggccgcgggtcaccaggaatgggtcccggacccgggtagggaggaggaggacagtgaccagagccgaatggcctagggtcaccgggagtgggtccctgacccgagtagggaggaggaggatgaggagggtccgaggtgaagaatggatcatcatagtcctcgacctcatcctccagggtaatgaatgccacaccaaactcctgttggtgccactcattaaggtcagtggggatggtaggggctagaggtggaggggacccaggagggagaggatgaccagtcacggctgcataacgacgaagatcctcatgcagccagtcggtcctgcgacggcgcacagactcctcgaccgcccgggtgcggcaaatggcgaagacaccaagaaggcccttggccagacgaatgaacagtcctcggcctcggccctgaccctggcccggaccacttcctctcccgctgcggtccatcggacgtgaggcagcggcggcgcgagaggaagatgggtgatgaggaggctgaggaggtggctcatcagaggaagcagggctgccagaccctgagggagcccgcttcatacgagcagctgggttggaggaatcaacccagtagggtacgtagcgggagtgtttgacaggattttccaagtgagtgtgggtgaccacttcgatcatcttcatgataaagggtgcatgaagacaccctttgagaggagaccaggaagcacggatgatctcttcctagatcatgtcaaacacattaa

SEQ ID NO: 155238 - DNA, 291 bp, Zea Mays
gcccacctcgatgacagggcgcgccgaggctaccaccccaggcgtgggggacactacgacagcggggaggatcggagtccttcgcctgaaccacccggtccgcaggctttcagccgcgccatacgacgggcaccgttcccgacccggttccgaaccccgactactatcacaaagtacttgggggagacgagaccggaactgtggctcgtggactatcggctggcctgccaactgggtggaacggacgatgacaacctcatcatccgcaacctccccctgtttctctccgac

SEQ ID NO: 155239 - DNA, 271 bp, Zea Mays
tgttggactttgctatgctttagtatgcaaaaatgctttgtattccattgatgatacatccattgctttgtcgccggccgttgctaaccttttgcaggaatatatggatgtgtttccctcggagataccccttggattaccacctgtgcgaggcattgagcacaagattgatttaattccagggcgagtttgcccaaccgtgctgcctacaggatcaaccctgaggagactaaggagattcagcaccaggtccaggaccttctgcagtgca

SEQ ID NO: 155240 - DNA, 754 bp, Zea Mays
cgctctctggtgtcgccagatcgcgttggggtcggtgcgaggggagaagaacggtctcggtggccgtattagctcgccgccgccgtgactgcgcctcgctccgtggacaaaacctctgcccgtgtcaatcaaggtgaggatctccgtcgagtcttcgtttccctctgtgtaatgcatagcgcttcgaacaaaaacggattgcgggccattgggtcggtaattgctcaccggagctcaagcctcaccgtggagccgccatgaactctagttagctctgtagacctgacccctaactttggtatgccccttggcatcttcgcctcattcgtaggatcgtgtggcaccaatcggaatagagagtagggattgggggcgccggctccaccaaccccggcgaacccgccaccgtggggaaggccttggcgccgccgcccggtcacctgggatgtgggagcgttcctgaccgcgggatctaaaagcagcggtcgggattaggggatggcctggtagcattgatttgataatcagcggtagagtttggatcttggcgcaggcaagcaggtgtcgttgatctgagatctgacgcgtagggttaaatcacggatattgaaaatcgagaccatagaatcttgatccgatggccagtatggtgtaccggttcggttatagagtgatctaatcctatgcgtcgattagagatctgacggccaaggcgggttcttaccccttcgccagacctctttgcataggagcc

SEQ ID NO: 155241 - DNA, 467 bp, Zea Mays
aggtgcactgcaggagccccaacgtgtcgtctctcccatgaaaaaaccacccgccatcccatcttgccctcaacgaggagcccacggcaaccgtccgccccagacactcctcaaacctggttcccctctcctctctctaaaacaacgcctcttctctcccacacaacaacgcgcgcccggagcagttcgtgacctcgcagtgtctacacgccggagcagccgcgctgagcgccgcctcgcatccccgacgcgctcgccatccatcctcgccctgccattgccatgtcctcgccaaggtgaccttcgtttatcctcctctctctctcccttctctatgcacagctggacggtgcccctagccacaatccccggccatgtcgctactggtcgtggtcgcagctcgcccctatgcgttgtgcccatcatcgactccagcgagccgctgatgaggcctccctccagccaag

SEQ ID NO: 155242 - DNA, 298 bp, Zea Mays
ttatcattacccactcttttaagtggtatcggacaccacgaaaaggtggtaagaatcctggctttgcaccataaccgcagtcaactaggtaatattttcctacaataccatgacattcattagagaattatctatcttttggtgggtgcatattgtagacattcattagagaagattaccttcaggtgcaacgagaccattctgcctttgtaaggcattagctagaacgacgacatcatgtgccgaaccctcccaaccagctagcacatatgttaagcgaaggtcaaagtctaccgcg

SEQ ID NO: 155243 - DNA, 541 bp, Zea Mays
gttcagcaaacatctgagaaggttcgggaaatttgtcagaatattttggccgctcagagtcgtcagaagagttatgctgatgtgaggaggcgggacttggaatttgcagtgggtgaccaagtccttcttagggtatcacctactaaaggagttgttcggttcggtgtctccggaaagcttagcccgagatacattggaccgttcactgtcttggcctgggtcggtagcttggcttatcgtttgcaattgtcggattccatggcaggagtacacccggtatttcatgtctctatgttgaggaagtttttgtgggatctggaccatcaaatcgagatggaaccgattgttgtgtagcagaatctgactctggagtgtcgtccggtgcgtatcttggagtcctcagagtgtgttatgagaaggagatcaattaagtatgttaaggtcttgtggactaatcagtctgagcgcgaggctacctgggaacttgaggagctgatgcggcagaaatatcccgaaattttcgttatgggtgagttttgat

SEQ ID NO: 155244 - DNA, 831 bp, Zea Mays
taccttctgtgttttgatgaagacagcgacgtaggcgcaaatctctggtggctgcttcatcataataaccttctgcatcaaacaccgcatcatcaggaagacgtggacgaggaggttgtggtggcggtgcttgttgttgcgtctccaacacagcaagtctatcgacgatctcgaacaatcgacgatctagcctctcgtaagtcttgccatggtccatgccaatgaaggcatcatgcactgacttgtggaccgtctcctccatttgctcctttaggagcttgttgtttgcctcaagatcttggcggctaacacattcatcgaagtctgtagggatccttgcttcttcttcgtcgcctgccatcgaaacacaaaaacaggaaacaaacggtgaaggttatccctaataatttcactacacactcctctcaggtggaacacaggaacacgctctaatgtatcttactaagctcttacaagtgtctgacgaaatacaaagcaaaggatggtacaatcagaggctggttcgtgatacttaccaagagggagtgaaaccgcgattgcaaggtcaaagatgtattgatcagaagaaagtacgtggagcttgggaggccaaaaattaatatcaaggattagcaaaaatcaagtgcagattagcgaagttcaataagtgtccaaagcacaagtcacaattgttggctaagccgtgtcctatcgaagcacaacaaggtaaaggcaataaggaacgatggacaaaaacttaaagaactagcagaatggcagttctgtaaatagaacagatttttcagcattagtagaaatcaaaggcgcgtt

SEQ ID NO: 155245 - DNA, 510 bp, Zea Mays
agccccacggcggcgcagcatgccggcgtggccatgctcgacgaacataggtcctaaaccgagaactaatgggtgccacacgaagagtacggcaaggcggacaacatgacaagcttctcacatgtgattatggtgtagaggctctcgagtctacgacatggtgtggttacgtggtgaagggcgtgctccggtgaggaattcactgcacgccaacagataatcccgcctagatagagcacgagcacgcgtcgggagcactaggaaggctctaggaccacccaccccaatcacgaggacgacaaccacacgaaggtaccgcggatgctctacgcgctcccctctcccttctcggttcctcaccaactccttacttgattctcttggctccggtggttatagtctcgaggaagcggcgccacggcatggcccaacagcctccatgagctgggcgcaacaacccccgaggagcgtgcggggaagatacacaatgctccgacccacgggtcccac

SEQ ID NO: 155246 - DNA, 655 bp, Zea Mays
aacggcgtgaaaacgacgtttgaaagatgaatagtgccataggaggtttggaatccgaatagaggcacaaaacgacatggaatttagccgaaacttcacgaataggtttatgagggtgaatatgagtgaagtgtgcgcttggtttgaatttaggcgaagaaaacgggattagggcactcggctcggaaacgatcgctcgaaacggggaattgagtgaaattgaagcctggaaactcggattggcgtgaaatttggcaaggatgttgctgggagtgttatgaaggtgcctgaaaaatttgggttcaattggagcatttttggctggtttgggcatttcaccgagcacgtggcgtgcgggaaattaggtttacggtgaaacggctatttgaggtgggaaaaccctcccgaaggagctagaaacctgcaggagtgttcaaggaatacaggggaacacatttcacaactggattgcactggatttcacaggaattggagtttgagcaaaagaggtggaaaggagtgctctgctcaaaaagaaatagggaggagagagagggagccagagcttctcacctaaggggggaaggagagaggcacgagttcgccggagcacggaagaagacggtggccgccggtggagggggatcgccggcgg

SEQ ID NO: 155247 - DNA, 959 bp, Zea Mays
attcccccgaaccgctggtcattagatcaaagagcgacgttggagatttaaataacggggatcgcttctcgcccgcccgattgaccatcaacggcccacaatcaaccctgaggtgacacacccaggagctgatctaagccgcatgttcaccatcccacggcccaccacgcttcatccgaagcagtaccctgacccctatcttggccccccctgagatcaacggtccgaaagatccttcttcaacctcccgtgcacaggcagtggtgtgggctggcaacgatggcgccatggccgcagccacccagacccgagcaggggaccgctgactatgcttctcgtcgagctaccaacggggaagacgaaggctagacagatacgagggctcttatcactttctgtcgtgcaggcgacctcggaccattatgagctgcggatccagggcgagggaaaactccgatgagaaattcccgtccacccacggcatcacgagttccgattcgacttcaattatcatcctcacatgctggtgacgctacttgaccagaatcctgaccccgaacgctatccaccattggattcgccgatggcggcaagctttctctctccctcgatctgtttccctgggttatggtgcttcctatccgatagagaggaaggggggcagcccgatatataagtgcagggatgaggttcctcccgggcggagtccgcacgaacggcgagttcggtagccatgcgcgcggcggggatctagcggagcacgcaacagactgagcaaggagaacgaccagacggcgggtccacgagctagcaatacagcgcggggagcggctggagggatgggcccggattgtctgcgagagaagaaggggaaagagggcagcgctgagcgggtgctatgtgaggctgagcagtgggttccacccgtcagccacacgcatgagagagcaggccgcaca

SEQ ID NO: 155248 - DNA, 596 bp, Zea Mays
gtcatggcggtgcaagcgcatggaggtgcaagtggcaagcaacttggaggtgtgcacggaaagggggagcatgcacgggtagagtagagcaccacatggcagtcctccgtgtggaggaggcgcatatcatggcggtgtaggacacgacgtatgggcgcgatatttcgtcgaacaccctggtggcattgttctagtcctcacagtcggtgtagaagcgaagagggagcaagcgaggatgggttggatttggtcaaggcacgacgacacgcttgggtgtgtatctggtacacgaggcggcggtcacgacacaggagcagggcatggccagagacgttggcagtcgcgtggcgtcgttgcgaccagagcacatgtggtcaacggcggcggttgcctatgaggaggcgatccccgtggcactccccagtttgacgcccatcatcagggccactgtttctgcttgaagagaggggaagattagagtagatcgatatgaccgtgcgatggagaagatgtgaggtagaaggaagccaataagggcatttccatcttctcagagagtcttgtatgcgcaaaacgtagataataggcatgaacca

SEQ ID NO: 155249 - DNA, 459 bp, Zea Mays
cttaactgctgcgccgcaaacaagggcttctgagtctccgtgcatcggaggagcccaaacttctgctcaataacccgaatccattcgtcagcttcgaggggatgttcggccttgacgaatagtgggggacgtgtttccgagaaatccaaatatgaagtttcgcggggtccttgtagataagctcgcccgccttgctgttgatattgctgtcccgccatttcgcgaaggaagcaggtgttgtcagctgttgcattgactaaggcagcgatagcctcagccaagtttgggggtactggtggcgggttaggagtagtctcccttccacgggaggttcccgcaccatcctatccacgagtcctggacgacatctgaggcaaagaacatttggaaaatataatatgccaaagcacaccatcattttacattacttaaagggtaatgatacagactcgaatttac

SEQ ID NO: 155250 - DNA, 782 bp, Zea Mays
gatccaggattgtctgaaaccatggataaattgtgacagagtgatatccacattgttccttcatagaggcgacgagttcagaactatcggcgaggaaatcacattcatgaagccacatccaataagatggagaccgagaacaaggctaaggcctcaactgaaggtgggggggaattagcctgagaagtttttgcctcaacgtgtaatgttcaaggggactggaaaccacaatatgttctgtaaatccctagactagaccaacttagtggcattgatgtatgaggcatcagacctgcaatgacaactagaaagggaaccacatcgttcacagtggttatcgatcgcaagctttgcatcgagccttgcaaggttgctacctgctgctaagccccgtgcctgtgcaagaggccaaaaggaagctggctctgaccaacgaacttaacgggcgggagctgggcagctggccctggcctcacgcccctgcatgactgcctctcgcttggggcatcggctagctagctgtcaaactaaaccaccagcggactagcaatgtggagccgcgggtgtttcatagtagcagggagaggaagtcaggcaatggagtcggaatggagccacaatcgcaggggagaagggcagctggccgccgccgaccttgatctggagtctagtcttgccagtgccgaagataaggagatgggaagtcggtcgacgacgatgcgataagagtgagggccataggtttggctgcgatatgagagcgctaaaatccattactgaga

SEQ ID NO: 155251 - DNA, 486 bp, Zea Mays
gcgggagtgggaggtgcttgaggctgagcaccagcgcctcagcgactggcgcgcccaactggaggagcgcactaggacggtgtcccgacgattcatctccaagcggtcccaactcgagcgggaccacaaggagtacaagagggacctctagagggtgtgcgccagggagctggaggcatcccggagggagaagaaggtgaccatgagggaggaggccatgacccagcgggagtctctcacgacagagtactaggccaagctgagcgccctggaccagactctggaagcccagcgggcctagcaggtcaaggctgtggagaggctgcaaaagtggcagcaagagctcgaggccaaggccagtgacaccgcccttgccgaggagaaccttagggcgaaggagcagtccttggataggcgggagacagacctcgccaggcgagagacggatctcgtcttcaggtaagaaatgctcagccggtggggcga

SEQ ID NO: 155252 - DNA, 712 bp, Zea Mays
tgccgcgttggaaacttcgcagaaaggccctcggggtttttgctaactgggaacgggttccttcactgttactcagagtcgctgatagtttgcgctaaggtccttcggtttctatttccttccacgtcgaagtccccgacgacggtgagcgcagggaagctccggcgagcttgcagactggccgaacggggcaatgaccggcgctcccgagcggcggacacgaaattggacctcccctgatcaattcccccaacttaatttcacgattggtaagctatcaacctctgtccacgtgaaccgcgaacgatgaggacaatggcacacgttcccggtgatgggggtggtctagttcaattgagcgggttggtgagcatcaccagtatacaaggatgctaaaacgagaacagagagggcatgatcagacctgtggagggctggccacggccagggtgctttcacggcggcggagaactgttttggggaaaacaagagattctcaagctctagggaacgattcaaggcacgaatggctccactggttgcgcaattacctaacagagcgagtggtggcggcaatttataggaggcttaggcggtggtgctcaatttagccgagcaaagctggcggccggaggggaaaagggctctggcgcatgacacaggtggcctttcaccgtggcaggtgctccggtgatcaccagacatgcaccgc

SEQ ID NO: 155253 - DNA, 570 bp, Zea Mays
gtttttatattaaaacaagtttattatgaaatttgtatgcaactgaggatttgggatgctcaatattctttgtatttggaacatatgcatcatgattggcacgctaggaaggaggtgcacctttttgctctaggttcgtttcttccctctcttcgtgatgcttcttatgttccctaaagcttgtgcccatctcgctgatcttggctaccctttgacaattcaatcagtaagttaggcgtcaagaaagaggaggcatgggttagattagcgtatagctggaactaagattgatcttgacataggtgcactttagagagcatcaggatatgttccataaaatgttctagtggagtgttcatctcgagaagcttgcaaaggtactgagaagatgttccacactgcttttggaccaaccagcatgcctaggacgtttcttccttatctgatcactactttcaatgggataagcattagaccagattgccaaggtttttaagctctatatgttggtctgggtatgtaagttagctattattaacacatgtccttagttctgtcaccttctccctg

SEQ ID NO: 155254 - DNA, 522 bp, Zea Mays
gtactgccattcagaggccggttgcttccaccgacagcaaggatgaggaatccgacttctctgatgaacaggtgggggaccctcacttcaataatgacaatgatgatgaagccaatacctcggcggggttgtaaggctttggcctcccccttttgggccgtttggtgtttttggtacactggttggcaactattttgttggttaacggttggtgctggcgcgcatgtggcgctctttgatttttctgaaacttactctgatggaatcgaggtttatttcctgtttgatacaattaactctgatggagtcaatgactctttgctgcctgaaatggttaattttgatggctggaggttcggttattttttatgtgggctctctttgcatttttcttgttgggcccattggatgccttattcccctcatgtcatgttgattatgtggccctttcaattctactgcttatggatttatactggaagaaggatctattggtgtatgctatgcataccggaattcctt

SEQ ID NO: 155255 - DNA, 1683 bp, Zea Mays
tcctaccttgccaatgatgggatagggagctacgaaacgtggggctagcttatccttgacttggaaccttctgacaccacgcattggagaaaccttgaggagacgaagtctccttcctcaaatcggagttccctccgcctgttgtctgcgtaactcttctgccgactttgagcttcaagcaaccttctgcggattagtgcaactttctcttccgcctctttggcaaaggcaggtccttctagtgctttttcccccacgttggaccacatgagaggggtctggcattttcgtccatacagtgcttcgaatggcgacatcttgatgctggcctgatagctattgttgtatgagaactctgcgtagggtagactggactcccaacttctatcaaaagctaacacacatgctcttaacagatcttcaaggactttgttgactctctctgtctgcccatctgtctgagggtgataagtggtactgaaatctagcttggtgcccatagctttctgaaggcttgtccagaatttggatgtgaactaggttcccctgtctgacactatcttccttgggatgtcgtggagtctcactatctccttgaggtaaatccgggcaagggtggctcctccaaaggtagttttcactggaatgaaatgggctactttggtgaggcgatctattattacccagatggagtcattccctttctgcgtctggggcagtccggttacgaagtccatgcctatttcttcccacttccattcaggtatcgggaggggttgtaataggccagcaggtttttggtgttcggccttcgtccgttggcagatgtcacattgggccacatactgagctatttctttcttcatccccttccaccagtatctggtcttgaggtccagtacatcttggtagttccggggtggatggagtaggccgagtcgtgagcttccttgagtaggacttctcgggcctccccttttggtacacacagacggtgtttgaaccaaaggactccttggtcatctgtcctaaggtccgggagttgttccttacgggctttctccacaagccttgctgtctctgagtctagacgttgagctttgccgatgaggtcttctagcattggcttgacttcgagactgtcgttgattcccagacatgcatttagttgtgctgattctttcttctagtcttctagaaagttggtcccttttattccgaatggcttttgactgagggcgtcggctaccacgttggccttcccggggtgatagtgaatttctaggtcgtaatccttgatcagttctaaccatcttcgctgacgaacgttgagatcaggttgagtaaatatatacctcagactcttatgatcggtgaaaatgtggcatttgtttccgatgaggtaatgcctccatatctttaaggcatgcactatggctgccaattccaaatcatgggtggggtaattctgctcgtgcggcttgagtaggcgtgatgcgtaagcaatgactttctcgttttgcattagcacacaccctaagccttgcctcgaggcatcacagaagacgacaaaatcttgatgaatatctggcagtgatagaacgggtgccgttgtgagtttctcctttatgatttggaaacttccttcacattttggggtccacacaaatttatggtctttct

SEQ ID NO: 155256 - DNA, 582 bp, Zea Mays
gaaacaggtatccaatgggttgagcgtacattggagaatagtgatgattgctatgacatgtttcgcatgcggcgcactgtgttttgtcgtttgcatgatacgttagtgcataattatggtctgcaaccaagttggggagtaagtacaaaggaagcggttgcaattttcttgtgggcatgcgggggtccacaatcttttagatagattaggaacaagtttggtcactcgttggaaacaattagccgcaaatttagcgaagtccttaacgcaatttataggatgtcttcaaacgtcatcaagcctaaggacacacatttcaatgagattcatcctaggctgcgagagagtagattttggccacacttcaaggattgcataggtgcaatagatggaagccactttcccgcttctgtcctggcctctgagcaaccgaagtatattggtcgacacggttatgcatcgcaaaatgtcatggacgtttgtgacttcgatatgaggttcacatttgtcgtcacaggttggcctggatcagtgcatgatactagagtattacaggatactttgatcacgtatcgagatagg

SEQ ID NO: 155257 - DNA, 355 bp, Zea Mays
ctgtgtggtcgcgccaggctttcatttgggcttgatatttgttgagggcctgcagggcgaagacgcggtctccgtcgatgaggtctttggaggttggctcgtctacgtcgggtgctgctgaagcgcttgtccgcggggacccgtgtttgatttcctgcggggtcatggcctccgatccgtatagcacgcgaaagggagtaaatccggtcgcccgacactcggtcgtgttcagtgcccagactgcttcgggtagcaggtcggcccatttcccttcttgtcgtcgaggagcattttcttgattgctgtgaaaattttgcccttggcgcgctccacggtgccgttggtttgtgggtgg

SEQ ID NO: 155258 - DNA, 580 bp, Zea Mays
aacaacactaacaaacaagcataccaaatcatattatagaatgtaacaattgggtattacaaaagcattgattgtgcacccaaaataacagctaaacaaaaataaatatatgcatagtaattgagatcttctgggtgtcctctgcttaggtgaacttgttttcataatgttctttgtcttcaaatcaatagcagactttgaactgcttgacttaatgggaacttgtgggggtgggatgtccgtgttcaatacccgagactttttctttggatggttagttactgaactggagggtgcagctgatttaaaagtgtgcttcaatgttggagcaggcataaaatcgtcgtcagacgatgcaactggtgttgtaggctgactttttttcacccgacaagctagcgcctttctacggaaacgagtaactaagaatggcgactgaggatctagctgcagcttggtctgggtattatcagcatgttgggaggagctgctagatcttgtgcgtctagaaatgtcaactgaaaacagctcttggcttgattcaatagttaatctttttggattcgatggaggacgatca

SEQ ID NO: 155259 - DNA, 1524 bp, Zea Mays
ccaatgtgtctcgaggccctcatgaggacctaaccgactttagtgaaagggtggtcaatgttctccaggagttaggttcacaaaccccactcttgctcctaggcaccccgaggttcatgatttaaggttctgcaatctctttcaagctgacttctataattctattattattaccaagaagcactaaatcatcaagcatagaatgattgattgggaaggttgtgaaaatatgaatgatgcttatatgtctcgggttctgagagcatgcgaacagaaggggatgaaggctatcatgactatggaatatccatggaatgatgaggttattgcttagttctatgcaactctttggataaagaaggtcgatgaggaagcggatgggtacgatcacccagtcatgtacttctacctccacagagtttggcacaaagtaattatcgaagatttgctcatatcctgggtttctctgacgaggacattagagggaggaaccttcgggttcatgatattcgtctatctaggcgtgaagagaaggaagtggtgcacatctcaaatgagagggaatactggattacttctaacatgcataagtactatcggtacatcaacttcttatctaggatgacaatccttcctaagagctgcaatcaaatgaatgtacttggagagagtcgtgtccttctcatgcttatgactcctacctgcactcgcaaaatcaactatttgatatgatttggaaagatattattcgggcatcttggtcacctttgaagggctaccttcatgcacccttcatcatgaagatgatcaaagtagtcacccaggtccgctatgaaaacccagtcaagaattatcgttatgttccttactggttgattccaacaatctagcagcaaggtccaagtgggctccagctggttcaggaggacctgcatcttctgatgagccaccacctcatcctccacttcttgagacctcctctagtgctgctgctggctctcgtccaatggaccatggcggtcgaggaagaggtcagggatgaggtttgtttgtgcatctgtttaagggcatcgtcgaggtttttgccatgtgtagaagctatgttgttgatgaggctgtgcactggcatgagacccaggcacttcatgatgatatgcgaagctttgcagcctccatgggacatcccatgccatagtgacctcctcctattccaattcctgcgtatctagaaaatctcaatgaatggtaccagcaggaatatggcgtgtcgtttattactgaggaagatgaggaagaggattatgatgattcatcttacttttagtctactcctactgctgctccaggacccattctaggtgatcccagaccatctagatctgctcatcctcctcctcatccaccttatcagggtccttcttctatctatcctccttctaacgaccctcctcaagactcgtagtatgaagaggagatggtccatgccttcttcgtggcttatcctccctatcctcctccacctgg

SEQ ID NO: 155260 - DNA, 1033 bp, Zea Mays
ggggaacttactggtgggggctaggtcgtgataggggcactggaggggggcggcccacggcggaatggctcggcggcggcgccaaccgactctgacgaggaattaagcgcagcagggagcaagtgaggggaagggagagggcaggggaggttccttacctcaaggcgaaccccagggacctcccggtggcggcgaaggcgcggcgacggctcgagtcgacggtggcggacaacgacggctgcgcggaggacggcgggtgagcacgggcagaggaaattagggagggagaggagaaattggggcgtgtcccgagttgcggatgttgagggggaagctcaccgtggcagagggcacggcggggctccgacgtcgacggggaaacaggctcgggacggcggcgggtaacggcggcggcgctctggcatgcgcgcagcgtgggggaggttgaaaaggggttctgcaggtgcgcaaatgacggggggagagggtagcgaggctctggggctcaagtggccgagggcggggcggttgcgagcttcacgcgcgacgtggacgcggagacctcggtgcgcgcagctcgggcggcggttacgcggggacgagggaactgacagagggggcccgcgggcagagagagcgggggagcgggcgcacgcgcggggaaagtggccgcgctgacgggcgggcccgccaggacagagagaggaaggggggaaggcgcgcgcgcgcgggatgggccggctgggccgaaaggccgaggggagcaggggtatgggccactttgccttttccttttattctagcaattgctttcccttttctttttatttactctatttcattcaattccaaatatgtcacaaattcaaattagcaccctcaagtattatgcatcaaacaaaaagtgaaatttagggtttaacatgatgccacatttcatactcccttggagtttagccttctagattataattacacaaaaaaatagccactcttcttctatagaaaagagaaggaggagattggggaagat

SEQ ID NO: 155261 - DNA, 521 bp, Zea Mays
aaaatatataaataaatgtgtcatttcatatcaacatcttggactagtacatctagttcaaattcaaagtttacagtcgaatttggattcaaatttaagaattcaaacatgaaaagaaaagaagaaaatagaaagaaaatggaaaaaaaaccctaacctaattgggcctgcggcacccaatttggcccactaaagaaaaccaacggtgcggcccaggactacctgcacgcgcacaaacgcctggcactgacaggtcgggcctgcgcgcctgcggctgcaaacccgcgcgccgtctctctgtcgcaagggggccactggccagtccctccctcgcgctggtcacctacatgcggggccacgatgtcagcttcgtccccgtaacgactctgccgagaacgccggcactggcatcggctcaacgcggcatgggggattgactgggacccgttgaactgcctatattaagtgccacgaccccgtgtcaaccaagcccccacctccgcgaacttcgcctgtgcagt

SEQ ID NO: 155262 - DNA, 375 bp, Zea Mays
caattgttcatgttcctccatcatcaatatttacgtacacacacaacattatttttgaaattattgacaaaccaaaattcttccttgctatttttgcagtcactaactgcttcgaatcttcatgaatctaattgcatagtctgcagtttctatccggagaaaacaggtatgctttacatgccatttatttttcgttattcacatccccctcaacctatacggcacaaacctgaattcttcctcactgatttgccattcaccaatagcttgaaatctttagaagttaaaaatacatagactgctgcttctatcagaaaaccaggtatgcattattagttcttcttcatattctcctccaaattatacagtttctga

SEQ ID NO: 155263 - DNA, 597 bp, Zea Mays
aaaagtattgaggctatcagcaacgaactgcttggagcatatagcagggccgaagatgatgccttgtccgcagccttcgggggccaagggaagaaaagattaaacagagtatttgatgccattggcttcgtataccctgattatcactacccactgcaaaggcaggggaagaaaagaaaaactatcgcttcggccattactgttgtgccgaagggcaagaagatgaaggtcctgacccaccggccgcgatacattgaaccagccatggtgcctgaatttggcgagggaacttcttctactgccgaagtaaaacaagctgctccgaatgtgcagagcgccgaagaggccattgtagtgccgaaggtgcctacagtcgggccagccgaagccgaggatgataaggctgaagagccacaggtggaaaaaatagtgaaactgccagaaattttaagtcctccagcagaggaaatattgctgaaagtgcagaaagctcctactgccactcctaagaggagaaggatggccaatgtgctagacgctgtcttggagaccgcaaaggccttgagccttggtcctattaagaaaattgctgaagtt

SEQ ID NO: 155264 - DNA, 634 bp, Zea Mays
cccgtatgcactaatctttacactacgcaggacgacgggttgattaaaaggaaccaggggcttcttttgtaaaattagcgcgctgaaggggtatcggcgatagtgagccgctagatcgatatcggaccgcctagattagatcgtccattaagtgaaccggtatgcacccccgaccgcctgatcacaatttgatggctgggatttgaatgtgccacacacaatatcgcccaccggatcatagatcaacgcctatcattacccccggccgaagggttacgctggatcacatcaccactattcgtagggagatcaacgatcaggcccattctctcccctaggccatggtggattggttgccggaacagagctcccgcggcgacgccattgccgcccacaccaaatccacgcccaagggcacaaaactacgatcctgaccgcgctacgcgtagagggaaggcaagcaaactcgtacgattgatcttaccaggaatccgaggcgtgatttcttttgcccacgatgggacgcggctctgtggcagcacagtggttccggggaggaattcctagtaccttggtcctcgaccgtgcacgtagctacacctgacacgattcacgaacactagagatccccctg

SEQ ID NO: 155265 - DNA, 839 bp, Zea Mays
gctggaagtcctggagctgttcagggcataacttcgaaggatcaactttgcagaattcagctcccagcttcttgataatcttgtgataaatggagggtggagagatccgagcacaacaggagcattttttcccaatcccagagcatcttttaaaacccctagccttctctcgaagtctggcactccttctgacctcagtgtcgaccaagattgactgtttcttcctcttgacgggtttagcaggcaaaggagactgaggttccacatgggagtcctgactaggagggggcaggcacttggagggaatcttgatcgagacagtttccatgctgggctcaacgaaggcagagatagcaccggacaataaaaatttcttggcccattcaaaagagtccggcctcaacagtaggcccatgaagaaagcatcccacacctttgggactggaactaattctgagttggtggggaacaagtcagcccaagaagaaaggcgttttctagccaggtaatcttcatatgcaggatcatggttgggctgctccaagtgttgcatgaagcccacattgatgttttcttccacttgcatgttctcctccccctggtcgttgtttccctccaaaagcatacccgctgggggaaaggctggcaaagcaagaactgcatccacaggttctggggcttccacctgagggaagtggacctcttgtgggataatgatgtcattgaagagacccacagattcatatcagagggcagatcttcaaggcctgagagctgataactgaattggtcctccacattattatcatttggcactggctcaggaggttgaacttgtt

SEQ ID NO: 155266 - DNA, 488 bp, Zea Mays
gatacattatctttttaacaaaattcttcctgatgatggtagagaattgtttcacattcatgcatttttgctgttagcaaccaagtatcatagttttttaagaagtatgataatctaaggtggtctattaaaaaggatgaaatgagaaccatctttatgcaatttcctgaagcttatgttgccacaattactactttgtagatagatggatcagttgttgaggacatttcctgaaagcacaaagttaggacaaatgtactgattgaaagaacactcctttataaccacaccacaacctatgatcatcccaaagaagacccaagtaaacagacatgcttaaataaaagtcagaaaagacactttaagatttgagatttgatcctgtagctggtcaggtggttcttaccgcagagcagatgaggatgattaaatgtctgaaatttcttgaattcttgagaaatcggcgtgcacataggttggaactttta

SEQ ID NO: 155267 - DNA, 1736 bp, Zea Mays
gccgtcgaaccgccgccggtgtctctggcgaagagcctggcttctctcgccgaggaggccgcggccgtccagaggcagaggaagcccctcacacggatggagcggaagcggttagccgagctccacatcaagaagagggtcaaggagcagtacctcaacggcaagttctaccgcctcatggataaggtcgtggcgaatgctgagacgctggaggatgcatacgacatcgtgcgtctgaattcaaacgttgatctagcgtcttcaaaggatgatgtatgctttgccacgctggcagaggagctgaggaacggggcgtttgatgtccgagctaatgctttctcagtggtcgcgaagagaaaacggggacaccttgttcttcctaggctgaacttgaaagtggttcaggaagcgataagagtggtgcttgaggttgtctacaggcctcaattctcaaagatatcacatggttgtcgcagtgggcgaggatatcactcagttttcagatttatatctgatgaaatcgggattccagattggttctttactgtcccgttgcacaaggcggttgatagcaatgtgacctctaagcttatgtcgctaatacaggagaagatcgatgacgcccagttagttgcattcatgcaaaatatgtttgatgccaaggtgatcaatttggtatttggtgggtaccccaagggtcatgggctgcctcaagaaggagtacttgcaccaatcctgatgaacatatatcttgacagttttgaccacgagatattcaggatttgcttgaaacatgaaggccttggttcagaggcaacagatgtttcagaagaccgtgggtcaaatttgcgtcgctggtttcggagccaactgaagggcaaggatgaaagtagtgaaaatcaaacagattgtctgataaagataaagctatatgcttgtagatatatggatgagatttttgttgcagtttctggatccagagatgtcgcggaagatatgaaatctgaaatggttgcttacttaaacaaatcactttacttggaagttgatgataaaattcatcttgtgccgatcagaaggaacccacgaggcttacagtttgctggttttgtggtcagagtagaaacgaaggaaaatgctaaactgaaagctgtgcataagctgaagcagaagattggtttgtttgcttctcagaagcaagagatttgggacgctatgaatcttagagtaggaaagaagtggttggcatatggattgagaagaataaaagagagtgagatcaagtcgcttggccttagcacccctttgttggatcacattgcacaatttaggaaagagggaatgaagacagatcactggttcaaaacattgctaaaggtatggatgcaggatgtcaatgccaaaaatgagctaaatgaggatgttctcttatcaaaatacattgctgagccagcacttgcacaagaccttagggatgcattctacaactttcagaagcaagctaaggattacatttcatcagagactgctgcaacggaagcattgttgtccgatttgaagagtacctgcactgatggcagtgtcataaaaattcatgcacctcttaactatattcagaagtgccttcatcgctatggtataattaatctagaaggtttccctaggcatgtatcggcccttgtcttgcaagatgatgagttaatagtaagttggtttgcaggaataattcatcgttg

SEQ ID NO: 155268 - DNA, 309 bp, Zea Mays
gacatgattcgagaaagtcaacaagagagagtaaaaaatgcaataggcactggacaaatttgtagcggtgcaagattgaaccaagaacaatcacttcaaagacctggagacactcggtggtgttctcattataagactcttaagagtctaaacaatctatttccttctgttattgaggtgctagattatgtggaaaaagatggtccaaatgataagaaaaggcgtcaagcccgcgggctcatagattatcttcaggattttgattttgtgtttcatctgcaattgatgttgataatattgggaaatgca

SEQ ID NO: 155269 - DNA, 1475 bp, Zea Mays
gcggccgcggacgtgggctagaaacggcctagttagggggggaaagggtttctctttttcttattattttccaaattctatttctatttttgcatccctttttttgaacaattaattaactaggtaatcttaggtgctaaaaaaatatactaagtgaggtgcttctaatcacacaaagtatatgcatatgatgaaaagacctagggataaaataaataaggaagggagggttagattagggttccaaaactcaggtttgaaaattgggatgttacaaacctaccccacttaaaggaatctcgccctcgagattcagacagggctcgagaaaaggtaagggtattccctcctcggagagtcctcactttcccaggtagcttcctcttctccttctctgctccactgaaccttacagagtcttacttctgagttgcgggtctttcggactgctgagtcaagaatctttattggcttctcccggtactggagatctttttgaatctgaattgtctttgcctcgatgtggttctctggtacttgcaggcacttacggagctgggacacatgaaacacattgtgaatatccgacatggattctggtagttcaaggcggtatgctgcgggtcccactctgttaggggccgacgaaacgtggtgctagctttcctttcatttggaaccttttgaccccacgcatcggggagaccttgaggtatacgaagtctccttcctcaaatctaagttctcttcgtctgttgtctgcataacttttctagcgactctgagcttcaagtaacctcttgcggatcagggcaaccttctcttcggcctctttaataaagtcgggtccttccagtgtcctttcccctacattggaccacattaggggggtctggcactttcgtccatacaatgcttcgaacggtgacatcttgatactggcctgatggctgttgttatatgagaattcggcatacggcaaactggactcccaatttctatcgaacgtcaacacacaggctcttagtaaatcttcgaggaccttgttgaccctctccgtttgaccatctgactgagggtgataggcggtgctgaaatctaacttggtgcccatagcttgctgaaggctcttccaaaattttgaggtgaactgcgtccctctatctgacactatctttcgaggaataccatggagcctgactacctctttaagatatatccgaaaaagggtggctcctccaaaagtggttttcactagaatgaagtgggccaccttggtgagacagtctattattacccagatagagtcattccctttttgcgtccggggcagtccggttacaaaatccatgcctatttcctcccacttccatttaggcactgggaggggttgcagtaggcctgcaggtttctggtgttcggcctttgttcgttggcaggtgtcacactgggccacatactgtgctatctctttc

SEQ ID NO: 155270 - DNA, 502 bp, Zea Mays
gaaattgtcaagcagcgccgctgcagtttggtgggtgatggggagagttgtcgctcgcgacgggtttggaattgtgcgtaggtgcggcattgtttatgagcatttgttatgtggatttgtgcactaagatgtgtgtcaaaaacagctggtggactttcgaatcgtacttaggtttttttccaaattcccggtgaaagcaagtaaaatagtgatggtttataccgttggtcgatttatatgtcctgttcttgattcatatccatgtcaaatgtgtttatcctcgcattccattttgagaactgttgtttgaagttattcatgttctactatttacatatgttgagggcgttgttcgagcatgttatatgtgttgattcttattttgaggaagtggaagtatatatttaacacatgttagatggggtggtctcatgttggtgtcatgcatagtgcatccatcattctttgcatggaagtttcatcacgatcatatggtccgacc

SEQ ID NO: 155271 - DNA, 620 bp, Zea Mays
atttattttgctataagtaattaaactgacgacatgcctaaggcactcacatgtgtttgatttgtttctgtttaagttttttatgaggtgttaatttagtaactaaaaccaactaaaatgaattacccttttgtccaactctacttgtccccttaaacaaaatttcgttgaacttagcgaaacaaagaatctacacaaaacatcagttatggtacaacaattgaattgaatgattcaagctgttcctctgtagaatgcaattgtttaaaaagaatggcttttgatgttatgaaatggtcagatatgacataggacttattgtgcagtgttgatattgtggtgactttggtatgccctcttctccttaggttgtagctgtgtgtggtaggtggccactccttgagcggttggcgatgagaggaggccgtggttctcaaggcctgggagaagacagcaggggaggagaaactagggcagggcgacgactgatcaacaatatgttgatcacagcctgttctcattttattgcaattaaggtataaataacctcctattacagattaacctaaaaggcctttagcctctttattctactgctaaaagggccttgctaatagccc

SEQ ID NO: 155272 - DNA, 851 bp, Zea Mays
ctgatctacaaaaattccttagactcagagaatatgactctggaccgcgggttggttataatattttctagggtttcttatgtaaaatgaaacgacgaaggggtatcggccatcgagagccgtccgatcacgaccgatcggacgagattagaacgcgacactgtagacacattgcaacacgccctggccatcagatccgaaatcgacggatgagggacgaccatgccttgattcgatcccaagccttcacccgcgatccaacggtccagttttcgcgtacgcgcgttctaacgccacccgtgcgatctcgaccgtctattttctaatccacgggcgccctggcgtcttcaacctcacgccgcccacgtacagacgtcgtgcccaccccagcactctctctttctcccgttggtcaaccggcgagcccaccgcccggaccagtacacggcaccaccgttctccggcggcgcaccaatcggtccgcacctaaactccgctcaggttaccgctcctccacggaccacacaaaaagccacagaatggagaaaatgaggtgagtccgaggtggctactcacccgaggtcccagcgtcgtgctctgttcggtggcgaagtccctgcctggtgaggaatcggcgacgcacgaacggcgcccacgcactgagggcgacggtgaaccccgcctcactttccttctcccgccgagttgcttgcgcggcagcacccggggtcggctttcttccctggtgctttggagcttctaggcatacgcggcgaccgcaaggagttttcctatgcaaacgcgacagggttatagaggagggcgaggggtaacgtgggttggcttcccgc

SEQ ID NO: 155273 - DNA, 931 bp, Zea Mays
ttgaggtggcggattggctgacttatgtggaggataagatggatgtttttgagattgtgtatggggatcgtgttcgttttggcacacagctgttgaagggagaggctcaaatttgatggagaggcgtgcaggtagctcactcctcttcaccgggagtcctgacctgggatgtttttatcagacagtttgaaaggaggttctacccagtcaccttcctagagaagatgaagatagatttgcagtcttttaagtaggataagaagtcagtcacagaatatgaagtgggctttaacaagatggtacgttttgttcctcatgtggcttacaatgaattggaaaaggcgagccagttccgtcagggcctgaaaccctctatcaggcatgctttgggcgcctttccgctggtggattttgtactacggtggagcaggcattgggcgtggagatgcagcatcagtacaccatgcttggaatcttagaagaccttgggggttgatcatcctcgtggccaggacgcgaggaggggcaacattgggggtttaacccacaagaggggaaagtcacaacaccagcgccaccactcctatcgtggcaaaccctctgaatcaggtactttaggagggagtactcagaggtatccggctgttcctaagcctgggttggggttggtgtgtttccgttgtggtgaagcgcatcgccgtgccgagtgtcagtggagtggcaggtgctctatctgcagccaggatcacaaggatgtggtgtgtaggaggaatcccaatgggaaacttaaatgggagctagtgactttttcctcttcgcagggcactgtcaacatgatgtcaagcgctgagcaacaattttctgtaccaccctctcagtagcagttctatatgcctaggactcctcagttcgtgcctatgccaggtttccc

SEQ ID NO: 155274 - DNA, 1236 bp, Zea Mays
cgtgaggggtgcaaacattacgaggtctttgaccaagcggacgaaaactttgaatgtgaaattttcaaggtcgaagaccctatgctgaagcagtcggcggggcgctcttcgataggatgtggggcccgcacggccgagaggcggtcagggagcgatccgaccgggcaatagatcaggtaaaggctattttttgtgtggttatatgtgtgggtatgtgtggttttgctaaatgagtgtgatgatgctgcagatggcgcatgccgaggacgtcgaggaccttggtggtctggacggcgctttgcccgaggccgcagaggtcgaactggtgccgccatttgatgccggcgagggcccctcggtgactgcagccggcgaagaccccgcaccagcccctgcgctgacgggcgaagacgccttgaaggtggtggccgagccggctgtcgagccggcagccgaagaccccacagccacggccgggccttcgcaggtggctgaataggtgttgaggattttgtaagttttgtttgtgtgatactgaacctcggttgctgcgcaggttctgaggtttgggcctgcgcacgcaaccgctactgacaatgctatttttgtggcggcttcgaccgtggctgccgatgacgattcgtttggctctgtgtctaagtgttttgagtctgatgattctgggagttcgattgcgtggacggaggagtcttcagatgaggacttggattattttgtagcattagatgtggttgcagcggagcattcaccgcgcgcgaaggattctgaggggctcccgggtgcgagtactgggtataggcggcgaagggcggtggcaaaacggagagtgagtggattgtcgcaaagtggtaggcgtcatcgtagtgagatggagagtggtcgtcttcgcgtggatgggactggtaaacgagaattgctgtcctcgccgattggggtgagtgtaggtgaaggagagctgcgaaatctttttgagggtgaggaattgaggatgatgctgttcaactacagggagatgggtatcatcccgaaggttgagccaatgtaatatatgatgccctcgctgtgtgtatgtaaccaaaatttgtatgacaaggctgcgcgccttcattgatccggccacacccgtaggcgacttctgcacggtgtcttttgtgaaagactttgccctttacgtacttattgtgctgttccggctgcacccttaggctactcttg

SEQ ID NO: 155275 - DNA, 518 bp, Zea Mays
tgtttcaccaatcctgcatttcaaaggaagcctaaggttcatttactgttaagtatagggaaaaatgaaattttgagtgggctaaaatagtcatgttctaggcttcctcgtcggatcggtcaagtcctcatcgttccgactttcatctttctcagcctagttttcacatctatctattcgatcccattcattctgaagcagctcgaaccagtatgtcatccttctcctcagcctagttttcacatctatctatttgatcacattcattctgacgcagctcaaaccaatatgccctgatgtctcattctcgacgtcgtccgacaatcgatgccgcccgaccacactccactctcagtgcccccatcttgctcatcatcacgacgtcggtccacccaacaggtctgatctcgcttgtcatgacaatttgactgtctccggcgaatgacgagcttggtaaacccacgagtcatatctctcaaccgaagatgtcacttggccctgcccctttaccagtgccc

SEQ ID NO: 155276 - DNA, 592 bp, Zea Mays
gcaccattactagggactcaaggatactaaattacataattctcatgcgtgttcaaggaagccgacatgttgtcgttgcttgcatgttgttgaaagggagcaacaataaaaaaattgaagttgatgaaccttgtccatcccctcttggttaaggatccacatgctcgacggtgactctaatgcgatggtagcggccatggcattgcattgtactagagggatggggcaactatggttggttggaagtggtgataggagggagagcagccattggcaagtgtgattgaatgtgcaaagtagtggaggaaaataagatggaaccgtgatgcgtccttctctccctctcccataactactaggcatagggcccaaagcatcacacgactcacaaatcaagagttgtatggcatgcatactctttgatgattcagctattggtcaaggaggttgaagcacacagtatcccatgtgcatacaatggacctatttttgtcaattgttttatggaaaaatggtcctacatgcagcccttcttaggcccgcaaagggcataggggcactattatcgtatgagggaaaccattccattgga

SEQ ID NO: 155277 - DNA, 1129 bp, Zea Mays
cgaagggttacggttaactctcgtccactcgatccgctaaggacggcacagattagattggatcacatctaaaccggtatctaacactcaccatccgatctaaaatctacggcgccaggcgttccacaccaacttctaatctggagctcctggacacgatccaacggtcgaaaatgaatcggtaagccacatctaatctcgcccgctcagatcaagatcgacggccatgcgtgcttcttcccccgcggcagtctgcaagcgccggagcgcgctcgacgcggcggccgccatgacagagctgaccaaatcggcgcccctgtgccccaattcgtaagcccctacacgcaacgcagtatggagatcatggcgagtcggtagagggtttccttaccgggaatcatggtgtagagagtcccgtccacggtgacatatggccccgcgacggcagagcagctcctatgagaaattggtagaggtccaccggcgcgccgcggttatcaggtcgccaccactgtcgcgagcgccgagctatactccagtgcccaccagagcaccccgaaccgcaaccagtgcacgaatctctacggcggcggcggagctcggtctccctggtgtcgtgcctcctcggccgaatcgagaggtcgcaagtgtaagaagatggagggaggaggggactggacgcatggcttttatgcactgagaagtgagatgaagcggtcaacatgagcgcgagaacggtggagttagctcaacgtcccggcgagtttggcggcattctgttgcgaggagcgcggtctatgtgttgaagactggtaggggatagagatgacgcatcggtcccacaagcagctatgcgaaggagatgcatagcgcaaacgggactgggcccacgggtcggcgccggaggcttgcatacgtgcggttaacgtatggccaatggggcccacgtgacagtgagtgtgcgcgcgccacacgcgagttgggtcgcacggagatggttggcgcgcagtggaaaaaaagaagatgggccgaattccagttgcatggcccagttaggtttcctcttttctttttattttattctcttttctctcttatttttgagtctcaatttgaacttcaaatttat

SEQ ID NO: 155278 - DNA, 657 bp, Zea Mays
ggggtctcagcgcaagaattcctatgactcagtaaacaccctgaggggacggcgggtttattccagtaaaacataaggtctcttttgaaagaagcgcacgacgaaggggtattctcaaatcagggccgccagatcggccacggatggcccagattagatcgaaatctaatggcaccaggactgcaggatcacagatctacgacccccatttacctaagcctgatgcgatatcacccacacgttcagggatcaacgaacaacaatgattcacgtcgggatcaaatctaaccgaccatctacgaatcaacgacttaggcttcaaacgcacgagatctattcctagccgtccacatggaaatcaacggtcatcgagtcgtcttcaccccattgcctcatgacccgacgcggtggcgcagcccgtggcggcggccatgaccggccagcgcgctatagccctatggtcccccaaacgtttccccgaagtttgcaacacgatcctgctttcctattgattacgagtaggggtatcatacctcaatccgaggcatggaatccgccgaccacggtgcacggcggacaggcggagaagcgtgcgttccggcgacgaattccgaggtcatcggccgccaaaccaccgccacgatgccatcgatgacc

SEQ ID NO: 155279 - DNA, 464 bp, Zea Mays
tctgtatgctatttgtctttgctgtgtgcgtcgttactaacttctccttggtacttggcccccctggtatgtaggctcgacgtgttgaggctggatgccagtatactttaagaaagaattggtgacctgacccccaggaggtagtcttgactgggacctggacctgcacatagccttggctaggaagctttagtagtgcacccataggacccactaactggtatcttttatcctttgattcacgcaataggacctgcaagatttagaccgggaagccaattcgtgtgtccggaccccctggatcacagctccaaatactagggcacctgtcacagagtggtggagcgtgtaggcttagggtacgggaccaggctaggcagctacacagctccggaccaccccaggggacgtgtgtccgttctcgagaatcggaccccaggttgccggacccacaggactatagc

SEQ ID NO: 155280 - DNA, 638 bp, Zea Mays
atttattttatcttccaagatgttcgcaacgagctccttctcgaggagatcataatagccgcttagtcgcctctagacactgctacaacactctacaccaccctcggtgagcagtcttcctaggtcgcccctatgccctctagagctccttgtttagctcctagctctaggggcgatagtcatcaacgtaaggacgtcatggtggaagcgttgctatcggtgcttgccaacaaaagtggcactcctagacgtcgttctataacccgtggaccagtaccccctcctatgcaatctctttcgttcatccaccacactcgtccttcccttcgatcagaatcttctttctgttcatcagttcaccactgataattattattccatggaactcaacatgtttggtttatttatgaaggatctagcgaccaagacccttatcgcccactataacagcttgtgacctctaaccttcttcgtctgcctacatcctctataaatccttccactatgcatgccctaactgtagctgcgtcatccaccacttggcaccatcatcttgaccactctggtcttaatgccctatctaagttgtctcgtagttcgatcatctcttgtggtcgaggctcttttgagcacttgtg

SEQ ID NO: 155281 - DNA, 670 bp, Zea Mays
ccgtgatgtattgggcaagtatgtgctaaaaaaatgtgcttcgtgctgggctaacgggccacatgctttgtggacatctatagataaggttacaactatggatctatgggatagcgttgacagttgagaggttttttattcggcaaattgacacgacggacatggagtgatgtcatttgaatttgattgagaagtagagggtactggatcgggtttatttttattttctatttgtttggtttcatagagaaagcggagtggttgatagagtttttatatgaaatttactataaatagatataatgctcatgttatcggatgcgaggtttttcaaccaaacaaaggatgtagcggctcagctctattctatccttcaaacaaacaaaaaaggagcgactttattatgtttgccatacgtaaaatagaacggatgcattctttaaaacttaaatgaaacgctccattatagttgactctctagccaaacacacccaaaatcaagctaaagacaacccccacaacgtgtagatctcaggtgaagcttagtaatagttcacccaaaagctatttttatgcaagaaattagcaaactataccatgcgagagggagagcttaaatcagacgaagaacatatctcaaccaagaactaccaatagtactataaatacc

SEQ ID NO: 155282 - DNA, 687 bp, Zea Mays
atcacagccgcagtagcaccagcggcgccggtggccggaggaacaggagggcgtgaccatccgcagttccacaccgcacggcactatcgaaaatccacaagtttccccctttttttccccattatcattaccactagttctatcaatcagtaccagcagtagcttcggtttcgctcagcagtccgtccgtttcccaacaggaatgaaacatgagctctagatccctccctgcttcttcttcccggccggagctctacataaaaactggaagcgttcgccggttttccgatgttcacgttggatggggaagtcgtcgtgatcgatacgtcgaacgacaatcatatatttgagctgcagcctgcagctgatctgcgacatttttttctttctttgttggagatggtggcgtatccttgtcaagctaggagaagtagaaaagagacgagcatagcatttttttctcagagcctggctgcaattgcaacgaacgatcgatagcggagcaggtgagaccgtgactctgtctctactctcaacgtgagaggagagtagcaaacgcaggaaggaactggtacgcattgtatgacgcgacgcaatgaagaggcgaattaaattccgggacgccaccctccatgaaccagcacgcttccatctgaatattgcgagcatcgcccaccttaattgccg

SEQ ID NO: 155283 - DNA, 821 bp, Zea Mays
ctccaagtctgtggggaactcaatccaacttgaagcacgaacattcggctgtctccttgactaaggggggagggatttgccatggttttctacaatgaaccactctaaacgccatcctttaatgctatccttaagtgggatgtcaaggtattccgttttccttccacgacgcatctccagactcgcaccacccacgagctggtgctgccccccagccatctcaggccgacaatgatacaagtacttccacaaaccgaagtgaggaagaattccaaggtaggcttcgcacaaatgaacaaagacagaaatttgcagaatagagttgggattcaggtgagttagattcagatggtaaaagtcaaggagaccgcaaaagaagggagaaatgggaagagcaaggccatggataagaaaagggatgtaaacaacggactcgtgggtatcctccatcgggatagtgaccccacgacaaattcgccaagagcaaagctccttcggaggaagaactccgacagagacaagatggagaaggtccgactcggaaacaactgacatatgattacctgcgaaaggcaattggctgttgggatcgatgggaggaataaccgcagcggcagaattctgactcttccgcttgggcgccatcacaatctcgtcggcggactgagcggaagcaaaatcaaaggaaagcagaggaggttcggaggcaaaaagtgaggctagggcttagaatgcagaggtgtgcgacgacatgatacaaagggggttttcccgggtcggacactgtttctaaaaagtgcttagtcatcactcggtcatta

SEQ ID NO: 155284 - DNA, 434 bp, Zea Mays
tatggctccaaatctatctgggtcctatagtcaggggtaccataatcaaagcgaccatggggaggtaaacggtaagggtgctgaatcccgacaggggcgggagaaccaccatccaaatggtgacacgctgtgcgctcaacacgcaattgagcacggcgaccaagttgacaatgttgttcagcttgggattgccctcaccaatgggcgagacaatcacacctccagcactgtcggtcgaacagcgagggtagtacttcaggtcaaggccatcaactaccccgctcaatgagcaacactacgaaagtgtacgtcgtgctgcatcttgcatggctgcctcgacagtatccctctcagtaatagaataatgctctaagaaggcctctacaccctagagatcatcgtccggacggcgcaccaagcaagtagcctcccac

SEQ ID NO: 155285 - DNA, 601 bp, Zea Mays
cgacatggaattgagccgatacttcacaaataggtttatataggtgaatatgagtgaagtgtgtgcttggtttgaatttaggcgaagaaaaaagagatttgggcactcggctcggaaacgatcgctcgaaacggagaatttggtgaaattaaagcctggaatctcggattggcgtgaaatttggcaaatatgttactggaggtggtgtgaaggtgcctgaaaaattgggttcaatcggggcatttttggctggtttgggcatttcatcgaacacatgacgtgcggtgaattaggttttcggggaaatggccatttgaggtatgaaaaccctcccgaaggagctaggaacctgcaaggatgtttaaggcacacataggaacacatatggccacttggtttcactggatttcacagggaattgaaagttgtgcaaaagggtggaaatgggggagtgtacagcctagagaacagagagagagagaagacagaggaagagaggaggctgctcaccgagaggagaggagcactggcgaggtcgccggaggatcgccgccggggaggggagatcgccggtgaggggaggatcgccggagagagggag

SEQ ID NO: 155286 - DNA, 294 bp, Zea Mays
ttaggtgtgcagcctatttggcaataatcgcaacaactaacccaacctctttcaacccttttaagcacgcatccacccaacctaggcggtcatccaccagtcacccgcccaccaatccatgtgtcactttgtgttttgttgtttgtatcattgtatagttaaaacaatatttttttgttacatgtaagatttatgggtgatttattgttgttggacgttgtgtggttgttaatgtcataaaatataatgtgataatgtttttcttgtcggtgatgggaacccattggagacccg

SEQ ID NO: 155287 - DNA, 567 bp, Zea Mays
gtgaccaccggaacaacgtcctctctgtacgacgcctccagggcagccctcgcaggcaagaaaggcaaggcagtcctagcagacaacaccctgccagctgcagttgagactgacaaaatcggtccagcaaacaacgaacaccatcgcaacgaagaccccccacacacacctgaggacaacatccacacatacaccgaagagatcccccttggagacacaccaccacgtttcccacccatgggacccacccagttcaaaaggaccaagacgacttccaagtcggcgaggactagggtatctcgtcagaggatcaacttaaacttcatagcctccgcatcaaggacaaccatctccagaagcagagggaagtcctcatagccaaaaggcagcgaacaatcatgcaagtccaaatcaggcagctaatcatggaagaggaagaaagagcgaaggcgcttgaacaagaaattgccgaaatgcagtacgaagcccccctcatcgttagctttttgacgtgacctacaatcgaaataactttcaataccaaaggccaacacaggcgcatgtcgc

SEQ ID NO: 155288 - DNA, 458 bp, Zea Mays
ttctagagaacggacacccgtcccctagggtggtctggagctgtgtggtcgcttagcctggtcccataccctaagcctacgcgctccaccactctgcgacgcgtgtcctagtatttggagctgtgatccaggggggtccggacacacggattggcttcccagtctaaatcttgcaggtcctgttgcgtgaatcaaaggataaaagataccagttagtgggggtcctatgggcgcactactaacgcttcctaccaaggctgtgtgcaggtccgggtcccagtcgagactacctcctaggggccaggtcacggatttttcttaagtatattggcatccagcctcgacatgtcgagcccacataccaggggggccaggtactaggaagaagttggtaacaaacgcacacagcaaaaagcaaatagcatacagataagttctatcactgttaggttaatact

SEQ ID NO: 155289 - DNA, 449 bp, Zea Mays
aagtccatgcaaatatcctcccatttctaagatggtatggggagaggttgtaaggtacctgctaccttcaaatgactagctttgattctttggcaagtgtcgcactcagatacatacttagcaatttctctcttcatcctggtccaccaatataaggatctgaggtcgtgatacatcttgttacttccggggtgcatggaaaattttgagagatgagcttcgtccaagattttcttcctgagttctagatttttgggaacgaccaatcgatcttcaaaccataggatacccctgctgtcctaacaaaaacatttgtacttatccaccttttggttgagcatttccttaatgacttgaacacccttgtcaccaatctgtgccatgattacctgctcttgtaaagttggctcagctgagatataatccaaggtacttggggaaaccacttc

SEQ ID NO: 155290 - DNA, 279 bp, Zea Mays
aattcagcctattctatccatcaagggtctactaagatgtacctagacctcaagaccagatactggtggagagggatgaaaaaggagatagctcagcatgtagctcggtgtgatacttgtcaatggactaaggcagaacatcaaaggccgcagggttactgcaaccccttctagtgcccaaatggaagtgggaagagatcggcatggatttcgtgatcggactgccccggacccaaaaggggaacgattctatctgggtcataattgaccatcttacca

SEQ ID NO: 155291 - DNA, 1754 bp, Zea Mays
cacaaccgcgtactgtaagctatagtggcgaaattccctcgcgcacccagggcgacaccaacgagtccgtgaccgacactagcaccggctcgattggatcccccagtctagtctttcattcatggcaggtggcagcatacaagtggtgggtgcctgggtggtcactggccagggaggcaacgttacgcacacgtacgtggttgccggcatctatcgcagttcgcagtgcctctagtccggagccggcatgattgatctgcccgtgtaggaggagtacacatattggggacgagatccatcgttttcgggcgcgggcacattacagcgggtgtatccggagagatatttgcctgtcctggccgacgtacgcactgtccgcgcaccactgcagcctgcaggccaccgcttattcataggcagaaaccagctcaacaatctccgagtacccacagctccacctcatgagtcatgactcgtgtccagacgccaaacagtacatacaagtgaggtcggtgcggcagttagttggcggtcgcgtcgagacgtatccgcctacctgtccggataatggcgggtgcctggcctgctggcgacggaatggaatggaatcatcccccaggcggtgagagtgagacccttccaaacgtgcacgcgcattcgatccggcggtaagcggtgcagctcagctgtatgtgtgtccgtgagtgatgccgatgggaccgacgagaaaaaccatctgcgttcgggtgaagctctctggctagctggtgagatgtgtgtacggggaggacaatgcaagtccacttcggttgattgggcccggccgggcaggtggtgggcatgcacatggagctaccattatcttactgctaatggtagcactaatcgatcccaatcattcgttgctaatgctacgcgtactcatacgtggtggtggcctggtggtggggcaactagcgcgaggcagatgcgtagtgcctgcgcatgcctcactagctagtagtagtagtagctactgaataaagccgcaatgtgagctgatgatagacaggataaaaaagcagacagggcactacaatacggcttagcgcggcgctaatcatgagcgccgccgctaaccggagtacaattaagggcactttgtttgccatgctactttgtgggattgttaataaaagggcaaagcgcatgataataatgcagggagccagggacacgcacacgaggctagctgctgcctaggccaacaaacgttggtgggttttgttatgtaatgctgagatattatatttagctctcacaccgtgttgcgcgtacgcctaggccaacaaatatgcatcctttttcaaagaatcaaagatgcagcatgccagcatgcatgcatgggttagaacgcggaagcttctgcaggctgtgttttgtcagaaaataaaggcgtacggaaacaactagtacatatatttacatacatatggaacataagacaaagtcttattttcggcatataatattatgtgcacgatactgaagtgaatccgtgaatactagttaattacacgtgcatatatcatatagaaccgtttcttgtgtaacacaaactaatatagattaatagtggttaatcggtagccaccaatttgcacactatctagtcaaagacaaatttcaaagctgtactggcaaataaatcgcagttcaaagtggacaaaggaatcaaaactatagtcgtaatccgatccagaactaaggccatg

SEQ ID NO: 155292 - DNA, 322 bp, Zea Mays
gaatcccttgccagaagctggagtttgttgcttgccttggacattgcttcgagcgggtgtgttggggatcctcttcggacaatcattggcgtagtgcccaacctcaccacacttgaagcacatggtgaatgtaccctgtcctgcaggtctcgccagggtgccagtgggggcaacctgatgagtatgcggagtctgtggagtcgcctgtggtgtatactaagctggtcgttgccctcctccaggacgagctagtgtaccctggggtggaacatagcgaggacggatgctactgctcccctgcccctgtgtgatagccttcctc

SEQ ID NO: 155293 - DNA, 567 bp, Zea Mays
ggatttagctttttccatcacctcttgccccgctgtcatgccagcattgggagattcttgctcagccttatcctcagttgaggtaggcttcgtctcagtaggcactgaaaacccagcttcggattcagcctgggccatagtagcttcggcaattttcttcacggggcaggagctaatgcctttgtaatttccatgaccgcgtctagcacgctggccattctcctcctcttaggagttgtggcgggagcctttgtcaccttcgacagttctgcctctaccggtgggctctttggcaacactattgttttttccaactctattgccacatcatctttggcttcagctgacccgactgtaggcaccttcggcactacaatcgatccttcagcgctccaaacggtgggagcagtttgttccgcttcggcagtggaggaggtctcttcaccaaatttaggcactacggccgtctcaatatatcgtggccggtgggtcaaaacctttattttcttgcccttcggcacagcagtggtggccgaagcagcaatttttatctttcttccttgcctc

SEQ ID NO: 155294 - DNA, 907 bp, Zea Mays
tgcactttaaaggctttttacctgcagaaagctcaaccaatttccatgtagaattcttctgaaggctctcaaattcatcattcatagcaacaaaccacttggatgaattatcacaggagatagcttccgaataagaagaaggttcaaatgcaacattagtttcttgagcagcaatgagagcataatgagccatactatcagtgtcacgatatcgatgtggcaaaacaatattccttctaggtctatcttgagcaatagagtgattgttgctaacaagaggtacataaactgaaactaactgtgtaataggagtaacagaatcaatattaatagatacgtctacctcaagattctcatcagtagttttagacatagatgtggatgaggaaccactatcagaaacacctccagaggaagaaaatgtactttcatcaaaagtaatgtcggtgttttggaccgggggccctcaaccgacgagtgaattagtgctgcgtgcccctgtccggatgggttgatgcaagaagaaacacaagatttatcctggttcgggtaagagaaggccctacttccagcagaggggggatgagacttatattatcttgcacttaagtgcttgtagtagggggtacaagctgagagagggagcgggtcccaggtctcttaagagtggtggagtgttgtgctatatgggagcgctgtgactgcgtatgcatgaaagcatgaaagtgttccagcatgccttgggaaggccttgggctcctccttttataggcgcaaggagaaggcccagttgtacaaggggtgttgctaaacactgtcgtggacggcggaggcgtgtccgagccctgtagcagcatggccggcggtgcagcccttgagtccgagccctgtagcagcatggccggtg

SEQ ID NO: 155295 - DNA, 716 bp, Zea Mays
cccgcggatatgtgggtaatctttaccattgccatccctactagagcggcgtcaaggcgatcaatgacacagcgtcaaggcaatcggtggcggtagctcgacaacacatgagttgaggtggcgtgtggggaggtggagcggttgttgcagcatgcgctgggggtagggttggccatgatagagcggagtgatagtgccacgagatttcgattgcacagggtgacaacgtcggggtgggcaagggacacatggcttgaagagacgggaaggcgacaggaggacgaacgatgaatggatgaaacagaagaaaactaatgtcctgagtcatgtttttcaaactctaaaataccacagttttaagatagaccatggtatttcaaatttaatattgatattaccaaccaaataactgttagtttccaataccgcagtaccatcgaacaccatagtattgcttcgaaactgtataaaaaatactaagcttccaaatagagccttagagcttgaggttatttggaactttaaaacaaggatttccattcaaattattttgatatatttggattgttcagtcaagatccaacagctagagctgtcagtgataaaatcaagccaattttctagcagcattactaaagcagcagcatgtgtccaaaactgtattcggtggtgtgttccagcagtttatcacagggttggcatacccccactgcttg

SEQ ID NO: 155296 - DNA, 1169 bp, Zea Mays
tcaactggctgtccaccaactctctgggatggcctatgctggtgggacacctttagtgctgctatggggaatgccacatgtgtagaatttgaagcatcatgtgctcatagggatgtctagctcaaggacgacgagttgtcagcaagtacattcacaagttcacaaagcttgcccactatgcaccagatgacgtgagtacagaggtcaagaagatggatcatttcctcaaaggattaaggccggagctcgagactattcttgctagccaagacttccacaacttctctcatctcacgaactaagccatccaagtagaaagggacagggaagaagaaagaggtcatcttaagaggaaatttcaacttctctgatcacaatagcaggaaaggcattagaggactcgatcctttgggtttcctcccaaagggcagaactttaataacctagcagggtttacttcgccgcattttagccagccaagttagagctccttccacactcagtttgtagcaagcaaccagccttcggccaatgcccaagcttgttggcactatggtgaccacagtcacttcaataaaaactacccgtaactaaagccagcagcatctgccttctccaactctgtcaactgccccaagaatgctccaacactagcctccaagacacccaccaccaatagccaagtatgcaaacaacaattccacaacagggcccgagtaaaccacatcgacgcacagaaagctcatcaggcacctagagtagtgctcggtgagttcttggtagaatttaccgctgctgcagtactttttttattctggagcatctcattctttcatagccacgcatttcatggaaaagcatagattccaactgcaccgttagatgtcatcttgatcacctgaactccagggccagaccttctatgccacctcaaatgttcctaagtcagaatccttttaagtggtgtagtgtttctagcagacctagcagtgataccttcacagggaatcgatgtaatcctagatatggattggttgtcccaacataatggtgtcataggatgtgtagacaagattgtccttctcaccgatcatcaagggaaatcagtttcttgcctatcccgaccaacagctcaagacccgatgatgtcgagtctcacaacaaaaagc

SEQ ID NO: 155297 - DNA, 1323 bp, Zea Mays
ggattccaatgtgccagagatagagccctttccgggacagaagcaccctgcgacctcagctgaccaaccatttcatcaaccaacgcctgacattaaaaacaaatgagtatcagaacaatatcacacctggggtactaccagatcagtaaaaaccaagttacctggaggttggaaaagaacgaaggaactcccaagtcgtgggaagttaattgatggctcgatgaaggatcaccgaccggaacaacccgcaatgcatcagtggggaccaaatcagtatcatcagcagaggtcaaaactctatcatcattggcgctggcctctaaggcgacttcctgacccggagcttaggctgctgccatgcaactagaatgcggaggagaagaccctacatgaacgtccatggaagtgtgagagggagaaccgactcgaacaacctcgggggctgggtcatagctcgtgctacccatccgagccgggtcatccccggcaacaccctcgggggctgggtaagcgctagcgccatccttgagggccgagctctctgtaacagccacctctaaggctgaaggaccttcacctatttccatgggagcagaacaatctagaccagcctcctggccctcaagatcgcgctccaaggtcgatgaggcgtgggacgccgaccaggataactccagcccagcatcaggcacatcagtgcaaacatccatcatgccagaccatgtcttcaagagtttgatcaaagctcaccagagataattcttgcagaccaatgagggcagataaagctggagaaggaacaccactgctttccccgctggctaggtaacgccggctgttcttccgaattagaaggatttcatcctcctcttcctcaccttcatcaacaacatggacagtacacccattggggtcagctttggccaaatcacacctatcgagttcaatgtcatccaggtcacacccattgggttccacagcagtcgggtcacacccattggggtcagctttggccagatcacacttatcgggttcaatgttatccaggtcacacccattgggtcacagcagtcgggtcacacccattggggtcagcttcagcaaattcaggcactggcacttcctcagcagcaggaacagaaggaccgacatcctgatccaagctagacactcgacgaagacgtctcttcttctttttcttcccctctgcaggagaagagggctgattggctcggcgagaacgctttgggcgaacactttcagacctctgagcatccaaatctttgctggcctcagggatgggcgccaccacctgtgtttcag

SEQ ID NO: 155298 - DNA, 375 bp, Zea Mays
cctccagtttcctctctttttcctctgcctcgagctcgtgcttggccagcaactcgcctcgtcgggtgagcatttcttccctaaaggcgagatccgtctctcgcctggcgaggtccatctcccgcctgtccaaggactgctccttcgccttaaggttttccttggcgagggcggcgtcgctggccttgccctcgagctcttgctgccatttctgcagcctttccacagccttgacctgctgggcccgctgggcttccagagtctggtccagagcgctcagcttggcctggtactccgtcgtgagggcctccctctgggtcacggcttcctccctcctggccactttcttttccctccagtgcgcctccagctccc

SEQ ID NO: 155299 - DNA, 706 bp, Zea Mays
gaatgctagctagctgtagttttcggtcagacgatatgctccagagccgaccgccctgcaggatgggctgggatgttgagtactcgacaaaagaagggcaattaactgaagacggcgatagtcaaatgctcgtttttttttgtttttttttcccttcccccgtttacgcgagcgaaggtcagaccacaagaaaagtgttaatacaaatttagtagtaatcgggagaccctagctatatattgtttcgccactatttgactcgtgatcactctgtacatgctaataatactgcatatatgtactgacgacgtactgtataagcacgtacgtacgacttaatttagtagtaataatactgcataagtacgtgcgtacatgcatattcgtctaggacacggccacagcagcccacaggcggcggctaaataataaggtaggggtcggcaaaggattttatttacgcttgatttgcactactcgtcgtcgtcggccgtactagcctactactagtactagaaggaacgcgcgcaatgtattcgtacgtagtacgttacgtacctatacccgtctgtacgtaccaaaaaaaacggcgacaacaaaatgagtgtgcgacgtcgtcgtcgtcgtcgacgacgattcagtcgggacttgatcggaaatgcggtttgatgaagaaagaaagctggctgacgccgctgctcgatcg

SEQ ID NO: 155300 - DNA, 329 bp, Zea Mays
cccagtcgttgatgcattgaaacaggacacgagcgtctcgcgttgcttgtatgtgccttcctggatttgttctcgtctaggttgtaagtgctctccgcactctaatccatccgtctaggcagatcttatcccttctatttgcacataattattcccttcttgattcatgttttgcttcgctcgctcttttgccactctatttgattgtgttgttatagcctatagattagtcttacgtcacagcgtgaaatgggattggccgagaagcaatctgatatgatggaaatagcactgtactcatggttaatctacttaaaacaattggttga

SEQ ID NO: 155301 - DNA, 660 bp, Zea Mays
caagtttgagttcaaatgatttgtttacacgaagctaatatacaatatgcttacttaacttcattttggctttattaacaattaattagggacggaaagtgaataaaattgaagccatcacagcaactgatatgaaaacaaatattatgcattcaaaataatcaccaccatggcaaaaggagtaaaccaatgaacccatctcataggatcatacaccattcaggaaaactcagcaggcttttcaaccacacttagcttcatattttggcacgtaccaaaaaggatccttttggagccaaataagccaagtatatctcaattttaccaccttccagcttataactggtcttacaaattataaccggtcattgaagatttcataatgtgatacccaatttccaaaaggaagagaaattgaagattattctttttttccttgttttctcttccgggtcctgtgctacaggggtttggaacttttaggaagcattcactagtaaaacagtagaattcttgttggactggtgccctgggatcgggaacggacgtgagagcgagtttgggccgtggatctcgatccggcggtggggagcccattagttctccccccttaaccctagccgccccctcccctattcccctttggttgcagccgccccc

SEQ ID NO: 155302 - DNA, 659 bp, Zea Mays
aaatgagtcaaattgagagagtaaaaatcaagaaggtcgtagaaaaagggagagacaggtaaacctaggccccgaataaagaaaggaacgaagactacagagttatgagtatccttcgtgggtacgatgatcccttgccaaacccgccaagagcacaattctttcgatggaagaacatcaatctcaactaaatgaagcaagtcggattcggaggcaacagacgcgtaattaccatagaaagaaagctgactgttgggattgattaggggaatgatgggcacaacgctccccggtttcttcttcctgggcgccatgggacttcactaaggcatagaatcaagcatggacttgcagagggatgagaatttcagagggtggtttgcggtagaaaaagcagagttagggtttgcctgctaggaaactgccagcaggtatgggtatatgtgcgcactgcaaacccactacaaacgtcagcactgagtcgaaggggaaaagcattaagtcaggcacactaagttggatgagttaagtcagatgggttctcagccggacagactaagtcggacaaacgaccgttatgtgcaattagtcggggtatatcagtcggaatgtaagtcgaatagaacaagaggctcaacactagcaagcaagatctcaaa

SEQ ID NO: 155303 - DNA, 561 bp, Zea Mays
aaatgacaccctcttgtgtttgccaaacacgcaatgctcacaaaactgtagcttattgatgttgtgttcatcaagacgacatcttttgcataattcatgcaatgtttgcttactcttatgtctaaaacgtatatgccaaatattagtatcatcagaattagatgatggataaattatagttgcatcacctataattatagttccacagagacaatataaaattgaagattttaatccaccttttataacaataaggtaaaatttcgacacctttaaagctctctccatcgaagtacttgtaccctttatcatcaagagaactcaaaggaataagatttttactcgtgtctagaatatgcctcgcattattcaaaattaataatgtcatcatgcatcttaagttgaacaaaactaattccaacaatatttacatggattgtcatcacctaatctaacaaaaccttctccttgtagagaatcataagtgacaaaccaatgcatattaatacacatatgaaatgaagcagtgcaatcaagaattcatttaacaccattattcgc

SEQ ID NO: 155304 - DNA, 547 bp, Zea Mays
caccactgtccaagccgagcgacgacgctaggagctcccccgacggcagaaccccaccggagccgcgtccaggtgtgtggaccagcactactccgccctaaaccctatcgcaaaagagtgcggatgctttgaacaatgagatgggggaaggtttaccggctgcggcacgacacagagccctgcccacgcgcgatggcgatttggtggcggagtaattactccggtgagcaattcttcacgcccagacgactcccgattctcgccgagggcacgaacgactctaccgcacccaggcgtttctggttgatggtgtgagagggtaatatggtggcgcggagggaagtttgccggagaagggtttccgcagcgacggcgcacggcagcggccacggttgggtacgagccgggctgatgagggttggcaacaaactcatcatctgggtccgcccatatagccgcggcgggtgagtggttacgtggtccgatggctccggcggagatcacggccgaggccggtacgccgttgacgcgagccgcggtccttgaa

SEQ ID NO: 155305 - DNA, 535 bp, Zea Mays
cgatattctaggaatgctctaggtcctcaccggatggcgttgttagcctgtacgcgctgggggacgcctttgtcttaacgatgaaaggaccctcccatttggctccagcttgccccgtgactctgtccgggttgttcggacgagtacgaggtccccttcgtcaaattctcttgggacgactgcgtggtcgcgccaggccttcgtttgagcttggtatttgttgagggcctgcatggcgaagacacggtctcctcgatgaggtctttggaggttggttcgtctacgtcggggacggctgaagcgcttgtccgtggtgacccatgcttgatttcctgcggggtcatggcctccgatccgtatagcaggcgaaagggagtgaatccagtcgctcggcattcggtcgtgttcagcgcccagactgcttcaggtagcaggtcggcccatttaccctttttgtcgtcgagaagcatttccttgatggcagtgaaaatcttgtcgttggcgcgctccacgacgccgttagattgtgggtgat

SEQ ID NO: 155306 - DNA, 857 bp, Zea Mays
tgactgacgtgtggagccatgcggtcagaccccccctccttcaacagaatcacccgcatcctcgggtcggccggcgcacgacgcgggatcttcggccatgaccgcccggatcatatggcctcgtcgcgcatataaaaatcgttcgtgtcacgttcctatgaccgattcaatcgcgtagatgaccggagctcaatccgagagggtgaggagagtggcgaccttacctcgatttgacccgtgccgccgtgatccttgtcctcatcgtcactcgaggccttagaaggggtcaggggccatcgccaaggtgccccgagcaagcgggttggtgctgtcggcatcgggaagggagtactaccggggaattgcttgtcggagttcaaaggccgcgccgagccgcagttcgccgtggaccaggctcatgtgcgtgccatcctcggtgagatgtggcttcctcgtttcggtcggttcagtgttacatgtcgcaacaagtagcttgggggttagtccggtagagcggatgatcgcggttgttcacaaatggcaccgccgtgcggatgattgggggaaagccgccgcgctggtgtttgcgttggggaagataaggtatgggctactggatcctgaatcaacggacacaatttgtatcggatactgattcgatcaagtgtgtcgagggtcgtccgattcggatcgatcgatcgagggtagattttgggtattcaaatctggggcgtcggaatcagatcggatggatagcgtggcgtaccgctttgtggcatgagcgatctaatccgaggcatccggtgttgatcggacggctaacctcgaccagtaccccttcgaccgtgcgcttttgc

SEQ ID NO: 155307 - DNA, 796 bp, Zea Mays
taagtgcgaaaaatcgaagtcttctccaaaaagactctccgtgcaaaagtcacctaagggtgcagccggaataataggtgcacaaaatcgaagtcttttccaaaagactctccgtgcaaaagtcgcctaaaggtgcagccggaataataggcgcgcaaaatcgaagccttttccaaaagactctccgtgcagaagtcgcccacgggcgcggccggatcaacgaaggcgcgcaaccttatcatacaaatagcggttacatacacacaacgagggcatcatatattacattggctcaaccttcgggatgatacccatctccctgtagttgaacagcattatcctcagttcctcaccctcaaacagattttgcagctccccctcacctacactcaccccaatcggcgaggataacaattctcgcttaccagtcccgtctacgcgaagacgacctctctccgcctcgctacgataacgcctaccaattcgcgacaattcactcactctccgcttcgccaccgcccttcgctgcctatacccattacttgcgcccgggagttcctcggaaccctccgtgcgcggcgaaggctccgctgcagccacatccaacgccgcaaaataatccaagtcctcatctgaagactcctccgtccacgcaatcgaactcctagaatcatcagactgaaaacactaagacacagagccaaacgaatcgtcatcagcagccacggtcgaagccgccacaaaaatatcattgtcaatagcggttgcgtgcgcatgcccagacccaagaacctgc

SEQ ID NO: 155308 - DNA, 466 bp, Zea Mays
gcagattgagcatcaggcacagttggcacgacctcggcaccacgatcatagttttcatctccagggcgagaggcaactaacaaacggcgtaccactacctccatgacttgcttttgtatcttcatagctgatttaacataattatcccactctcgctgacacttaattgggatgataagtctttgcacgttgggtggaggacctacgtttagcaccccatcaacgtcaatgtcatcaacatcatgccaaccaatcttctccttagccgtagcaacaacctcactaaaggaaggtctatcattgaatatcacagccacatgttgcatgtcaacgaactcagcatttccataacgatcttgttcaacgatgcctccatggtatatgcccaaaaaattgttcatctatttgaaatacgaattcaacgttgaagaaccaattgtgatggttagtggataaccccttccac

SEQ ID NO: 155309 - DNA, 424 bp, Zea Mays
tagagacttatcaccggactattcactgtgactcttgcagcgcattggacagaggtgtcctcgtcggagttcgccgtcgatcgtagccacgccatgtgcttagaagaactaccacgtcgaagtagatatccgtatgaggtctattcatcgtcggaggcattaccccggggaacgccacgatagttcacgccggtgactcacctctcccctcgaccgccggtctccccctttcaaaattcggcaccaccgcttagcgcccttataaattgacagcacggtctgctccgctatgttatcaccaagccagagcatccatccctgccctcgattagctactacagccgttgaatttgggtttccccccaaattggtcgactgcaccgccgtgaatcaccccatcgcagctagctgctcccaggtccgc

SEQ ID NO: 155310 - DNA, 803 bp, Zea Mays
taaatctaaaccgctcgatctcggatggacgcccgagatctaacgactgggggtggacacaggcgcggtggcgccgctcggtcccacggtgagggctcgccggagacaagggggctggccatggcggggctctagagggttggggactacctcgggcgcgttcagggtggtttggcagactcggtcatgggcatcacaccggcgtgggagcaccagagggcgctgcacactgtgaggcgggctaacggcggcgtggggcaactccggcgaacaatcacatgctaactagggtagtaacgaccaaaattaagggcgcgggcaggttgctcacctcgtggggaagcggtggagtcgtggggcaacgacagtggcgtagggacacgacggggcgacgctggcggagctccggctgcacaggaggaactctggtgagctcggaccgggcggtctagagggattaggggcgaaccgaggggtgttccaggtggtaggtgatagggcggagcttaccggggcaacagacgcggcggggagttccacggcgatcgtagaacgggcgacgggcttcggtgggcggtggcggggctctggtcgtgtgcgtagagtgagagagagagagcgagggggttcggctgagggcgcaagtgagcgaggggaggtgggcaagcagggcgcggggctcaaaaggggcgcagacgcggggacatgggcacgtccacagcaggggatcgtgggcgagaggttagggacgactgacaggtcgggtcggcgggacagatagtgtcacacccggttttgaaggt

SEQ ID NO: 155311 - DNA, 623 bp, Zea Mays
attcggacaaatcctatcgaactgaacttttcccccaactgaattaactcttaaaggtggaatcattggttctatggggatgttatgtgcttctacccaagatgtagaaacaaaagaatgtgtggcaccagtgtcaaatataatttttgttggatggtattcgactggaaacatatctacggccacgtcctgagcatcctggattgcttcggtctctaggtggttcacctttccatggttgtaagcctgaccacatcctcctggtgcttgctatggtgctccttgtcttactggggtattgactgctggcaactactgagttgctttcttcggacaatgcttcgcccagtgattttgttccccataatagaagcatgcgcggcctccgacttgcgctggagttgcttggttgttctggttggttgctggggcaggaaggcgagctgcctggttgttctaacgctagtactgatttcctccctggtggtagctctgacggtgctcctcctcctactattgctgctgccgaggaaactgcctctggtactggtgctggtgctggtgctgacgctgatgctggtgaccttgagggtgaccttgcttgaagtgctggggtgggatgc

SEQ ID NO: 155312 - DNA, 385 bp, Zea Mays
gaggctccgtccaatccctttcaaaaaacgaacagtgccaacagtggatttactcttctttttcttatcatacggggacactaattttggtatagaaactttagatttctttgatggtcgtggagatggctgtggagaaggtggatccctgaagggcgatgtatgtggcggagacggtgggccaccatgaggatgaggagaaggagggtcagaaagaggatgaggagcagcatgtgaagtttgaggaggtgatgatggatgtacaataggaacagcaatttgagaaggcggagacggttgggcctgcgatgaattcgaccaatcaaccaattcgacatcccttcgaggccaaaggataaaattcttgatagcttgtccaagtgtc

SEQ ID NO: 155313 - DNA, 694 bp, Zea Mays
actcttcgagcgtcggcctctgtgtgcggagaaggcgaaccgccgagtgaggagcacaccaccgcccgtggtaaatgcgcctcttcgtctccgccgcgtgaggagcacgccactgcccgcagtagatacgcctcttcgtttctgtcgaaggcagcggaccagtccgctgcgtgaaaagcacgccaccgcccatggtaaatgcgcctcttcgtctccgccgagggtagcggaccagtccgccacgtgaagagcatgctaccgcctgcggtagtgcgcctcttcatctccaccgaaagcagcgaaccagtctctggcacaaggtcccaggcccacgagtcatcctccatgggtgtcggttcctgggtgcaaagaagtcgaaccgccgctcgcgccggtatcgcgcctcctcgaagccccccgcagaagactgagaaatttttgaaaccaatgaagcggtatcaaggcaccccgcgcgtggcctagcaaatcaagtgcggaggtcacaggtcaatcggccacggggacaggtgtgactgttggcgtaatcgagggcggactggcagtaattacgacagcgagtgcgtagaagcagtgagccaatcgccaatcaaactttggccccacctgcacgctcgttccctcccctgaggcgggcccgagggccactgtcggtaccctgaatcaggggtacccc

SEQ ID NO: 155314 - DNA, 1139 bp, Zea Mays
taccctttttggcccagtttcgcattacccctccgcgcagcccaggcgggagcatggcctgcgctgctggctccactgacaacgtgggcctactggccaggaagacttcgcgcgtgcgcaccagtcgcagacaagtggacccgtgttgccagggtcatcttctcctgattgtcgcgggcgtgaaacgggtctccaaagccgccgccgctttacccgccgacgaatcgcgcgcgcagttgtaacagccgtcgcgttgatcggaggatcaggtcaagatttgccccctcaacctgggtacaaagaccccgggcgtgtcacgagaactgttgaccacctcgagcacgatctctggcgcgcggaacccgcgcgtcgtcgcctacctccgccgagttcggagctaagccgccgcaaccgcgcatgccacaatctgcgctggcccatgacctgaccgaactctgcgcgtcgtgatcctcaccttctatatctgcggaccgaccccctcctttcttctccctttccccattgccaccgtgcgccattgcgaaagaaagtagccgccgtactcgttcccagaccaccgcgccacccgtggccgaattggtgtgcagggagtttcgcctgacaccactggagccgctcatcgcatcgctggacgagaagggcccctggacctccgtaattgctcgacggaggccgctacagctgccaaaccccgtcgtcggctctctacaccgatcaaccaccggtaagattgcccccattgagttcgccgtaatctccactaccgattgctcatcaccgcgttcggaatagctcgccaaatcgcggatccgtagttcgccgccatgctcacatccgtaggattagctgggcggcgccgccgcgcacggtcagtgcgttgggaacgatgaagtgctggccgttgatcccgggttggtcggtcaggattagatgagtgtggggatcgctggtagccgtcgaatgccaatccagcgcatagtattacataccatttcgggtgtggtcttgatctaatcaggaccctcggttgacgatcgggcggctcgggttcgaaggataccccttcggtgggtcggtttagcgattaggcccctctgtttttagggaaatcacccgcg

SEQ ID NO: 155315 - DNA, 438 bp, Zea Mays
ctgtccagcgaagagagatcatgggaaggaatttggagatgatccaaatcaatagtatgagctcgatcagacgaacaacccagcaacttgtggaaaaaatcacttatagtttcctccttgtcctcatgccttgactttattaaaccatcgtcggataacagattaccaataaaattcttgcccttgcggtatttagcgtggaggtggaagaaggcagtgttagcatccccctcagctaaccaggtaatcctagaacagcttcgagccatagaacgttgcaaggttgaaagggccacaacatgaccatcaagctgcttcaacagccaattttctagcactgacaagggtctgatatcttgagcagactgcagcttgtgcataatttctcgtgccatcccaagctgagaggagatatggcccacccttttttgagaccag

SEQ ID NO: 155316 - DNA, 858 bp, Zea Mays
taaatgacaactttgtctttctctggcttcggcgttgtctcctccctagggtggcgcacgttcaccttgttgctaaaataaccaagcctcctcatagattgcaaatcctttcccttaaagttgagtgaccaatttcaatgtagcttggcttcgaaggtctgtccttcagcaattccaaggtaggtcttgatgttgatgaagccctcatggcttcagagataggcagggtgtcttgtcgtgcctctaaagaggtaggtgtgatcaactttgtgtggtccgaatcctaggcatctaagcaaactagaaagttatttagaatgacttagccaaagctggtttctgaagcagtggtggagaggcatagaaagttttggcagtaggtagttgagggcagtaaatggatctgcactcacccgctcggccgcttttattttgagaaattggtgtgaagtggtgtgagtcactgaaaatgttcccgtgcattgcctccagcttctcctgctgatttaactctcagatcacttgctttattaaatcaatctatctctttcataacatgctttgggaaggtgtttttcggatcttcggcacaaggcctccaaattctatttttgcgatctaagctcgttatgaaggaacatactcatcacgcaagggggatactgttgggggcctactatgtcgaagatacccattcaaccttttgattcggcacaaacaagtgtatttcaggtacatttctactggcggacaaagccgatcttcgccgaggcaacataaaaagaagcttcgcctgtgcatgctagtggcaaaggtgctagctgaagtcgataactttggcaacaaagaagaactttg

SEQ ID NO: 155317 - DNA, 764 bp, Zea Mays
gtacattttattgaaataggaaccgtaagttaaattcgacctcaaattataaattagaatataaaatgagaaaagaaatttgtaataaaatcatctattaattgctagagttaaataagaaaagaagaatgaacttgtaatcagtatagtttatgttcctagtaggatggtattagacatttggaaatcaaaaaaaagaaaccaaacctatgcgtgggccaaatctcccctgccctcaacccatccggattcttcctcccactgcggcccataaactactcgcggcccatcttcccctttccacgccgcagcccacttcaaccgccacgcgtgcttggctgttccactgacgtgtgggccagcttgggacgttccgcgccatcactggcatgtggcccccaccgctagccattcgcgtttgcaccactgccgctgaacgatggacccgctcggtcagaccagtcttctacacgagctcgcttctggatcacaacaaactccgcctctaccggccataatcacaaccctccgcgggtctcgcgatagttgttcccttctgggggagggacgccttcgtgctgggagtataaaactcgtgctttcccttcgtctttccccaacccgcgctactattcctatgtcgccattaccacacatctgagagaaatgcgccgccgtgcgtggacttcgattgtcgtcgaccggatccctaggggttgtgaccttgggcttcttcagacttgtggacgggtaaccgggcgccg

SEQ ID NO: 155318 - DNA, 633 bp, Zea Mays
aaggccgtggtccaagacagggaaggtaactagcagcagcagcccctcacttatccgcgtctcctatccactgcttcaaagtcgaaagcttgctcctttttctgtggtctcgatgtgttcttgtatccagttacttgatcatgcatcgatgtgcgcgtcagcatgcatgtaattgggttgatcgcgccttcctcccatctctcttcggtgttccatgcgtgtgaaattgatgtgccatccatatcgccgagtccgatcctgatggctttgggttctaagacagcactttgatgtttccatctggtttgattaaactaaaaaaccaaaactttctttttgatccggttaagcacagggtttggttatacgtacttgctttattactttactactaatctttgtgcttcttgagattggggttaaaagccggggatggcatgatggattcttggcaactccacagctcatttgaactgatcagaccccctgtttcccaactcggattttaatctatgtagcgaactaaccggccatgaaaactgttgcttaaccaatttattttcaggcatcccgctggactggcagcggctcatcttcgcagggatgcagctggaggatgaccgcaccctggcc

SEQ ID NO: 155319 - DNA, 591 bp, Zea Mays
gcccaaggccctcaagcgggaaattgtgaacctacaaagttagctgtctaaccctccatagtacacatccagacatcatgtcatcgacaataacatcgaacggatcccgcatcaaagcacgttccagggtttcaacgtcactgatgacaaatgtcctctatcaacaaggttgcatgccactccctagccttgtaactatagggcacctagctggccaaaatacaatggcaaggtagaccattcatagttcatcatgagctaccaaattgtagtagcctcctctatggtgacgataacaccgtggcaaaatcatttatcataacactcgaaggccccaccctcccctattacacaaggtttccgcccttaaccaccgactcatggaatgtcccacgcaaaaaatttctactcgattttcaagggtacatactagacactgatgtcatcgctgagccatccgtgtgcaaacaacaagagaaggaaagccttcaagactgctacaacatgtttctcttaatgaagtctcagcttccatcagtcgaagactacatcgctatccactacgcaatcagcgaccttcacacatggcac

SEQ ID NO: 155320 - DNA, 799 bp, Zea Mays
ctcgtcgatatctggtgtggccgtggcatttgttcgtggtgatccgtgctttagttcttgcagagtcatggctttgggtctatacattaactggaaaggggtaaacccggtggctctagattctattgtgtttagcgcccaaatgacttcaggaagttgtctgcccatttgcccttttgtcatcaagtagtctcttctttatggcgctaaaaatcttgacgttggtgcgttctactactccgttggattgtgggtggtagactgatgcgaacattgccttcgtgccgatggaattgcaaaattccctgaagtcttgattgtcacattgtttgccattgtcgactgttaattgattgtccaacaatgtcgagtccccaacgctgtagtggtcaggtgtgtgcaatgagctttgtgaacagcgaaggggcgctgttcgaggtgagaatttttggcatccttcgcacgaatgagtcactcggttggccacacacacgatggctggccagtagaaaccttggtgtatgacctcggtagagagagctctcggtcccgaatgtgatccgcatgtccctctgtggacttctcggagaagttctacgccttcgacttcagcaatgcatttaacatgggttgatttatccccttcttgtatagctatccgtcgatcacagcgaagtcaatgcttctgtgttttaaccttttagcttcgctttggttggtgggatggtagtggccttgaaggtatagggtgttgggtgcccaccagtcttcggtcattattagatttactatttggcgg

SEQ ID NO: 155321 - DNA, 666 bp, Zea Mays
ccagcaccaagttctactagatgtcgcagcccaagccctcgacccgacagatcaagcaacgacgcagccctccacacacggcggtgccacgcaggcgcgcacgcaatcggtgcccccaaagccccaacccatgatccgagccactctgcacgatgccgctgacatcccaaatctatcaaccatgccgaggcccagcgtgattccttgtccattctccgggaatgccgaggccctctcgacgttagtcaaccactggcggctctgattttctctccattgactccttctcagtggctaaaccctccgctcctgtggtgcacgctatggcttgtaggtgggcgaggtgatggtcatgacacacgcatatatagccggcggatgatgaaatccgatgcgacacgacgaattgagacacgtctgcccggaatccatgctctcgattgagtttgttacgtcgtcgttggttggttgatgacgagtgggaccacgtggtagaggaacaactcgagtccgcgcgtgggatgggagactgccgaagtagggtctgcatgtcagtgagaagtctgcgcgcgagagcggtctaagcggagcgagagcgtaagggattggacggtggtccccgcttggcagcgactggggcttgatgggtggctgtgctggttgagg

SEQ ID NO: 155322 - DNA, 529 bp, Zea Mays
gccgtttattgtccgtattgttgacgaggacgacgaagaagaagaggaagtcccattaattcggaagaacagtcggcgttacagagttagtggggggagtagcgatattccttctctagctctgtctgctcttgttggtctgcaaggattatccatagcaaattttgatcaggctctcgaggatgttgttcctgaagatctgatgcctgagccaactgatggtgatatgatggacgtctgctctgacattccagatgtgggattagaggtatcccgggcagcatctcgtgcatcgtcgaccttggaaggcggacttcggagccaagaggttggtcaaggtcgttcaattcccatggaggtgactgagaatccttcagccttagaggtggttgttgtggagaacccagtcctcaagggtggtgccagcggttgcccagcccccgagggtgttgccggtaatgatccggctcgggtgggtagtgcaagctgcaacccagcccccgagggtgttgccggtgatgatccggct

SEQ ID NO: 155323 - DNA, 410 bp, Zea Mays
atggggagccaagctgcatgtggcacaagggccttgtcatcccgaagcttaatttcaatggactcatgaccatagtcattagcttctcccttttcttcttgtccgcttttatgtaaaaccattcgcttgtccaaccggtcggcaacttggtacgatagccaattatcagggcctttgtatctttttgatatgcgaagttgtagcagccgaagttcttatgaagaccatctgctctggccttcgtttgatagtgtagctcatgcacccggcagaaagcttcggcattaggactcataccctggcttcggaaagcccatatatagacactaagtctaacgattgcattgggtgtcaactgatgaaagtatatctcaaaattctttagaacttctccaatcatctcatgtaga

SEQ ID NO: 155324 - DNA, 526 bp, Zea Mays
ggaggcctaggatcatagcatcgtactctgctatgttgtttgtgcatcaatcggtgtcaagggaaaagctgaggcgagctgcatatctatatttggtacttgatggtgtcatgataatggccatggttgtggcccttgcatgacaccagacaccatcgcagtgaattgaagttatttgtgttggagggggcacttgagtggatggtcttgtccaattgactatgaaatcagcgaggacctaggacttgattgcattcctagactcaaaacttatgttgtattcggatagctctgtagatcattttcctatccatgcggaggcctttgtgttgttgaagagatcacgcaggctttgctctgcgagtactctgacctcatgtgcctcgaagtagtgtcgtagttttcgtgaggccatgaggacaacatacacaatcttatccatttctatcatgttgcacttggagtttgtaagcacttcagagacatagtaaattgggtgttgttgtagcctacccttaagatgctt

SEQ ID NO: 155325 - DNA, 703 bp, Zea Mays
ccaaagtaatggtttcagatctggtggtcatcgatgtgacaaaagaatcatagtctgagccaaggccggccagaagatatgctattatctcatcatcacgtaaagcagcacctgcagcagcaagttcattggccagccccttgattcggcgaaaaaaatcagccgcagatagatctcttttcttggatgtagccagttcaactcgaatttgcaccatgcgagcacgagtagcagagaagaacattctctgcaagatatcccaggcctccttttgatgtggaggctgagatcacatcccgcagaacctcttcagacatggatgacagcatgccgctaagaacctgctgatcctggtcgaaccagcgatcataatctggattggagaccatggtgatgccattgtcagatgtagatgcaatctgctgagctggaggggaaagagaaccatcgagatagcccaacaatttggcgctgcggagaaagggcagtaattgagctcgccagaggaggaagttagacttcgtgagtcgtattgtaacagcatgatgaatatgaattggcacaaaggaagacgccatggaaggaagcatggtagtagtggtggaaggagaggaggaggaggtagaggatgaagttagattttgccggaaaatttatggctctgttaccatgttaatgtatggcgccttgaccttcacaggtc

SEQ ID NO: 155326 - DNA, 712 bp, Zea Mays
ctattttctctggtaggctttcacgttcttgttctattggcctagattccgaaggtctagccttagcataatcaagagcaacagtttcgtcaatagcctttttcagctcctcagccttgtctttggaaacctttgaaggagcaggcgtcgccacgttcgagggcctcataatagcatctagcatgtttgctattcttttcccctttttaggaattcccaccgaccccctcttttctgaacacacaagcacaccagttgtaacacgctccagagcaatactacgatcaacactacactggactagggcacaaccctatactagtataaacccaccgtctcaaacctcacgttagagtccctttgattcaccattcggagtgagtccgcgctaatcccccatcgaacacaaattttactacccctagtttccaaaaccacgatagttggcacgccaggtaggaggacttttagagtgccaaaagacacctgtcacttcgattgtccacgcatcgacattcaccgacgacgaaaccttcacgtcgaggagccacatcatgttcagcaccctcgacttccttgccaccgccaccgatgatctccacctcgccacccctgacattcccgtcaccacgggcacacgactcacacactccaccaggagcaaggtagagaagcagagcctaaaaaggcgagccgtcgccttgaagcgctg

SEQ ID NO: 155327 - DNA, 705 bp, Zea Mays
ggacggcgtgtttattatgaataaccccgagggctcttttacaaatttactatggcgaaagggcatctatgaatcctgaccgctggatccatcgcgagggcatagattaaatcgcgaatggtatgagatcacgccccttggatccaaaacctacggtccggatcacatctctgaaacagtacgatggtttctctaatctgcgccgtccctgaccgaatcaacggcgcaaacattctcttctaccccaggatggtcaggaacggcggtgctctacacctacagtggtgggttcgccggagtgaaatccccaggtgcccccaaggcctaatccctaccctggtagcggtggtatggggtaagattatggtgaatccaatccggggaagggcgcaccgacgacgatcatgaagacgacaggttacgcgcaggcggatccttggcgaggctaaaccaccgacaaggaaatccatggtcacacgatgcgcgacagtcgatggcgcataattataagagtagacgacatcaaggcgaacggagtgggtgaggctttaccggcattggaggacttcgctgcgaatcatggctaggccagagcgcattccggatctcggccgcggcgaggccgaaccagcgcagaggcgacggggtggacatgggcggtggccgcgggcggatgtagaccaacacgaaggatgtgcgagcgcg

SEQ ID NO: 155328 - DNA, 273 bp, Zea Mays
gtgtgctctggccacggtgactgtgagcatcacggcaataccgtcgtgttcccggcgatctgaggctacttcgtacaaattggtggttcggcaagcatcccagagcatcaagggtactcaaatgagggagagcgagggatgaactgaccgggaaagggctggccgcggtgaggtgggtttcacggtggcggagacttgatttggggaaaatctcaaattcgagttctctggtggggggtttggggtgcaggtgggtgctctagctgctcgaat

SEQ ID NO: 155329 - DNA, 415 bp, Zea Mays
gcgccgccttgtgctgaccagaggaggatgaggaactccgcaccgtccgattgatcatcgcgcggtggggattagatctgggggtaatcaattgtgaatcgttgatcgagctattgacggcttagattaaatctgggtatcgattcaatcgcgtccaaccatggccgtagatccataatccgatgggtgcgagtcgatctgggttattcagaatccggaccgttaggttttgatctggtgatcgagatattgggtggactgagcctaatctagacgcttggcttatgatctaatagccgagatatcgcgataccctttcgccatgacgattttgcataagagcccctggttaatgcctgaactaacccgcggtccagtccaggattcgctgtgtcttgggaagttttgcaccgag

SEQ ID NO: 155330 - DNA, 450 bp, Zea Mays
gttcgcgccgattagctctcgcaacgaactgcctccgcccgcaaaccatgacctccacgccagtcgcaagtcttcacgccatctgcaacctccatgccatgtcagttgtcacgtcccacccgcccactccacaacatactccagctcgcttctccacccgcaccaaaatgcacaccaactcatctctatcgtacacaagcagaccatgactccacccccaggcccgcgcacgctcgccaacacccgtgtcgcctcccgcaccctccgcacgacacaccccagccagcctcccgcttctcgcgttcgcgccgattggctctcacaacgaacttcctccgccatcaaaccatgacctccacgccagtcgccagtcttcatgccatctgcaacctccatgccatgtcagtcgtcgcgtcccactcgcccactccacaacagactcccgcccgc

SEQ ID NO: 155331 - DNA, 558 bp, Zea Mays
aagaggagcaggtcagcgcagggcagccgaaggaaaacgcggaggaggaggaggacgtagccgtggaggagaagatcatacaggtggaggcggatatgctggagctgcaagaggagaggtcgtagagcagcgaggtcgtggagacagaaatagaggccaatgagcgcacggacgatggctcactgaccgtcattggagaagaagttgcaacacctgagggagaagacgagtggcggaagagaagatcgtcgaggagatccagcgagcagaggtgactgagaactcggaggcgaacgcaaactctgaggaaccagaccaacaaaactgacgtcgtctccgaagaacccaaggaatagtctatggtgatgagcacaggatctgggaggtgaatggagagcacgggatctgggaggtgaaggggatcgcgggggcaatggagttgattgcgagggcggtcgcggacgtgggaatgagcggagcggaggatgtcgcgggtgggagtgggaggcagaaccgtgcaccacactggtgtggacgcctacactatctgcttaagag

SEQ ID NO: 155332 - DNA, 661 bp, Zea Mays
aagctttccaaaccgaataattgtttaatgaacacatccaaggttgtagcatgagatgagggaaagtttcgtgcttgtatttggcctagtttgagttattatgaggtgttattgtaacaataatgtactcatggggctactagctccttagaacctcatatggctcactagcgatgaccttcacgcttggtgcagcatcatgtgtatgaggtatcaagagacgccttggtattcatggcagatggctctaaggggacaagaatagtcaagccacaatatgtagactacgaggttgttgcacttggccttgcttggtagaaaccttatgtcgagagttatactatgactgggggaagctttggtgattgggagcatatccttagttcatctctatgcaaactagatgtaattccaacttactaacaccaaatgatgactcattgctattgtttgtgtgcatgtaccattcctaaggtacctcaagggatagtcttgattggcttgggcatatagtgaaaacctttttaggtgtgaaactttgcatgatattgaagttgtagtttaatgtagaatgaaactttgcatgaattattattattatatctttatttttgggtcgccttgcattagcactggtgaagtatcaacttcctaggttgac

SEQ ID NO: 155333 - DNA, 669 bp, Zea Mays
taggtcaatgagcatccttagcacaccagggtgcagtaacaagagcgatgagggtgtgaacggacctgtagagagctggccacagcgagctcacacacggcggggttcttgactgatttgggggaaatcccaaattggggagctatgggggacaattggaggtgagggctggttcactgggtgcacgattacttagcggagcaggctggggcaccaatttatagtgtccaagggcggtggctcctaattttggcatggtgtgctagcggctggagagaaagaaggtcactggtggctcagtcgtggcgttcaccggtgcagcggttctgagatggtaagcctaggcttgccacagttactactgcgcagtaaagagccacggcgtggcataattggggtcgccggagttccacgacgacaccgacggtccggccacgtcgcacggctacaggcgcggttgataagcttcaccccgcgaccaaatccgctccccctccgatcttttcaccccccggtactatcctgcccgagtcctacacaaatcaccgcgatcagcgcgaatccttgcgcagaggtcaccggcggcgaggggggctaaacctgagatctttctgcgtactgtaccatgcgatgcttattcagagtgcctaaccgagtgttttgctaggc

SEQ ID NO: 155334 - DNA, 1059 bp, Zea Mays
ttcacccaagctccgcgtcactgcctgcatacggattccgcgcaaggattggggatcgaattcgcctggatcttcgtcgccgctatcgcgtgtaggttacaacaagacgtctgaccccttcggctcggtcttggtgtataaataatggaccaatcaaagccccttgacccccatcgaaagaacacaggaactcgtcggtgtgagaccggcgccgccgcacctaaccatctaccacaccggaccttgcccctgttgttggtcggggtgaatctccggggctcgtggaaggctattgtggcaccggtgtaggaattggacccgcagggacggcttgattgctcaccgaagtcagtcttccgccgctgaaccgcatagatgcgtgggcagcgttctgtgcatcgccatcaccggtaagaccttgacccctggactcaccccaacccccgctatgcgtagcaccgttgagatccaagtttgttgtgcgggtcgcgctatctaggcaccgcagcaatggcgctgccgtggtccgctcgggctttgtcgccgggcgctatcaggagatggaagatgggtcctacgccgttgatctaaccagggatggctaggattagatatgtgggggagtcatcctgtgtcgttgacttacgagcatgtggccaggatttgtgcgcggtgtaatccttgtgcaatcaaccctgaccagcggatctggatcgaacggttcggtgggaaggtagagattttagatccaggccgttgggatgtcatcggatggttgtgggtggttaccggttcataaagcgtgcgatgtgatctggtccacccaagtgtgatcggacggtggagatatgggcataccctttgaccctggttgtttttcaaaagaacccctccacttttcaataaccaacccgcagtccacactgtagggaagcctgagtcttagggtaattgtgattatggcccctgtgtttttctgttattggcgcccagtccagagctcagggaaaatcaggaaaatgaatttagaatttgattttcaatacacaaataaatcca

SEQ ID NO: 155335 - DNA, 981 bp, Zea Mays
gccgatttgggattacctaaataggaacctaaataggaacgaactattgtttgcaattgaacggtgtcttactccttcgcacggcggtcgacgcccacagttcgcggtggcgaagcagaggtgagcgaccgaggaggcggcagagtaaagatgagcgcaaagcagggccaaggcgagcataaagattagaagaggtgagcggatgtccttagaggtgcggaggcgaagcgagcgagcgacagccaatagccgacgatagagaagcgagcaatttcacctgcctgtgcgagcatcggcgcaaccaagaagccaaacgggtgacgaagaagcgagcaactatgtctgtctgcgagcgacgacgtaacaaagaagctagacagatgtcagacgcgaagaaaggccatgggtcttggacctagtgctgctaatgggtcgggctaaggtatggcgtgggctatacctcgccacattaggtcctccgcccctgctgcaaggtgtaccggcggcggtgccttctgcgacagcgcggacagtccgcaacctagggccggatggactgcgacctacagtatgagccgagtcttctctgcgccgagccgaacggtctgcgtgtgtgtagaggcgacgacgttcactaacaacacctggacctgaccctctgtgagggacccgtcagggaggagagatcatagggtttgtttttgcatcggcagaccacccaagatgccttgagacgatgtagagtcgaagagatgtgaagattggagtgataaaatgctaagttactgtctacttatagggcaaaacgtaaaggaaaagaagatatattgattttggttcgattgttggatgtatcccttcgaatatataaggaatgtatggacccattcctagacatcctccaacaactcacacgagtttagagggataaacacgtgtagagatagaagttaatctgtatgatctgatctgatctaattg

SEQ ID NO: 155336 - DNA, 567 bp, Zea Mays
attgcaacttggtcattgtagacctccagtcttcatgtatcgtgccattgcttatctggtaaagacatctctcgacattgctacatccaaggggcacaatggtaggattaactaatataagtgatacacatgcatatgaatcaattgttactattgcttggtataaaaaagtagacatcattacaaggagtcagggagtgaagtaaaaaaccaaacatgaaatttgcaactgagcctacctatcttcctttgactcgataccctcattgttgaaaacacatttccccattccctgccaaggcacacgacaatactgaggtggataaggcagtaagcatcaaattgacttaccatccaatatgttggcgatgccaatcatggtagcaacttgcccccacgactgccgcggcgggccagtcgttccccttggtgggtttcagattaggagcacgagggaatcaggcacatgaacctgcatgatgttgtcggtggtccaggcgatgccacataagttaaagaaaattgcgcagaataggagcaaacatgtgttgctgacatacataaaca

SEQ ID NO: 155337 - DNA, 506 bp, Zea Mays
ggatggcacatggctacatcccaatagagcaacaccaaaaaagtgatcagggacacaggaatccagacttacaaccttatttagatcaactaagtcttaccaaacacttacttaattgtctacagtcgaccactctcagctgccaattcaccatgtgatacttcttgtcaccggagcccacccatgcgcgcgattaaacacctctcttaccgtctctctgattcgcttgcttcctgcctccaacatcttttttgttctccctgtctgcattagtgcccagtaatccaaaagagaacaacacatgaagattacatcagtggggtcattatggagttttttattaaagcaaacagaatttctggacttccagatcgcccatagaacagctccgcaccgaactgcaacagattttctgtaccccttatcaaagtttctaagccacaccccagttagatgttccacatctgacggagtagtaggcaaataaagtgcaatctgaatcagac

SEQ ID NO: 155338 - DNA, 463 bp, Zea Mays
gaatagaggggattataggaaacctggtattacaaaaggtcattagctagcccaataatgtcttcatccactagttgtactctaataccctctcatgcgaatacaatgcccttgacatcagggaaacgtcctttttagtttaaaaggtgatctattggtttgaattctttatattcctacttattagcatctttttggtggaaaaaggtgccttacaaccttaacctatgtttggaaagttctctcgtgcaatttggctaaatttcccatggtctttattttattttgagaaatgatgtggcataatgatgtgtgatgttttacttgagtggacataaacaccatctaggtatgccttgaataaagggattataggaaacctgatatcacaaaaggtcattagctagcccaataacgtcttcatcaactagttgtactcgaataccctctcgtgtgattacaa

SEQ ID NO: 155339 - DNA, 501 bp, Zea Mays
gccatgcctaagatctaccttcacaacaataagattcagagtacatgcgtggtcagaagtaagttggacacaacactgtcttacctgactaccaacaacaaagtgcaccttctccatcctatttagacaactcccagttcaaccttcttttgtgcgatagattccggcagatcagcaatcctctccgagagtccatatagtgttttctgtatatatatcgaaaagacaaataaaaagacatgatcactacaacgcaatcttgcaataaaagtgcaatagtaaaatctgaaaaacaaaagacgaccattgcatgtcttctcctccatgatgaggtaactcgaaagactaccaggttttcaacaagcatatgaacacaacactgtcttacctgactaccaacaacaaagtgcaccttctcaatcctatttagacaactcccagttcagcctttgtcacagtcaacaacatcacgatatgaaccaatagcaaaattaattcata

SEQ ID NO: 155340 - DNA, 572 bp, Zea Mays
gttgcggcatcttcgggcgaccgggctcctttaaatgtcaagctccgcttgaatctcgaatcactgtgtagacctcgtcaccagagcgctgtgagttcgtcacctaggccggctacacgcccttgctcgccgtcgacataccgcaccgctcagagctctggctttgcccttgaaacgtcgctgcgcgggaggaaggtgttgccccgcatcagagttactccacgggcggggcagtccgggaattcctcgccggtgctcgcgcccaatctctctccgcaccccgtcgtggcctgcttccgccatagttccgcgcgctcggtaagccacattactgtgttcaccattgtgctctcgctgtttaggttgtctcggtcggggagattagtcgccagcgggccattttggccgtcaccggcaagctcgccgccgcagaagcactgtggcgccgcctcggtgccgtgataggatagctgaggaggagaaacgctggttgccgttggatgagaagtgaacggagccgattagaagtagataccggttcggccaggactcgtcacggccgttgatcgtgg

SEQ ID NO: 155341 - DNA, 903 bp, Zea Mays
cttttctttctttcttcttcctcccaccaatccaccaatggagaatgcagcacaccaaaggaggaaccagggggcggctagggtttagagggacgtgggtgcagcaccttggggaggagaggagcggctacaatggggaagaaggggggcggctgctgcaaaaatgagggaaggatgggggacggctgctgctatgagggaaggggaggggtggctagggtttttgagaagaggagggagcgatgcccccgatgcccttgatgctaaactgacggctcacaaccaaatcccccatccatgccccgattcagacaaatgaatactcaaatgatatcgtttaaatgagatcttcacatctgcggactccgaacttctaacggcccacaaccattttcccacatccacgcaccgaagatcaacttttggtcaacattttttaggatattacaaggagcactacctcggggtctgcatgatgatgccatcgtcgcccaaggtcaagccccggtgactggtcagggaggatggggagcgcgtgaggaagtcatgggtggaagcatcgggcacaggaacaatcggtgcgccgaaattgtgtcatcgtgcacaaagtcgtgttggggggatcatcctagtgaattcgtcatcgtatgcacctgcttttgcaccaagaaattgtcggaattggtgatctttgcatgggatcgaagttcgccggcctgtgctctgccgtgggccgcggagtctgagggctgtgctgcctggggtagatgatgggtcgggtgctgtcggatcggcgacgtgtggctatgattagaaggctgtgtaacctttcgcaagatcaaatctgggttgttaattagggatcgtggggtggagattagatcccacgttaatagaatcctc

SEQ ID NO: 155342 - DNA, 1035 bp, Zea Mays
ggaattgaaccaccccagctcatttcccctaacctaatttcaccaatgactaactaataagctctggccacggcggccgtgaacatcgcggcaagacagtcgcgttccctgcgaccaaagggctcctagctcgattgtttgggtcggcaagcatcgtagacttaagggaaagcttaaacgagggagagaaggagatgaactgaccggaataaggctggccgcggtgaggttgggtttcgggtggtggagaattgatttggggcaaattcaaaattcgcgagctcgggcgaacaattgctagcaatacgtggtggctgggtgggtgatgatgttgtcaagctctctgcggggtcaatttatagggagcagtagcggtgacgagcaatttgagaagattgcgctggctgccggagatgaagaagaaggcactggcgcgcgtgagtgcgtgtccacagtcgtggcgagctcaccggcaacgatgggactgctatagggagtcacggcgacacggtggaaaggctcggacacgcggcacaaggccgtgcaacggtgatcatcggcatagttatccgcggcggctgtggcaacttggtacggcggtcggacttgtttagtgaccggagttatccacggcggtgatatttctaggaccccgagcgctatccacaccatctgaatactaatcgtggcgacgatggcatgaatcatggcggggagccaccggcggcgagatcttttctggtgcggggaatcactgtacgatgggctgcagcattcaatcaacctgacagccatagtttaggctcgattttctcacaaattttcatggcaacataaccaatgatctgcagcaaagttgtagaactacaatccatctataactttgctacaatgtgctcccacaaaaagtcactggatcttgcttaaaattaagccctaagttcatgtcatcccactattaatctgaatttcagatttcaagcagtctgacagtccaacttcaggctcaattatctccagtattttcttaacaac

SEQ ID NO: 155343 - DNA, 595 bp, Zea Mays
gccacttgggaaagtgaggactctctgaggaaggaatacccttaccttttctcgagccccgtctgaatctcgagggcgagattcctttaagtggggtaggtttgtagcatcccaaaaatcctaatctaggtttgaaaccctaatccaccttttcccctcccttcatcctctaattctaagttctccactaagtttttctttcatcatatgcatacattttgtttgactacaaagcacctcacttagattctattttctaaacacttagagtattcacaaaatattttgttcaaaagaaaaaggggcaaaatgggaaatgggaattgaaaagtaaaaagaaaaagggaaaaactctctcctttccctgttggaccaaatctcggcccaacacccgcaacccccccttcccacgcgcccgcactcctccgctttcggcccaacttcggcctgcttccgcacgcgcgacagccgctccacacccctccctccctctcgctgacaaggcgtccccacccgtcagccacccgctctctcgcacgctcgctccctctgaccaagcggccccacgagtcagttgcttcgtcgtccgtccgcc

SEQ ID NO: 155344 - DNA, 591 bp, Zea Mays
gtcactttgatattatggatcggaaggatgtcatttcctagactgctatggtctctgctaatgcaaaattggggatctagatttagctagagtgttgtttgatcagatgcctgataataactttgttttgtggaatgcaatgattagagggtacaaccacatctcgcggtataatgaggcattatgcacatttcagcagatgatgcttgagggaagattcatgcctgatgaagcaacattaataagtgttgtctcagcctgcactcagctaggcagtgttgaatactgcaactggatcagttcttacattagtaaaagcaacactcatataactgttgcattaggaaatgcattcgtagtttgcaaaatgtggagatgtaggaagaccgcggttattttttaatgaaatgaagacaagatataccattacatggacaacaatgatatctggttttgcttatgtggcaggaggttccactgtccctattctcttgcctttttacaggtgccttgtgctcggagcatgtcagcaggtagaggtccaggattagtggaaaaccttgttaatattttctacaagcatctgtgtgg

SEQ ID NO: 155345 - DNA, 487 bp, Zea Mays
ggacttaattcaggagggcgctaagctacttgttacttgttagggccgccagcatcaagttagctagtcctgaggataatcagaaagatgaaaactccgaagaaatcattgaagattgatgcaaccgagcgaagtcgttaaattctagaagcgaagttgttgaattctgaaagtgtgcttggctggtgtctgctgggattcatctttattttcatgtttggtggatcgatggcccctgtgtgggtgtttttctgttgtctttagaccttttggttgcctccgtggctgaggtggtttcaagtaaaattgggtgctggttggttgaggatagtctctgaatcagggaggtactctcttttggttaaactttgaatgttggtgggtcatggacgaatagcctaggtagtagtttgttccttgggatttctgttatgcatggtatgttcggatgtatttctgatatgaaaataatagaaatgaggtctcc

SEQ ID NO: 155346 - DNA, 398 bp, Zea Mays
ctttttcggtcgcctttgtctgataagacaactcatgaatattgcaaaagcatcttgcatcaggatccagttcttggctcctcatggcccagataaaaacccccactctaataagggcttcgggggtaatctgatgaagatgtatctcaaatgttttcaaagcatcgactaacttctcatgaagcgggaaacgaagactagccttcataaagctcctgaagactaccacttcatcgctttttggtaggggaacagtgtcctctcccccagccctcactacaaatacatcatgaaagtatttccccttcatcgattcaatctgaccttgcttaatggtggacttcccgaagacaacatggctcggcctccatggccgatctttgacatcttcatttcca

SEQ ID NO: 155347 - DNA, 664 bp, Zea Mays
gtgagtatcacagacacatgaggatgctagaacaagactaaggacaacaggatcggacctgaggagagctttcccccggtgagcttggtttcgcggtgttcttcaaccgttttgggggaaatcccaaattgggaagctatgggagatgatcggagctgagagtgggtttactggctacataattccctagcggaacatgctgaggctccaatttataggctgctcaagcgatggtgatcaatttgactgaatcgcattggcgaccggaggggaaaagggctctggcgcttgatacaggtggcctttcaccgtggcaggtgctccggtgatcaccggacatgcaccgcatgattcaccatgacgagagccagcgctaaggcatgtggtgcgcaacggcgacagctcgacggcggtgagagttatccgagcgaccgacgagctgggggggaagtacggcaagcttagccgcaaccgagctcgagtggatcagacgccgagatttttactgggctatgcttatctgatggccactgcgcatgaatcacggcaagcaatcgatcaatggcgatgggccaccggcgacgagatctttttggcgctggcagtctgatcatctcgggacactgtaccatgacgagcacccatcagatgaactgacagagcg

SEQ ID NO: 155348 - DNA, 692 bp, Zea Mays
gataggtgtcgacatatttgtctcccacatttaataatgatcttcatcatttcccaaaaccaaaagattcattgttccgtattcctaccacaatgatattgcgcgcattgctaggaatttcatcatcaagatgaacctcttcatgaggcaaatcaccaccagggtgaattaatcggaggagagttatcacagaccatgtgaatctgcaatcagaacatatgctttgactaaggctgatggatcatattcgtaggcatccccgagaatagatcaaatgccaataagtcaaatgtggatatgatattaatcccgggtatatccacatctacatcaggtagaagcattcaaaccaatatggttaatcctcaacgatttctggcaaactccatatacataggagtacacaccgaacgacaggttcagtttggcttttgtgcatttaatagaatattgaggcattacactatatgggcattcctctccctaatgccgagatgttattaaagcatacatataaaatctccaaccacaatcatccagttgtggccaatgtatgctattgtggtgatttatttgggaaatcttacgcacattacagatcggggttttatgcagtgagctttggacttagattaatgtagtggcatgaatactacatatttttttcttcaacatgaagggttagtctcaac

SEQ ID NO: 155349 - DNA, 737 bp, Zea Mays
tatgaggtgtgtcctgttcatgtggcccaatatgtctcatggggatgtgcttctctgcgccgaccacgtctgccgtttttgtgtgctcatcgatatgtccaggtgccctcaatgccgccgggggagtaacggagacaccctctgtgtaaccggcgatcgcagacgctacaggatgcatgtccattgaaatagacgtacctattggcttatgcacagacgatacatgtggcatgtcatcgccagcgctggtgctggacattttctcgccgctaatcgccggccggtcctctcacttccgccgccgctaaccgccgccaatatctcagatacgaacgtggacgagcgactgtaaatttgtatttgtttcctcccgtaactgcgcctttatttacgcgaacgaagaacacgtctttccttatctcaaacctgtggagatttaaatgttgcatggtttacgctatcatgttacacaacgttatgcagtcgtaaccggtaagcacatagaaatattcgttcccgtgattcgtggcataaaagattctatttatgcatgagttatgcacgtttctacatatatttatgcgtgtgtatatcgcatgtcgcgtctcagccgggatacgtggctatcctatgcatggctgacgcaagctggcgtacagtaggccgaacgtgaccgatcggcgtcctgactagggcttcgcccactaacggaacccagggcttccattacctcttcc

SEQ ID NO: 155350 - DNA, 592 bp, Zea Mays
acccttgttttcgagcatgaaaatagtaatcaggataaaaaacccaatcacatcaaaaactctgtttaacctcctctttgcgcgagcgctgaaggcagtgctcatagcttcatcctctgcctttgtgtaagctcccagcagctcgtcgctggtagcttcgacagcctcaagccagtcatcatttggctcatcaaactgatttctgaaacgataggtgtatcttaagtcaaccagaccaccttcactggagccgacagcagtctccttcggcatttcctagtcatttacgagtggtcacactttgtaagtaatatgctcctgcaccaaatccctggtaccaatgtaagtacacacagtattgaaagccatcaaacacgcttatacttcgtttccacttgcaattaacggtcttctaatgccgaagcgtgaccgtatgggacgttggacaatgcccttcacatcttcccttttacttaaatcattcttgacatagaaccattgtttcatccaagaacccaaccacttctttcggaatgtcggcacagggaacctcgcatcaaaacggggcacaaagctgtagcacccgaagttg

SEQ ID NO: 155351 - DNA, 401 bp, Zea Mays
catgccctcaacatgtcttcgagaatttgattcactctctctgtctgaccatctgtctgaggatggtatgctgaactcctaatcacagtggttccaagtgacttttggagctgctcccaaaagcgtgccacaaacagtgctcctctgtcagatacaatagtcttcggaatttcatgcaaatgcactatttgatcaacatagatttctgtcttggtcaatctatccacaatgacccaaatagaatcgtggtgtcgggaggtattgggcaatcccacaataaaatccatgcaaatatcctcccatttccaagatggtatgggaaggggttgtaaggcgcctgctaccttcaaatgactagccttgactctctggcaagtgtcgcattcagatatatacttagc

SEQ ID NO: 155352 - DNA, 770 bp, Zea Mays
cgatgaggaggggtggcgaggaatctggacgaccccgcgacaccgcccagaatcccgacctcgccatgcgtccgaatgaaccacggcggcacctcccgcagagtccctcatgacccgcccaagggtagcgcgccgctgcagacatgaatcaccggcagcggccctctctcttgctctatcgcgctacctcccggttcatctttcatggtgattcttaggtggcgatgggggcgaagtcgcaaggtagggaggagactagtcggacgctttatggagacgagtacgaggtcatgtcggtggagctgagcacccgagattacggcggaaggttgtaactgaacggcggccaaagcttaaccatccccccccccccgaagacgcgggcccgcccggagttatcggcacgcaccatcacgcgcggattccagtccatgcccgcgcgagaaggacggaggggtgctgacaccaggggcccgcgagtctgtggcatcaggtgcacaagcgcgggcgacggaaggcccgccaagagggacccacgcgtcggtgaaatggacaagagcgcggcgcagattagggcgcgagagctgggccgaggccagtgacatttggcccatgaggtcgttttcccatttgcttttatttttatttttattttcttttcttttcttttcttcctttccaaatttcaaatttcaattctaatttaaattcaaaattgtggcaggtttatcctcaaattatattgcgcaattaaaagtaccacatttgga

SEQ ID NO: 155353 - DNA, 836 bp, Zea Mays
gatttaagtacggagtaaccggggctttgatctctctcatcaccatgccgcaatcgacctcgtcggggctcgggtttgggggagaataggtgtgggaagggagacttagaccgccgacgtgccttcccatccttgcgtggtcgccggaggccgtaggagggatcggggaccatcaccggggtaccccgaatatgtgcgtgggatccgtgggcatcgttggaggaagcactgctgggaattgctcgccggagtaagacaaccgcgccgcgccgaagttcattgcggactggcctcctgaacgcgccattctcggtgagtatttgctcctccatttcgttttgcttagcgctatttgatgcaaccaatcaattggaagatagcgcgttaggatgggtgatcgttgtggccggtgatggcgccgccgggcgcgagtgaccagagaaagggctcggggaggggaatgcgtctgtgctcggatcctggccatccgattgtgatggacggttccgatgagttatgggtttgcaatcatatggattagatctgtaccgttgagatgtgatatgaggggtgatcgtcgatcgcgacctcaactgttgatttccgatccaacgtgcgtcgttagggctagtctagtggcgcacatcgaggatttgggccaccggtttctaatcggactgtcataggcccacgataccccttcgtaggtcagattgacacatgagcccctctgttttaaggaataaacccgcagtccatagattctattccttgagtctaggaaatatttgtagaccagcccctgtgtttcggtttaattgaagctcggtccagag

SEQ ID NO: 155354 - DNA, 612 bp, Zea Mays
gtagtgccgaagatgcctacagtcgggccaaccaaagctaaagatgataaggccgaagagccacaggtggaaaaagtgataaaagtgccagaaatcctgagcccaccggcagaggcagatttgccgaagatgcaaaaggctcctgttgcaactcccaagaggaggaggacggccagcgtgctagatgctattatatagaccacgaaggccttaactccagctcttgccaagaaaactgccgaagctgccaaaatccaagtcgaagccaaagctgagccttcagcgcctactgagacgaaggccgtcgagcctaaagataaggtggatcagcaaattttagataccggcaagatgacagagcaagatatggcagaaaaagcaaaatctcctgtccccgaagccttaactgaagatattgattacattgttcgacatgcttcggggaagaaattatctgaagaagaaatcttggaggccaaacactacgcccaaagactgaaatatccgaagggggccttagtgttcaatggtagtaacgaagatgatttcctgtactatctcccggataacaaagaaatatccgtgtgccgggagatagctaggagtatggga

SEQ ID NO: 155355 - DNA, 734 bp, Zea Mays
gggggttctgcaatggcagtattggctgttttagtctagttcaatgctgatttagtagtctgaacaagaatctccctatcctgctgaacttcacctatgtgtttaagttttcatagggataagtgttagtggggacgaggtacatagcttaggtgctgaaggtttcccactgcagaaagatatctaggagttggtctgttctggagatagtggaggggaaagtagctatctgactatggatcaggtttggagttgcagaaaagatcttcccccgctgtcctaaactggtgagctcaggctgagataagacttgggtggacaacaaagggagaccccagaaatatcaagttgggcctgttgagtctgctcacagtggagtgttcacttatcattcttctgtctgtgtttactggacatgggatattttggctggttaagttgaccaggttcagtgaatatggtgtggctacgagctggtgagatattgatgcatgaaagccacatatgggttgctcatataatgttggcaccctcaaaacatttcctcactgcatgttggacaggtgcagggccaccttgccccatattcaggtgtttatagggtaggtttcagcgaggattacctccccgtcttgagctctaccctcagaccacaacaaagaatatgaagttcttgtgtccatactagagatagccctctctccccagccaccaactcggtcagcccttgtgca

SEQ ID NO: 155356 - DNA, 472 bp, Zea Mays
ccacgggagagaggaaagatcggagagggagatcagggagcgcagagagaagcaggagatggccgccaccgatgcctcacagctgggggtcgcccggggtcctcggatgtgtcttgatcgattcgtcagcatgtggggatggtaatcgaagtagaatcagagctcagggcgccatgggcgaatgggaatttctcaccggtgctgctctgtagccgcggagccgccacctcaaaatacggtaaggattcctctatcgcgcttgccttattcctctgatcatgagccgccaaatttagctcaggttgggtgtgcggttcgttaggaatcgctcaccgaagttatagcgtgccgcgaagctctcactcgccgcggccgggtacttggacagcagactgcatcgcgcaggggcggatatgaagcaggtgtgcgggagcataggtttagggcttatatgccctcggggggagccttg

SEQ ID NO: 155357 - DNA, 357 bp, Zea Mays
agcacccacgcttgcctcgaatcatcccctagaactctccaatttcccattctccccaattcggtttctgccgccgtgaaagcatcctcgtcgtggccagcttgctccaggttagttcaagcgctctggtcatttgttctagcatccttaagtcctcctgaagctactcgaccaattcaaattggttaggctgccctggatcgctgggaacacgttagttcctttgactgtctgcactgtctcagtggacaggatgatttagtgtctcattagtgaaattgagtgagggaaaatggttaggagggatcagatttggtgtctgccgctcgggagcgcaggtctttgcgtgatccggcc

SEQ ID NO: 155358 - DNA, 390 bp, Zea Mays
ccttgagctttcttgaagggtccaatcatatccagtccccagcacgcgaacgaccatgttacaggtatggtttgcagttgctgtgctggtagatgttgctgttttgataagtattgacaagcttcacacctctggactaactcggctgcatcactcttcgccgttggctagtagaaaccagacctgaagaccttcccaaccagagttctagatgctgcgtgtatcccgcattgtctagcgtggacctcatctagtagttgcttcccagtagccgaaagaatgcatttcatgaggactcctgtcgcaccccttctgtatagtgtttccccaatgaggttgtagtgagctgactgccttgcaatgcgctctgctgtatttttgtcacccggc

SEQ ID NO: 155359 - DNA, 803 bp, Zea Mays
catgatcgtcgtcgatattaacaccattagtttctctcacaacaaatctatcaagagctcccttttgagattgagccgctgcttctaatctttgtttctttttacgtttttcagcaccagaatcatacttcctatttcgtgaatacatgatcctaatccctatggtacaaaccaaaaaataattagttggatacataatcctaatccctatggtacgaagtagattgttcaatactcaatagagacgaacatgttcgcttgtatttttttcaggtcttcaaaactcaggaggtcctcgcgacgttcctgatcccgtcgtcagtggcggtgctctggcctctggtgtttggctgttcgcgcggtgccctctggtgttggcaattggcatacgatgcatctggattctggcctatgggcatctggcggactggctgggcggcacttgcagctgccagctggttgggccttctcgtgtaagcaaagtagcaacaatagctaatggccatgggctttaagtatttggattttggaggccctgttaactttgggggccctgtgctattgcccagatggcacttggccatcgacgagcctgccattgatcctttttctattaaaacctgaagggatttcacgccctctccgggcttcacggcctcacgtgtactttcaggaccatttctcttgaggcgtgtccacgacgctggttccgaattcctatgtccgtgggcgcgatagcttattgcctggttttgtgccgtctttccagtacctcgcctccatgcgagccaagcggctggccc

SEQ ID NO: 155360 - DNA, 503 bp, Zea Mays
ctgatgtagcctttctctaacaactcatcaatctgcttcttgagttccaccaactctggtccggacacttgataggctctcttggaaatagggatggtgcctagaataagatctatggcgaattcaaccttcctttcaggtggcataactggtaactcctcaggaaacacatctgggaattctgacactaccttgatagcttttgatggtttaatcttctcgatatgggcggtgacttggtgacaactcccttttcttggtcctgacaagaccaactctactaacacttcttctcctgataaggacactaacttcactattctcttgtcacaactaagaccggcttgatacttggttagccaattcatccctaggatgacatctatagttgtatcctggttacccataactatcaaatcggcggggaactctatcccccttatttgaacctttgcactagggcaaaatctatcagtttgggtccttccatcatctgaactaac

SEQ ID NO: 155361 - DNA, 383 bp, Zea Mays
ccaaatgacgtagggcaactcccttatccactttccggcgaacttttcatttttatcgaagactttttttcctgagtgcctccaatatcatcccgttagctcgttcaacctgcccgttggctcttgggtgtgccaccgaagcatatttgatctgaatgctcttttgctcgcagaaattgaagaactctgaacttgtgaagttggatcctaggtcggttatgatactatttggtatcccgaatctgaatattatgtcttgtatgaattccacggccttagctgaagttaaagaagcaatgggtttgaactctatccatttagtgaatttgtcgattgctaccagtatatgagtgtatcctccttgagctttcttgaaaggtcca

SEQ ID NO: 155362 - DNA, 549 bp, Zea Mays
atcaagcccttttattttattgttattttcttgttgcatggtacaggtttcgtaagtgcaacatagtgttcacccagtggaaggcaattgccgtttaattgtaaattgtgactaagcatcaactagtcgtctcaaggcagcttattgcactattgcctagccaatttggctgtctcagtaagcttcatgaaaagtcaatgtattttcctgtttcctcctcatttcagctggcagctaggtcaaagccagaggaggctgtcttagtatatagaggttgtggtggtatgggatggacatagttgttgtcagcctgttagaagcgactagttgttcaactagaaagggcttggtgggactgcttttcctcgagtttactcaagacgctccccgtcgtcctgcgcggttcatctcaggtggtgctgctgtgtcaccaagacagccctccccgagatagtctcgcttcatgtcaaagctccggcagaagacgtctgccatcctcgctatccctgtgcctgccaggactcctatgcgcttgccggctgcaccccc

SEQ ID NO: 155363 - DNA, 638 bp, Zea Mays
cacagagggaggggatggtatgcacaggagcttcaggtgtacccacacgaggtctgctgcaggtgatgaggagagggagtaggggcacggtggagggagcacgcaatgggcaaccgggacggcctgcgtcgagctaacaacccagggaaggaccggcttataaatccacctagggacgatgctcatgcggttggttggagtatagggccgaatctcccggagtcttccgtcgtttctgttagcgcctaatgtggagaagaggtctggagaggagagtcgaccacgcgaggatgacagagacggcccgatagatgggccccacgcgatcagcgtgagtgcggcaccgcgacacacggcttcgagagactgcacgatggaacccgcctggcggtgaaggtggcaaagttgggctggcgctcagaaatttggcccacagcgtggatgaaagggggggagagagaaatgggttgtgaaggtagaatcgacccatcacgcagggatgtctccttatctttttcttttctgttttcctttctttttcctttccacttgatttcataatttgaattccaaaatttgttattagttttcccatttattttaaatatgaaatttcaaatactggtctgaattagttt

SEQ ID NO: 155364 - DNA, 354 bp, Zea Mays
aacaattcatcactagccgcttcaacggcttcaagccattcatcatttggctctccaaactgacttctatagcgataggagtatttcagataaaccaggccaccttcacaggaaccagcagcggtttccttcggcatctcccaatcattaacaaggggccataccttgaaagcaatgtgctcctggaccaaatatatggtgtcaatgtagttgcacacagtgttgaaggccatcagacatgcttgagctttgttaccatccgcaatcgaaggtcttctaatgccaaagcgcggtcgtatggggcgttgtatcatgcccttcacatcctccctctcactcaaatcattttaacat

SEQ ID NO: 155365 - DNA, 641 bp, Zea Mays
ttcaactttcgcgcatagtgcctggcttccagaatttcttcttcggacaacttcttccccgaagcgtgtcgaatgatgtagtcaatattttcgatcaaagcttcgggagcaggagtctcgatcttttcagaagcaatctgctctgccgctttttcttcaggcgcgccaggctctgtctcggcgggcactgaaggttcagctttggcttcagcttgaacttgcgtagcttcgggttctgcttgcccagtttcggctccggcctgcgatttggcttcagattgagcaattttcttggaaggagcagggctcagcgcctttgtagtctctagcacaacatctagtatgttggccatccttctcctcttggaagttgcggcagaaacctttttgctcttcggcacaggctcagctggggtgactgaagcagcaatcttcctatttttctcttgtcttcacagcaggtagcggtagtcagggtatacgaagccaatagcatcaaataccatgtttaatcttttttgccccggccaccaaaggctgcggacagggcattatcttcagccttggagtatgctccaagcagctcatcactggtagcttcgatgcactttaaccagtcgtcgttcggctcatcaaatttc

SEQ ID NO: 155366 - DNA, 501 bp, Zea Mays
gaatcatcgactcgtcttcacagcttgtgctacggtacctctaatcctcctcaacgccctcacgacggagttgctccaggtacagctcacatcgcggctttgttccgaccacccttctcagatgggttgcgatgttctccggcagacttcaccacagcggccaagtttctatatcatctcatgaggcggatgcttctgccacggatgggttatagggaggctgccactcatattcagctttggctcctaggtgccctagtctctcactccgagtttgacgttgtggatttcctcatttgtgagatcgaggacaccgtgttggatggactttgtgcccgacgtcagctaccgtatgctcactatctctgccacatctccgcacagctgatctggccaccgcagtttcagggactcttgaggcctcacgcctacactttggttcctaccgtccagcccctgaggaccccatgccagcaccagatccagtggtcgacactcagg

SEQ ID NO: 155367 - DNA, 814 bp, Zea Mays
attggtacaagttttttgatgtcctaaactcgtatataatttgattatttgttcagcaaagtttgtaaaatttgacttttccctctataaaatacgcttccctttctgggacagagtatagtaggttagtagtaaaagcaacacaaatgttaacatgaaactgttttttggcctcttttgtaactggacgggaatcttgtgaaatggtttctcctaaccgtttaactccttgtttcttatggtttgatcctctgagataaaattccctgcttgtttgtattttctgtcggagatccatttttcactgcatcggcaatccttttgacctctaaaatgctgggattcatttttcaatactctcatcgattcacatcgtgcagatgagatgagacatcactgccctcttctcaatggtgcaaactcgttggtcttccatggtttgtgctacagctacctcatatgttcgtcagcagccaaacaattttttgatccgcgaattaactggactcactttggctaaagacttcaggggtttcgaatcttccgtgtatgtttgtaacttattgctatatcgttgtggcaaactgtgagagtatggaccgtttctcgcattgtgaactttgcctcttccaagcttgtgagctacactgccgaatttgctttccaagacttccactggaggtgtacatcctactttacctgatgccctcaggtttcttgttaaaaaatgtgatcattgaacaaataaaagtcataaattttgaaggtattaactgcactaaaaatataggtgtgtaattgttttagaacggag

SEQ ID NO: 155368 - DNA, 640 bp, Zea Mays
actcccatggagcttggaggcctggaggagcagaccgcatatgtacgaccaagtcgcgctataacgcgcatcccatcagatcacacaccgtcgaaacctccgaaccgcccatcagctcaacgattcaacggccacggaaccacccgtcctcttgcgctcgcgcggcgcgcagcccgctcgcgctccgttttaccgccgcaactctccctcagtcttgagcctactgcctacataaactcgcccgcagagagagagagagagagagctcggaagaagggaaagggacgctgatccgatcgcaagagacgaatcgtgcagttggatcacggagcgcggtcgagtgacgaagttgtcgcattgtgccgagcattaacgaatcgagctcgatcgagagtccgcagctagtggcggcgtttggtgccagcgcgcgaccagggccatggccggcgccgcgttccgggctgtggttttctccctcctcggcgccgccactttcttcgtgggttcctcttcggcgtcgtggcatgcgcaggtgttcgtggtcggcggcgagccgagggggtggaggaagccaacggcgcccaacgaggagagctacaaccactgggccgccaggaaccgcttccacgtcggggacttc

SEQ ID NO: 155369 - DNA, 279 bp, Zea Mays
cgtggtttaggtggccggtgcagctggtgctcagtctgctgtctttgcgtgatcaccttctctagactccggctgtggcggaggccaagtcaagtggccagcggcagccgcccagccagacgacaaatatattatcgtttactccatttgtttcactatgtttgtccatggcctttggataatacatcctacaatgtttgtcaaacgaggctatcaagagtttaagttgctgtgacattttaaatatctatcactaattaaatgctttcaaagaagaga

SEQ ID NO: 155370 - DNA, 654 bp, Zea Mays
atattggtgcagtagttaaccttttcttgagttcctcaaaacaattctggcatgcttcatcccacttgaactctttacctttctctagtagtgaggtaagaggtttcactaacttggaaaaacctttaataaatcttctgtagtatcctgccaatccaagaaaacttcagatcttggacgcatcctttggttgcttccaatttaatatctcacttatctttcctgggtccactttaattccaccatcagtaacaatatgtcctaagaaagcaacttccttcaaccaaaaatcacacttcgagaactttgcatacaattggttgtcacgaaacttttgtaggactagccttagatgatcttcatgtgtctcttcattcggagagtatatcagtatgtcgtcaatgaatacgactacaaactgatccagatattccatgaatactttattcatcaagttcataaagtatgttggtgcattagtcagtccaaacgacatgaccaaaaactcgtataatccatatcttgtagtgaaggctgtcttgggtacatcatctgctcgaatctttaactgatgatatctcgaccttagatctatcttcgagaatatcttagctcccttcatctgatcaaataaatcttcaattcgaggtaatg

SEQ ID NO: 155371 - DNA, 625 bp, Zea Mays
cccgctactcatgcgggcagcacaccgaagggccccttcgtccctatcatccttcgccacctcaaacggcgggaacgccacataacagtgggagcacatcacggccgctgggagtcctaggaggtcttcgacttcgcctcccgacacataaaaccaaaattcataccagttgccccacttgttgcgggcgcagggaactagttccacaacttccgccgaagtcttgacagtcctcggcgtaaaggtgcacaatccaaactgtgcaatcttgctcccaatttttctcttctgtcagtgcagacaataattcttggtgaagacctctacggagggctgatcaccatacgaagtcaccgcctagacatacttcgccagggccaccatggcattaggtgtcaattggtggatctgcacgtcatacctctgcaagacctccgccacaaaacgatgcgcaggtaggcgaaggccagcgataaaaaatgcctcgaacacaactatctcaccctccgactcaggaatctcttccgcccctggaactcatccaactccattcccaaaataccccaactgctgcatatcttgcacgtgaaccgaggagatcctcgaaacgccgaactccactgtg

SEQ ID NO: 155372 - DNA, 519 bp, Zea Mays
tagtttctctctagcacccaccacacctcaaggtcgtggactgatcccacccacacatgggtacgagcccttttctgccccaagaaggcccgaaagatctaacatgcaatgtggggcacctaaagccatcattaatgccccacagaaccctaactcatgggcaagggagcgacataatgataccctaacacccacacctatagaccaaagtgtcggtggattacccttgaccgccattgatatagtgagagaggagatatctagggcattctgagacaaacttggagtaaacatgacccatgggggcagtcatatcagaaaccatatgataaccgatttgactatgacccatacccacagcggaccagaatacacgaattttcaaaatttttgggtgacccgggcaagagcacgcatgaacacataggccaatttctagcacaaccaggggaattggtcgacaaagagtcattccgtgtgcgtttattttcattatccctaattggtactgccttcgta

SEQ ID NO: 155373 - DNA, 878 bp, Zea Mays
tctgaaaaatgagtcagttaacaggcaccgcttcgcgtaacacgacaccgtttggaccaaggtcaactgctcaggcaatataattacaccccgcggtcacatcaagttactactccaggacagtgtggtaaatactctgcgtaccaagacacccctttggcacaaccattgggtgtgtcgccaggaattttcaaagattttctgaagaagtcatatccacaaaatatacgtaatgaatgtatcacgacaaaaggaggagatggactgagatgggaggaagtccaaatgtggctactgaagtacaagtctaatcagcagaagcattgaagcacagagcaggatgatgtccagccgagagccatctgtctcaaccagccagacgtccaatctgtcatcgatcgaattaatttcagacctaacaaggcgtggacagatagcgtcgtttgaattcacagagtataagatgaaaacctttgaatgaattatttccaaaatccactcaaagctcgggggctacacccttcggtgcccccaatagattttcagtctcatggagataaaatgctgatttctaaagcataagatgatgacctttgaatgaattatttccaaaatccactcaaagctcgggggctacacccagtgcacccaatagattttcagtcccataaagataaaatgctgatttctaaagcataagatgaagataaaatgttgatttctaaagcataagatgaagataaaatgctggtttctaaagcataagatgatgacaaaatgctgatttctaaagcataagataaagataaaattctgatttctaaagcataagatgagggtctttgaatagattatttccaaaattcactcaaaactcg

SEQ ID NO: 155374 - DNA, 360 bp, Zea Mays
caaacttgcttgatttgcttgattttgtcgaccttaatggtgaggtttctattcaaaggcattttttctgtaatccatgaatccatcactaatgtgagcgcctgtggtctgttccttgtaagccataggatgcccagatctatcttgttagcattctattcaagtagttttagctccatctgtcatagtttgcagttaagtgcagagggtggttcaagactaattattcagctctgcacatgtccagttggcagcattgcgtgttagtagctttgaattatttggccagctcattcagttcatccttgcctgcattgttaggtttgtacaattggcattagttcggggtgggttgtggtt

SEQ ID NO: 155375 - DNA, 717 bp, Zea Mays
gtagcactgcctccgaaccatagaccatgaagaagggggtgtttccatgcagagctcgactgggttgagttcttaggctccaaaccacataaggtaattctctgatccattcttgccgaagactttcttcatgagtgctttcagtatcattccattagccctttccacctgaccattggctcttggatgtgctactgacgcatatttgatctggatgctctgttgttcgcagaaatcaaagaattcagagctagtgaaattggaccccaggtcggttatgatgctattcagtgtcacaaacctgaatattatatcttgtatgaattccactgccttggctgaagttagagaagcaatgggtttgtattatatccatttggtgaatttgtcaatggcgaccaacacgtgagtgtagcctccctgagctttcttgaagggtccaatcatgtccagtccccagcacgcaaatggccatgttatgggtatggtctgcagttgctgtgctggtaaatgttgttgctttgataagaattggcaagcttgacatcgctggactaactcggctgcatcactttttgttgtcggccagtagaaaccagacctgaagaccttcccaaccagagttctggatgctgcgtgtattccgcactgtccggcgcgaatctcatctagcagttgtctcctagtaaccgagggaatgcacttcatgaggactcc

SEQ ID NO: 155376 - DNA, 287 bp, Zea Mays
tctctctcgttagtgagtcgccggactcgcgaaaaggctggcgaagccaacgagcggctgtcgccggttaattatctgtcagcgggagccactgacacgtcaccgtcgttatcgcctccgagttgctttcccgcacatggaaaccatgtggtggtggcggcggctcctcttcttctcgtcgactggctgacctcctcacatggggacccgccacccaaccaccgtgagatcgcatcaggcagcgcggagacggacgggagaggaggaattcatgcagatttactgat

SEQ ID NO: 155377 - DNA, 575 bp, Zea Mays
acgtctaaaatggttcgctaagtcttctactgtgattagccagctcatgttaaataggagtcgatttcgttaagtgttcgttatatatgtgttgtctcggattacgataataatagtcaagccgacgtgtatgtcgtatggcgggctatgtcattcctttggttaatcaacttgctagatgactttagttaagcttgtagtcacgataaattgcttgttgtattctaaatgcgtatggttacggtcgcggatgaaaagtattagtgctcatgtgatgtctaatttaaaacgcaaattgttgagtgattgtcgtgaagaatgcgttgttaagtggttgtggtaattttagtgcactaatgacttgaataaaatttgcaagtcgaattgttggttctaatttgattgtcttaactcaattaaatagtaaagcgttagagtaattcaagtcgctcgaacgcggcgattcgtgaattctataggagctgaattttattgattgttgttttggactgcacgcactgttttagttgtgctgtacgtttgatgaactaaattgtgttttctgtagatatgtg

SEQ ID NO: 155378 - DNA, 748 bp, Zea Mays
gcgctccgggcgagggcgcacgcggcggcagcccatacgggcgtggacacgccggcggtgctcccggcgacggcgatcgagtcgacggaggccgcagcctctacaggcggcgtgactctctctccccggatcggtaccatggtcgccgcatggcccaggccattgtcagggacatcggtcccggcggtgggtggcctaccctcaccaagaccaactacgtcgagtgggccgtggtgatgagggtacggctctaggttcgccacatgtgggaagcagttcggtacgacgacgtcgactaccacgaggatcgacgggcgctggatgccctcattgctgcagtcccgcccgagatgcagtttcgcttcccagaagcggactttcaaggaggtctgggacgccatcgctgcgatccgcatcggcagcgaccatgcccgcaagaccacactacaggcacttcgcaaggagtgggagaacctggccttcaagccaggtgaggatgttgatgactttgctctccgcctcaacactctgttgcagaagatggtgcagttcagcgacgacacctacgatgaggagagagctgttgagaagctcttacgttgcatccccgagaagtacaagcagattgctcgctcgatcgagtctctgctagacctctccatgatgacgatcgatgaggcgataggtcgtatcaaggtggtcaatggcgatgaaccacaggctccctctgggcctatcactatcggca

SEQ ID NO: 155379 - DNA, 534 bp, Zea Mays
attgggtttacggcggcggagagtggatttggggcgaatccaaaattcgcgagttctagcgaaggactgcgagcgattagcggtggctgaatgcgtgaggatgtggtaaagctcacggcggggtcaatttatattgccctgaggcggtggcgcttaatttgagcggatagcggaggcggccggagataagggagaacctgggtgcggtgaatccgtggctaacggcgtggcaacctccccggcgatgatgggatggcccaggggagtcatgacggcacggtggaaaagctaagccacgcggcgtacagccaggaggtggcgttcaccggcgattttatcggcccagccacaaagaggaagagagagccacgggggtcaccggagtgatctccagctcaccgccggcgaggatcttttaccgtgtgtccttatctgcccatcccgagcaccagttgggccggcaacagcacgaatcacggtgaagttggtcgtcggcggtgggtttgttggcgagctgatctttttcagtcgtgg

SEQ ID NO: 155380 - DNA, 491 bp, Zea Mays
ctacaaatctgtctgtcacgcgctctgaatcaggttttcaatggtacagtgtccggatcagaacgccagttcagatgactcaccgccggtgaccgtgcgcctggattcgcgcctgccatggtgattcgtgcctagcgcagatggataacggcgaagaaatattgcaccgtggatgaactccggccactattctactccggccgccgtacccgcctgtgtcatggccgcttcggataaattcaccagagttagccacctcgcgaccttgcgccacgtgccctggtgtcttaccacatcgcagtagctcacgttatgcatatctggtgatcgcttgtgagctcgccacggtgaaagccaccaatcgcttgcgccagtgcacccccttctctccgaccaccaccacgacatctcaattttatggaccaccgctcggggagcctataaattgagcatgccttcagttccgcaaggtagtctagcatccaatccac

SEQ ID NO: 155381 - DNA, 611 bp, Zea Mays
ctaaacccaatgagtgtgaccttgatgatgttgaacccaatgggtgtaatccggccaaagttgatcccaatgggtgtaccatccgcattattgatgaagatgaagaagaggaggaggaaatccctttaattcggaagaacagccggcgctacatagccagcgaggagagtagtggtgttccttctctagctttgtctgccctcgttggtctgcaagaattgtctctggcaaattttgatcagactctcaaagatatggtgccagaagatctattgtcggagccggcagatggtgggatgatggaaatttgtgttgatgtgcttgatgccgggttggagttatcccgagcggcgtctcgtgcctcatcgaccttggagcgcggtcttaagagtcaggaggctggtctggattgctctgttcccatggaagtggttgaaggtccttcagccttagaggtagctgttagagagggctcagtcctcaaggatggcgctagcgtttacccagcccccgagggtgttgccagagatgatccggctcggatgggtagcgcgagctatgacccagcccccgagggtgtccgagttggttctccctctcatacttccatg

SEQ ID NO: 155382 - DNA, 354 bp, Zea Mays
ggctgataagagtctgaaagtctctcatccaccacctcctctggtgttctccgcaacatctcaactacggacttggctggctttggctgtgctttactacttgccttaaattgcaaggttgattgtctttttttggctgttgtaccagaactaggctgcaccttggatgcttgagactccacaacagatgtatcattcgccccatctgttgctgccacctccaccacttcatcatcttcttcatcttcatctagaaacattagtctttttctcttgtttgcctccaaataacttgtcatctccttccttaatccactgctagccttgggacataactttgcatctccatatgcc

SEQ ID NO: 155383 - DNA, 755 bp, Zea Mays
cagccatcttcgtccacctctgtgagatgttcgtaggtgtggccccctgtacttccctcttccgctacttcttcatgctggtcaagttcgggaagactagggaccacatcggtgcctactacttccagacgaggctagatccaaccgtcgtctacatcccacctttggcggtgcgaggtgggcaaactggcgcagcgattgggtgattgccagcgccgaggtcaacgactgcctcgtcctgtcgagagatgggccagtgctcaaccgcaagtagtggaggaccaaatcgtccctctcgccagagttcctgcccgtattggacaggatcaagggcttggctacgggcagcctgacaccgatgcacgtggtcagtgatctctaaagcaccggatcgcgccgctgtagaggagaccgcgcctgtgctattggttcaccggcccgaacgacatcggcaggatccagcgcgggccgggcaccaatctgtcctggaacgagctggcagtcctggtgggagggattactggagaaacttttgtccctgagtccctgatacgcccccagaacatccctgcactctgcaacgattcaggcctgaggacagcgatcttggccacgctgccgacccttgacgacagcggcgtggcggttcgccagactagaggctgggacccccaccacgggatccggatctccgatgcaccagttggaggtccccagcccaccggtgtggctcgcaacgccaatcccaccgtggc

SEQ ID NO: 155384 - DNA, 888 bp, Zea Mays
gttggagggacacgcaggggtggacgtggcatcgatggctgaaaattgagctcagtttctggtgaccgaagcttgggttagtccttgggagcataagagtttccacgctgctgtgctccacgtgcatcaggcaagttgatgcttgaatggattggtacgtaaggccgagtgagttcggtgcttccagtcctaagtggtgaatgcgatggttatccagagttggagacctccctgccagcttgtctcttgtctgggcaatgcgtgtccaaaatttaccgctttgctgaaattcagttatccatgcgccgttgcattgcggccacgtgccttgttttgcttggagctggcaccctcgagagcgttccccgtcgcgatatgggcatgcagctggcggcctttgttttctccagtgccatattgctcggcttaatgaagcctttcgccaccttgtgctcactaggctaggctcgctgtgggtctctctcgctcatgccctcataatcagtaatggtccggtttcgccatccattttgcctaagtctgtcgcgcgttatcttctccttgtctggtgaccatgccatcgtcccaccacatcgccatggccggaccacctcagaagtttgcaggcctgtataatacatgttccaagttctctttggatcactagagctctctatgttggcagcgttaaccctaccgagctccgttgtgcagaacgtgtttgcaatgttgcggagcgccgtcaagaactatcccatcatcgaccggagaaccccgttttcccaagctattttgcgcgggcaccaaggttcaggtaaaccagtgatactctccacgcgtttgattaaggctctactgtatggcggcctcgatatcgcgcttgccgag

SEQ ID NO: 155385 - DNA, 471 bp, Zea Mays
ggacctaaagttgctctgtcaggttatttgaaggagcactagccatggtacagtgtcgtgtatggatcagatcgccagcgcgactgacctcaccgccgacggctccctccgccgtgattcgtgctgccgacgtcgcgattcgtgcccagggtggatggatagcgtcgcggggtgaaagatcttcgctgccggtgagctggacgccattccggctagccgcgatacttctcccctttctcaccgcccctcggattagaatctcaccgccgctgtaccgtcgccgttgtccgccgcgtgtccgagcctcgccactgcaccgccacgattcactttagctcatcgttgcccaccggaatagctgccacgacgttgaacacgtattcactgcgctggtattcttcctcatctctggccgcctgcgtggagcggtacctgatctggtcttaagaaccccggccgcctgcgtggcga

SEQ ID NO: 155386 - DNA, 1861 bp, Zea Mays
aacatgcgccataacattcggcattaccatgagcccagggaacatgaccccgctcagtccgtatgctgggacgtggcatctaaagcaggagcaactcctgacgatagggcgttccgtgagcaccgcaattcctgacgccacgatcgttgccacgcctaggagcgcgaggaggaaggagcagagcatgatgccagactccaacacgagaacccactccttccctggaatctgccacctaactttgctcaagccctaaacacgccgagtgatgttggcagggtcctagcttagatcgccaacggcttgccatgtaccccgaacgcggaaggctaccgacagattctcacctagccgacaaatcatcttattcccccactcattcggcaccggccatgcgctacatcatcaacagttggcgagacacgtggagtaacatcaatgcttcgcgcgatctacgacccgaaagtgagatgaggcggcgagaagagtacgacccataaagtttctactattcgcccacatacaattgtactttcgcatactactaatggagcaatcgacttaagtcagagatcgtcttaagtcagtgttacatgctcacgcttacaaacaaagggtgcatactatactcgctaacggagcaatcgacttaagccggagatcgacttaatttggtgttacatgctcacacttacaaacaaagggtgcatattataccctgctaacagagcaatcgacttaagtcgaggatcaacttaagtcgaggatcgacttaggtcagtgttacatgctcacacttacaaaccaagggtgcatactatactcttctaatggagcaatcgacttaagtcaaagattggcttaagacgatgtaacacgctcactcttacaaacaaagggtgcacaccatgccctactaaggaagtcatatacttgaatcaagaagtggtttaactcggtgtcacgtacatgcatacaaacacacacaaaatgggtccgagcaaaaccccatcaacaagaacaaaacaaaaatccacggatgcccactatgttccccatgcacaattcatcacaatacagcaaagcaactccaaaaactcatattcaaactaaattgtcaaatacatttacaaaaaggagaagtgtctccaagtcaagcaacaattgttctactttccaagtttacaatgtatcatacaggagcatttccgagagtggaatcagccagaggaccactaagggcaggagccttagccgcagtccctgatgcagcttgaacatccacaataatatcctcaggaaccacaacaccaggtttcttcacaagaagacgactagcatggaccactttatccatcgctttgtcgtaccccgccttaaaattttcacggtcgccctttaagaccttgatgttccgtttggtagtttctagctcctgcgacacaaacttctttgaagcacataggcctctaatggtagaatccctagaaggcagtgaattgctgagcgttgacacctcctcctgggactctttcagctcattcctcttgcgctcctgctcctccatggtaaactggtggctctagtctggagtggtaagggagctggaggcatccttgtagagcttatcaaaattattccgaaaagagagcagcatccggttctcagccttaagcctctgtatccccaccagcggatgggagaattcttgacaataggtcgacaacatggaatatgcaacctaaagctcttggcaagttacctcatgggttttcttctccatgtctaacttcgattgcagggaagatttcatggtgcgggcaccatcaaggaacctagtgaattggtcaagctttgcttg

SEQ ID NO: 155387 - DNA, 732 bp, Zea Mays
gatgcaggtaaatgatatcagaatcacttattttgcattcactcatgcagtttccgttcttcacgtacagacaactaaacagacgttcaaccaaagtcaacgcacacaataatttaggatggaatggtgcgggtagcggggtaaccaagtttttgccttaggttaggttggtcaaacggcaaaaacgaaacattaatttgacacagattctacaactcggacgcaaatcaggagaaaagaaggcagtacggagataactggatgaaggaaaagggtgcaagttgagtcctattgttaacctacgtaaccgtctccactagtagtagcattattcacactttgggacacttccttttcgtttgaatattaagattggttctttggtcaaagaatccatgcgcaaaaggcacgttctaatatactatcaacaagttgcggctagagcatatactgtgtgtatatatataagtagctaggcaagaacaccttaggaatgcatgaatatttgtgaaccaacttgtagagctttgtgagtgaccatctgaaccctacgaaaacttccaatcatttcccctatatagacgcgcgcattttgctaagaaagaaaaataaaataaattcgtctgcgatattcgcggcgcaccaaacaattgttgtactatgtactagaactagtacaacacaagccaagaaaagaaatcatttgggaatgttctcaagcacgtcctcgcg

SEQ ID NO: 155388 - DNA, 509 bp, Zea Mays
gttcgatagtaaccaaaaacccccgtgtagtaccacatagacacacaaaccgacaatagactatcggtttgcactagttgcaaaaacagcacaagagcacctcgaagctagtagatacacgaccttcaatcaccaccggtagatggggcactgtagttcaccctctcaatccaccgcaatacaaggcacctgctcgatgaatgacaccaccacatgatggaaaggaagaggatgagaaccagtgcccccagagccgaacaagttgattgttttcttggttagagtgaatgaaggaaatcataggagttcatgcgtccttttgtctcaggaaaagagatatccgctcatatttgaaggagtggagcagtcctcggtagttatggctacccggatcacatgaatggcatgcctcctagggcgaggtggtgttgacgccaccaccaagagctacatcctattgtccttccatgcgagactaagcaagaaaaggataagggcagctggttggg

SEQ ID NO: 155389 - DNA, 569 bp, Zea Mays
tttcgatggcaggcgacgatgaagaagcaaggatccctacagacttcgatgaatgtgttagccgccaagaccttgaggcaaacaacaagctcctgaaggagcaaatggaggagacggtccacaagtcagtgcatgatgccttcattaacatggaccttggtaggacttacgagaggctggatcgacgattgtcccagatcgtcgacagacttgctgtgttggagacgcaacaacaagcaccgccaccaccacctcctcgtccacgtcttcccaatgatgcggtgattgatgaagaaggtaattatgaagaagcggccaccagagatttgcgcctccgtcgtcgtcttcatcaaaacacagaaggtatgccacaccgccagcaaggtaataacaatcgtgctccagacgacccttatgctaagattaaattttctatcccatctttttctggtcattatgatgctgagggatatcttgattgggagatgacgatagaacagaaatttgttgcccaccttgtacctgaacgacatcaagttagacaagccactagtgaatttaaagatttt

SEQ ID NO: 155390 - DNA, 450 bp, Zea Mays
cactgaactaatggttaagtggaacattgacaagagaatgttttctttaactttagacaatgcagcagccaatgaagtagcagtcaaagatataattgttgatctcaatgccaatggtaacgaaaattcttcattagtatgtgatggtttgttctttcatgtaaggtgtgcttgccatattctgaacctagttgcaagggatggactaagtgtaattgcacccacaattgagaatataaggcaattagtgcttgctgtgaagggatctccattgcaatgggatgagctaatgaaacgagcagctgagtgtggattggatacaaaaaagggcctctctcttgatgttgcaaccaggtggaactcaacctatatgatgatacgagatgctttatattacaaggctgcattcatgaggcagaaatcatctgatcgtcgtaggtatgagaaaat

SEQ ID NO: 155391 - DNA, 588 bp, Zea Mays
cactccgcaagaagttttgttatggattctttggatctattaccattcttcttggttaggttgataggattgttctttagtattaagattctcgactagatcggtaatggcgatattatattatattacagtggttttctaatccctaatattgctatataacccttgacttcttatacttttgttttcttgccattatattgccacccttgggcaatatctaccttgatatattaaatctctgcatctctacttttctccttgataacgctttctccctaactcacttcatatccttggttgtatcatttatcctcactttaatagttcacggttatcttatttctcttttggccaccaataaatatgtattgtctaactccttgctatttctttcccgactccttgattttataatatctttcttattccaaaccttgtctcaccttttgtttggttgaatgagtagaattggattgagttgtgccggtatgcttgagttcatgttagttgtttttgtgcccttgtttgatttgcttctttgatatgattgttggtgtattgtgtgacttttgtccacaatggcat

SEQ ID NO: 155392 - DNA, 501 bp, Zea Mays
tagatcctctctggtcgcctatttgatccttcaggtccacacatggctgctgcgatccatgaaccccattgagggcaattgtaagaaggaatcgaccttatgatgtcaaatagtcagtatatacaacttcaccatagaatattctcaccatagtacctttaaggagttgaaaggatcgatggtcaacaaacaactacaaggtcatccacttcaatggcatctaccaccgtttatatgctacccaattgagcagaggagatgatgttgtgctcctcgaagcagttaaagagagctttcacaacaagcctagtgaaactgacttcaagcaagagcacaaggggcccactctttgccattagtccaagtggtatgcgtggcatagtgatagtggctccaatgatgagaacaaaaggtaccatctcaacttggacgatgattatagcttcccatcattgaacaacgctagcccaccatgtcctattagccacaatagggaaagag

SEQ ID NO: 155393 - DNA, 738 bp, Zea Mays
caaaattatgagtaaccactcgcctaagcgagagaaccagaaaacccactttttggaagccaccgcaaagcgaaaatgataatcatattcttccttaacatgataaccatccagggaaccaccaagaatggcatggaacgccaaactcatagaatgcttagaaagcttacaagtaaagcgtcgaaaaaccgcaataagtagaaaataaccttcaatgaatggtgagggatgatgaaccgatgaagagaatctatgtagaacttccttttgaaagcataaaccaggagccaaatccaaatcaacaatgttgagggacacatgattgtctcccactgccatgagagaacaaaggtcgaagaacactggtaggaaaaggcaagaaagatgagaggaagcaaagattcaaggaaggagagaaagagagcaaaccaactgaggaactagagaaacccaccattcgagagaggaagaaataatgtcggcagtggcgaagagaagagggggagggagattggaggagaggatagcaggaggaagaggaaggagaaagcaaggggagggagcggtgagagcaccattgcttaacaaaaagcttggtaaacttgttgtaccattttagcacagtttggtgtccactttgacttgatgtggattatctaatttttttttgccatttagctagtttcgaaggtcaaagcagcagtgaaggggtaagtaaataaaatagatatgagagtc

SEQ ID NO: 155394 - DNA, 559 bp, Zea Mays
atcctctatataaatagtattaccagactctattttatacattcttttttccgcattggacgcgcacagaaaaatatcatttgtatatctcgtattaaaatatgatgtatattaatttttcttcacctaaaatagtatgcctttttattacaaagttttccttggcagatcttaaaaaattactatgcagacatctaatagtattgcttgctgctactcattcttcattaatttagctacaatacttattctactgcatgttattgtacatttctagtagatctgaagtagagagacacgaatagaggagccactacatttggaggtggttgaggacgtactctattttaccggaccctttagtgcatgttgttggagtgaaaaagttgatcagcgtgcgctagatatagagtagaggagcatataacgcacaccttgctggagagagtataacaggtggtggcagcgacgcggttctactgcactgctgtggccgtgcgggatgtcggctagttgcctccggacgaaccaccgaaatgcgttgcgtttgtgtacgcac

SEQ ID NO: 155395 - DNA, 503 bp, Zea Mays
caatttttctttctcaagtctgtgtccacttgatcgatggcatattgggagaggtgattaaatttgctgagatattgcatcacagaatctcccccttgcttcagacgtatgaactcctccagcttcatctatagcactccttctagaacataatgttcccttaatgccagtttgaactcttcccacgtgacctgatatcctgcaggctaaatagttgaaaaatttgcccaccaagtgctggcaggacccctcaactgttgggcagcgaataggggcttctgtgtctcagtgcatcggatcagccaaaacttttgctccataactcgcagccactcatcaacttctagaggttcttcagccttaacaaagagtggtggacgggttttagagaactctaaataagtggtgtctcgtggcccttgaaattgacctcttcctccgtattgctgaaattgatttcccgccaattcacgcataaatcacgtgttgtcggcggtagtgtt

SEQ ID NO: 155396 - DNA, 474 bp, Zea Mays
accattgtcaacaagcccaaaatgtataggtgagtggccatacaacacttcaaacggagaagttccaagagccgagtgagaacaagtattgtaccaaaactcagccaacggcaaccagtgcgcccatttcttgggagaagagtggacaaaacagcgaagatacgtctccagacactgattcactcgctctatttgtccatccgactgaggatgatatgcactgcttaagcataactgagtaccagccattttgaacagttcttgccacaagtgactcgtaaagaccgggtccatgtctgaaatcatagcaactagtaacccatgtagccgatagacttctaacaaatatagtttagccactgaaagagctgtaaagggatgagccaagggaagaaagtgagcatacttagaaaacttgtccaccaccactaagatgcaattagaccgattgaactgaggcaatccggtgataaa

SEQ ID NO: 155397 - DNA, 823 bp, Zea Mays
ctgaaataaaacaccacatattaatatgccacattgtttctcaataaaacaaagaccatggaaaatttagccaaattgagtgagagaactgtccaaacataggttaaagttgtaaggcaccttttttccaccatacagttgctaaaaagttggaatataaagaattctaatcaatagatcaccttttaaaccacaaatgatgtttccatgatattgagggcattgtattcacatgagagggtattagagtacaactagtggatgaagacattgttgggctagctactgaccttttgtgataccaggtttcctataatcctctctattcaaggcatacctaggtggtgtttatgtccactcaagtaaaacaccgcacatcattatgccacatcgtttctcaaaataaaataaaataaagaccatgggaaatttagaaaaattgcgtgagagatctgtccaaacataggttatagttgtatgtcaccttttttccaccatacagttgtgaaaaggttgtaatacaaagaatacaaaacaatagatcaccttttaaacctcaaatgacgtttctatgatattgaggacattgtattcagacgagtgggtattcgagaacaactagtggatgaagacgttattgggctagctaatgaccttttgtgatactaggtttcctataatcccctgtattaaaggcatacctagatggtgtttgtgtccactcaagtaaaacatcgcacatcattacgccacatcgtttctaaaaataaaataaagacaataggaaatttagccaaattgggtaagagatttgtccaaacat

SEQ ID NO: 155398 - DNA, 313 bp, Zea Mays
ggtggcggcaccttctttctccacgggcgcagcaatggcagcgtcggttggcgctggggaattagactcgcgtgaggaggtagccgaggagaggaacgggtcacgggcgcgctaatatacggcgcggttgaagtccgagggcggcctgcacaacagccagcaccggcgttatcgcggcggccgttgcgcgccagcgagcgaagaaaggggaagattcttgtagaccgggcccgcacagcagtggcaggtggaattcgtgcacgtaatcacaaacgccgatagggatggcccacccgccagtgggacggaaacc

SEQ ID NO: 155399 - DNA, 625 bp, Zea Mays
gctatggcaactgtggagcagaagggagaggagaagtgggaatagatgatgaagatgatggattgggtggtgaagaagttggattcagtggaagctagacaccatcggctggaaggacaagccgagctctcagctacagtggcaaggaagccagacgaagagcgtactatattggcaaggcagatggaggagacgggcaaggtggtggcgcagttacgtttggagatgatggcaatggacttggagggagatggtgctggatcatcaagggaggatgctgatcaaggtgatccaaaccaaagaagaggagaaccacaacaggagagagtaagagaagaagaagatcaggtgatgggagggcgaggacatccatctctgcccaaatatttgtttcccggatttcaagggaaggaacctggaatatggttagccaagtgccaagactacttcaccatttataaggttccggaagctctatgggcaatatcagcatccatgcacatggaggggaatgcaacgaggtggcttcaagtgtacaagatgaggcagggactgggaaactggatgcagtttggcagagctgttcgggccaaatttggagtggaagaatatcccaaggccatga

SEQ ID NO: 155400 - DNA, 1243 bp, Zea Mays
gcttttctctctttagacgttccacgagcattagatgtgtccaggataagtcttttttagcttcagttcatcctcctccaactgaacaattcatgctttagcgtcactcttagctgttagctccatacagtcaaattagctccatacagtcaaaattaagcagtttaaaaagtgcatacgcaccctacttcacaaagttaggaaaccatacatgattcacttcttcagccatagacaatatgtggttcaaatggagtgacataatagatacttatataccttagaggcaccgacatgattaagacaaatgcccaccagaccaacaccggaacctagctgcttatcatgcaaaatgttagagcaataatcagaattaacaaaacctgaggatactcctcaattgcaaacaaaaaaagtaagcaccaccacctaactatttttgcaaagaaaatatgtaggtaattttgcacataaataaagtccaagcccacaagttcttgtttcgggtggagattggaaggacttctcgtttagaccaaattgacgcattaaggcctcagtttcttcgtcttccagcgacttagctcgaaatttggtatcaatgggttggcttccattctgaagctcgagctcaacctcatgtatcattgcagagagattaaaatcctccacaacattatcacaaataggtccttcaattccatcgtcaaagcccaagccaagaatagcattgccagatgctagggcttccttttcaaactgcttccaaagtcgttctcttggcgactcggaatcactatctgagggttgcccaactgggctatgctctattccaagcatatccaggaactcattagcaacagaatctgttgaagcatccatgctgcgtgatctgcccttcctactggcagacttgtaactatcagtcacccctgtgcagctcaatcggcgagaatgcttatcttctacaactggtgattcaaattcctctggctcagcaactgagagctccttcaaaatacatttgtcctccagttccgcatctgctccaaactgaccctctgcttcaagagcagcggtaggcagtgatgaagcagctttgactattccatcctgtttatcttccacattctccatttgaacagcaacgtcactgaagaccacctcagttttcactccaacagtctgatcttcagcgacatccccttcttaacctctaccgatgtgcagtgctttgcctccg

SEQ ID NO: 155401 - DNA, 518 bp, Zea Mays
gcgggattaaggtttcctttgaacgaaatgattggggaagttttggaaaattacgaaatctatctttatcagctgacttctaatgctatcgttaggctcactgtcttcatctgggctctccgaatctaaggaatagactcgaatgccaaagctttttgccgagtgcacgagcttcattatcagacgaaggccagagaagatggtcttcatgagaattttggttgttacaacttcgcttacagcaaagatatgaagactccggtggttagctatcgcaccaagtggctgactggttggaaaaatgagtggttttatgtgaaggccgatgagaagaagagggagaagctcaagacgctagtactgagccctctgagcttaagcttcaggttgactaggcctctatgccgcatgacatcggggtcaccgtgccaagaagttgtggcagaattctgggtggtagccgagcagatcgggaccagagatctagtccaagaatatctagcctataaagtgttccc

SEQ ID NO: 155402 - DNA, 508 bp, Zea Mays
ataaaagataggttagggcacgaaaaacctaggataagcaagtttatgatgtgaaaggattccgtgttgagtggtaatgcatctgaagatcgtgtttgactcctctctttccttgacgaggttgatattttcttctccggtcttgagctcattgattcgcggtgagtgcatatcatcgggggtgggggaatgtgtttaagatagatttggatgagataggctacatgatgtaggtctaaagttcatttgatgttaggtgggaatagacagattatgcaatccatcatgacactattggttgggttagctcttatgttcacggtagagttggtctaatgcactaattttaggtttatgtgcatgaggagagaacaagatttataggagtaggatcgagtttattttactagtgttaactttttaagggctatccttaggttagctcaacttaaggttagacttcatcaggttagattaacctattaggttggatcagatctagaataaa

SEQ ID NO: 155403 - DNA, 777 bp, Zea Mays
gcggcggcggccgagccttcgcaggtggcggaataggggttagggattgcaagtgaactttttgtctgtgtgatactgaacctcggttgctacgcaggttccgacgtttgggcctgcgcaagcaaccactactgacaatactgattttgcggcggagacttcaattgtagtgcccgccgatgatagtgtgcctggctctatgtctgaatgttttgagtccgacggtgagtctgggagtttgtttccttagacggaggagtcctcggatgaaggcttagattattttgttgcgttggatgtggctgtggtggagactttgccacgtgtggagggtgctaaggatcttcctggtacgagtagtgggtgttcgcggcgaagggtggtgggaaaacagtgcgttggtgaattttcgcggagcggcaggtgccgtcgcatggagatggagcgtggccgacttcgagtagacggggctggtaaacgagaattgttgtcttcaccgaacggggcaggcataggcgaaaagaatcttcgggagctatttgagggtgaggaattgaggataatgctgtttaattacagggagatgggtatcattccgaaggttgagccgatgtgataggcgatgccctcgccgtgtgtgtgtaattgtaatggtgatgtggcatgttggccgtattcgtacacttgtattgttccggctgcgtacgtgggcggctttgtgcggagtatctttgtaatgatagacttcgattaacgttattccggttgcgcccttaa

SEQ ID NO: 155404 - DNA, 734 bp, Zea Mays
caggaactgctgatgtattttacctaatatattgaggagacccatcagcaaaagccaaggaaggatgacattgtagtgactcaaaagaataagagatagaggactgcaaagttttatggtgatgaatatattatgtacacgaagaagcatattcctcttctaatactgacttgtaaaaaaacagtaaagggtgttttattttagacgtagatttgaaagggtacttgatctaattactctacttttaaaaataaactatggttacctagatttggacggatattttacagaacggctaatataaatgccctattattattatcaacaatttgtccggacccaacatgcatgctgtagattccgacttgaattaatcctctctttagctaatcgatgaacgcaagctgcacgcagcatccactggctgtggcaagcacacgaccgaactcttttgtacgtatgcatgtacctgctacgcgcaacatcaccggccggcgcactactactagtcagccagctgcaagtagctcatccagagacgacagtttttgaccatgtgcgtcacgcacgtctcgccttcgtcgccacacccgctggtagctgcaagaggacgccgaaaacgatgcgcgctagctagatgttgcttttttttgctagtagacattggatgcatccatgttcggtgccaaatagacatcacctttgaagtttcgaatggattcgtcgatccgtct

SEQ ID NO: 155405 - DNA, 288 bp, Zea Mays
gggcgagtcgttgctaccatcgcactaggaacaaggctcatatcgtccaaaggtacctcgagggcttgaaatctttgttccccttttctagattcgtgatgtgctttgctcaaatgagtgaatctgtccactaagctgctgcatcttctctaaattacttaacgaatgtagcttccaggatcctcaacaaaacaaggatgcagcatgaatctggccactaaacaaggagagtcgaatttttaaatgttcacagttaaggctaatgtttagttcccgaaaaatgtatct

SEQ ID NO: 155406 - DNA, 488 bp, Zea Mays
cctccctcggtgagcagaacacccctcctctgttcttctccctctcagttccctgtgttgagtttgcctcttctccaccccttttcacatctcttccaaatctgtgaattcctgtgaatccaattggtggaatgagttcaagtgtctctattgtgtattcctgctagcttttagctccttcgggagggcattcccacctcaaatggtcatttcaccaaaaccctagatccccgcacaccacgtgctcggtgaaatgcccaaaccagccaaacttgctccaattgaacccaaatttttcaggcaccttcacaacacttccagcaacatccttgccaaatttcacgccaatccgagatcccaggcttaaatttcaccaaaatgcccgttttgagcgatcgtttccgagccgagtgcccaaatccctatttcttcgcctaaattcaaaccaagcacacacttcactcatattgacctatataaacctattc

SEQ ID NO: 155407 - DNA, 787 bp, Zea Mays
ccatcagctatgagccaacactcctccgatttcactcggcgtgttcattgcacgagcaaagtcagggttcaggtttcgagcgaagatagaattctctcggcttgttctcaatctcggtcttgagcctgccgatggtcacgtcggcgagaattcctcctttctctgaatagtcgttcatcaggaatttctcctactttcgagtcttcatcccaggatacaagctgcactaggtcttgctccccaacctcatgatgtcaccaaatattccggcgtctgttccttcgtcgtcgagcttctcgctctggaggttcttcccctggcatggttggctcgtcgtcggagatgggagatgactccaacctccccccgatgaagaggacgtcggggtagaaaggagttgctgcagtgatgaattcctttccgtccttctttgagggtgaaggtgtcggaaggataacttgacaagcttccaccttgcttgcttcctttttccttgtaatccgtgtccactcctttgtgggcgaagtgggcaacgcggttcttcgagcaagtgaattcccggctctcgatttgcaagagacagtcttcgtctggggcgtaggaggttgcacttttcgttgtctcattctgactttctcggagatttccaaggaaggcttcttctctagtggatccgctatgaggtgcagaattcccttctcatctgctaaggacgagatggcctcgaagcagaatacggatctagggtggagggcaatcttgcattgggaagtgatagccattgagc

SEQ ID NO: 155408 - DNA, 724 bp, Zea Mays
gggctcgcgcggtcagtcacccaccagcctctgccgcgcacagcttgccttctcgcacgcttgctccctatcaccgccaggcgggccccactttccagagtcttctcccagctccggatcaggacgaactccaacaaacccgccgctccgcattgttcggcgggggaatggccacgtttggccgaaaaccgcgggccgttgcaaccgcccggtctccctcttgcgcataaaagaccggcacctcgcctcgttcctccatccgattgggaatcgcacgatgattcaacgagttctggtgaggttgtaggccgggactgccgccgctctgcaaactcgctcgcgccatcgttctgtgcacgcggtcgggccggggagcatcgttggtgggtggtggtgtcgaccgtgggctcggtggtatggatcgagtatcggggaggcgaattgttcatcggttcttgggcaccaccatcgggccgcactccgccatgggcggtggtctccatgcgataagatcgggtaaggacccttcccgtggattagctttgaacgcagtatcttgtagatgcagttgatgtggggaatcgagcactggaccgccgggtagcgcttctcaggcgagctctgccgtgtgaagtgagcgcgccgccacggctggggagcgtggtgggggaaaatgcatcgtcggctgttgattcggaggagtaagggaagaagaacatgccct

SEQ ID NO: 155409 - DNA, 619 bp, Zea Mays
cttcgaggccgaggtggttccgcctctcccgtcgccaactgctgtcgtacccttttctggtcctcctccgaccacgtagcctggtcatggccttgtagagttttttgaaatttgtgtaaactatgctaagaacttagttgttttgaatcttaagctctcagttgtttgccatgttatttttcttgttgttttgttcctattgccttaatcttactacggtgtccccgttagaacgtgagtttccctttaggggggaatagtgagtgaggaaaccatatccctaaggcgtatgtgttcctgtggctcgactatctttcctagtcgtgatatcccctgttgttgaggtttttcgcattatgactaaggcgagggtacgaaatgtgttcatttttaaaactataggaaaaaaacaacacagggaggggttccccttgctagcccccgagggaggcttggtattgaaagcaaggccgagcctcccttgaaagctattctttattaatcatgaaaatcatagtacaattaggcatgtatgcctaaggataaaagcgacgtagttgttctatgttccatgcattgtcgtagacttctccttcctcgttgcagagcttgtacgttc

SEQ ID NO: 155410 - DNA, 980 bp, Zea Mays
tgatgaaatgtccagacttcccacagttgaagcaaccactggaggaactgggaatagcagggaaacgagtaccgggggcactcggctaattggtaggagcgggggcagtagtgggacgaataaagataggctgcttgaatggatatgaaggtgggcgaggcgaagaacgattttgattaaagggtcggatcaccaacctggttctcttctcaggtccttgattggacctttcacctccaaacccctttgattttccatgtcctgcatttttggcttccactgccagtgctatacttacagccttactgcaggtgaggtccaagcatgttgccattttctgctgaagcctgtcattgagccccctcataaaacaattctttttctttatgtcagtatccacctggtcaatgcatactgagagaggtggttgaatttgttgagatactgcatcaccgtatctcctccttgcctaatccggataaactcttctagcttcatctggagtactccctctagaacataatgctctcggaatgccaacttgatctcatcccaggtaatctgatgtccaactggctggattgctgagaaatttgcccaccaagtactggcaggccctcttagctgttgtgcgacgaacaggggcttttgcgtctctatgcatcgaattaacccaaacttctgttccgtcactcttacccattcatcgacttctaaaggttcctcttctttaatgaaaagcggtggtcgagtctcagagaattccaaataagtagtatcacacggtccttgtgggggaactctgcctctgtggggttggaattggttgctcgccattttgcgcaaaaagcacgtattatcagcggtggcattgacccgggcagcaatagcctcggccaaaattggtagtactggtggcgggttaggaatatcctccccaccatgggatgtccccgcaccatcatgtgcgcgagtccgtg

SEQ ID NO: 155411 - DNA, 450 bp, Zea Mays
aaatgaatgggatgctcctgaatcaaaaagcacagaagcgggagtaaattcgactaggaactcactgagcactactcccggggcttgctgggcttcctgagcgtcgacgtggttgacccgggccctgccctggtactgagccctgctctgctggctgctggaaggaaacgccttgggggtgggtgctgatggaaccttggggccattcaccgagttggagtaggttggtcctggtgccttcaactgggggcagttgttcttgaagtgattagggtccccgcagtgccaacaggcatttgctggcggctggttgcttgcaacggagggtgcctgatgggagctctgactctgctgactgaagcgtgatggagagggtccagattgtttatgaaagcttggacccctgggtgggagcccaaagggtcgagctctctggtgacgttcttgctg

SEQ ID NO: 155412 - DNA, 625 bp, Zea Mays
ggataagggaatctgggtctacatatatatactcctagaactagggctccgggttgttcgaagtttactgctgtcaggatttacggccaagtgatcggactcgtggagttcgttacgatggcgaagaggaagacctaacagcgcggtcccatagctcaatccgacaatgcactattgacgaaggtgtcccacatggcggtggaataaggaaacacaggcgcacgacattggctggcccatgggctccaccaggcagtgactaacacgccgcgtgcgtgagtaaggaaagcttaaggtgtggtccccgccagtcagtgaaaataagagcgcggcgcggttgtgtactactggtgagtgggcctgccaagtcagcgactggcacgagctcatgggcgtgggatcaatctgacaagcggggcccgtctgtcagcgcaactgcgcaagcacccatggttgggttgggccaagggatgaacggtgagagtgggccgagataggaggttcagcccacggcgctggaattattttccctttttattttctgtttcctattttcaattttcaaattcgaattcaaatttggttttggatttcaaattcaattaaatgcacaaaaaaactccag

SEQ ID NO: 155413 - DNA, 420 bp, Zea Mays
tgggagaaagctggttcttgcggtgccaggaccaattcgaccagttcatagcgggctacctggacgtgtcttggacgccggttttgtcgtcgctggagaggaaaacccggttctcggtgatgctgtggcctcaccagctgttgtgcaagctcacttcagctttcgaggtgacttgcagcgcgcacaagaactggaaagtcgccgatcctctgttgcgggacaggttgcgcgaagcggtgtctcacaaggttctcccgttgttgtaccgaatgcaggtggagtgtggctccgagaagctgcacaagtccgcaacgtacagcgtagatcaaataaagtctcagctgctgaaattgttcgagggttgaagcaattattgtcagtggttaggttaagggaatttggatgcagatgcatgttcgt

SEQ ID NO: 155414 - DNA, 651 bp, Zea Mays
atagtatgtagcacaaatagtccaaatcacagttcgtagcacaaatagtccaaatcacagttcgtagcagaaaaagtccaaatcacagtccaaatcataagacatgtagaacctcactttctcctagtcttgcccttgaccccaagagcgtcggtgactagactataagggttacgtagccgacgtcgtatggatggagtaggttgtgatgactttgccgaagcagcatcctataactaggatagtccaatcatgtcgtgaggaacctcaatgtcatccttgtccccctcgttctccttgtcctcctcgccagcaaaggtttcccgcgtcgaatgtgatgagttgtgtgcagctgtagaaggtccaagtcctagcacgatggcatcatgtcgctgcacaggaggttgtacgtcaattctggcgctagacctgcatccacaacaagcagcagcatgacgtagccgacgtgaatcctctattgttcaaaagctagttagccaccaagttttggacattaaaatgtatgactttgctactaacagttaggacttactaagaggaaggcaagcaccctgttgccagaagtgctctgtgagaaacgctcgatgtcaaccacaaagagcatcatagagtttccctatgaagtggtcc

SEQ ID NO: 155415 - DNA, 426 bp, Zea Mays
ccgtcgattatagcgcagtctctgcttctgtgttttaatcttttggcttcgctttggtcggaatgatggtaatggacttggagataaagggtgataggtgcccgccagtcttcggccattattagatttactattcggtgaccgtcgacgtcttgtgttatttgtaggccctcggggtttcttacgtctggtgtgccgattgtgtgaaaatacatcaaatgtcaagggttcgctcttcgctgctactttggctaacatgtcagcttcttcattcttgttccgctcaatgtgttgtaaggtgaatcctttgaattgcttttctaaacttcggacagcagcgagatattgcatgagtactggctctttggcggagtagtctttttctatttggccaacaactaccatggaatcagttttgactatgca

SEQ ID NO: 155416 - DNA, 647 bp, Zea Mays
tatacggaggagataacgaaggtaacttcctctactgtctaccagacaataaggaggtcaatgtttgccgtgaaatgatggataacatggggtgtccaaagcttgaacttggtttgtctacgatgatgaaggatcagcttgcagatagccttgcctacagcagcttgaaggttagtatactttggcttgtcattttgtaacttttgttatggtgaactatttttgtggtaattcttatcgtcattatttgttcactcttcgtttgccagggcttgattctaagcaaggctctgaaggcccaaaaggatgcagaggatgagagctatcgaatagcgcttgcaaaccttcgttcggaggtcataacattgagaaatgaagctcttaaaaaggataagatcctactctctttggtggagagattaaaatctagcgaagccaggctttctgctcaagctgaagcccatgaagccgacatgcaagagctaaagaagaaagttgtcgaagcaattgacaatcttaatgttgaagtagtaaaacacggaatatgtgaaattgaaagatcaagggcatagaaaaatgtcgatgagcttcgtgctgtaaaggaaaaatgctatgatatggctatggaatgtgctaaaaatctgaag

SEQ ID NO: 155417 - DNA, 428 bp, Zea Mays
tcggcgatggcatccgccgcggggtcgggcgtgagccaccgcgcgtcggtgttgaggtgccgaaccacgcgctggcgtcgatcttcacatgaacggttaagattaggtccatcataccctttcggtcaagagtatctgtgcccttagatcgtgatcggacgttctggtgtttgggttgagctctttaaaatctggtgcattgatcatcaatcggacgggggccagcgcttaccgattgatggacgggtggatctaatccgagccgtaggtgtaggatcgtgcggtcctggtcgaaacataccccttcggccagggatttttgctaaagaaaccccgccaagctttgaaaccaacccgcagtcctcgggtactattcactgtgtcttaggagtcttgcaccgaggcccctgaccttcctggaattcgaa

SEQ ID NO: 155418 - DNA, 514 bp, Zea Mays
ccaaactcgacaatgtgatccggtagcaactccactgccgccaccggatcgctagttgtcttctctgatgacggcgtgtttgacaacacggccgcggcaaatggtgacgaagaagaagaagacgacataacataccgtctgtggcggcggtcggtctacttcacgcgggccagttcaccggcggcgagaaaaagcgggagatgtgcagcaagtgctaaggcaaaagaatctagggttttctgtaaaccagcgggtacaaaattctccgtcgcagccgcaacggctttcatagacccgaaaaggcgcctcaggaaaccaacagtcccacagtaaaatgacacttgtcaacggtcgcatttcaaaaaaccctacggggaccacttcaacctagcgagggtagcgtttcggccatctcccaggaaagacttcaggaccagctcaccaagttgaaccggcccctcgggagtctagtgttggagcgaaggtcgttcgcccccctcatacttggaagggc

SEQ ID NO: 155419 - DNA, 423 bp, Zea Mays
tctggttgctagcatggtgtgtgcacacctctctcctccaccgtcgatcgaagcgcccctgattgatcgcctgtgggagctgcccgacagcgtggagctctctatcaccgaaggcatttgctgaggtggtggcgtcgcccttggccgaatggtttctgtagcttgttcgtccggtatatgagtctctgtagcttgcccgatgtcaatgttacggtacctagagggtcccgcaatgtgggcttacgaataggttctaggttgtgtcccgtactgcttcatctattgtcataccccttgtgtcactatcaagcatgcgtagttatacgcttggtaaggggtattgccccgtcctttccgacgtatgggccactatagagactccgttgctgaggtctccgcgactggagtcgtccggccccgcgg

SEQ ID NO: 155420 - DNA, 680 bp, Zea Mays
gatcggactccgccgctggttataagaatcttgctatgcacgcccttctgtctatccactgcaagctatggcttccaccatgaccaccatggggggataatccgctgcctgcctctggactaacgacccaccctcagcgtaccacctatcggagtcgccgaggcgccgtgaagctattggtgacctcgtgctggcttggacgtcttcggagcgtggtggattcctcgccgtagtaaagctccaccgcggaagcccctgttccacgtggtcgggcctcgtcgtcgcgccaaactcttggtatgatccccgaccacttttaccgtgttgttaggagtgcattgcacctgtccgtagtgattcagagtagcgtaacgccgagttgggggaactcgccggacttctcagccgtagaagcggcggcgctgccatcgcggggtaggaggggaagggtgtatcattcgaccgttagatggccgctgattcacggtgttgatcgggtacgtcggttttgaatcgaacgctcgtgcttcgatcgggattcgtaaaatactggccgctgatctttgatctgacgattgcaatcgcataccggttcgcagttacgccgatctaatcaggaacgttcatccgcgatctatcggccgaaactaaaccatactgtttcgacccccactttgcag

SEQ ID NO: 155421 - DNA, 524 bp, Zea Mays
tggggacggcgggttgttttctggaaattgcaggggctctttaagaaaagtgcacggcgaaggggtatcgcgagtctacaaccgtccgattagaaacgaacggcccagatgtgctctgttattaattgaactggtgcgcatccaggaccaactgatcccgatccgacggctcacgatgatttcccccaaatctaatcgggaacgttgattacgaatccaacgacgcatagtgactaccctgagatctaatcgtgaccgttgaatacgatccaacggcccgagcggcttcttctttctccctctgactacggcgctcacactacgtctcaacacccaggcgcagtcgaccgtgcgccatggccgatgctctatcgctcgcagagaaaggaaataaaagaaagaaagaaaaatagagctcaccggaggctagttcgtttaggaggaattgcccgccaccgttggccagcggcccggcaccaggatgcacctgcgacaacctcgcgcatgttctggatgaagccgga

SEQ ID NO: 155422 - DNA, 367 bp, Zea Mays
aagtgatccatgatttgttttggagaaactgataaggtaaaggtgggcagagagaggcagggccagatggtgtggtacagtatgggccagccagcaggcactgggccaatgggcggtcgacgtcgagttgccgagtttgggagggcagcacctgatcccgcgccacaagccttgcccgaaccagaaccccacttcggtgctacgcatccgctcgcttttcttctccgatggatgtgcagccagctgcccagctgcactgcaatcaaccaccactactactactacgcacctagctagctgcatgtatgacatgcatggtggaccgggtgcatgtgggggctcatcatcatcatcatccatatctcgt

SEQ ID NO: 155423 - DNA, 955 bp, Zea Mays
cggcccactagtgatacggccagaattcggggattctctcgagcgagatcatatttgggtctcttcttaatataataccatgagaacgatctttctctccccgaaagagtttatattatatatttgaatcaaagttattaaaagatgagccgatttcgagccctctacgggcttcccgacctcacacccatccccatcatgacacgtgtgaggagcgcggatgcgactcttcctccaatccagctgtcaccgatggcaggcatcgtgttctccatcccatgctacttcctccttcgacaccgcttgtgtccctccggatcccatcgccccgctcgccttctccttcgttggcccgactagcatctcctctaccctctacctctcacttcctcctcccgtagtcacagtgtgcagctctgccggcccaggttttgcgctcctggccaccacggtgtccctccgtcgactcctaccaccgtgtcctgtataagtgtgtctcatttaccaaaaactcccgctgtcggtacgctgcaatccgactccgggatactcgcacctctttcatgcctgacaagcgcgctccacggcactgcgatgccaatcggggctacctcctccgtaagaccgccctctaggccctccctaggtttcgctccttctcctccgccaatctccctccctaggcctactcctccgcaagaccttgtactaatgtcaacaaacttccattaatgcgggttgagatatgtgcctccattggcccaacctattagctataactccctctccctggtctataaaagtgagagggagacaccctttacgagggatggcacatcgatcctttttcggacaccatttttcctgtctttttacacaacctcacacattttactctttcaggctctcgcaaccctcctgtaatcggcacttagccactttcctacaatccaat

SEQ ID NO: 155424 - DNA, 383 bp, Zea Mays
acaaccattctttgcaaaattggaacttgtgtcccataattgtcccaccattttcctaccagtgaaaggcataaacaatatatacaaaaactaattgtgggcatcaaatgaatgctacagacatgaacacaactacaaatcatgtaggattagtacctagatcaaaatcataacccttgcattcagcctttgctataggttttccaaattgacctttatctctgaacttggggagctccccattgcagataaggtaatcacattgtatcctgtggtgtgcaattttattttccctgccctcttctatgaaccaagtatcaatttatcacattgtaacccatgtctgttttggtagacctcagccttagacgttatttgtcaac

SEQ ID NO: 155425 - DNA, 676 bp, Zea Mays
aagatatgctgtcggaaccaactgatggtgatatgatggatgtttgctctaacatttcagacgtgggattagaggtatcccgggcagtatctcgcgcatcgtcgaccttggaaggcagtcttcggtgtcaagaggttagttaggattgcccgactcccatggtggttactgaggatccttcagcctaagaggtggctgttgcagcaaacccagcctccaagggtggtgctggcggttacctagccccccagggtgtcgccggtaatgatccggctcgggtgggtagcgcaagctgcaacacagcccccgagggtgttgccggtagtgatccggctctggtgggtagcgcgagctgcaacctagccccgagggtgtccgaatgagctctccttcccacacctccatggacgtccatgtcgggtcgtctccaccatgatctgatggagtgatagtgatgcatacttctttaactttgggcaagggagttgccttggaggccagcgagccagatgccagaattctgatatctgctagtggagctgaatcaacccccgatgatgctctttagattgttccagttgatcttccttcgtcgagctacaacgcaacttctcatgacttgggattaccctcattttttctaatcttcaggtaacttagctcttttcgttctatc

SEQ ID NO: 155426 - DNA, 509 bp, Zea Mays
cgatcggtcaggggctcctatcaagcatctgtgccatattgttggctttggcggggaggacggacgatatcggcggccgtaatcattcaccgacaccataacccgagctaggcactactagaacctgggtaagaaatcgctctacgagttcgccatccacttaatttcaattcgcacccgagatacgtaggaatcgtgtaccgattagcgttgtaggcatctcagccatggcgggccaccgtatcgctaggcgcgatcgccggagttggcagcaaggtagaagaacgctccctgaccgttgatgcgaggatggagggttgagattagatcccgcgtaccctttcaccacgtttcgatctggttcgtcgatctggatcggatggacaaagatagatctaaagtaataaaaccctcaccgtttgattcggatccaacggatgcgattccgtaccggttcgcatgaataatgatttaatctggcacgcccgtatctaatccaacggctagga

SEQ ID NO: 155427 - DNA, 742 bp, Zea Mays
caaaaatagacgaccacgtaaaatatttggtcgtaaggactgttggaggcacaacatcgccacatccaaatgaaccgacgaccagaaaaaaatgcgatcgttgttttcaaataagactggtcgctaatgatgtataatggccatatgtacggagagtgaccgatgaccaaaactaatcaaaacaaggcgcgaaaaattaacagattcccgggcttggtttccctcacacgaagcatatttggtaactgcttatatgtagattcattaggccccgatctcctcccattcctctcttgatctcctccattgcacagattcgaaattcatagcagcagcaacgggagaacccatccctaatctctccggcgaccaagatcctccccctctactcgtaagaggcagcagcaagcatctcccctcccaggtgaccacatcctcctccttttgccctactgcaattttctcaaccatccttggtgagcaggtcctcctcccatccgcccagagaaggcagctgctggaatcacctctcccaggcgactacatcctcctcctactcctctcctccccagctgcagttcgcacacccacaaagggcactttgttttggcaaaggtgtgttcctgctcttattttctttctaataagaagtaataattagggtgacttgtaatacgtaggttactgtgaggcttattgtgccattatgtgaagttcatataggaatttcttatatcatgat

SEQ ID NO: 155428 - DNA, 361 bp, Zea Mays
gtcaccccacgacggaggccatggccggagttcccttctacgtgctctcaccctatttcaagctcggatagatgctacacgttactcggtgggtggcaaatggggtggatggtagcttaccggaaaccaaagcacgggtgatgctatccacgaagtgctatagatccgcagaggagattaaggtacgatgaggaattcatgtccctccgaccaccaataatgcccaatgagggcgctgccagctccagcgggctccgacgaagacccctgaccaagcccccgaatttgggagtcgttgagggtggattctcagtgtcgcgccatgctctcctcctccttctcgctattgctctccctcgac

SEQ ID NO: 155429 - DNA, 381 bp, Zea Mays
agtctttgttttcataccctaccattcaagttcacacttcatctgatcgtggtagtggttgaacgacagtgtcacccttcaaatgacatgtgtcgcataaaggcaccagggccacttaatactttaactagtgagatgtgtttctataacgtactacatgatagcaccagatgaagcatctgttgcacaagtggttgctgagatgctgcatagtacttgatcagctaggacaagcgtgcattcggtagacggtgttgagcagatttgttgtcactgttgagaacaagaaaggggttgcttaagccacttgccaaaggaccccaattgtttggtcagatgtccatgtcagatgcacagcaggttgtgcactaaggactccca

SEQ ID NO: 155430 - DNA, 673 bp, Zea Mays
agggcatagtggtcaccccgagttaattaagcgcgagcatgttgcaccatcttaagtcgttgccgacttaagccgattgctccgttagtagggcatagtggtcaccccgagttaagtaagaatgcaggtcgatcatgaacaaactgagtattcttgaagcctttttattgatgatatatttcccagtttacagagtacattgtcgtcccgatagcttttgaaatacagctaggggtaaaacttcctgaggtgttctatattccatgagttcctgatttccgtgccgtccatctgagtgagacgatatgatcccgaccgagtgacttctgctactatgaatggtcctttccataggggtgacaacttgtgccgtccctcccccgttagaattcggcggaggatgagatctcccactgcaaaggatcgacgtcgcatggtcttgtcgtgatagcgtctcagagtttgctggtaccgtgctgattgaattaccgtgttcagtcgttcttattcgagtacatcaacatcctccagcctagtagcctcggcttctgctatgctttcaaagaccaaccttggcgccccaaacttgagatcagcgggtagtactgcctcggacccatagaccataaagaaaggagtatttccatgcagagctcggctaggttgagttctt

SEQ ID NO: 155431 - DNA, 532 bp, Zea Mays
tgattgtttaccattagcggagttctcatataataatagctatcaagaaagcattaagatggcacccttcgaagccttatatggacgacgatgtcgcactccgttaaactggtctgaacctggtgaaagaaatttcttcaggcctgatatggtaaaggagacagaagagaaggttcaacgaataattcataatttgaagaaagctcaagctcgttagaagagttacgcagacacacaccggatacccttgtactttccagttggaaattatgtctacctgaaagtttcaccaatgaagggtatatcacgttttggggtaaaagggaagcttgcaccccggtatattggtccttttcctatccttgaaagatatggaccagtggcataccgacttcagttacccgaaaccttgtctgcagtacataatgtgttccacgtgtctcaattgaagaagtgtcttcgggttcccgatcgaaccattgaagtaacggatgttgccctagaaccagacttgacatattccgagcatcct

SEQ ID NO: 155432 - DNA, 819 bp, Zea Mays
ggttgattctaactaaactcaggggctcatgtgacaatagtgcgcactgcgcagcgaaggggtatcggccaatcctagccacacgatctaaaatctatcgtccagattagattattcttattacaaaacaacgcgcgatcacggatgaacgacaaccattaaattcgagatctgcgtaccggatccgttctaaacctatgatctgtgccaaccgcacgattagagatccaatgactcagatcataagccgtgaaggggtatgcggccaccaatctcagccattcgaagggaatcggacggcaccaggggattctccccacaagccggccggccgaggacggcgacccgagatctcacgacggtctctagccggagaaaatgccaatcgtgcactcgagccctaattaccctcccgaaagatcctacgtgtagaggagatcattgcgagcaaggtggatgacgtcttaccgaaggtggggcggcgaggttgtccgaccatagagcaggcgggtccacggcggagcagtaggtacagtgagaaaatctgatggccacaagcacaacccgcccaaggtgaggcttctcacaccctctgtgtcgtcgtgcgaagttcctggtgcggcgtttgagggcgtagaggcggggtagcgccgtttcgttggtggcggccgaagtcctcctgtgtactgggcaaacccgctgaccacccgagcacaggggcaagggaggcttgatccgggtgagggcgtcgcggggaaggtcggttttatagctggccggtggacacagcccgaaatcctagcacgggctacagatcta

SEQ ID NO: 155433 - DNA, 489 bp, Zea Mays
tgaggcacacaaaggcggcccttgaaacgaaccaaatcattctcatcaatggtgaactcctgaggtttaccatcgccaaccctctttcgagcttcctgcaataaacgatcctgctactgagccgcacgcactctctccatgagggaagattgaataagcatccgagtctcctcactagcggtgccgacatagcacaaagcgattctcaaacggtccagatcagcgatcaacgacaaggccacttttggaaccccggacctgctaagggcaacaaccaccacatttgccatcctagggtaataatgaatggacaaatcataatctttaatcaattcgagccaccaacgctgcctcaaattcagctccttctgagtgaaattatacttgagactttatgatcggtgtaaatgtcacaagactcgccataaagataatgcctccacgactttagagcaaaaaccaccacggctaattcaagatcatgggttg

SEQ ID NO: 155434 - DNA, 765 bp, Zea Mays
gatcaccacaagaagaaaattgtggtccgctggggaagtatgaaccaaaacctctgtcacatggtccttggccatatgatacatgaccagcatcccgttgggcacgaccaccacgtggtctcactgcctgagacttagcgacaagaggcaaaacacctctaggcctcccaggacgtctctgaacaggctgagcatgaacaccatgagagaggcggttcatgtccttcctgctcgacttataaacccgccgctcatctctcttcctcctaaagcaaaaagaagctagatgcccatccctctcacaatattcacaatggtacctcacctctctcttgggtggattttgtttgtagaaggcgactttcttttcagatgactgaggggctctaggaaggggatcgctagagatgttgggaaatgtgtcaagtgtgttcctaagatggttaggttttggaagccacacttgtttctgaggaggatctctcataggttcatcaatcacaccatctctcacagggatgactagcttagtagaggtggttttgataagcttgggagtggatgaaggtttctctgaaggtgtcaaaccactgcactcacccaccttcccaaagcaagcgacactcccatccttagtagcaaagcctaacctcggtccgcaagttcccctcttgaactgactgaccatcatgcccaactggggctcactgcacgacacccaactcaagatagatcgaaggtatgtgttttcttccttgatttttg

SEQ ID NO: 155435 - DNA, 349 bp, Zea Mays
aatagcggaacaagagaaagccgagacggccgaagcgccaaagcgtcctgccaaagctaatgaaaaaacgatcgaagaaccagaattaaagaagctagcagggcaaccaaaaaccctaagcccaccacaagagccggagttgccgaaggtgtccaaaattcctgcaataactccaaagaggaggagaatggccagcgtactagacgctgtcatggaatctgcaaaggtacaggctcttgcttcaacgcttgataaagaaggtgacattccaaagaaatctgatgaagctaggatatcacaagatactaccgaagtcggaccaccagcttgtactgaagcaaatacttcg

SEQ ID NO: 155436 - DNA, 467 bp, Zea Mays
gttggatcccattgaacacacgtctgtatctgtggcaccagataggtcaggcctctaagataataaggggattaatgccctttcttgcctgatcatcaagcccattgtatgtgcttgcccccagtcatcgaagtcgacatctgcaggctgaggagataagtcctgtaagccgaccctacgaggatataaaaccacacggcgagagagaacacaagaaaccagcaagtggttaattgtttcttcagcctgatcacacagcggcatggttcagggtgaggcagcccctttttgccaggcagtctgctgtccaacacctattatgtgcaatcaaccacatgaaaaattttcatttgttaggtgcccaacccttctgaatcctctcccatggtctgaaatgaatagcaccaatgaagaaatcctcatatgcagactttgtggagtaacttcctgaagctgccagatatgag

SEQ ID NO: 155437 - DNA, 749 bp, Zea Mays
gccgtgattcgtgcctggcacgccgtggatattcgcagggaggtaactttggacgtgtcgcgacctcgcggacctagcccgagtctagtaggagataattcaccggtggccaccgtagctcggtcatttccgccaccgtgtcatccatgcctcgctcctccctcactgtatcccttctttacgtggtaaccatgcacgaatggtgtactccgcggccgtggatcgttagccggaccaccgcgcctttaaatagccccgccacccatggcgaggtattcacatctccaccagtgagctcagttgaagcccaaattcgtggaatcctctccacctctcccaaaattggtagtgcacggtgaaaccatagtcctttacggctgtgtagccccaacctcacctcctaattctgcccggaaccgttgcggcgccattttcccccttttctatcaccggcaagcgaaaatcctccgcgccccgtggccagctacttccaggtctgctcctgctcgttttaatcgtgtttcagcacctatatacactcgtgatactcatcggctctgcccttcttgcttgtccacgctcaatcacccagaacacatgaacttgtgttcgatattccccgccaccgtggtcagactaagccagagccataaccactcaattcaatctcattctagggttgtattatgtccgtaatacttgcccagtcattaaattgggcagccatcaccaatcttggccggtccgag

SEQ ID NO: 155438 - DNA, 454 bp, Zea Mays
gaagacaactttttgcaccaggtatgggaattttgagttcatagtcatgtcttttggcttaactaatgcccctgcttttatggaagcaatgaataggatgttacatgagttcttggatgactttgtggtcgtgtttctggatgatattctgatttattcaaaaacggaggaagagcatgagcggcatctccgtctcgttctaggtgctcttaggaagaatcagttttatggcaaattgaagaagtgtgctttttggttgtttgaagtttctttcctgggtcatgtgattaattagcagggcattgcggttgatcccaagaatgtcgctgctgtggtggagtggaagagaccctctagtgtctcagaaatctgaagtttcttggggcttgccggatattatcggtgtttcgtgccaaatttttccagcattgctagcctttgactagactattgg

SEQ ID NO: 155439 - DNA, 530 bp, Zea Mays
cttcgacctcgcctaccgccacataaaaccaataatcataccagttgccccacttgttgcgggcgtagggaactaactcaacaacttctgccgctgattcctagtcctcggcgtaaaggtgcatgacccaaactgtgcaatcttgcttccaatttttctcttctgccagtgcaaacagtaattcttggcgaagaactctacggagggctgaccgctgtacgaagtcactgcccagacatacttcgctagggccaccacaacattaggtgtcaattgatggatctgcacgtcatacctccgcaacacttccaccacaaaacaatgtgcaggcaaccgaaggccggcagtgaaaaatgcctcgaacacaaccatctcaccctccgactcaggaatctcttccacccccagaactcggccaactccattcccaaaataccccaaccggtgcatgtcttgcacacgaaccgaggagatcctcgaaacaccgaattccaccgtgtggcccgggtgtagctccactgccgccaaat

SEQ ID NO: 155440 - DNA, 906 bp, Zea Mays
gctagggttagggaaggttagtgggccgaaacacgaatcgcggcccaactcgcccacgcgacagctcccgaccccgtcgcaagcgcccaaccaaacaaattctactgccctactggtgaatgtttttcctcaaattccaaattcccaaaacgcaacaaccgaatgagaaaaaacaaaaagaataacctcccacttctcttctttgcaaaccgggtatcacactctaccccccttaaaaataattcaacctcgaattctgacgcttctatcagaacggcaaaaggaaagactaatgaatcaacaacacttacccacaacaaaaagttccggatacttctgccgcatcagctcctcaagttcccacgtagcctcgcgctcagactgattagtccataagaccttgacatacttaattgatctcttcctcaatacacgctccgagaattccaatatacgcaccggacgacactctaaagtcagatcctgctgcaccgcaattggttccatctcaatctgatggtccggatctcgcaagaacttcttcaacatagagacatgaaaaactgggtgtacccctgccatggaatccggcagtagcaagcgataagccaggctgcccactcgggccaagatagtgaacggtccaatgtatctcgggctgagctttccagagacaccgaaccgaacaactcctttagtaggtgataccctaagaaggacttggtcacccacaacaaattccagatcccgcctcctcacatcagcataactcttctgatggctctgagttgccaaaatattctgatgaatttcgcgaaccttttcagaagtctgctgaacccaatcaggaccaaccagggatctctctcccaaagtctcccagcacagaggggagatacaccgcct

SEQ ID NO: 155441 - DNA, 1290 bp, Zea Mays
cgacgacatctagggcgaatgtaggaggacgatgggagacaatgtcgagggttcaaggagtgaaatgatggatcactacaaatgtttcatatcctttagctgggaatttgtgggtcctaaaaatctaggggcacaatatcatcaacccacttgcacttggtaattaacaggcatgcacaccatcgttctccaattggtgccaacttcttatcttcatcctcagaatgtacatgctcatcgaccatgttctatgtgatgcccgcttcttcaccatcctgcactgggtctggatggatttctatgttctctcctagctctatggctccatctccactgagttgttcgagattgtcatcacgtcaatgccctcttatcacacaaagtggatcaccctcaaatagcattttgtctgcagcagcaaaactcgcatcctccttggtgacaccgagttttgaccctcatgcaaggaaacctctccatcatgggttattgccatcacatgaagacccttgacgactccctcatcgatctcaatgaatttgtgtcaaattgcatgccaacaatcaacttccactgcaagcctaaatgagcgcctcacatacatgaggttcacatcctatagcgacaacaacctctcccatctttgatggggtgctctttgacccacaacttgaagaattcaacgtggcaccgacctcctcttcccccgcacccttgttaacgttcccgtggtggcctccaacgcaaccacactacctccaatctttggtgttagaaattatcattggcattgtggtgactccaacaatcgctccagtctcagtgctgatagcacccatagcacaactccctctaccaaccgactaccaatcatggaccagtgtcccaccctatataactccaacactatgactgtctagatgtggcctggtctgatcaggggcttccttgggcacctcctcgactagttgggtgatgcatcaaatgacatataggcatgtatagcatgacatagcccctggtgccctctcaccctcggttactcatggttcggttttggtgggcccttatggtttccatgggtcaattcccccatgctatagctttaggctagcgtcccatgttatagccctagatctacttgagattcattggttttgggccctaggaccaacattctatcgctggtgcctttagcaccatgacactcacccctccaacacaccacaggcgactagttcatggacttcggggccaccgctcacatggcttcctactctagtatatttt

SEQ ID NO: 155442 - DNA, 293 bp, Zea Mays
cagttaacgtgccctttaccacccttgtttcttaatgatccatgagcgatcattttattttgcatatccttggtaatctcgttgtctccttgtaactccacttggtaattaattttctttacttcaaccattttgttggaaccttacctatcttacccttgcttgttttctccactttgtcagtcttgccttaactctatccatggttatgcttttcatcattaccacctttacccttatcacctctatatcataccttgatgtttatcttatactagcctttaaaatatccg

SEQ ID NO: 155443 - DNA, 767 bp, Zea Mays
tttgtatttagagggtcaaatagactttttccaatatctaaggagcgcacacatttatatgagaattacgcatggggcttattttggtcatggatccaatgctgctctttgttttatactactggagcagagctcatgtgccttaccgcaaggtaattaaattagagatgcatggtaaactgtcaagtgtgtgtttttactacaagtgcatggagagcattaatcaaagagcaacaccaagtaatctttcactattttctttgttgtaacattactactcattactagcatgatggcaaccttttgatgcaattaacatgtccatgattgaatactttgcatgtgtgacagtggggttcatgtcatcagttgcttggacaattatatcatggaagtgattgatgcgtctttgcccttgcaaggtcggctgtctccctatactactataattcacctattgtccttttttgtagcactagacattctgaaactctagcacatcacatgaaggccattacatgccaaactttgaatttgtagctaatctgtgactgttacatgccaaactaaaggataatttgattatctctagagttcatactgttcctgaatgtcaatcatgcacagaccaaacaggagcaaataatccaatattatgtttgagatcaattcattggaaaaacataaaccaagattatggcgtggtggaggtgagctttagcggcagaggcggcagcgaccccgacgcgtacgctgtggtgctcaag

SEQ ID NO: 155444 - DNA, 1155 bp, Zea Mays
gcccaagttctggccaaccaaacctgactcattgaagtcctcactagaagtctagagaatcagcgcccgaatggtggaagaccacaggacaggatgggagattttctaaggctcaagcctcccacatttgctggatccagcaatctgctcgatgctgatgactggctgcgcacgataaaaaggaagttagaagccatcagatgccctgagaaccagcgtgttcatttggctgctcatcaacttttcgggatggccctatcctggtgggatacctttagcactgccgttagagatgctacctggggagaatttgaaactgctttctgagaacatcatgtgccccaagggatcgttaagctcaaggaatatgaatttcaggaactaactcaaggtggaagatctgtcagtgagtacgtgcacaaattcacagaattggctcgctacgcgcctgacgacgtcagcacagaagccaagaagatggcccgctttttgaaagggctaagaccagaactcaagactatccttgccagccaggatttcctcagcttctcgcacctctcaaacaaagccatacaagtggaaagggcaagggaagaagaaaaaggtcaccttaagaggaaattccaagtcctccgagctaagcagcaagaccgacaccagagaattcgatcctttgggtttccacccaagggaccaagcttcaataagccagttggacccactccgtcacgtttcagtcagtagggtcatagctcctttcagcccccctcagttgcaagcaaccaaccaccagctaatgcctgttggcactacggagaccccagtcacttcaagaataactgccccccgttgaaggcatcgggacctacttactccaactcggtgaatggccccaagaatgccccagtgcccacctcaaaggcaccctcctccatcagccagcagagcaagacccagtatcatggcagggcacgagtaaaccacgtcgatgcccaagaggctcaacaagctccgagagtagtactcggtgagttcctagttgaatttactcccgctactgtactttttgattcaggagcatcccattcgtttatagccactagttttgtggaaaaacatgtcattccctctacacacctagaaattcccttggtc

SEQ ID NO: 155445 - DNA, 731 bp, Zea Mays
gattttgaaagtctgtgtgtgcatgccccacgcaggtaaagacaaaggtaacaggatacaaacattctccctattctttatagattcttcgatacttatttccttcctgcccttcttccatatatcagataagaattttttagtccactttgaagcctcgttggtcgatattcggacgtggtcagcagaaactctaaaatcagggtcggtacaaaccttcagatgattgcacccgactttcagcaaaactgaagcagtgcttcgggcgcctatccatgcgcaatagtactcttgtgctgagagaacgattttataagcacgagtttcactgagcacccaccgcattaaaccctccaagtcaccatctgaaaattcttatctttagatgaagctccggcagaggagaaggtcttcaataattcattatagcatctgttgctgagggtgtacagtttgccaccatgattcaatagttttcattaagttgtctcacatgattcacttcatctttgagatcatctattctcacctgagcggtgtcaaggttaactgctgcttcggcagttcggcagatgcttgcattatcttcatcgtttcagcttcatattcctcttttgctcgttttagctcagcctcgagcgatgcaattcgcttgtcctttttagtattcaaagcttcaagctctgatacttccctccccattatttcttcaaccttgcttttctcttcgc

SEQ ID NO: 155446 - DNA, 905 bp, Zea Mays
tatacattgtgatagtatgaatgattttgaacaccaccaatatcagcatctcccctatggatattgctttcaggcattgtctttgtgacagtctacaagtttagaccaacacattcagttacgtagaaaaaattgaacaatgcaatattaattatatgtgtcatgatagatcgcgtactttagaaacagcaggttcattcatatcattccatattccatcaacaccattggagatgaagtcctttaccaaactagcccaccaagctcgtgccttttcagatgtaaaatcagggaaaacacaatcaccaggccacacctcccctgaatgtaaactgtatgagacatatcctcctaacatttaagaaaattgacgatgaatcttatttaagtcagtgatacataccaacgaacgggctgccatctgccttttgaacccaaacatcattttttgagccactatcaaaaacgaagaaacccttctccttcttgatgcctggatcaagcatccagactgctttgcaaccaatggaatgaagatcgtccaccagtgattttggatctgggaatcggatctgtagcacattgatagcaaaatgctcagacaggattcaacaaaatcaattatcataataaattatttgcattcaaaagagcaccataacgttagctaaaaaagtgcatgatgatagtaaaaaataactggagggtctagtaaacattccaaagcaatatatataaaagttctaaaacatgacaaaagaaacacaaatcagtggttaaagcgctcctgtatagcaaacacagcagatccagtacttacactatcaaacgtgaagcacctaaaaccatccatatagtcaatatccatccagacaacatcacaaggaattcctttctccctaaat

SEQ ID NO: 155447 - DNA, 405 bp, Zea Mays
cactgggtcacggcctgaatcagacaccaaaggagacgccatggtacctgcaggagagggcaaagtcccaatgggaggggacaaaggcgcactcaagtgtccaaaaaatccaagttgttagttagatggggcgaggcagagaagggaaaatccgcctcattaaaggtgacgtgacgagaaatgataatacgatttgcggagagatcaagacagtggtagcctttgtggttggaagaaaccaaggaagacaaacttggtagagcagggggataatttatgtggtgcagtagcagtgatgttagggtagcaatcacatccaaaaacccgaagatgatcataagagggaatagtgccaaagagagcagcataaggacatatggcttgtatagttttggtaggaaggcg

SEQ ID NO: 155448 - DNA, 679 bp, Zea Mays
tcttagactaccttcagcaaaataatgtttatatttgtttgttagtttatttttaaactaaaacgtgacaaataaaaaaacataggttgtattatttagctatacactttgttaggtcgggataaagcatagtcgatatttttgctaaacctgaggagtgatttgcaagaagaagcactccaattttcgaagcaccgccgttgttatcaccgtcgttataaaggcagcctgggtgcgctgaagaaagaaccctcgcttcagtcctcaccttctgcatttctcgcaacccacgccgcgtcacttccccttcgtagtccagtggaagtggaaccgccaaaatgtcgtcgtcggcggcggagacgccgcgggagcacgtggagagtatccggcggaagcgctactacatcggccgcggcgagcaaaacccgctggcggaggacttgcaccaggccacgaactacctctcgcaggagctctactccaaggacgtgcacttcctcatggagctcgtgcaggtaatccttttggcgcttatcttgctgtccctgttcttgtgtgagcgggaaactttgtgttgcatcaagggcctgtagctgagtatgggtgagctaggagtttgcattggggttttctcaacgggtcactgtaccgctgtgtataggtgtgacgaggggttaag

SEQ ID NO: 155449 - DNA, 589 bp, Zea Mays
ttgaaattcaaattgagatttaaaaataagaaagaaaatagaataaagaaaaagaaaagggttttacctaccctgggccgggatcccctcgcggcccacttactcatttgtgcccacgcagcccagcttctctcctggcgtcacgttgacagatggggccaggctgtcagccctcctcctgggaaccacaacctcctggtcacctgcttgtgggccctcttggtcagtgacccccacaacctccatgactcagtcgcatgctgctgcaccctcaactaccgacaggcggggcccacgttgtcagctgtgtatgtggtgcatgtgcctgggtgtcccgtctcactgccaggtgggcccctgttaccgggtctccttctcccccgcgcgactcgctcgcgagctcaccggccgccgggaaattcgaggtagttaggccggttgattacctccgcccacctctgcaactataagtccctgccgcaacctcttgcctcacctctctgtttccctggtcgagccatcatcacccccgcgcgccatagccgacgtagagaggagaggattagggagggtggttgcgccaccgttg

SEQ ID NO: 155450 - DNA, 590 bp, Zea Mays
cgtcccaattcccggccactgcttccgcttagtataaattgagcctgcggtcagctccgcaacatcatcacacgccccaccatctagtatcgcccccaatcttgcaaccgtgagcgccaattctaagtttcccccaaatctgttctgagacaccgcgaagaacacctcgccgtggccagcgcgatacaggttagttcatccctgctgcccttgtgtttgagtgaccttaggtgctcatgatgctcgtcgacccatttgattgaactaaattgccaccaatcaccgagaacacgttcatctgtctgcaacaccctcggtcaccgcggccacagcgaattggatcaccatttctgaaattaagttagggaaagtgatcgggaatggttcaatcctatgtctgctgctcgggggcaccggtcttggcctcctccggtcgatctacgtgctcgccggagctctaccgcgccgcgcatcgtcggggacctggcgccgtgaaggaatagaacgtgaggggcttttctgcaaactgtcagcgactcagtgcaatagtaattgaacccacttcggattgatcagtaagccgaggccct

SEQ ID NO: 155451 - DNA, 591 bp, Zea Mays
ggcactgtagactgtccggtgcgcccatactccgtttttaaaaaatctttcccaacccaagcccgaggccaggctcctttttctcctctctggctagcctctgctctctgtctggcgatttcctctctcaccggcgatctcccctccccggcggcgatcctccgacgaccctgtgctcagccctgccttcttctctggtgagactcccctagttccctatctctctctctctctgttcttcaccagtctgaaagctgtcactcatttccaattccacccctttgtgcccaactaaaattcctatccaattctgtgaatccatgtggtgtgaaatgttgctctgtgcccattgtgtatccctgcaggtttctagctccttagggagggtttcacagcctcaaatagccatttctccaaaaccctaaatccttgcacaccacatgctcggtgaaatgcctaaaccagccaaaaatgctccaattgaacccaaatttttcaggcactttcacaacacctccagtaacatattcacaaaatttcacgcccatccgatattccaggctttaatttcaccaaatttcccgtttcgag

SEQ ID NO: 155452 - DNA, 1688 bp, Zea Mays
taataaaattagcttataagagccgatgaatttcgttcttaatcctagagagtaagtctggacgaattgatattggtctcggcttgaagggcctgaaaccggacttaataggcaaccgatgctcctctagctctcagcttaaccctggcatctcggtgtaactcgaagcaaagcaatcagaatattcttttaataagccgatcatttcatctctaggattgtctttcaaggtcttgttcacaaaagtcggcttttgagttttaccatctcctatgtcaatctcctctaaaggatcgcccgatgtaaatcgttgtcctaacttgtcgagatccctaaattcctctattttggttactttagaggagttaaacgctctctgcgtgactatggactatccggcctcagaggttggagcgtccacgataccggaatcgcgctatggcactctctggtagcagccggactgtccggccttttagaggccgaaccatccaggaaagggccgaaccgtccagcctcaggccgtctgaccttgggggccggaccgtccacgacctaggtatgctctctttagatgaattcattgtttaacctttacatgggatttagccgattctccatcaactctagcattatttaacctttacatgggatttagcctatgggcgtatcgtccgtgggtcgaaccttccagtcctcagggctggaccatccagccgtgactagtgccacaaatggtgctcaatagtttgtttggtggccaaggaataggagaggattaagggcttgtttgggagatagggaaatgaaggggattagagagctaaatttcactcgctatttaaaattgaatagggggagattttagctctcaattccacttggtctcaaacatgaagttggaaatctcttcctattcaaaatattgaatagttgcgctaccaaaccagcccttagattccgccatcacatctctaataaaaattacggtttagaaaattgtaatgatgtggattcagtctgtacaattgcaggatttgaagcctgtcagtagtgcagcgcgggtgatcaataacagaggcatatcgcacacgttgacgcgtacaaattagaatacaagaagtattttcaatcaatttagcccaaaaggaaataacgacttttcgacctcgcttcccaaatctgacgctctttggtcggcccactaggcgtctaggcccaacccgccattccatgcggtcatccaatcctaaactaggtttgcctggcctcacggtcacgaggacgtgaggcgtgatgtctagtgaatatatatgtatagaaagcacgaagcatgaaagcccaactagaagcacgttttttggccccgtacgagctcgatccggaccgcttttatacgggcctaggccagtccggcacgaattagcggaccaggttcgaataggaaactaagcatggtgggctagcctggcccgtcccatttacctataagcccgtcaagcctgctttttgcactaaatcattcttaccagcctgtttttggcccactttttccgtgcttaccgagccgacccggcccgtttaggcctgcagcggcccgagctcgaacagaggaacgagcccgcggcttagacggaccggtctggctttctaacagtgcctggcgggccgggcccggccaggcagcc

SEQ ID NO: 155453 - DNA, 388 bp, Zea Mays
tgggcattcacggggagtcttgtggttgacagggggaggcaaagatatggcagggggaactgacctaggctacactagagagtagaggtgaactggattgcactatcgtggacaacatggatcggcacaagggtgttttttcgtaattgatgcaaaagtcccgtggcttgagcataggcgtctaggatgtttttgagcttggaaacacctgagggagaagcatcagtcacaaattcacaatcagtgtctgactttggttcagagggtgtcgaactgtaccatcttgcttgatcattgcttggagaacgtctgtaaccatgaggaagagatagagtgagagaggatcgcctcgctgcagtcccttattgcaagcaaaccagggtcccag

SEQ ID NO: 155454 - DNA, 766 bp, Zea Mays
aatcatttttaacgtaaaaccattgcttaatccatgagcccgtccattttttccgaaacgttagcacatgacacttcacatcagaccgatacatgaagctataacatccaaagttgttatgatattgctctttcccaaccgcctttgtctggtaggacaattcatgaatattgcagaagcagttggcatctggctccatcccttggatcctcatagcccaaatgaaaactccaactttcatcaaagcctcgggagtaagttgatgaaggtatatttcaaatgtcttcagtacttcgaccagcatcttatgcaagggaaagcgaagcctagccttcattaaacttttgaataccaccacttcgtctgctttaggaagaggaacagtactctctcctccagccctcactatggatatatcaaggaaatatttgcccttcatcgctttaatcttcccttgcttaatagtggattttctgaaaacaacatgatttggcctccattgacgatcttcagcatctttgttctcactctcaacatcaaaactctcgctatcgcttgagtccccagacaacccatctaacatctcatcagtgattttctcaacattggtcctctccatggcttcgtagaaaccagcaagcacggggtccacacttttcttatcttcgaccatttcagcgatggttacaacagaaagccgaagctcaaaaaacaattgcggttacagaggtagaaagctaaaacgacaaacacaacacaaagcttg

SEQ ID NO: 155455 - DNA, 511 bp, Zea Mays
cagatggcaagtcggcagcgagggcgttagcgcccaaacggcctagcccacagcccagtctaaccctaaatccgtaaaccctaatactcagcatacgccacgccgccgcccgccagtacgcactcacggtctcaactctcacgcacagccgcagcccacactcccgcagcgcagttggccgaaaacctaaccctaagccgccagccgccacttctccagccgccgccgtccgccggtttccctcgccacgacgccagacgccagtacgccagtacgccacttctccagccgccagacgccaacgtctccagccgccagacgccacttctcttctccagccgacgccacttctcttctccagccaacagccgccgccacctgcggactcggcagccaacagccgccgccacctgcggtctgcggactcggcactatcggcaggctccagtgccctccagtgtaacgccccgaattttgcagttgaattttttcttttctttactcgccaaat

SEQ ID NO: 155456 - DNA, 699 bp, Zea Mays
cggcagcttatcatgacgttgactgcaccgacaacttcgaatcatgattgattggccaacaataatattataacaatggttttggttagcgttatgacggtggttaggtcagcactcgacacacagctcctaggcctggccgcctgggccattgccgcgtgatgcctacaggtacattgacttgaataaaagggatcaggcattcgggtttgtacggctggtacccgtacaatagaggttggtgaaaccctataaatttaccttggtatgacaggaaggatgctttaacgacgtgttttaggatctggagggagtatagtgcagttgtatcctttaacttgcaagcaaggccgggatcggggtcttcaatcttgctcggcttgtgcgttgacagttgcttcgagccttcgacgacgctgtcgatgaagctgtttaagcaagtataataagagggtaaaagcaggataaatgcggaggtgaggacagaatagagaagagagaggaaaagcgagttgtaaactcgtagttggtttagacataagaaccaaaaaaaactttgtgtgggagataagtgagatcctacatctattactacttattaaggctaaggagtagcctgcctctgctttgttctgtcttccgacgatctcaaccgtccaatacgccatagagtctctcccgtccgatgcgcacactctc

SEQ ID NO: 155457 - DNA, 587 bp, Zea Mays
aacaatattacaaaattataggaactggaacgaactgaaaaggagctaaaatgaattttatatggattttacaagttctaggattatttttacacttaattattcatttcttaaatagattttctgattaattatctgtcgagactgcgcgccaaataaaaagaaactcaggggccagagcgcaaggttccctagactcagcgaacagtgagcggggacggcgggttgattagctaaaacagcaggggcctaatagctaaatcgttcagccgaaggggtacgggacagtgaccgtgggatcacagatcgatgaccatgatttaatgaaaccgcgatctaatcctatccctctgcaaccgatccaacggaccacactacatcgcatgaacatctacgccagatcgaaccccaaccgtacatctgaggatcaacggtttagaattggtcgcgcgaaggggaaagagataacctgatcccgaccgcaccttactagatctacggtcagggcacttcctcttccccaacggtgtagcacggtgcgccagtactccccacggcggaatacgccggcgaggcacccaatcaac

SEQ ID NO: 155458 - DNA, 1012 bp, Zea Mays
cagtgagttcagctcacagagcgacatagatttctgctaaagcaccacgaccgcgagcaattcgttcgactccgaagggtcccgcacccacccaagcgcacacacaccttcctagtcccttcacgactcccccaaccaaccaccgaggatagagggatccccggtgtagaacgacgatgtcggcccgcccttctctctccctcacgacattgtctcatgatggcggcttgcttcgaggtggcaataggtagaagggtcagggcaccagggagcttcgactattaatagcacgggcgttgaggacggtcccgggacgatcgctgcttcgcggggctgcgcgcaacaacccctttgctgagggggttatggcggtgatgagagctgctgctagatggggaccactgggcggtgacggacacgagtgtgatgagggctaaagagggcacacacgtctgggttcgggtgtcagcgacacaatagtgcgcgtgatggggttcttacccatgtggtcccacccgtcggcgctggtgtgcgtgggtggactggttagaggagacacagcacacacggacactggccacccgggcccattaagtagaggcacgacacgagtgaagagaagcggacgtgcggggaccagccatcagtgagggcttgcgggtctgattgtgtgcaaccactggcgcgtgggccttgcatgtcaccgcaaggtgaggcgtgggttggccggcgcggaggaaagccacttgggccgaggccgagggagcagggccaagtggagtggtttgtcctttccctttttctcttttttctaatgttagtatttcctatttaaattttcaactttcaaattaaaatcaactaatttcaaacttcaaaattaaatcttccaaataagtgcacaaacaaataaactccagcatgatgcataattactttaataattagttgttttaatcaagcttaatcttgtgatatgcacaaagggagaaaagaatataatcacacaaac

SEQ ID NO: 155459 - DNA, 964 bp, Zea Mays
agataaaagcaagaggctatgtgtggattatcgtgctttgaatcaagtgacaatcaagaataaatatccgctaccctgtattgtggttctctttgaacagttgaggggtgcccaggtgttctctaaaattgatttgaactctggttatcatcaattgaggattcgtgaggaggatattgagaagacaaccttttgcaccaggtatgggcattacgagttcatagtcatgtcttttggcttaactaatgcccctgctgcttttatggaagcaatgaataggatgttacatgaattcttggacgactttgtggtcgtgttcctggatgatattctgatttattcaaagaccgaggaagagcatgagcggcatctccgtctcgttctgagtgctcttaggaagaatcagttttatggcaaattgaagaagtgcgccttttggctgtccgaagtggctttcctggggcatgtgattagtcagcagggcattgcggttgatcccacgaatgtcgcggctgtggtggagtggaagagaccctctagtgtctctgaaattcgaagtttcttggggctcgccgaatattatcgacgcttcgtaccaaatttttccagcattgctaagactttgactagactcttggagaagggtgttcttttcgtctggtctagcgattgtgaggtcatctatcagacattgaagaacaagttggtgaacgcccctatcctaactttgcttgagaatggtaagcgtttcacagtttatacggatgcttctcgaattggtcttggctgtgtgttgatgcaggaaggcagagtgatcgcttatggctcaaggcagttgaggaagcatgaggggaattacccaactcatgatcttgaattggccgcggtggtctttgctctaaaatcgtggaggcattatctttatggcgagtcttgtgacatttacaccgatcataaaagtctc

SEQ ID NO: 155460 - DNA, 474 bp, Zea Mays
ggttggggttgcatgaacgaggctgagacgaccagacagcggagggggagtcctcggtggaccggggaacactccggtgagcaatcgcgcgcgactaagtgcaaaacagaggaaaataggggcgaggttaggacagttcccttggggaaagacccaggagctcataaacggcatccggggcacggcgaggacatgggtcgatggtggcggagcggcggcagtgaaccggtgagtgcggaccgacaaaccagaggggaagggttgaactgaggggcatcccgggttgcgggtgataaggtggagcttaccgaggcagcagacacaacgagggctcgatggcgaccgcagaacgggcgcgagatcacagcgagcggtggcggaacttcctgggcgcgtgcgcagagcgagagagagggcgagcgtgctcgactgagggtgcaactgagcgggggagggcgagtgagtgaggacggg

SEQ ID NO: 155461 - DNA, 819 bp, Zea Mays
cgaagggcggttgcgaagcgtagagtgagtgaggtggatggcagtcggcttcgtgtgggcagggctggcaagcaggaattgttgtcctcgccggccgagtgtaggtgagggggagttgcaaagtctttttgagggtgaggagctgaggataatgctatttaactatagggagatggggattattctggaggttgaaccgatgtaaggtgtgatgccctcgctgtacatatgtaactataggttgtatgatgaggctgtgcaccttcgcgcatccggctatgttcataaaggcgttgcacacttggtctagtacgtttattatgtcggtccggcgcgcgtgttgaattaatctggctgcacccttaggcgacttttgcgcggatagtctttttaggtagacttcgattttgcgcgcttgttgtgctagtccggctgcacccttaggcgacttttgcacgggtagtcttttgaagaagacttcgattttgcgcacttgttgtgctagtccggctgcacccttaggtgacttttgctcggatagtcttttgaagaagacttcgattttgcgcacttgttgtgctagtccggctgcacccttaggcgacttttcacgcggagtgtcgcacgcgagggtagctagcgctgcccctcgcggtgactttgtattggtcgaatgtcgaagaccgtcgatgcggtcttttttcgacgtagatttttgcgggggatttttcgcttgtatattacatggctccgcctcattaaaaacctcacccccagggaggaaaagagtacgggccagaataaaattgttgtgggaat

SEQ ID NO: 155462 - DNA, 702 bp, Zea Mays
ggagaatgtagcacctactttaggtgctcgtatctactatatgttatatacttgtagacttttagattatgcctaaaaaggatatgctgtcatttttttaaattgtgttgttggttctataatatccttatgattagtaactttgaattgtatgatgtcatttttatcgatttatttttctatatttaagatatcatgtacatgattatgtatttttttattttatttgtttgttggacgattggttaactattattatcaggacaaactattcgacaaatattcgtcatctacccgagtaatatttgttatccatttcttacccgcccgagttattatctggtgccgtcctatatccgttccgaactactcgtacccagtcctgtatccgagagatatatattagggtaggatacaaaatgattctatatccgtctatatccatcctattttcacccctagtccctccatgaaccattccataaggagggtagacatcagtaccacgaagggaagagcccaagtgctcacctccattaacataatccatgttgctaaaggccaacattttaattgcaagtggatgtttggtcatataatctgatattcactgcatcacatacaatatttatattgaaaaagttaaacagtcggcgtactgaagtcaatatgtatgtactggcgcataacgtaaaaaactat

SEQ ID NO: 155463 - DNA, 399 bp, Zea Mays
atggactttatcgtaggattgcccaatacctccaggcaccatgattccatttgggttattgtggacaggttgaccaagaccgctcacttcttgctagtacacaccacccacaggatagagaagtatgcagagatctacatcgaccaggtagttcgtttgcatgggataccaaggactatagtctcagacagaggagcaccatttgtggcacgattttgggaacaattgcaggaatcacttgggacccatgtcatacgaagctcagcataccatccccaaacagatggccagacagaaagggtaaaccagattttggaggacatgttaagggcatgtgtactacactacggaaaggattgggacaagtgtctttctttggcggagttttcctataataat

SEQ ID NO: 155464 - DNA, 334 bp, Zea Mays
gtgggcggttggatataatctgtgcggctatgatcgtaccgattgggttgttacgagggttagacgtggaccgtccgatctaatcggacgcggtcgggaaaggaagttgcagagtcgtcgatctcggatccaaggatcagcgttacgtaccgattcggccggggatgcatctaatcctggcagtcgattggcgatcgagcgatcaggagcgcactgtaccccttcgcggtgcacttttgcgtaagagcccctctggacgttgggaatcaacccgcggtccactggattgttctctgtgtctagaaatatttacctcatggccccttcgttatct

SEQ ID NO: 155465 - DNA, 488 bp, Zea Mays
gagaacaagcccgaggaccgcgggttcaatccgagaaagtccaaggtttcatttacaaaactgcctggtcgaagggttacgggtctgttctggccgtccgattagagatcgagcgccaagatcaaaacagcgccgcgcgaatcggtattctacactgaccgtcagatccagatctatggtcagtatccactgctacgtgatcccatgcaagccgttagatatcgatcggtcgttccacccccaatcggtatgcgcgagccactcccattcattcgataggcatccgacgatcgagcttcattttccccccagaccaaccccggcggcagcgcaagtatcacacagcggcgcgccatggccggagaaatcgcggtgaggcccggctacaccaactctgaaggaagtccgctccacacgaagttaagactatggcgaacccatggggaatgactgctccaatcaccttacggcctaaccctactgcccac

SEQ ID NO: 155466 - DNA, 523 bp, Zea Mays
ccctccgcccgcccccaccccccgcctgccacgcccacgggcgcaacaagccaacaacccacactcggccccgctacctcgatgcgtcgccataaatccgctacctcctcctcgagtcctgcttgatcgccccatgctcgaccgatcgaccggacggaagggcagccctgaccgtgaccacagcgcgatgtgcgacgagtgagggcggtggcgggggttgcgaccaacgacggagagccacacaaagaagcccatcgacgatgttttcctcaaggttcgctcgctcattccttccttccttgtgctattggcgtgtgatcctagctagcgctctcttgatttcatccttatccacgtgaatcctggatcacattgcatgcagatcggattactggaaggccagaccagctgctcgcattcactggtgcacggtgtgggagctgagagcttcgttcctatggccgggccccacctctcttgggcccttgtgcagatacgcagaggtagtgtcccctaatttgtt

SEQ ID NO: 155467 - DNA, 518 bp, Zea Mays
tcggatatgtgttcctgagattgaaagccttcttgagactatactgaaggaagcccatgactcggattattctattcatcataggagtaccaagatgtatcaggatttgaagcatctactggtggtatggattgaagagagatgtggctgcacatgtggctatgtgcgatgtgtgtcaaagagttaaggctgaacaccagaggccaactggattattgcacccactgaagataaccgagtggaagtgggaagagattggtgtggatttcattactggattgcctcgcacccagaaaggatatgatgatatatgcgtgattgtggatagatcgactaaagtggctcatttcaatccggtcaagactacttataaaggttctcagctagcagagttgtatatggctcggattgtgtgtttacatggagtaccaaagaagatcgtgtctgatcgaggttcacagtttacctcaagattttggagaagctttcatgagaatatgaatacaaagttgaacttt

SEQ ID NO: 155468 - DNA, 666 bp, Zea Mays
cgggcgagagagggaaggatcccaagtctctgtgttgttcagctagagggtctacgtattgtgtatttgtttttagtttgggtcctttctctcttcgtgctgaccctccttttataggccaaggagggggccgattatagatggcttctctcgaaagatattgttatgctggggtaaaatggagcgattcaccaccgacaaaatccttgtcatgcatcaatttttatcctcatgtaaatctccgaccgtgcttctttaagacttctaggggagcatgctagcgacgagagtacgaacatcattattattcctattatccacctcttcccacgtcgacccttagtcttcatatcttgacctctggcttcccttcgttgtcttacatgctttgtagggcatcagagtactcaggtctaggacccctggttcttgaatggtgctcaggcctaaggctcgtaggtcatgagtgagaggaggaccgactccttctcgtgtcgtggctcggtgccaggcgcagttaaggcggcatgcgtgatattgatggcaagagcagtccttcagccacatgtggaatccactcgagtggtttcgtggcggttcgtctgacacccttgcctggctctgcctcacccgacccctaggctcgacgtagggctcatccgaggg

SEQ ID NO: 155469 - DNA, 1019 bp, Zea Mays
ccatggtcgtgggcacattgctgctcaatgtccaagtagaagaacaatgttgttgaatgaaaaaggtgaatgggaatcagacagtgatccaaaagacaacagatagaagtttgatgaagaaattgaacaggaacagaatgagatccagccagaagaaggagatcataactgttttatctctcttcgagtgctaagtgtgactgctgaaagagaagaaaatggatagcgccacaatattttccatacctgaggtatgatcaaagataagctatgccgcatcattgttgataatggttgctgcaacacattgctagtcaagaattggtggacagattggaactaaaatcaaggcgtcgtcctagtccatataagatgcagtggcttaatgattgtggatcattgcgtgttagccacgtggtgaatgttcctttttctgttgggaagtacaacgatcatgtggaatgtgatgtggtccctatgcaagcatgtcaatttctgctaggtcgaccttggttatatgatcatgatgtccagatttttggaagaaccaactagttgtctttcttgtacaaagtagagcgaatctctttgcttcctttgacatcgaaggaaattatgaaggatgatctaaagaagaaacaacgagagagcgaaaagcacttgagaatgatccacaaaaatagtaaggaagagtttccaaagccaaataaaactccacatcctccaataaccaagacaccgggaaagagggattagtcatgatgactaggaagggggttgtaaaagaattgagtgaacctaatgccatgttctttatgctcctgtacatggacaaccttctttctactaacaacttaccctctactttgccaagtattgtctttgatgcattacaagaatatgaggatgtgtttcctgatgaagtgccaccagggctaccacctaagagagggattgaacatcaaatggaccttgtgtctgacgcttccctcccaaatcgtgctgcctaccgcaccaac

SEQ ID NO: 155470 - DNA, 1011 bp, Zea Mays
agaagaagaaaaagagacggcttcagcgattgtcatgcttggaccaggatgctggcccttctgctcttgttgctgaaaaagtaccagcagaggtctttactggagttgatctcactggtggtgtgcctgttgaagctgaccccaatgggtgcgaccatgcaccagttgaccccaatgggtgtgatcctattgaagctgaccccaatgggtgtgatcctgcaccatcttttgtccacatcttttatgaggacgaagaagaggaagaagaagttccactaattcgcaagaatagccagcgttatggaggtagcagggggatagtgatattccttctccagctctgtctgctcttgttagcctgtaagagatatccataacagattttgatcaggcccttgaggatgttgttcctgaggatatgatgtcagagccaactgatggtgatatgatggatgtttgctctgacattccagatgtgggattagaggtatcctgggcagcatctcacgcatcatcgaccttggaaggcggtcttcggtgtcaagaggttggtcaagattgcctgactcccatgggggtgactgaggatccttcagccgtagaggtggctgttgcagaagacctagcccccaagggtggtgctggcggttacctagcccccgagggtgtcgccggtaatgatccagctcgggtgggtattgcaagctgcaacccagcccccgagggtgttgccggtagtgatccggctccgatgggcagtgcgagctgcaacccaaccctcgagggtgtccgagcgagctctccttcccatacctccatggatgtccacgtcgggtcgtctccaccacattctgatggagtgatagcgatgcatacttctttagcttcaagtgagggagttgccttagaggttagcgcaccggataccagaattctgatatctgctagtggagctgaatcaacccccgacgatgctcttcagattgttccagttgatcttccttcgtcgag

SEQ ID NO: 155471 - DNA, 1151 bp, Zea Mays
gtgatgtcaaagcacatgctcatgatgctttcaacaagattatgctcctaatgcatcaaatctatgttatcgggtaagatcaatgcctttgcgtatagtagctcctagataaaggagatgtgcgtccagttgtgttctttaccgtacccttcaaacccacctccttcgaccggttttggtcaagatgttgtctcatggtatcttcacatgtttgtctctttggaggcccatctctaaccctcttgccttcttgaaatgactttgtatctttcctaaaaggatgattggcgagaaggaaacgtcggtgcatataaaaatgttttctttttgccgtgctttaacctatatgcttgcaactcactcatacatatcgggcaatgcatcctaccatggacacaccacccacaccaaatgccatatgccaacaaatcatgaatttaccatagatatggcactcgtagatttaatctacaattcagatggctatcataatcctccactccttgccacaacacttccagttattcgatcaatgattgcataaatacattgattttcgtacacagatccttagggcccggaataaccagagtaagaaacgtgagctcttctttcatgcatttggtaggagggagattgtaggccataatgaaaattggccaacatgattacggagtggaacttctgctgaaaggaggtaatccatctgtcgacaaaccaagatgaacacttctagggccccttgcaaattctagatcaaaacggtccaatggatgccaagcctcgccatttgatggatgcaccatgatattcggatcttggtcctaacaacccccttccttatgccatgtcattttctttgttgtctcctaatttagaaacaatcatttaagtcgtggagtaataggcatgtaccggagctgcttgatcgggacttttgtagtgacctcggtgccttcctcgtccaccaccacaacataccttgagttcttacagtgcatacaatgggtgtcattctcgtgatccctccagaacaacatgcaattatttttgcatgcatcaatcttctcatagttcatgttgagacccaagacaatctttttagactgatacaagttctctggcatcttatggttcggcgggaggagatc

SEQ ID NO: 155472 - DNA, 549 bp, Zea Mays
aaacgattaaaatattccgagcatcgaatggtccatcactcaactagtgtaggcggtctaggggtttgccttcttcccctgtagcactatataagcagacaggttggtggggagttaccacatcattcattgccattgcacagttgtgctgttaaaaattttaaccaaagccaaagcttttcggattgctctttccaaacacgctcttcatcattcgaagtcagcttcgtcttaaggaaccacgacacttgagatggcccgagtaagatccattgctagagtgtcccgtgagggagatgatgctgaaatgatagaaatagcaccaatattagaaatgatgaggcgatcgggtctagtagtgccggaagaagctgttgccgaaggtgaaactgccgaagctgaacagactgtagttgaggaagggagtgatgatgaaattgaagaagacaacaatattctgagcccatcgaaactgagccatattgaatttggaaaatctaccgtgtcagtagaggacctagttatgatgaagaagttgggctgtttttg

SEQ ID NO: 155473 - DNA, 918 bp, Zea Mays
ggtctgcgctctaaataaacagaagcacaggggctaactcgcaagattccatagactcagcgaatagtgaatggggacggcgggtggttttctggaaattgcaagggctctttaagaaaagtgttggccgaaggggtatggagagctctaggccatccgatctgcatcccgcggtgcagattagatcacgcaaggggggggggggttcaccaccgatctttagatcttgatccaagggcccagtactaaacgtgaagcggtacacagtacgagccgttagatgggcgatctagggacatgatgtaatggagacgtgcacaatccagaccgcccgaaccggatccgacggactagccttaatctaacccaaccggtatcactcctttcatcctagccgttcgtgccgaatcggacggcgtggaccccatctcccccatcacctcactctcctcccaacggcacggcgcgccaccgaggaacaaacgccaacgatgaggtcaatcaagcccgctactatgctattcctcaattaccaggttctacgcgctcgcaaggagaaaacaggtcggatggatgttacctcactagcgattagccgtcgcttgcagcagcccacgcaccgggtgattttgtgcccaaacgcggacaacggcgagcaatcaccgacggttcgatgacccccagaccctccagtagacaccacggcgagcgtgatcccacgacgaagctcttgagcccaaagccgacgccaagacgctgcccaggccgagaatggttgagcagtattccctccctcaactcacacaccgatgccagccgaattctggttagtggccaggttagggtggacacaggatgccacgaccgggttgttcctcttatacgcgcggaaatagccaacgcacaacgaaattcgcc

SEQ ID NO: 155474 - DNA, 854 bp, Zea Mays
gtacaacgaccacagatcatcaaagaataaatgccgcacaggatctatattatctttgctccaaaatgcatcttctggcacaacaaatgtgaagtcctcgagtttgtatttgttgctagccaccatgtaccactcatgcattctaatcttcagagtcgacaacttagaaagttgcaccgtcgtcaagaacggcctcccattcacaaatttaggaggaacatcctccttcttgtatatcgggatattgattttaagacgtaatgattctcgagtatgaatcattccatcttcttcccatacttcgaaattgtctatttgggaccgtgtgcgtactccacgagatgttgattctgcttttgattgatctgtcataactctcttcaatttttgcaggtagcgtgtcactgcttctcatggtttcttgacattgtcagtggcgattcgctgatgaattttctttgaagtagttggcccttcaacattggtgtcaacctttgcttcctttttgatgtttgcgtcgacattctaaggaacaattttgtctatgtccccctcgtcgagttccttcgcaagaggtgatatgattgtttcaactgtttttgtggaggtcggtgctatattttccggcaccatggggtatggaatgatcgaactatctttttgttgcattggtgttgaattcggcgttggtgacttatgacacgatagtggcttaagatcggctcatcacccaacttgatgtcgcgtcgatgccaacggaccaactcgttcattgcctcctgcaaagttatgatcccctcaactggaaagtctatgtaccaatcttcacaaccgctgtctatgatctgtagaac

SEQ ID NO: 155475 - DNA, 572 bp, Zea Mays
cgtggcacctatggcactccttgccctggtggggctcctgggctgactaatgacaagaactcccttgcgagggatctggccaacatcagtgtcacgcttgggacacccacgatggaacacgcatccccagcatcatctctgttgactcctcctcccgcagcgtggggagtttcagctccaccaacccctcatgccatggatcaggatgcgccagtctcatcggacctcccacttacgggtcgggaggaaccagtcgcttcttggtaggacgcgtcaatggttggggaaggaccataagtattcaaccacatcccttttcagccaaacatcgataatagctcactcgccggcttgtatgcgggccttcccatcccctcaggatgcctagattccgaagagggagatggtccagttatcggcctagacttgtccgggctctacgatcttgagtccatgatgcagttcctgtacgcaagcgacaagttactctccaacagttcggatggctacaacaccaatgaggaaggttacgaatcaactcgggagtgctaagttcagaaagaccacaagtt

SEQ ID NO: 155476 - DNA, 446 bp, Zea Mays
gcagggtcgtgactccggaagcacgtcaggacgtattcaaccaccgcctagcagagcttgctgccctctgcctctaggcgggcaccgaggatctgatctaggcgtcggaggcgatcagcagcggagtccagcaccgggagggcatcggtgatcgacgctggcggctccgacactgggatggggcttacccctagcggcactagtgtcgtgcttgcctcaccggcccacgcggcaatgcgctggaccccagcgtggtgctctgcttggaggtcttcaagggcctttctggtggcctccaccgcctagggacccggcgccgcctgcgctgcattgaactggcggatctgctcctccagcttcctctccctttcctcagcttcgagctcgtgctcggccagcatctcgcctcgccgggtgagcatttcttccctgaaggtgagatccgt

SEQ ID NO: 155477 - DNA, 351 bp, Zea Mays
agaaaatgtgggaggtttgtggctcataaattctcggcgcttgtccctgggtggagttgccagtggtggaggtggtagttgctgtcattcctgctgttcttggcggatttcttgacgctcttgacgcatttcttgatggtcttgacggatttgcgcttgcatctctatcatggtgttagccatctgctgtagtagttgcatctgagcggcaactatagcatctgtcccagccggtggaggattcagaaaagggttcatctccggttgtggttgggtaactatcctcctgcaatgaatacgagtaggtagatcaacacctcctcccctcctggtattaaccatctaggttag

SEQ ID NO: 155478 - DNA, 438 bp, Zea Mays
gacctttaagagtagagaggcatgtaacccctgtccatatcaacgatagcataaggtagtttcaagcaaaggcgagtatctcaggatgttgtttctctagtgggtatagcatgtatcactttccatctaagcagagaggtcaacaattagagacggtatctgctagaagaacacataaggttccatgtgtgcagtttgctttttctggtaacactgtactatctgagtttgttgggcgagcggtagatatgcgactttacccaaacagaattagttgcaacatcttgggtaaaacacacataaagtggtttaccaacaagtggtcattggaaattcctagcacataagacgagggtggatgtcgaataacatcactgttaactcgtgattagccagggaatccaagtttaaggaagacaataaaagtttgagaaaaca

SEQ ID NO: 155479 - DNA, 553 bp, Zea Mays
caaaattttgcacaacattcatagtgagtagtactaacaatcccaccaatcagatttgtaaaactatggctcaattctagatcagagagaaaatccgaataatcccaaaagtgaagagatttgatgaaatccataagattatgaaataccgtgaggacgacatgttggttgaacttctcacaagctgtcggactgtccgtgcgtaacttgccctctccgtccgcgcgcaaacgacaaaggagaccccttttgcgagtggagagcgagagaggagatgcaaagagtgaaacaacaagtctgcggcctctgcccaatttttactgcctgtcgcggacggtccgcgcagggccggcggacggtccacggcctgatgagttcagacagtctgcattcccaaccggactgtccagttcctgatacggcggacggtccgcgatccatgggcggacagtcccgcggcctgatactcagttttccaatgtctgtccatttgctgacgttgaatttcaaatccgaattgatgctcatatatggacatttcgaccaatccaag

SEQ ID NO: 155480 - DNA, 500 bp, Zea Mays
gggtgccggagcactgctcaccggtgatgctccgccgtgtgaacctggcggcggtgacactgctcgtggttggtggggaagaaagcttagaaccgttggatcaaatgcggaggtccaggattagaaggtaacttacccattcggaggttgaatccaggccgtagatggatagatccacgggcaggattgaggatggataaggtccgttggattggagttgtgggttcaggattagaactttgtgtaccccttcacatatttaatctggaccatccggaatgaatcggacggctctgaatcaacgataccccttcgccctggctttctttctaaagaacccctggctttcttaaaaatcaacccgccgtccatgggcgatgttcactgagtcttagaaaatttacgtgttagcccctgggcttctccgaatttggcgtgccgaccagttagcgaataaaatcaaggaaattcattttaaaatcatttttaatacgaaaata

SEQ ID NO: 155481 - DNA, 468 bp, Zea Mays
taagtgcaaatcgaaattatgcccaaaaactctagacactgcgaggtcaggctgggtagtatgagaaaagagggagaggaaggtacaatagagcgagtcgtttgaaagccaccgatcaaacaaaaaagaagtggatctaccatccctgacatagatgagtatggtctctgaagtgatcaataacataattgtagacacgacccaagtacgtgggggaggaggggtgggaaccaagtccggatcgttaccctcgaagcaccagtctctccaagggacataggggccatggagggctttgtcagcgaacttgagaaggaggcaaaggtttttgagtcttcagattttttatgcctaggtcgccggcattcctaggaatatagacattgtcccacgccaccagacacttataaccacctctgggtgaatcctctctgcttaaggatctgaattaggctcatccagttaagg

SEQ ID NO: 155482 - DNA, 581 bp, Zea Mays
acccgtcggccgtccatgtgtacaaggcttactgtacgagctgttgactttgtaggcacacgttttgagtgcgccgctgccgccgttccatttcccttcacaaaaaagcaagttgatattgctactgataggcgagccaactttgattgctaaccatcggacagcaccagggaaggacaaatgtattccgacgctgtacgtaaataattgagaaagaaccattcattaccttggttgtatggtcaagtcaaagcaagtatatgatgacacattgtcatcgtggccccgaatacagtatatagtagctcttgaccagacatggagcctaaagcacgcaatcagttgcttgttggagcgatcgatctacgtcaagattattggcaaatcaagtctagagcccgaccatctcgatctgtgtacgaagcatcacagattcacgacttccgtttcggtactacgcgggtacgtacgctctaggcgtgtgaacccaggagaccggccggggacctagcgcgagtgggggcagggctaggtttgaacgcacatggcgtagcgtttaattagacgcgcagtagagcaac

SEQ ID NO: 155483 - DNA, 1155 bp, Zea Mays
cacgcccaccagaagagaagatgccaggtaggggcacaggtccacgcccaccagacgaggagtcactagctgcatgatcagtaacacaaggcgcagtatccaagtcgcgaccaagaagaaaatcgaaggagctagcgggagtaggcgggtcatgtgcgaacggaaaactgagctcatcaaatacaacatgacgggaaataataatgcggcgcgtggaaagatccagacagcgataccccttgtgagcagaagggtaccctaagaagacacatgcggcagagcggggcgcaagtttatgcggggacgtggcctgtaagttaggataacagagacaaccaaagacgcgcaagtgctcataggaaggaggagtattgtacaaacgggtgtatggaacctcatggcgtatggaggaggcaggtctgcggttaagcaagtatgtggcagctgcgagggcctcaacccaatacttgggtggcatggacgcatgaaggagcatggtacgcacagagttgttgagggtacggagaatacgttcagccttgccattctgtggtgaagtgtggggacaagaaaggtgaaaaacgatgccataggcagcaaggagttcatccatggcatggttaacaaattctgtcccattatcagcttggaagcatttaatagtgtagctaaactgtgtgcgaacataaggaataaaatcagcaatatgctgacggacctcagacttgtgcttaaggggaaatgtccagcaaaaatgtgtgaagtcatctagtaaaaccaagtaatatgagcagccagatatactaggaaccggtgatgtccagacatcacaatgaactatctcaaaaggggaaacagtgtgggaagtagatgtactaaaaggtagacgggcatgtttgcctagttgacaggcatgacaaagagtctggtctactttattacatgaaattaaatttttccgcttgagactagataagactgctggaccagggtgacctaggcgacgatgccacactgaggaggaggctgcgaggagggcgctggcagtggactgggcggctggtgaaagtgtgtagagatcgcctgagctattgcagcgaagaatcactcgccccgtcttgggttccttgacagagaaaccaaaagcgtcaaatt

SEQ ID NO: 155484 - DNA, 466 bp, Zea Mays
ccagcttcgagcttcggaaaccccatacttctggccatttcccggtagacggataattctttgttgtctgggaggcaatacaagaaatcatcttcatctgtaccattaaacactaaggcccctttcgggtacttcagttctcgggcatagtgtttagcttcaaaaatttcttcttcagataatctttttcccgaagcatgtcgaataatataaccaaggtcttcggaaggtgcttcaggagtaggagtgacagctttttcaggcaaaatctgttctatagcttcttcctccgttgccttttctccaatttccgagggtttctccttggcaggctctaaaggcccagcttcggcgctagcctgactcattgtagctttggcttcggtcagttttgtttcggtttcaattcgcacttttgaagccttggcaattttctctggagtagagcttgaagcctttaccgtct

SEQ ID NO: 155485 - DNA, 505 bp, Zea Mays
cttctaagtcgtagttttttggtggatatatgttggtcatgtatgaaactcgtttcctatttcttaatggtggaaacccctttttgttaaaaaaaatatccagaagagcagcgtctctcctattcaatgctctcaagaagacttgcctcttgtttagaccatctatcctaccctgccgtccagttgagtttcctgtcaattatttggatctgcccaagaagctcacgaaggaccaactacttcccctaattaaccggttggcagacctccttcctggctggaaggttgatcttaccactagggttggtcaggttgtttaggttcagttcgtgctcacggcgacaattatctatcacgtcatggctttggacctcccatgctaagctataaagggaagaaaggaagctaatggaggctatttcttggtggcttgaatcttgatcgagagtcactagggtcgttgttttacacgagaccatccatgagttacataggaagaaatata

SEQ ID NO: 155486 - DNA, 463 bp, Zea Mays
ggaggacataaaggggattattcaacgccctaattggtcttagcttcggcatcacgagaccgactactgcacttgggaacgatattgaagcatgccaaaaggctttcaacaatgtttgcgcctttattggcataagagacctagtccagaaacacatagcctacagagtatgacctcttgtgaatgactaggagatgccgaaggaagctgctgccgggtctagtcagggtggcctggtctatctaaaatataccttcagatatagaggcgagtttgatgagccaaacgatgagtggttgagcagtattgaggcaaccagtgacaaattgcttggggcctatataagggccaaagatgatgcaatgaccttggccttcgaaggttgaggcaagaaaaggttgaatagagttttttacgtcattggtttcgtataccctgattatagctatccctcgtgaaagca

SEQ ID NO: 155487 - DNA, 431 bp, Zea Mays
ggaaagtgcaggcactggaggagcaggtctaccagttccaagcggcgcaagctgctcaggtgacgcagacggccttgggccccaagcggtagaggtgatgaggaagacgctcgatgacctccgggctgagcaacacaccagggtccagcgcatcgccgcctcggctgacgaggcaagtacgacattggtgccgttgggggtgagtcccatcccggcgttggtgcggccggcatccatcttcgacgcgctcccggtactggattccgctgctgaccgcctccgacgtttggattagattcttggcgcccgcctagaggccgagggcagcagactctaccggtcagcaatagattatgtcttgacatgcttccagagccatgacccggctgtctccttggggccagtcgttgcaggtccggtggtcgatactg

SEQ ID NO: 155488 - DNA, 806 bp, Zea Mays
attgaactggacgaaagcggaggggccgactgggactgctgtagaggggcatggagaccatgagacgcgacaatggtcaaacctctagaaagagcatcaaaagaaatagcaagccaaaaattgacacatcatacaccaaggtaaatattgtgtccattccaatgccaggcacacaattgtaaagataaagagtaaaggaaccaaatatttagatgattcaaaaatacagcacaaccctgcctcgtagagtgcacacagcatgtctccactcaccacactacatgcgtattccaggcagcacttcaccacactctgtcatcctccttagcagatgtagtatcgctccagcaagcagcaacaacacaacccagtaagactgcaacgcaggcagcataaagctttcagtcggtttgtagttttttgtttacaaaaaatgaagcttagttccatgtccaatccaaatgttgctcctgtagctgtagatggtaaaccaccaattctcatttgcaagaacacccaaaatacgcctttccactgctgtgacagaacatgtgcactgaacaccaacaacatcaagggacaagacaaatatattttaaggaaaatattactgcaaataggaaattaggtaaaaagaaaaaaataaaagggcaagaggcaatcctcaccaagttataaacaagtacatcaggctccaatgaaggatcccaatccttgtgccacatcttcattactcattttgagggcttctgtctcatatcatatactcaataatcttgattaactcctttagaataccagctcag

SEQ ID NO: 155489 - DNA, 973 bp, Zea Mays
gtaatgaagctaaaattaacagttgaaaagtatgcaatgtcagcataatttctcagtggtagtgcataaaatgtggtataaaaattcataaacacataaaaggtatgtggggaaatattcctgaccggttatgatttgatacgtgggcaatccctgaaaaagaggcgtttggtgggggagtattcgcttattggcagcttttgatcatttcgatgtctaacatacaagcgaaaaaacaccatcttcgatctcacatactctcgggcttctgcagttatgttgtcaccgtatcatagatcgtcgactggacagttctccctgatgcgtcctccaggtgccattgttgattgccctagaaacgagacgccacctgcaactctacgaggacctggtagccatgagatctatggagaagatggtgttctgacaataatgatgcgtgggccgatgaatacaataggatctggtgaggtggatacatcaaatatattacaatcgcacgtaagttcaatgcttataagtatgtttatgatttgaattcactgacgatgatattgtgttcgggagaaatgaagatttgatgttaatgtaaggatttttttatgttgtacacagccagattcgattgatcctagtttaattcctaggattggtatggtgttccgagatgttgatgatgcatatgatttctataaacgatatgcatatgaggtcggatttcctttgaaaaggtatagggaaaagacaaactgcaaatggttgaattgctctagagaggggagatgtgtaaaataaaacatggtaaccctggagtccggaataaatacacaggtcgaacccagtgcaaagcaggaataaagcttaggaaaatttatgatgatgcaaaaaagtgtcatatctgtcaggattgatctagttaaccttgagcataatcatgattttgtaacccaagaaactgagaaacaacacctcc

SEQ ID NO: 155490 - DNA, 656 bp, Zea Mays
aattaggtgatggtgcatgggctggcactggccacgttcgccggcgctcgggtgaagtctagcgaagggtggcgcgatgctagaggggactaggggtgaagtggctagccgagtagcttcactagggcacagggaagctgcctgagttgtgaaatgggatagaacacgtcctagttggtttggttgcggtggctggtgctcgggtggcaatgcgggtggtggcgtgctcggcttgggggaaactctagtgaaggggcacttgccaatggttctggggcttgtggggatgaatggccgacgacacaggtggtcttataggcgcaggcgtgggtggaaaccagtagtggctgaccatgggcacgggggcgcgtgggctccgttggacgcgcactggtgtgtcgtcctgggtcgagcacgtggtgattgctcgtgtggtcatattcgaacgcctattggtccctaatctagacgaatttgggcaagataattttgtaggatctcctctcttggcttccctctatctgttttgtgtggagacagaagtgtttcttggcctgggtgtggagttgtctcgtcccaaagattgatctgtcacaagggccccaaccgagaagaaactggtgttttgtcttgtcaaaaggattggtcccgaggcc

SEQ ID NO: 155491 - DNA, 436 bp, Zea Mays
ctgcagggagggagcgtgaacagcaagcagccaggcgtgtggcagtggccaccgccatggtcagccaatccctggccattgccgccctctctgcccatggtcgcctggtccttttatgccagtagcgctgcatccttccctgcagtggcttccatttcttcctccccatccagcccccattcttccaccttgagcagtgaggagcagcttccatggatggtgccgccccatctcgtctcctctctgcagcagctggctatcgagtgcttccttgctgctgtcccatgggcgctatcccctcctctctggttttgcttgagcagggagcagccccttcatccttccatggtgccctcccttcctccctggccaagcacctccggtagcctccctgctgttcacgtgcaagaggtaaggttaaagaagacctcccctg

SEQ ID NO: 155492 - DNA, 587 bp, Zea Mays
atcgtctggccccttaacaatctcgcaaacgtccctagcccgaaggttgtttgctgtcaccaaatgtttccagccctcggtgaagcccacaaataacgggtagtggtggtggatgacaggccataatctcttcttggtgtccttcagcattataacatcacagcaatgccttctctgtctaactgcattggaaagtgcacttctatctgctccgtgcttcccggctcgatcctgccctggaggcgggtttgggctttctgtttggggagtaaaaggagggacacggaggcgggtttgggctcgatttcttttgaaacaccttttctccaagttcccttattgatggaaccagtatatcagactaacagtatatccctttatcgatggaaccagctgtgcactaggtacctactaggatggatgtggtctgcaccggtgcgtctaacaaagttgatgaagacgcgacaaaacttgaatggcagacaacgagcagctccggtgaagggagcggggaggatagttctagtgacgacaatccttgtcctcctatacctccaaggaagaaaaaaacatcagatgagcttgat

SEQ ID NO: 155493 - DNA, 967 bp, Zea Mays
gcgaaatcaagggacgacgggttgattctcggaaacccgaggggtactttagcaaaaccgccgcgcgaaggggtacggggtttcctcagctgtcgaatctatgatcaacgactgagattagatccacgggcgagcgcgcggacgcgggcgcgcactgaccaacgggctagggtggtcagcgactgggggcggggaagcggactgaccggtcgggcccagtgccagaggcacaagcagccgacaggtgggtccaggcgcaaagcgcacatgcgagaagcggtatccagtgatccggaccgcgcaatagagatcgaacgaccgaaatcaagcaccggaggggttaacagctgtgggcaacgccactcttgctcatggcggtgaggtcgccgtactggggcaggtgtgggctacagcggttccgaggtcaccaaggttgtccaggatcggcgaggagaacccggcgaacacactggtggggttctagccacgagaccggggctagagatgggagaacgacggagggagagctccgggcgggtcgagggtaactccagcgaggaatcacgaccgcggggagaggcaatcgagtgcgatagggctcggtctagttccggtgagggtaggggagcgctatgggtcaacatcagggcataggacgggactgagttggctggacaccgcgcggggcacggcgagcaggcgcggccaaactccggcgaggccaaattggctacagtcaggcgcgaataaggaaaatcaagcacgggggcggatgtctcacctcgggacggagcttggggtggcttggcgcggcttctggcgggttggatggccagcacggtgggcgcaaaactccggtgaagccgagcggtgagagcagagcacgagagagggtgagcttgcgcgaaatgaggcagggaagcgagtgcgggtgcgggcggtgcttaaaagggacctagggtgcgtg

SEQ ID NO: 155494 - DNA, 432 bp, Zea Mays
caatcaagttgatgtccccactaggagaggaagtggtgaccgagttagtcccgcctgagccgaaaaaagaaagttgttatcagataactgttgatagcagtgaagcagacccactagagatcatcaaagttgtgtctgagttcccagatgtgtttccaaaggacttaccaggtatgccaccagagcagaaagttgagtttgccatagagcttcttcctggcaccgcccccatctttaagagagcttacaaagtatcaagaccagagttggttgagcttaacaagcagatcgatgagctgtcagagaaaggatacatccggccaagcacctcgccttgggccgcccctgtcctattcgtggagaagaaagatggcaccagaaggatgtgtatcgattatcgagctctgaatgaggtcataatcaagaacaagt

SEQ ID NO: 155495 - DNA, 1266 bp, Zea Mays
ctagagttgattggaccaggaactcaccgagaatcactcctggtgcatcctccgcttcttcagcatacacatgatttacttttgccttgccaaaggactgttgctgactcttagctgatgctgcacggttggctccagtctgctgctttggtccttgaacagagttggagaagacagaaggagcgggctggctgaggtaaggacaattggccttgtagtgtccggcttcacggcagtggaaacaagtcctcacattggtcaactgacttccaccagactgctaggtgcggaagttactctgggtcttcataactggagctgactgagatggcttctgaaaagaaccggggtgcgccttaaatgagaaggcaccctggctcctttgtccagggtggggtggaaactgagtcttctgaaacttttctgcctgatggggcttcttgctctcaaaccgacgtttgcgctcactaagttctgccttcctatttctctcagtggtgataaccctgttaaccatggtattaaagtcactatgggtggtggcttcaaccagggttctgatttctgggttaagacccccaagaaaagcttcttgattcttatcgtcgtcattgatgtcctcaggtgcataacgtgacaactccgtgaacttatgcagatactcagttacggtcatgccaccctgacgaagcttcctgaactcatccttcttcaacttcatcacactgctggggatgtgctgctctctaaagatcctgacaaattcagcccataccatctcattggcattcccattgatctcccgatagctgtgccaccaagcaagggctggtccccttagttgctgcactgcaagcaagaccttgtctctgtcaaccgcatgaactacttcaaacttcatctctatttcacgcagccaatcatctgcctcaattggattgtctgatcctccaaacttgggtggctgcatgcggttgaaatctgcaatcttgctcccattgccattgtgatgcactgcaagtctattgttgccaaggtttccttgagcttgagctgtgagggttgtgacaagggcttgaaggagttggttctgctgctgcaacatggctgccagatcaatgggtgctggggcacggggaggcagtggcggtaggtgtccaattgctggtgcttcggcggctgcgttctgagcgcctaggtttccctggttgacatcttccccatcttccagagcattgagtccatggactcggctcgaacgacgag

SEQ ID NO: 155496 - DNA, 1209 bp, Zea Mays
tgactgaaggcatggcctcgggtacgactccaagaacaggataggaatggggtagttgggtcttagccggtagaatccaaggttgatgtaacttctctcctcccttgcactataaaagggaggtagagtaactgtttaaggggtgagacctaggggattggatcagatttggtcaattggggttctagattccacaagattaataggggttggttatgcccgagttgctacgtcatactcttacacaagagttcaatctacactgaggatagacataaaggtggactagtacaatgcccgtgcattgcgacaatatacctatcatatttgatggtatagtgcaacagttgtacgacacccgagggtccagtggcaagccagttcgatggactctccccacaaaaaaataaatttaaaattaaagtggagtagtggaccctccccacaaaaaattgatttaaaattaaagtggatatatggcccacataccggatattaaactacaaatactgcattttatcttagctaaaagggagaaagttgagttgaaaatgagacctggcctttttttatagctcacttggtcgctcgtaaactgtagatactgcattttatcttagccaaaagggagaaaggtaagttgaaaaggagacatgtccatttttatagctcgcttggtcgtcctccttcacctagagacgtggtactatccgggagcgctgcgctgtgtgtagcttcgtgtcatatgttgggcttgagtgtttttctcactacctatctgagaggtaacgacctgtttgttaagcgagacatggggagaaaaatagatctactctacgcgtgtgacgcacgacgcacaaaactcgtgttttaaaggagtagagattaagactattagtccattaggctagaactcccattacaactacaaggtgagggagtgctagtatggacagctatgtgcaagcttgtaatctacttcacatttgtgttcatcaatcaatgagaggatgtagagtattcacaacctgaacctctctaactgtccacatgttggctcctagtcgtgccatgtttagcacgaccgccgacttacaccccgctctcttccaaaacctatcatttcatgcaactacattattattgatacattgtgtggttgtgtggcaaaaatcgttgtttctgtctggcttgttgagtatcatccgc

SEQ ID NO: 155497 - DNA, 874 bp, Zea Mays
aacgaatagtgtgcccaaacaaattctgctcaactacctcagcctcaaagagggagcctttccaaatagtgatgaatcctccagaagctccaatagaagggccgagagcaaatttatttaaatagcggttgcagaagagacgaatataagagtcatcgaaggattccttttttgtttcctgaatacaaacaatgtcacagttggattccaaatattattccgcaaagagttccacttgatgtcagagttaatgcctctgatgttgtgagacaaaattttcagtgaccggtgagaactctgaaaatgactatccattgaaaaccaaaaatatttcactgaagagctcgagtacgccaagcatacatcgacaggggcccaagcatacaatatgaaggaggtaagccaattcagagattcccaaaaaagtggggcagcgcgtgccaatactacccccgaaatccagacataagaaaagccgaaaaggcttaaaaaaaccccatatgacctttgaacccagaaaattcgggccattcacccataagacataaattggtgaaaagatagatgtggtccccatagcgggcactacaggcccaataacataaggagtagatttgttgcgatacataattaaaccaaaagatgtcaagaaccactgcgcagcagccccaagctgaaacagaagagacggcaacgcattacagccccgccaagggatgagactccgcatcatcatccatagcagaagcctccctctagtcatcagatggagaacccaactcattcctggagcaagacgaggaacgaggcctctggatggcagcactggaggacctggagttatttaaagcatcaaggctcaacttgtgggggg

SEQ ID NO: 155498 - DNA, 383 bp, Zea Mays
ttggagcctaagaactcaacctagtcgagccctgcatggaaacacttctttcttcatggtctacgggtcagaggcagtactgcctgcagatctcaagtttggggcgccaaggttgatctttgaaagcatagcagaggccgaagcgaccaggctggaagatgtcgatgtactcaaagaagagcggctgaatgcagtaattcaagcggcacggtaccagcagactctgagacgctatcacgacaaggccgtgcgacaacgatccttttcagtaggagatctcgtcctccgccgaattctaacgggggagggacggcacaagttatcgcccttatgggaaggaccattcatagtagcagaagtcactcggccgggatcatatcgtc

SEQ ID NO: 155499 - DNA, 420 bp, Zea Mays
gcgcccggctctgcccttgggaaacgggtttgacatgctcctacacggctttgccccccaggcaatgcggaagtggcggcgcctggtctgctcaagaccgatgctgacaaccaagcctgtctcctccatgtcagcgcagagcacatcaaggacatcatgcttctgcgcttccctcgctctcgcgcctcccccaccgtaacagccgcctctgtgtccctcactatgccccaacccccaaatccatgtaccatcgtctgctccccacccatcttgccgccacgcacgcccggagagccatcgacgatggctgtcgaggtctgcgtccccacgtcgtttgcagaagaagaacaagcagttcgccatcaagtaaggctacacgtcccgtccacgtccgcgtctacaccaccttttcacccccgc

SEQ ID NO: 155500 - DNA, 954 bp, Zea Mays
atcgttggatccgcgaccaagcgtctagatttaaaaatcccaagatcgcttgccacgcgcccgatccgcatcggacgaccgaaatgaatttaggccaaatcggtatctagcatctaatcaaggccgttcgccaaaggatcgacgaccgagatcgtccacctcccctggtgacaaaacgcggcggcggcggtcggctcccgcggtggcgccatgggtgaagcccacccgagttcgagctctaggtctaaacttatcaccgggatgcggcaaacgatgcagagataaatgcgacttcgttagagggatactcactgtgacttcacccgcagagacaccctgcccacggcgttgcgacgaagaggatcttcggcgagcaattacgggtcgcaagaccatcgattctgcccgcaaacaccacggatggcttcgcactagcacggcgcaggaccccgacccgatcctaggtttcggatggcggcggggaagagggtccgcggcagcgcgggtcgtctagatgcggattcgccgccttctctctctcgctacttcggtagtggtcgtgaagataggaaatagaggaggaacaggcgaattccgtcgtgcccccctatatggacgcgacgtggccagggcgccagaacaggtcgcgcgaagactacgcatgccgccatgcgcgacgagtttgttgaggacacagctgacatgagtggcccacacgccagcaaagagaaaaccgcgcgaagactgaaacctgagctgcgggacccacccgtcaacgattcgtggcgcgaggagtggaagcggatgcgcaccgtgactgccgagtgctcccaacacgccagtgagggggtgagggcggacacgagggagagactgttcggtggtccccccatgtcggtgcctccttccgtccaggaccgcgcgggctcgaggtcaaatgggccgaaaaccaag

SEQ ID NO: 155501 - DNA, 1370 bp, Zea Mays
ctctcttcctcctcactccacctatctgttgcctgcgtcgctggcttcgcccatcttcctcctcactctctccatttctagcacgctcttctttgtccttacatcctccgtattcttcatctacagctagttccgtcgtccaacatattcatcaggttaggaaaaggtttgtattcttttttccccaacgtttcatgcttttactagatccattttccttcgcaagattcgtcaattgcaaggtttgtattccttttcccccaatgtttcatgcttctaccagatccatttttcctctccaagattagtcgattgcttcatgccattcgcaccttagaatttgggatacattggtcgttttatattgcagccacattttcgtcttcattgtcccctgtctacggcatggacagttactcactgcgcttccagattttgaccctttcccccctttttaaaatacagttattagtgatctttgctacttattccttggtgtcggtaaaccaaggtatgctttctcaacagaaaaggacataggaaggaaattgtcctttatgttgttcgctttactaccctctcctcttccaaatctagaatctgctgttttttttcactcctcttctccccccttcccgtcatatgtctcactggaacttttacagatttgtgtttagagtttatggtacagaaaaagaaaaaggaagggaaccaaagaaaaaaacattcttactgttactttcaaatccatttaatacccagttcttttaattcaaatcttgaatctattcgtcttttttaaacccatgtttctttttcgtacatggctcacatgatctttcgcataattcgtagttgggcaatcctttgtttctcgtctatattttcttaaaaaaaatctcagaaattcttttctatcctcttttgtttcagcttacccacattgattttattttcataactttcctcgaatttgtctcccttgagtttcctgatttccaatcccactcagtttaatccaacatagtttggattccagttcttcccccgaaatcccactttcattcgtgtttcatatgtaatatgtaaaggttttcttagatttgttcctctagccactgcacaatacagtcaacatgcatgttgtttgctgatacacaaaggtaagattttttttacgccatcaagttattcatgctttgccactttgaatttgtattgatgtgtaaaagaattgattatatgatgttctacataaattgccagaatcctttgtggctaccaaaaactgaatgtagccacatcgaccggtaactctcacgctaggagatttcattgacgaggtaaactaaaattagttttaagctgct

SEQ ID NO: 155502 - DNA, 289 bp, Zea Mays
tacaaatgtctgagaacaggcgcagagatggaagacgtgctcaacaagagcagtaggcaccccaggaggaggtagctcagcagcagttgccaccgccacccccgatgacaattgagcagatgttcctgatgcaaacccaagcagtccaagcaattggtcagattctagcagcagtgcagcaggtgcagcagcaacccccacctcaacctcatgtgcaagtgcagatgccacaggtgcccagagacaagcgagctgagttcatgaggggccatccccctgtctttgccca

SEQ ID NO: 155503 - DNA, 281 bp, Zea Mays
tggtaatcttttatgttggaatagattggtcttgagtattgctcatactcatctatccactgggagagatgagttcaaatggaatttgtcaacctcgaggctttttacggtccgttcaatgtacaatgctcttattaataatgccaagattttctatttcaaaccgctatggaagatgaaaatacctctgaaaattaagatctttatgtggtatctaattagaggtgtggcactcacgaaagacaatctagctaagcgtagatggcagggaagtaaaaaaa

SEQ ID NO: 155504 - DNA, 782 bp, Zea Mays
gtcatagtgaatggtctagattgcttctgtgctaggatggatggaggtcggggatgatgtccagtcgactatgaagttgatgaggacctgtgattttattgttgttctaggctcaaaggtgacattgtagctggacagttatgctgaccacttggctattctagcgaaggcctcgagattgttgaacaaatcaatgagggctcgatctgtatggatccttatcttgtgcacctcgaagtagtgcctaaatttgtgtgatgtcataaggactgcatagatttttttctagttctgtcatgttacactttgaattggtgaggacctcggaaacaaagtagacatggtattgctatagtttgttgtcttcgtgtctttcctacaccagagctgcactgacctccctatatgatgctgcgatgcatagaagttgaggtgaagtggggtatgggttgatcagtgttgtgagctggaacaagtactccttcagccattcaaaggctgcagcctgctctgggccctaagcaaaatccttcactccatgtagtgttttgaggaatgggagacttcgctcaatatatcttgagatgaatctgttcaacgtggcgagccttcctgtcaacttttgcatgtctcgagctgactgcatgggtgtcatgtctagtattgcttttatcttggctgggtttacctctatgcctctatgtgatacaaggtagcccagtattctgccttgctgaacgccaaatatgcattttctaggtttaggcaaagtctagctttgc

SEQ ID NO: 155505 - DNA, 715 bp, Zea Mays
agaagacgacggaacatattgtttctgggcaatattgttttgttatgaggcgatttttttctagtttctcttttccggtgggcgtcagagcgctgttggcgctttcctagattatgtgcgttatattgttagcctctttagcgtattctggtacgagcaaatattttctcgtggcttgaattgttgtgcagaggtaggacttggttatcgtctgtgaaggtgaagagtttatacgaaccagtttgactttgttctttgggaaacattaaaccattagggtttcagtcttgttagctagaggattactagtacaatttgaagcttaaatgattcatcgcatagtgctgcatctttgtgaatcttgtacctcgatcagggtactcgtaaactcatacttgagtatgatttcgaagtccagtagtcctgctaggctcgattcctgtaattatctcgttaggaagttccagcaaccatgacttgttttctgtcaggagtttaagtaaacgatgagcatgattcagtttctgcagaaaggctatgttaccagtggcattttattatctaggtatttatttgcccggttttgctggaggctatggttctgcagaaaggctatgggtttgctgaagggcctgccttgaatttcgtatttattttctgcttcaactcctcagcacgtttaactacttgcattcagcattgcgttgcatggctt

SEQ ID NO: 155506 - DNA, 1672 bp, Zea Mays
ggcaggttcaggaaatgggcaaatgacttgctcttaatgaaatcccgttgattggccggaaatatacatggtcgaacggacactctaatcctaccctggtcaaattggatagggttttctgcacaacagattgggaggagcaattcacagattctcttctccagagctcagccacggatgactccgaccattgccctttggtgcttgggtttcgtgatttcagcagaggaaaagggaggtttcacttccaagcattttggcctaggatggagggatttcgtgacgtggtagctcaatcttgggcgtctgttccagcaggcccttgcccactcatcactttggccaacaaattaaagacaacggctaggagtctgcagagctggaatgacaaaaaagttgggaggattaagctgcagcttgagatggctagggagctcctacatcaattagaggtggcgcaggacaatcgttccttatctcctggtgaactgtggctccgaagcctgctcaagaagcactcccttgccctgtcctctatctctcgtaccatggcaaggctgaaatcgcggattgggtgcctcaaagaaggtgatgccaatacctctctttttcatgcacaaacaaggttcaggaagaaaaagaatttcattgcagcggtgcactcagaggatgggaaaatctggactgcccatgaaggaaaggcagcagccttctttgatttttatcaagggctccttggaactgcagaagtaagggatgttaccgttgatctggaatctctggggatgccatcttatgaccttgatacccttgctgcgcctgtctcggaggaggaagtctgggatacaattaagtcccttccttcggacaaatccccgggtcctgacgggttcactggtagattttacaaaagttgttggtcggtgatcaaggctgatttcatggcggcagtttactgcatttgggctagaaatttcagaaacttgggtccgctaaattcagcttttattacacttctgcccaaggtggagggggccactagtgtgagagatttccgcccaatcagtatggttcatagtttcgcgaagttggtgactaaattgttggctaacaggttagcaggccggctgcaaaatatggtttcccccaatcaaaccgcttttattaagaaacggtttattcttgacaacttcatgctagtccagcagacgaccagattcttacattgtcagaagcaggcttgtatccttctcaagctagacatttcaaaggcttttgactcggtatcgtgggccttccttatcgaggtcttgaaaaaacttggttttggacagatctggtgtgatataataagcgggttgttagctacctcttctaccaagattttactaaatagtctgcccggggaatgtattgggcatcaacgaaggctgaggcagggtgatcctctatcacctatgttgtttattcttgtaatggatgtcttgaatctgctcgtgcagcgagcctctgaggaagggcttcttcaacctctctctacaaggaatatgcagcaccgtatctcgctgtacgcggatgacgcagtgttatttctaagccctactgccccggacatcagtgtggttatggatattcttcatctttttggttcagcttcaggtctaaggactaa

SEQ ID NO: 155507 - DNA, 550 bp, Zea Mays
gaagaatgtcacaccgtgtgggggaggagatgacgaggaccttcctcgccccttcagacaggtcaagggcatgactgtctaccttgagtagcaagagggaagaaagaaaaggcatcttgacagagccactcgtgcagtgattgcagcagtagatcaggtagagcagggaggccagttacggatttcttctgatcagattgccttctgagttcgtcgccttgggtctcggactcgctcctccactgcttgctccactccttccgacccagtctccactccacctcccacttcgctagctcctgccgctctcgagccgtccactactcccgctgcttccaccacctccaccactctagcttccactgctcccgcttatgctccacctattcctccacctcgcctccgggagcgtgatgagatcgagctacgaccgcttgctgatgatcctcgtctgcttgatctttagcgagccacggctgcccgggtacgttggttcagacatgtactcgtgaattcttggttgccatctcagagggacccaacagctgcg

SEQ ID NO: 155508 - DNA, 784 bp, Zea Mays
cgccggtgaacacgccctccggcgatcctataccggccaaaatacgcaaggactggaccccctactcggctaacatctaattcaacccctaacgatcattacccctcaatcaattgcatgattccaggttgggagttcactgtctatggcaacgacaaaaattgagaatacaccgacgtgttctgagttatccagggcgatctaataaaattcaaaaggtctatgagtatcagggaacttgaaagtggctagaacaccacgcagaagagcatgagctaacctgtagatgtccgaccatggtgaggtgtttacgggtgtggaaaatcgatttggggagaaagaggaattagagagctatggtggctaatcagaggtgggagcgggtgctttggcttcgtgattacctagcggaggtcacagcgtgctcaatttatagggcctgagggtggtggctcgtgaattggagatggcgcggtgttggccggagagggaagaggttactggcgcaagcaattcgtggcgttcaccgtggcaagctccccggcgatgaactggtgggctaaggtgactcactgcgacgcggttaaagcaccaaagcatgtggcgcaaggtcgcgaggtggctaactctagtgagttcatccgaatcggtcgttagtcaggcagacacggcggccggagtgaaacagtggctcaagttcatccacaaggcgatttttactaccctgagcaaatatcagtactccgttgagcatgaatcgtagcgtccggcatgaatccgagcg

SEQ ID NO: 155509 - DNA, 608 bp, Zea Mays
tgggattctttcctcttccatcattaagttgctaccatctggcgaactctagtcctttggtattaacatactcatgtctctgaattctttaatactcttgtttcaaatacttgtctctaaatttctactacctacttaaacatttcagtttatttgtccatgaccttcctgtgttttgagaccctttcctcttctattgttaagtcgctatcttccggcaatttcttgtctcttggtatcagtatgctcatctccttgaaatctctcatactctcattttttatgcttacctttatatcccaaggtctggttaagatattttattttacttgtccttgaccacccttgtttcttgacaatccatgagcggtcattttattttgcacatccttggcaatctcgttaattccttgtaacttccttcggtaatgaattttttacttcaactcttctgtcggaacctcacttatcttatccttgtttgttttctccacttcgtaactttgtgattcttgccttaactctatccatggattatgtttttcaccattatcacctttatccttatcacctttatatcttaccttgatgtttatcttataccggtc

SEQ ID NO: 155510 - DNA, 289 bp, Zea Mays
gtccatatgaaagcaatcattgaaagtgctagcaaagcgtaactttttaaattattagtattatttccttcggtcttgtatctcgtgtgcttttgtatgctagccatttggcctacaatctcataatagatcagttgcctattctatgttcatagtggcactcttgtgacttctgttcagcacaatataagtttgtatgcctatctatgatttggcaagtcaatccagtctagacagcatcctatataccttctcaacttagtcattatctatttggacacttcttcag

SEQ ID NO: 155511 - DNA, 977 bp, Zea Mays
catgccgccgctcacgccaacagcttcggcggcctcaggcacctccatcgtgtggagcagtgaggagagggagagagattaggaatgtcctgtgcggttcttcctcaagcgcgatgactaggggaatcgcctgcgcgtatgggtgctcgtcgtggcatcgttgatgggaaagatccttggcgtcaccgcaatttctccccggagttatgggcgccgccgcggatcgcacttccctatgggccgctgtcgtggtccctggctttctacggcatttggagtgttgggcacggtcattgctgttcgcctggtcttggggaagctagctccaccgccaatttgatgaacaaccggtggaaactcgggcaattgctcaccggagcatagccccgccgctcacctgcgcctcaccgtggtccggcctctgcgcgtcatttctgtcggtaggtattcctcccactaactccccataactctgtagtagtgtagcgcgcgtaaactcgagggagctcgacttgaatcatgaaatggtgtttctccgacgatggcgctgccgtgcagggactctgcgccgcctcattcaggcatcgtgggggatgggcgtgcgtgggtcgttgatctgcgaacgtgcgtataggattagatcttcgaataccctttcgcgcatttgatctgacccatcggatcaggatcgggcggtgaggggtagtcatcggtgtggatgcctcgcggccatcggatctcgatctggcggttgtcgttggttactggtttaagttttataaaaatctaatcgcaaccattagtaattaatccaacggcctgaatcgcctcataacccttcgccctgcgcttcattcaaatgagcccctcggctttcgacaaataaacccgccgtccaccgaggcactctctgagtcttaagtagttttatagcaaaccccctgcatttctctgttttcaggcacgcagtccagaag

SEQ ID NO: 155512 - DNA, 422 bp, Zea Mays
gtctgactgccgaagctgtggttgctgactttgttttcaagaatattcagcctttgaaagacagggcgtatccagcttacttgtacagtggtattactgactctacccgggtcaccaacaagaaaattcctactgaggatctggtgagccgactagacatgatcccgagggacaagatatcaaatgttggtgctcctgttgcctattctgcttggaatctgccacctcataggtcatttttcaattttgtgtccaaccctcctactagtgatggtggtctgggtcttagagtgcgaccctctcccgaggacattgaggctctggttgctccccttcgtgattttcccaatgatgagagatagattcactttgagatgccagcaagtccagatgatgcagaaatagatgttgtactcagtatg

SEQ ID NO: 155513 - DNA, 793 bp, Zea Mays
cttgtactctatccattttgtgaatttgtcaatggcaaccagtatatgtgtatagcctccctgagccttcttgaaaggttcgatcatgtccagccgctagcatgcaaatgaccatgttacaggaatggtctacagctgctgtgtgggcaagtgctgttgctttgataggaattggcacgcttcacacttctggactaactcggcaacatcactctttgcagttggccagtagaaactggatctgaaagccttcccgaccagagtccttggtgcagcatgtaccccacactgcacggcatggatttcatctaattgtctcccaatggccaagtgaatgcatttcatgaagactcctcttgcacctctcctgtacagtaagccccctatgatggtgcagtggcctgactgccttgtgatgcgttctgccgcagccttgtcatccagctcttcctcatttttatgtacctgatgataggctctctccagtcgttgggatctgcctctagctgactcaaggcgttgcattcctccacctgatccgtgaggatgcttggctgtgatatttcttggactaagatcctaggcagagcctgggccctactggatcccagcttcgacaatgcgtctgctgctgcattgcgatctctttccacgtgatggaacttcaatccctcgaacttgtcttccagtttttgcacagctgcgcagtacttgcccattgaatcggtcgagcagtcctaatccttgtttatctggcttatgaccaccaacgagtcaccaaataccatcagct

SEQ ID NO: 155514 - DNA, 1510 bp, Zea Mays
tagtaataatcgattaaccagaaaaaacctgaaagtgtaacttgatctggaattcctggatccgtgcgcacactctaggcgttgtgcgtgtttggtcccgtcaatcagtcagtctttacgacgcattcgcattcgcgctcacctccagaaccgagatccaccaccgcgcaccttcacgactcggccggcgctccgtcactcatgatggccggccgcccgcgcccgcagacggagctgcactcgccgtccgcctccacgcggcggcgtgagcggtggctggttgtactcggcgtcgcactccacgccgtgtacatgctcagcatcttcgacatatacttcaagtcccccatcgtgcacggcatggatcccgtgccgcctcgcctctcggcgccccccgccaagcgcctcgtcctcctcgtcggtgtgtccccttgatcctctgatcccgtctcagtaagcttcggctcgatgttgggtgtgtaaatttggctggggttttttggtgggtgcagcggacgggctcagggcggacaagttcttcgagcccgacgaacgggggaggtacagagcgccgttcctgcgcggtgtgatcgaggagaagggccggtggggagtcagccacgcgcgcccgcccaccgagtccaggcccggccatgtctccctcatcgctggcttctacgaggaccctagtgctgtcaccaaaggtgcgctgccccggtgctagctctagtgtacgtgtaccacatcaggctgttcgttattcaacttgatgcaatgttttcacaagccattcagtttactttaattttcaagtatcatgcacgtttagtgtgtcattgcattgctttgacattttcggtagttgttgctactgaactaataatagttggtactcttaaccttatggttgttaaccaaaaaaacatgtactgaatgtagtgcttagtaccaatattttgtaactgagagaaatgcgcataactgacatcctgcacttggttaatattgcttagttgaattaaagtgttatatgttatgccctaatagtgaaacagtgagtattgtatttggcaggatggaaggccaatccagttgagtttgattctgtattcaatcagagtcggcacactatctcatttggaagtccagatattgttcctatattctgcagtaacctacctcacagtacctgggacacttatccccatgaatatgaagactttgcaacaggtcagattgattggtattacatgtagcttcctgaagcttaaggcattactatgttattgtacgttcgtaactgccatgcaagtactgtcgaattcatgaaatcacattgtgctttcctcgctgcattagatgactttgtgatttctcatactgcacatcgtttctttggaaccacgttgtgcttttctcactgcattaaatgactttgtgatttctcatactgcacatcctttcttcctgaaatattgatactaatctaaaagttcatcttgcagaagga

SEQ ID NO: 155515 - DNA, 563 bp, Zea Mays
ggcgagcgaaaagctgcacgctcggacgtccacgtcattgttattgattgcagccgcatgatccccatccaatgaccaggtatatatcaagcaaagagcaagccaggttgtccacgtctcccttaatcctctcagccgttcaatttgaaacacacaaccacatatcctccgaagactgctttccagccgatgtgctggagttttctagaaacatatctaagcgtcgcctcttcctccgttggtatctcacctcacctgcactctgtgcctcccacgtgccctgatcacaccatgcctccttcctctcatgcccatgtggtgggccccaggttccctctgttgccatctccttcccctgtcccacttactctgcggcgtaataattcgaccaaacatgtggcgagtttgcgctatttgtggggttgcatgggaaacaaagcgacgtgtgggctctatggccatgggtgccggctgtggcatttgtgtgccaggatagtgtgtgtgtgggacacgcatgaatatgcatacgtgcgggggttccttgcttgcggccttgcgtgcgc

SEQ ID NO: 155516 - DNA, 326 bp, Zea Mays
gccgtcatatggggatggagcgtggccatcttcgagtagaccggattggtaaacgagaactgttgtcctcgtcgactggggcaagcataagtgagggggatctgcgaaatcttttttagggtgaggaattgaggataatgttgttcaattatagggagatgggtatcatcccgaaggttgagccgatgtagtatatggtgccctcaccgtgtgtatgtaattgtaacttgtattgtaatgtggcctgttggccgttttctcggcgagagactttgatggcgtgttttattgtgcttgtccggctgcacccttgggcgtctttcgca

SEQ ID NO: 155517 - DNA, 540 bp, Zea Mays
agttctaccattgtcctttggcactggccccaatgctagaacagagcatatcaccttcgatatcatcgacatggtgtacccatacaatacaatccttggcagagggactatgaacacctttgaagcagcaagtgcatgaagataccaggacctcgagaggtcatttcaatcttcggagaccaacaagtggcttgcaacatagaaagggacttcgtcccaaggtaatggaatgtccactaagtgggcgccagcatccagaaaaacactcctaagccacctgccaagatagacaaacaccaaaacaccattcaaagtgacgggtccaagaaagtaaccctcgatgccactctccccaaccatgcagtactgataggcgaaggcctcactttacaaaaagaagccagcttgcttaattgcctacgcagaaacaaagacgttttcgcctagtcatcattaggcctagtcggagtaagccaaagtgtcatcgagcatagcttacacgtcaacccctctgttcgccctaagaaacgaaaactttac

SEQ ID NO: 155518 - DNA, 283 bp, Zea Mays
attatggtaatttgacaatatacttgctgtggcttttagtttttagtatggttctacgcttagaagtatgcacagtacaaattatgatgtaggaggacaatagcgtactcgaaggcatcgctcatcttaatagatcctaaacaatgtctctgttgattgctttctctgcataattgcttgcgattgcagcctatcacacctttttgtttataagtactattgtttgaacagccattaaacataatggttttaccagtcacttttctatatgttatacttctgc

SEQ ID NO: 155519 - DNA, 422 bp, Zea Mays
gggccgttagttttcgatcgtgtggcaggtgttaggttggggaaaatcgtagcctagaaccgtggatcttggatccggtggtggggatccgatctggatttcattaaacaccgaccgtcggatcgggatccagtggccctgattacgtaccaattcacaaccacaccggtttaatctggttcgcttatatctaatccaacagccagtattgatccataccccttcgcgggtactatttgctaaagagccctcgggaaaaatacgaatcaacccgcagtccttccctggtttagcctgagtctggggaattcttgtagaatagtccccgcacttctcagtattcgctgcccgaccctgagtctaaggaaaatgggaaataatcacagaaattgattttttaacgcataaataaatgttaaaac

SEQ ID NO: 155520 - DNA, 327 bp, Zea Mays
ggctctcacataccaacgcgagtgggcacgacatcagctaatcctcaccgttcaccataaatcgacggcaatcgggtcatccccccaccagcccatctccaggcagcggcggcggtgagaccgagctccacccagggagttcgccagagttcctccccgcccagaacacagagaccctaaatcctaaacgcggacgacgctatacactgagggaaggaaggcgaagtgatggagagctcattaccgtgattcggttagcaggattccctggccacggaggtcagtggtgctgcggcggaggaccctcaccggtgaagaaatcccgag

SEQ ID NO: 155521 - DNA, 397 bp, Zea Mays
gaaatggaccaactcctaggattttgatctgacagccacgcactccacacgaagttgcttcgcctcgatgcacccttcattatgacgccatgggctacctccaattcccactagaaccgcaccgccgagttttgaatcccaaacacggacgaaacctaccattcgtagcactgggtggttttggggctcaaccaccaaaccgccataagtagcgcaccgcatgcacatcccccacgtcctagacctgtatcccttcggtccacgaccacgccggcaacacgatctgctctaccacgtccttgcatcggtgcgtgtaccaagtgtcaacaccacgtctagtcattctgcttctctggtccctcggtcaagtcccaacgctcgtccttcaccgctcccg

SEQ ID NO: 155522 - DNA, 590 bp, Zea Mays
ggttgattccacatggcccgcactggccacatttgcagtagcggcggtagctctcgcagcactggcagcttgcattcggaataccagtaacgcaaaaagctccaatctcgaaacaaattccctacggccgcgcgccgcaccgaggcttctatgcgaaacagcggtggatgtgtgctgcgtggagggaacgggcatctgagggtgtggtgctccacatttttttattggaggctggataggctcatacatcggctcaggcttcggctccggttataaacattatccacattttttcattgctgtgcatactcaactgaaactgaagtaaacaaattttatctgagtgcactattgttatacagactcaattgaagctgaagtacagaaaatttagtaagcatccgagtgcactaatacaaactactacaacatagccctttctgcatctttgtccagcctattcttcctattgacattctcaaggctgcacataattgtcgatcaaaacaaaagagcaggccagcagcaccatgccgcatctagcgttggttcgcataggagccttggtgcggcacggccacagggatttt

SEQ ID NO: 155523 - DNA, 714 bp, Zea Mays
tttgaaatacagctagggataaaacttcctgaggtgttctatattccatgagttcccaatttccgtgccgtccatctgagtgagatgatatgatcccggccgagtgacttttgctactatgaatggtccttcccataggggtgacaacttgtgtcgtccctcccccgttagaatttggcggaggacgagatctcccactgcaaaggatcaacgtcgcatggccttatcgtggtaacgcctcagagtttgctggtaccgtgctgattgaattaccgtgttcagccgctcttcttcgagtacatcaacatcctctagcctagtagcctcggcttctgctatgctttcaaagatcaaccttggcgccccaaacttgaggtcagcaggtagtactgcctctgacccgtagaccatgaagaaaggagtatttccgtgcaaagctcgactaggttgagttcttaggctccaaacaacgtagggcaactcccttatccactttcctacaaactttttgtttttatcgaagactttcttcctgagtgcctccaatatcatcccgttagctcgttcaacctgcccgttggctcttgggtgtgccatcgaagcatacttgatctggatgctcttttgctcacagaaatcgaagaactctgagcttgtgaagttggatcctaggtcagtgatgatactgtttggtattccgaatctgaatattat

SEQ ID NO: 155524 - DNA, 433 bp, Zea Mays
gaagaaattttatacccccaaattcaggatgttacaagaagtcgccaacgcggatcgacaacctaggccaccggcgaagaacagtggcaaccacttcgaggagttgatgttctcatcgtgccagaaccacggctttcccgtctgccataagctctaggagcgtgagcttctaagaacttcatcttcaagcccctgccaagaaagcaaagtaggaggaaccggccaagccaatggagcaagagcctcccgccgaggatttccctaaaacaatggggtgccttatgatcttcggttggaccaaagcatatggctaaaagctccacctcaaggcggcccaccgcaaggtgcttgcggcagagcctaccatcccgcagtatctacgatggtcagagttccccatcgtcttcgaccgccgcgaccactcggataggat

SEQ ID NO: 155525 - DNA, 797 bp, Zea Mays
taacgatctcccctactaatgaaaatgcagttctttgctggtccactgctgcacgtttttgtttgcgcatttgacagcttgctggcattttagaggtatgcccgagtgatgcttgcgatccccacttttccgagttacggtctggcaccttgcgcaagacttatcgagccaacccatacttctgctgatgtatccccttgaattctgaaccctagttctcactttttccaccgccgctttcctgtttcctgagcacttgagtccaccggcctttcttgagagatcacgatggcctccaagaggaagagatagagtgttgttgttccaattatcccgccaatcgatcttaacagccaacttccattcaccggcaaccacatgtctgttgtttccgaggctgaccttctgcacctcgtcgaaactggtgttcttccaccaaaagagttgtgttcctagcgaatatggcgtggggttaccgttccgatagaggatacccacgaagttgtcatcttcgtgccatttctcaaccgaggactagccctgctagcatctcccttcttccgcggccttgtcaatttttatgctctgaatcttacacacttaaaccccaattctgttcttcaaattgttgtgtttgttcacctctgtgaagctttccttggaattcttcctcattttgggctttggaagtatctctaccacaatcagcgcgggatggctggaggacagcatcagcttgttggcggtgctagcctagaacttcgcagaggcaggaaggtcgaatatcttgatatccc

SEQ ID NO: 155526 - DNA, 645 bp, Zea Mays
tagcattttgtggtgccgtctcctggcaggagtgcagcgccacgctagtaaagtcaaggccgcaactcagcgaggagcaagcaggtgatgacgactgcagcagcagcatgatggtgacgagcagtgaaacggaggaggaggccatcggctgctctagtatgtactagtgggtaggatagtggcgattgtgacccggccgtccctatcgattgaggtgctagtccattttatagcccatgcaaacaaccgggcgctgctgcatctgtgtgggccatccctctctcgtttgatcggggacacaaagcagagcagagcaacacggagcagagcagctagctagcgtcactctcatcactagtagtactatcctataaccagcccagcagcagcagactctcatcattatcataccactaccagcctagcagaagcactgcctgtcggctaccctgctgctgcattcacatatgcttgaacaagttgtagatgtagggagggggaatcacatcacaagagagctgaggtggagcgccgagaggagaggatacgcgacatctccatttcacaagttctgattcaatcagtatgcgtgcgtttgtaataataattaattaatccagaaattgaggggtggacatactgggt

SEQ ID NO: 155527 - DNA, 652 bp, Zea Mays
ataaagccctccccagtgcccggctagcttccccgttgcctcctctgtaccacgccaaactcccccaagctcgcccatagctccggcgacctccccgcgacccgccagagccgcccgagggcaaccaccgtggccgaaccctttcccgccctcctccgctcgatccaagcccttagatagctccactaggaggccgtgaagcttgtccgagcttgaaccgaggaccccgccaccggaatagcgcaatcgtgctcgccggagttcggaaccccgccggagcacgtggaccgggtgagtctccgcaccattttccaattcactgcatgcatagcctctacgtcaccccgtggagctcctcgtaccgtttaattgaactataccgccgtggtttggccggagcaggagccgccgacgacctcctccgcctgcgctcgtggccaggatcgctctgaccacctctgacgccgaccctcacaccgacgtgaccgccgtgacctcccctacgtcactgacaaccgcgccggagctctactgccgccggtaagcctcgccaccataatctatgccgcgggtactgtttaagccagccagggagcgcaggttagatttcggttagggtcagggggttttgtgcaatgtcagcgactcaaag

SEQ ID NO: 155528 - DNA, 482 bp, Zea Mays
gtttcataaactgagggtgaggatgtcttgcttgcacttctcttcttatccctgcttcattcgctttgcatccagcttgcttgaccaaatatgcttcgaagcaccaaactagtgaccagtaaccttaaatccagattatgcaccgtagttggtatggctggagctgattttactctgtttagatgacaggggcaaaaccagatggcattacatttgttggagtcattttggcctgtactcatggaggcttggtggatgaaggcaagctgcttttcaactcgatgagaggggagttcggtcttaagccaagaatcgagcactatggttgcatggttgacctgctggggcgtgttggtctgttaaaagaagctaacagtctgatcgcgagcatgccaatggagcctgacgccgtaatctggggagccctgcttggagcctgcacttccatggcaacttagaactagcgaaaacagcggtgggaa

SEQ ID NO: 155529 - DNA, 548 bp, Zea Mays
agctcaaggcggtatgctgcgagtcccactctgctaatgacgggatagggaccgacgaaatgtggtgctaactttcctttcatttggaatcttttgacaccacgcatcggggagaccttgaggtatacaaaatctccttcctcaaatctgagttcccttcgtctgttgtctgcataacttttctggcgactctgagcttcaagtaacctcttgcggatcagggcaaccttctcttcagcctctttaacaaagtcgggtccttccagtgtcctttcctctacattggaccacattaggggggtctggcacttttgtccatacaatgcttcaaacggtgacatcttgatactagcctgatggctattgttatatgagaattcggcatacggcaaactggactcccaattcctgtcgaacgtcaacacacaggctcttagtaaatcttcgaggaccttgttgaccctttccgtttgaccatctgactgggggtgataagcggtgctaaaatctaacttggtgcccatagcttgctgaaggctcttccaaaa

SEQ ID NO: 155530 - DNA, 809 bp, Zea Mays
gattgcctcgcacctagaaaggttatgattctatatgggtgattgtgaatagattgactaaagtagctcacttcattcctgtcaagactacttataagtgatctcaattggctgagttatatatggcttggattgtgtctctacatggcgtaccgaggaagatcattttggatagaggatcacagtttactccagactttggaaaagtttttatgaaaatatggatacgaagttgaattttacttcggcctaccatcctgagactgatggacagactgaaagaactaatcaagtattggaagatatgttgagagcttgtgcccttaagcatggtagtagttgggacaagagtctaccttatgctaagttctcatatactggttaacaggccagtctgaagatgtcaccgttcgagactctgtatgataggaaatgtgcaggtctcctctattttggaccagattagaggaagacagttcattggacctgaacttattcaagaggcagaagaacaagttcgtataattcgagagaatttgagggtagctcaaaccaggcaaaagagctacgcggataatagaagaagaccactgaaatttgaggaaggtgatcatgtgtactcaaggtgtcaccccttcgtggaatgaggagatttaaagtcaaggccaaattgtcccctcgctatattggaccattctgagtttttaggcaagttggagagatgggctatcaactcgagctacctaataatctatctgatgtgcataatgtatttcatgtatctcaacttaagaagtgtctccgggtac

SEQ ID NO: 155531 - DNA, 558 bp, Zea Mays
aagatatccatcttcacctctgatttctgaggcacacaaaggcggcccctaaaacaaaccaaatcattctcatcaatggtgaactctggggtttaccatcgccaaccctcttttgagcttcctgcaataaatgatcctgctgctgagccgcacgcactctctccatgagggaagattgaataagcatccgagtctcctcactagcggtgccgacaaagcacagagcgatccccaaacggtccagatcagcgatcaacggcaaggccactttcggaacctcggacctgctaagggcatcaaccaccacatttgccttccccgggtgataatggacaaatcataatctttaatcaattcgagccaccgacgctgcctcaaattaagctccttctgagtgaaaatatacttgagacttttatgatcggtgtaaatgtcacaagactcgccataaagataatgcctccacgactttagagcaaaaaccaccgcggccaattcaagatcatgagttgggtaattcccctcatgcttcctcaactgccttgaaccataagcaat

SEQ ID NO: 155532 - DNA, 623 bp, Zea Mays
ggctcggcatgctggcaatgagccagtaactgatttcactgccaatggaggttctgctctcgttcaggatctccgtttccaaaatcctgcattgcgtattcgcgatgctaggattgatggaaaccgcttttggacgcttcatcatgtggacttttataattccgtgatcctccccaagaagcatcaacctattatgcttcaacgctatatcaactgggaaggttgtgaggccattggggacccagagatgacacaggcattgagggcctgtgaaaggaaaaagatgaagagtatcatgacattccaatatgattggaatgatgaagttattgcccaattctactcaactttgtggatcaagccagctgacgaggagagtccatacaactatccttatctgaacttctacattgaaggtagttgatataaggtgagctaccgtcggtttgctcacattcttggtttttctgacaatgatatctctggcgacaagatcaagatacatgattttcgtcagcctactagagatgaagccaaagatcttcatctctctgagtctgggaagtattgggagtctacaaacatgcataagtattcgatacatcaactccctctgcaggatg

SEQ ID NO: 155533 - DNA, 405 bp, Zea Mays
tgggaacacctgttaacagacgaatactttctttatatacaagaacaagtgagtagtctggtggtaacaacgatttgaagaaaggtgcaggtccttggttcgaagctccgcgggcgcaacttttttttgccaaataactaactacagcttccagttctgggtcggggccgcgtcgccaggcggtggctgtgtcccaaaaaactgcggcccatgtaggccaaggatcccacgccgtcaagtggtgtgtacacgtgggccgttttttactaaaactcatctgtgaccaatttatttcatcattacgtcagccgatcaagccaaattagcgatgacgatatcaaatctaatctgtgacgaacttgttgcgtccaaactttgtgtctatgacgttcctttcattttcgt

SEQ ID NO: 155534 - DNA, 580 bp, Zea Mays
gaagaaagaaaaagagaaactaactcaaacaaccaaaagcactcgtccctaaaccctaaaccctaaacccaacatttggtgcccaccgtttgggcgacgaagacaacacccacgatgacccctaagaaaagcacccgtccctcaccatcaagaaagtcaaggtactcctgccgccgatcattccccactacctaaccgaaggccaacaccaacccatagggtgaggatcccctcacaaaacaaaagtagacagatgcctccaccaagcaagagggcgcgacccacaccaccagtttagaagactcagaagaccctccgcccaacccaaaaaagccaacattaccaagtcaaggtttggctagacctgacaaggaacctatctcccacacccccgggtttcgctgccacagcaggcccgtgccacccattcggaatgcccttggagaacgacgacaaagacttacaggccagcctagacctcagcatcaacactgaggagcatttgttactcaaaagccttagcacgcgcaactctaatctccagacacagccctcctcatctatattatgttagtcggcg

SEQ ID NO: 155535 - DNA, 412 bp, Zea Mays
ggaacacggaggttgcgcgcttcgcggagttcagttctggggtctgcggcgcggcgggagtcagctaatcaccatgcggattccctggcagcgttagttcggtcagcggggatttcgcacggcaggtacacgggcagtggattcactcgccgtcgtagtcgagaagaaggagacagggtcgcttgatgcctagaaactgggccccgcaaatcagtgagcttgggaggagcgagcgcaggagaggctggcgcatggggccctgctgtcagcgccagcggtgtgcgtgagatcgtggttctgtggctgcgcggttgaatagaacttgggatagggatgggacttaccaacgggccccacatagcagaagcacaacagaagtgtggcgcgtccgtggtcaaggctatcgagcggg

SEQ ID NO: 155536 - DNA, 573 bp, Zea Mays
agtgcaggactcctctatattgggatcagactggagaaagatagttctttgggcctaaacttattcaagaggcagaagaacaagtccgtataatccaagagaattcgagagtagctcaaaccaggcaaaagagctacgctgataatagaagaagaccactggagtttgaggagggtgatcatgtgtatctcaaggtgtcaccacttcgtggaatgaggagatttaaagtcaaaggcaaattatcccctcgctttattggaccattcagagtttttagatgagttggggagatggcataccaactcgagttacctgataatctatctaatgtgcacaatgtattccacgtgtctcagcttaagaaatgtcttgtgtctctaaggaacagttaccaatggaagagctcagtgttcagggagatttgacttatacggaatatcctatcaagatttttgacactttgactcgatttacaagaaataaagttattaagatgtgcaaagtgcaatggagccatcatggagaagatgaagctacttgggagagagaagaagagcttcgcatagaatttcc

SEQ ID NO: 155537 - DNA, 373 bp, Zea Mays
ataaatctcttaatagtgttgactattaaacctatcaggtttgttgttgctatactctgccaatgcatatgctatccatgtcacaattttgtattagagaatgctttccagattccatattaatactcacaggtcatagtttgtagatattgatgttggctcacttggcctatgacaccatcacatgtaatcttagttcatatagaagcatatgctccctccttttccaaaaggcagaatatagttctagcatggcgtgaatttctcaaagttttctctatgagaaaatcgagtttatattgacatcccaaatgataagatgtccaaacaacttattccaaaagatgattgatagttgcctagagggggggtg

SEQ ID NO: 155538 - DNA, 580 bp, Zea Mays
tgggtatcccaaatctgaagatgatttcctggatgaactctaccgctttggctgagatgaggattgcaatcggcttgtattcgatccattttgtaaatttatcgatggctacaagcacatgtgtgtaccctccctgagatttcttgaacggcccggtcatgtctagtccccagcatgcgaagggccaggtgatcgaaatagtttgcagctgctgcgctggcaggtgttgttgcttggccaaaaattgggatgcctcacatatttggactaggtcgactgcatctttctttgttgtcaattaataaaaacctgctctcaaagccttccccacaagagtcctagatgttgcatgtactccacattggcctgcatgaatttcttccagcaaacgcctcccaacgcctgaatcgatgcatttcatgaagactccagcagcccctctcttgtacagtacttcccctatgactgcgtagtgggccgacttcctcgcaatgcgctcgatagcagccttgtagttcggttcttcctcgttcttgatatatctaatgattggcaccctccagtcatttggatcttgttc

SEQ ID NO: 155539 - DNA, 426 bp, Zea Mays
acttaaaaatagagcagcggagcatcgtgtttctaatcttacagacaagccaagaacaggcagctaaagaacagcagggaattgcccccggcgcctgcttagccagcatcaaagccaggaattaacagcatccgaagcacattgtcccgctattttaatcccgagctaagcacttgacagcatccctaatctgatctgcgcctcgaccgccaagctaacttcctcgcgcatttaatgcagctgtgcaaatcctccttggccccccatgtgcactgcgtcaccagtcgcgtatataaaaccacacaccatggtggcgccaacgaaacacacacactcctccagaacgaacacacaccagacgtctgttggcgcgttggagagtacacagctcgcagtgcagagcagccacttccttcgtctacaact

SEQ ID NO: 155540 - DNA, 812 bp, Zea Mays
gctatggcagctggaccccacttgtaagatctctctctttctccaaatcaggaactgaaaaaaaagcacgcacgcctcccaccagctcacctgtgcatgtcgttgtcgcatgccacgatgctatgcgcccacctgcgcttggcctcttgctgcggtcaatgccgtgcacacccgccgtagcagctgagacctctcctcttcctcttctctataccgttcgacagtttcttctacctccattaatggttccaactcttcttcttccccactcggggactgccattaatggcgccggccagccctccctttccaccagaccacgtcgctgaccttgtgtttgcctgctaatctgtgggccacatccgcatgcctcgggccatgtccaccctgccgcagttttctcttcagttactgtgcacagcttcatggcgctattaatggagaattacaacgtcagtttcttgagccaccaacgtcgagctgcaaatagccttcaagccacgtaattccaacttgattcactctctccctcgcctataagagccacagccacgagttctcctccctctgctcagtctcgccacgccctgctcctctgctgctcgccgccgttgtgcaacaccatgtcgaagctttgcccacacgcagaccatcgagtccctactgcagccacgtcgtgacgctacacgtgttcgttcagctcgacaatcgccatcgtcgtcgtttgtcgaagccaccctctaccttctctactgttacgaataaggtagaagaaatctattttttgtttgtacccctattctacctattta

SEQ ID NO: 155541 - DNA, 371 bp, Zea Mays
ttctggagaggagtcaccgcttcaccatgtctgacttagaccatcatcgctacgagctgtaggcatctcaggatgaagtttctcggcttggctagttgttgtctaccaaggactccaccatcagggaactgcgcgcctccaagaaacttgttgcgtaggagctggaggctgctcaacttgctattaagagcttggagaataactgtgtcatcctgaaggcctagcgcgatagggctatggacaaagtcgttcgcgctaggcggatcctgatgaggagacccggcgtcgtggtgcccgatgatattgttgctaatgtcaaggccacgcctgatgccgcaagccgtccctcctcttctgttgcccctgcgaag

SEQ ID NO: 155542 - DNA, 297 bp, Zea Mays
aaaaccctatcagacctcgcctccttctcaaccctcctgcgccgccacaaaggaacctcgatgtagcaagaggaaggggagtacaacgagagggagagagaggtttccgccgccgccggatagatccataccacggtggtggcagggccgtagtaaagcgcctggggtgaccgcgagcggctactgaagctatccgtggcatctcctggcgatgtaatccaacaacgcgccaccaatttctcgacgcctttccaccgccgccgcgagtgcctgtgccgccgtgggtagggttctgcg

SEQ ID NO: 155543 - DNA, 764 bp, Zea Mays
gccagaccgccgggttgccgtggaaactccgatgacctcggttgtgccacgccgtggcttgttactgtgcggtagtaatcgtggcacacttaagagtacaacctttgagccattgctccggtgaacgccacgaatcctttgcgccagtactcttccccctctccggtcgccgcgcgtcttctccaaattagcctccaccgctcatgaatcctataaattgtgtgtgccatcagctccgctaggtagttgtgcatccagtgaaccagctctcacctccaatgatcccctacagctccccaatttgagacttcccccaaatcggtccagaacatcgtactgtgtgagctcgccgtggccagcgcgctacaagtccgttcatgccctttgttccctcgtttaattactctgatatgctcttgatactccctgacccatccagttgagttagaacctgtaggatcaccgggaacatctcggtttgtctgttgctcgcgctgtcaccgtgggcagtgtgattaagagctcgaaccttgcaattacgggaggggaaatggttgtttagggttgaatttggtgtcaagcaaagggaaggattagtcgttgcctatttcggccagtacgagctcgccggagctcggcctgtcgccgttcaccgtcggggctcacgggttgtaaagaatagaaaggggaggggtctattcataattgtcagtgacacaagaaacagtactacggactctttaaaggtttttcaaatcaccagg

SEQ ID NO: 155544 - DNA, 1168 bp, Zea Mays
ggatagctcagagcatgatcaaggcaaatggactctcggacgaattctagggcgaggcaatcactatggcagtttgtctgctcaatcgctcattgtcaaagagtgtgggtggcaacaccacccccccccctactagctctggaccgcgagtgtccctgacgttcatcatctgcgcacctttgggtgtaccacatacatgaatgtgacgacaccagatctaaagtagctcgacgatcggagcaaagcacaccatcttcttcaactatgaagcgggctccaaggcgtaccaggtgtacgacctagcgtcacgatgcgtcgaagtggaagacttcatcgtcgagaactttaacatgtcgttgtctaggtcgatcaccaccacaacaatgacgagcgcaactacatcaattggggttgatgtttcacctacgacctcatcagcaccgccaacccacacctcaccagcgcatgacactaggagtgcgacgctgagcacacacacactcaaggacacgtccctaattgagtttgtgtcgccacccggtgttgacacttcacagcagctagacgcaaaccacaacaacgatgcccgctccggtaccgtgacattgataatgtactagggtcggccatgccaccgggggtcaccacacatgagttggatgagcagttgttgctggcaaatgaagctaagccgacgacatttaatgagacacaagagctaacaccaaaccatgctcaatgagttcacctccatcaaaacgaatgacacctaggagcttgtcgaactaccgcctagggtctgaccgatcaacctcaagtggggctacagcaccaatcatgatgaagccaggctcatcaatcatcaccaagttcaaagccagacttgtcgccaaggggtatgtacaacgtcaaggtgtccactccgacaagatttttgctctgatggcgtgacttgactctgtgtgattgttgttggcctacgccacgagtgaaggctggccaatgcaccacatgacgccaagttggcctttctcaaaggcgagttgcaggatgtacgtcaagcatcatgcctggttcgtgctcaaagggcgtgcggacaaggagctccacctgatcaaggcgctctatggtctccgtcaacccctccgtgcatgatactcgaaactag

SEQ ID NO: 155545 - DNA, 308 bp, Zea Mays
gctcaacgggaatcaaaggcatgccttcaaaaagcttcggtaaacaacaacttcattttcctcaggagcaggggcggtgctgtctccttcaactctcacaatagacatgtcgtgaaagtatcttcctctcatggtgtcaatatgacttcgtttgatggtcgattttccaagatggtgtggcttggtcgtcagggccggtcctcataatcttcatctccactttccacatcataatcatcactgtcatcagaatcttcagacaaatcctccattatctccttggtaattttctctgtattcgtttttgc

SEQ ID NO: 155546 - DNA, 1169 bp, Zea Mays
gaacaactcccagacttcctgtatggcctgaagctggacagtagtcgcacaggtatgtcccttatgccatttctcagcacacttatcacacaggcctcgagcacgcctgtaggacctaagtgctcccattctatcaaccatagtctgaggaaggggccctgggcgttgatctgcaggcactgccttgtctgctgttggtggtagggtgttcttgactgaaggtttgttccacagattgccatcaaaccgacgaacttccttacgcttcatcggttccgaaacttcttcctgtaacgtggccaaggtacaagcagtgtcgaggtctggaggtcgttgtagcattacgacagcacgaatatcctccctcaggccttccataaaccgagttgtgaaatataagggatcaaacactgactcataagctgttaattgatcaaccaggacacaaaatttctcaatatagtcagccaccgttgtcgtctgcttaatacgaaacatctggcgcaacagggactgatgttgatccttgccgaacctgtccaaaagcagcttacaaaacaactgccatggcagaggctgatagcgacgctcaatggactgaaaccaacaggcaaccagtggggagaaatgcattttagccactttaacccaggaggtctgatccacactatacatatcaaaatatacttcacagcgagaaatccaaaactggggatgagtaccatcaaacaatgggaatgaaattgtgggtaacttgcccgtagaatgatgtgtaggggcagaatcaaaacctccaaccccacccaaatcaccaggagtactagagagcatatgattcggaataactgggggtgagtggaagttgtgcatacccttgcccgagcccggcatgaaggtcgtcactgatccgtaccccgggtcacgaatctggttctcctcgttgcccttcagacggaacgacggctcggcctcaggacggagcaggagacctgaatccccggtttgcggatccatgaaggagcgatcccattgcttgttgagtttcctcaactcgagcttgacatcttccaaggcggaatccaccttgggtctccacgcctccaactcggcagtcgagttctcgagcgcgcccaagcgctcctccttgatggcgaccacctccgagaacc

SEQ ID NO: 155547 - DNA, 443 bp, Zea Mays
gaagctatatatggaatatcacaacctcaccactcttaccaaccaaagctcttatgaggtccctgcgggttgcaagaaaaatgtgtggtggtaacaagaaagtgatggttaagcgaatacaagaccagagtaccgattatgatggcttatatgtggagcttggtggggaataataaacaaggaatgcaatctgaatcctagttgttgtaaagttaaataacaatccaactcgaagttccctgcctagtgctgaccacaagatacgagtgatgtaaatagatcaaacacacgcgcaaagaaattttagatttgatgcaaacaaggagtatgattggaatgcaagtgttgcgatcagacccaaccaaagttttgtaccaaatgacaatagcaaactggttgaacaacttgatgaaactttcagtacttgacttttagcatttgtg

SEQ ID NO: 155548 - DNA, 1007 bp, Zea Mays
gatggtacagtgtcccgatcaggtcgccagctctatccctcgtcgccgacgagccgcgtgtggattcatgcttttgccgccgtgattcgtgctcggatcggttggatagcgcttggggttgagtaaatatcatcgccgtggatatactccggccactaaactactccgaccaccgtaccgagctagtcacggatgcttcggatgtgttcgccggagatagccgcttcacggccttgcgccacgtgcctgggcacatttaccgcatcgccgtgactcgcttaagccatccgatcatcgccggggagcccgccacggtattctccacgaatccactgcgctagtgacctcccattcctctgaccgccgcgtgtctcagtccaaattcaccggccactgctcttgcctgctataaattgagcccgtcgtgagctccgtagggtaatcacgcatctaagccgccaagtcttgtcttcaattgtccactaacgcccgtcaattgctcagtttccccaatccgtgtttccgcaaccacgaaagagacctcaccgtggtcagcttgctccaggttagttcaagctccctggacgtttgttctagtctccttaagaccccctaatgctgttcgacccctttgattgaactagaccaccctggattaccgtgaacgcatgtgttcatcctttgtccgtgctgtctccgtggacaggatgatttagagtcgtagtcgtgaaattgagtgagggaaatgatcggcgggtcttgaatttggtttctgccaaagtagggcgccagtccgcaagtaattttgccggtataagatcgccggagtgcggcccagcgccgttcgtcgtcagggattgtaagatgtgaagagatagaaaggagagggccttttcgcaaagcgtcagtgactcagttaaatagtgcgcgggtttcttccgtagttattcagaccgaggggggtttctgcaaaagtgccagtgcgggcgcgcgcgcgggcactttcc

SEQ ID NO: 155549 - DNA, 488 bp, Zea Mays
catcccattcttaagggttgtatcgatagggacaaagacgaaagggtactaccccagggatgagaggtatggtgtggcaatgagatctaggaggaggtagcccttgggtaggtcaaataaggaggtaaattcagatagaaggccttggatctcctgagaaagaagttgtatgttgggagtttccagaactggttgcacttccatagtataccatatgatataactgaaaggctgacacttgttccaacttggagcaatcagttcactaaccttgtagaattaccagctgctgctcatggtaaaaacataaccatttctcctgccagtgaacctgcatcgggctatgggaagatagccaatccatacccaagatgacatcataacactgtagaggtaacaccttgaggttaacacagaagatatggccttgaatgttcatttgacatcgaggaatttgatgagtgcaatatataatctgaccattcgcc

SEQ ID NO: 155550 - DNA, 719 bp, Zea Mays
agaagaacaagtccgtataattcgggagaatttaagggtagctcagaccaggtaaagagctacgctgataatagaagaagaccactggaatttgaggaaggtgatcatgtttaccacaagacgtcaccacttcgtggaatgaggagattcaaagtcaagggcaaattgtcccctcgctttattggaccattctgagtttttaggcaagttggagagatggcctatcaactcgagctacctgataatctatcagatgtgcataatgtatttcacgtatctcaacttaagaagtgtcttcgtgtccctaaggaacaattaccaatggaagagctcaatgttcagggtgatttgacttacacggagtatcctatcaagattcttgatactttggcttgagttacaagaaataaggtgataaagatgtgcaaagtgcaatgacgtcaccatggagaagatgaagcatcatgggaaagagaagaagagtttcgcatagatttttcccacctttttcctagatcttcctaaatctcgaggacgagattctttgtaaggggggtaggatttgtaatacctaatttgtaagagataatataaaaggaaaaaaattatttcctttatctatatgtgtatattgtatctacttatcatcacaagtaagtatcatatttaaagacaaataactaatctaaaagatttaccactaaattatgcatcatgct

SEQ ID NO: 155551 - DNA, 604 bp, Zea Mays
ggatgattgtgccaaaattcaaactatatagagggaggtcgcctctatgaaagtcttgaaatagagagactaaatcatccttgataatggaccaaaacacttgaaaacattccgcaaaaaaaccatccggcccaagcgctttgttatgttccatatggaatagtgctgcccaaatttcttcctcagaaaaaggcgagaccaacaatgcgttttcaacatccgaaacctaaggaatgtcatgtatttgggactcatctagagcaacatatgttgcatcaggtggcccaaataagcatttgtaatatgaagttatatgcttcattaaagttgcatccccatgtatcactttatttccatcacgtagttgaaaaatcctagatttcccactggcaactagatggaaatacttagtgttggagtccacatgtaatagatctttagtttttgctctttgataccatttaatttccttttctcgaagcagttgggctaagttatgttggaggacttgtttcaaatcaaaattttctactgacaaataggtcccctctgcctttttatccaaaaatccagcttctttaggatttctttattttcttttttg

SEQ ID NO: 155552 - DNA, 671 bp, Zea Mays
taatatatctactatttaccacttaccagtcaacattcacaaaatcaggagctcttcatccacaattataaacgatggtacaggttgcccaccaaagacctccattctatccagtggtctcctttgatcgagcaaattcaaaagtgaatttttgaatacagctacaagaccggttcacaccattttctagacatcatatctctcctcttgaacatgtaaaaggccatcaatggtttttatgcttacaaccagctcttttctgtatgatcgcaaataatcatcattcagaattgtccaaacactgttctctatagctggaaggttacagttgaccaaacagttatttctgtacttcccctcacttagcttgttttatgaataatgccagtaaatatcacatatagcaggcaggtagctaatcagtaattgattatttgcaaatgaactacaaatgtcagctgaaaaaggattggtcttcttatgaaatttactgatccccaatgatggactcaaaaactctatagatgctttcactaggtaaccattagtattaaaaacaatgttagttgggtcttaacgtgtacccatggtccaactggaaaagcaacagagtgtactagtcaatgactatatcggacccttgaaaattcttcatcgccccttgtttttcc

SEQ ID NO: 155553 - DNA, 661 bp, Zea Mays
cggttgaggacttactagtgtgtggaggggaatgaggaccggccgatttcgggtccctctgcagtggagaagaccaaggcgacggtggctcggtcaatgcgtaggagacgctgaagttgacggcgggtcggactctgcgttggagacggtgaaggcgatgacgggtagaatctctagggttcggccgccgcggtggagcgaatgcggctcggtctctgcggtggagacgaacaagggggcggcggctcggtctccgcgattccgggtccctctccggtgaagaagaccaaggcgacggtgtctcggtctatgcggtggagaaggtgaatgcgacggcggtcggtatctgcgttggagacgctgaaggcgacggcggtctctagggttcggccgccgcggtggagaagaacaagcagacggcggcgataatgctagggttcggccgccgcatgagttacgggtgaggtgagctaaataactgcgtgctcgtgggttgattcgtgggcccgatacacgtactctgctgggcgaaatctatgtgaaggcccatggaccgacacgtggattactgtttcgtaaatggaaacataagacatcgtaatatcaatatttgtgtggagactagtacgactgcccagattgcgggaacacaatcttctcg

SEQ ID NO: 155554 - DNA, 491 bp, Zea Mays
ggaaaaattagggggggttagggtttcaaacctgggttgggattttgggatgttacaaacctaccccacttaaaggaatctcgccctcgagattagactggatttgggaaaagataagggtattccctcctcaagaagtcctcactctcccaagtggcttcctcttctccttctctgctccactgaactttacagagctttacttctgaggtgcgggtctttctgactgctgaatcaagaatcttcactggtttctcacgatattgaagatctttctgaatctgcactgtctcttcttcaaggtgactctctggtgcttgcaggcatttgcggagctgggatacgtggaacacattgtggatgtcctacatggattctggtagttccaggcggtatgctgcgggtcctaccttgccaataatgggatagggacctacaaaacgtggggctagcttccctttgacttggaacctcctgacaccacgcattgg

SEQ ID NO: 155555 - DNA, 411 bp, Zea Mays
ctaagcctaacgatggtgttaggcgttagttgatgaagataaatcccaaacttcttcaaaacatcagcaatcattccattcaaaggaaatcttagtcctgccttaaagaaacctttgaagaccactacttcatcctttcctggcttcggggtaatctcctccccgccgaaacgaaccagctccttctttgcttcactaaaatatcccaaattcatcagtttagacatatcaccttcggtaacggtggatttcccaaactccaagtggctcggtttagttggcacggcgttgtaatcatcttcagattcaaattcctcagcatcgacctgctcaacttcagcggcaggggcatcctccgatactaccagccctgaccgttacatcacttcagagattggagcggttttggca

SEQ ID NO: 155556 - DNA, 941 bp, Zea Mays
tggaatttttgtggttcaatcttcagatcgaggtattacattatttcctcatgtttttactcgatctcacccgttcttgattatctagtgtatcgtttcaaggatacattttagtttaggtgcttgcaacacttaaactatcttattttgtctcgaacattgtttgagtttagttgtttggtattgttcgttgtagttgaaccgctcgcatgaacggttgaagtgcatgctcaatatcatacgcgtctttactcaaacgtgtttgttaagatccttgaacatcgatctcctcactcatcataggttctatcttttattttaaggatggtgcgtcggaggaatccatcagttgttgaatctgattcttccgatgaacaagaaattcatgaagaaactcccccgcgctctagatccaagcgcgggcgaggatctgggaacgtaatgcaaggtggtgaggcctccgggtctcatggagctcgcggtcagacggcccggaatccctctggtcggtcccgacccgcgataaatccacaagcatgggagccgacaagtgatgatgatggtggaaaggatgatgagattgaccttccctctgcccacgctcctattatccgagggttggttctccaccgggcggaggcccatcattctggcaatgagccagttaaggattttactgccagcgggggttctgcacttctccaggacatccgctttcagaatcctgctttatgtattcgtgatgccaggattgatgggaatcggttctggactcttcatcatgtcgatttctacaactcagtaattcttcccaagaaacatcagcccattctgcatcagcggtacatcaactgggaaggctgtgaagctattggagatccggagatgacacaggctttgagggcctgtgagagaaagaaaatgaagaatataatgacctt

SEQ ID NO: 155557 - DNA, 3115 bp, Zea Mays
tgaagaagcatcctctctcttcgggagaagaatgagatacgctgagttcagcaaatcaagcttataagcattaccatggtatagggagttaagagcagccattatgtcgactttaatgatgtcccagcatgtcttgtaaaattttcctgtaaaaccatcaggcctaggagccttgtcagaagggagataagcaatggtgtccataacctctttctccgaaaaaggttgctccaaagcacttagatccatcgcagccctgtgacaattactcagatcaatagtaaaatgtctctgcaaatcagcccccaacagattacaaaaatattcttcaaaaatgagctgcatgtcatcatgattggtagccattcttccatcttcctcaagtttggaaatgaaattctttttcttccaataatatgcctataaatgaaagaacttagtgttggcatcaccctcctttagatagtggatccgcgatctcaaccgagcaacagtcctttcaagagacgcaaggctaaggcatcgttgcttcaacaaattcagcaaccaaacttccccactggacaaaattctgatatcctgtgccatttccagcctatgcaacacttctctgacaagccccagctgcatcctcacattacccacttctttatgcccctaggactgcaaaacatgagctaaccttttaagcttcaatgacacttgctccaacaggcatgagctcctaactggcatgctccaagacgcacccaccacctccagaaaaccaggaattttgggccaaaaactctcaaagtgaaaccgtcttttccccatgcagccacctctgacactgagggtcaaaggacaatgatctgaagatgtggtagcattactatgaagagaagcgtccgggaatagatcttcccaacagctagtgcaaaaaacatggtccagcttaacaagagttggagcatccctctggttggaccaagtatacctccttcccttcaaatgaatctcttttagatccaaggaaataataagcctacggaagccccccagcatagccctgttaatattggaattgttcttgtcttcctccctgaaaatcagattgaaatcgcccccaatgatccatggtcccacacaggtatctctgatttctattaattcctgaagaaaggaggatttaagattgtcctagtgaggaccatacactccagtgaaccaccaacaagaaccatttttctcttgcaatttaacgaaaaccgaaaattgttggataactaaagccaacgatgtaaaaactccatcacgccatgatattaacaccccacctctggtaccaatcactgggctataaacaaaattactgaaaccagaccccaaaattgagagaatatcaaaatctgaaatagaacaaagtttggtttcctgtaggcaaataatcgaaggtctaatgtcaaccaccaaagatttaacagaatctctcttcacacgatcatttagccctctcacattctagattaaaaaacagcttgaatccatctaaacaatgatcaaacaccaccagaaaaccaccccaaccgcacctaaacaggtccgttcagcggcaccgtctagccaaacagcgctgccaaagcagcaatatgaacgctagagagcccagaaacaaatagcttcgcatatttcccggcatcctgtacagaaataacttcattgtcatcacagaaacccagatgtctgtagaccagggcagcagcctcagaaccgagttctggaggaaatttggccaccctcctgctccgccttggtacaaaattactaggtagaggcttcttccttctcttgggaaaccgtggagttggcagcaaggcatccaccggtttagtgaccaaacactggaactcgcacaagggtgaagaaattaccatagaattatcaaaagttgactgaaccaatgtgtcatcctgatcatccgaattagatggtctcaacctcctagagtagaccttgaaaactggtggcttaaaattccatctagcagaagaaacactgtcaacacaactcactgccaaaatcgaatcctccctcaatccagcagccaaaacatcagtggcaccatcaggagaataatcgagtaccataacatcacacaaggccagaacaccaggcgccgccagctcctcaactgcaacacacgggagagtaggggcatcaactggtcctgccaacaaatccaaagagacaggctccgccaaaacctccactggagttaaagggcaacccggatcaccagtagccatcaaccccacatcatcagaaggtccatcacacatcgacgaggaatgaaaacgagggcccagtcacgagtgcaccgaagtccgaggcaagggggcctgatcacccagcctccgcacccaccgagcccgacgaccctgctccggctcatcatcagagggatccgatggaggtggcggcagatgcccctccacaagggcaccctctagaccaataatcttcacgatcacagggaacaccaacgaacgtggaatccaaactctgtcttcatcgaggaccatcggctccacagtgtgcaggtccaaaacctctggcaaccccacgagagagcggcaccatgctctcaacctaatgactgacaagtcctccccgctgatagaatccgggtgcaagccctgaatcaggcagtatggaccaagcagaacctccgttgtctccagtccccaaaggtgagtagggataccacgtagctcgacgtcaatgagggaagacaagacactgcctcccgaagcaaaagcctgcctagtccatctcttaacatgcaacctcagtggagggacaaggatcgatggtccttcactaatcacccgcacagccagctcctctgaagggaagaggacaagaaaggagcctgatgcaacacgacgtaggcggagcgcatcagcgtcaaggccaaaccttgaggcgagcgcctctctaacctccgtggcgcaaccagttccttcctgcccaacaacgctgacgaccagggcatggcgaagttccaactcagcacggtcgatcatcctggaatgcccaataaacctcacaggacgaggaccgtccctagccg

SEQ ID NO: 155558 - DNA, 292 bp, Zea Mays
gtcgaacatggacgccattaatggcagtgtgaatgagaggagaaacgcccaaggcggaagtggggacggaagaggaactggcagaggttggctatggcagtggtgcggtccacgcgaaggcgaggcatcgtcgtgggctgaggcggacatggcgaggaccgctgagcgatggcacagaccaacgttggcgtagtgcttcgtaggaacagagaccggctgctgaaacgtccaagattgaagatgaagaggtgctgacaatgtgggggccacatgtcagtgaatatgagagagg

SEQ ID NO: 155559 - DNA, 272 bp, Zea Mays
attggtcccaaacctaattcttgtcaaacataagcatcactaataaattgtggaaacaacgatccaagttcccgcatattcaaaaaacgaggtgccgttacctacattcaatgaatgtagacatcattctcctaccaccactcattccaaccatcaatattctcctttacacttgtccattgtttatggagatctcatccaaagcaaaaccatacttttttaattgatagaatgaaatattaaattgtttgtgttgaacgctaaaaagagca

SEQ ID NO: 155560 - DNA, 467 bp, Zea Mays
tggtgggtgataaatccattactcaagcaaacccatcaacctcaagtcatccaaggcttgaagaaggtcatcaaccccaaaagatgccaaccctggtggaaggtgaacatgaaagtgttgatgatgaagtgcctcttgatcaagtggatgatgaagaggaacaaattcaaagacaaccatcagtgccccatcctcgagtccaccataccatccaaagggatcatccagtggacaacatcctgggtagcatcaggagaggggtaacaactcgatctcgttcagcaaatttttgtgaattttactcgtttgtctcctctcttgagacacttaaggttgaagaagcgccgggtgatccagattggataattgccatgcaagaggagttgaacaacttcacccggaatgaagtctggtccttagttcaaagacccaagcaaaatgtgattgggacaaaatgggtctttagg

SEQ ID NO: 155561 - DNA, 771 bp, Zea Mays
gggtgaggcattgacatgtggggcccatgggtcagcggtatgtcgagggcgcggggcgtgctggccactggatcgcagatcgatggctctggttccacgaaccgttattcgtgaatctgtgccgtcagatcagaactgggtggttaggatgggcgccagggggcttcaccctctccggccggccaggtgcggtgccatacgcgcctgtggtggtgcaggtgtcggagatgaggtagaccagggttctagggcgttgaggggtggtctggatagctagaaaggttggggaggactcggtgaatcctatggcagggtcgggattgcaggaatggggcttaggcgaccaaacggcggagggggagtcctcagcggaccgggggatactccggtgagcaatcgcgagcaactaagggcagaccaggggaaattaggggcgggattagatcagttaccatgagagaaggctcggggactcacgaacggcgtccagagcacggcgaggacacgggtcgacggcggcggagctgcagcgaggcaaagaggaccggtgagcatggaccgagagaaacagagggagagggagcgaaacgaggggtgtcccgggtcatgggcggtggggcgacgcttaccgaggcaatagacccagcgagggctcgacgacgaccacagaacgggcacgagaccacgacgaatggtgacagagctccctgggtatgcgtgcgatgcaaggcgagtgctgggggctgcgactgcccgagtgagggggaggag

SEQ ID NO: 155562 - DNA, 486 bp, Zea Mays
aaggggaggaagaatcgcgaggggcggagcaacggtcgcgacgtcgatgtcgacgtggagagtggaggacggcgacgcgaaggcgcggggctaggagcgggcaggagcgaccgcggctagggttttgtgttgcgtgcgattgaggagatgtgtgcactcggtggtggagacggcatggggtagtggcagttgggatcaatcgagggaaggacccaaggaggagacttcaggcgaaaatcgtgggaatctggatgttcgggacacaatattatggtggagatgagtagtagaaccatggaaatggtaaagggagaaagattgttttttatcacacagaagtataggtggtggagtggtttgaagggttgagttatgttgctgattcaacatgtctcgggttcgatccctcagtccacctcctttttttactacacgtttgggtgacagaacagcgtcagaggcagaacggcaggctacccttacagc

SEQ ID NO: 155563 - DNA, 557 bp, Zea Mays
ggccatcctggtcagggtgactaggttaaggccatcctggttaggtgggcaagtcgagattgctaatagttgggtcgaccaggttaggactgacctatttggagtgaccaaatcagcgctgactaggttgcctttggtccaggtcatgttttggcgctctttagcggtatttcggttaagggttctcctcgtagatttttcgtagtctttggttggtgcaggtttgtttgtgtttcgtttggccttagagaatgacattgttcgttgaagtttaggttggttacggtcatcctagttgaccgatagtgtgtagtgcgcctgatggatgtagaccccatgcctccaagtgaattcttgaaattagtcaagggaattgctaactgggatgacctaagttttttgaaaatagatcgatcttttaggtaagagaaagttttttatttgggtaagggtaagcctatagtaaggtgttttggagtttattttggtcatctagtaaaacagacgctcttggtgcattggggatgacttggatccctggaccccaagcaaacctg

SEQ ID NO: 155564 - DNA, 955 bp, Zea Mays
gctaatatttgcaaccctacataccgctgggttgagcaacaaatcagatcttggattcgtgggtataggtctgaggccgaggcaagaacacatcagacgagctcatgcatcacatggcacaagaccgttgcaagaccttgcctttggccacggcctagtggacgacgcggaagcatgcgacgaccacctgcaacatcctcatgagcatgtcctcctcgggcgggctaagcctcgacctcgaaccgacagctagcaacggcgtcgatgacctcccttgcgcttggcccgtgagggacacgaccttgtggagcgcggcgagcgagccagaggcgtcggcgtcggcggagcggaaaacatcaaggaagggccacaccacaacggcggggagcgcgtcggctgtagagggagagagtgagaaagtgaggcaacgcaacgcggtgggaattgtatgggacttaggagagggaggtgcttcggagtgagcaagacgagagtgaggctggggaggggagtgagagggagaggatacgactttgctcacatatgcatttgatgaaggggcggggctttgcttgccgaggtcctaggtcaccgggtgtcacgtggcacagagaggatgtgtgcggatgagtcgattgagagtgctgcttcaataatacaagagagagaatgttcacgtggagggagagagaaaaccaaaacagtggtgtgttgtgtcagtgcgacgtgcgagaacaacagtagcgtgggccacgcattgactgagcggagagcgtgccagcgcgaagcgctgagggagctccaattcctagtggcttttaacaagaagtaatattgtttggttgccttcccagttaccaccatgtaggttgtggatggaaaataagaggcacaactagctcccggcatacgcgtttgctgatcaggctttggccatatcgatgcatgcacctgc

SEQ ID NO: 155565 - DNA, 651 bp, Zea Mays
gatgaagaaagggggggtgatacaccattggcttggcgtgagagtcgggtggtgtacccacccatgcacatcactgatagacatgcacatgttgggcatagcgatgaactggcataggcgagggcactagagagagccccatgggtgggagcgatgtcaaaggagatgccactagggctgaaggcggagccacgaaggtccctagggacccaacatgggttgacaggggtggcacacgggttaataagggccaacagggtggctcggagggaggctgggggagcaggagccatgagggccatcgggtcaccgactgaagctgtgtttggggacctgtagttggaaaaacaaatagtggctgacaattggttgccacgaaatcaaggtcatggagaaaatccaactcaggaagggaggcggtgggtggttcggaagtaggcgagaaagggaaatccatcttgtcgaagatgacatgacgggagatcaagagacgatgagtggtgaggttaggacaccagtaccctttgtgatcaggggagtacccgagggagacacaacgagcagagcgaggagcaagcttatggggagtagtatcagaaaggttgggtagcatgtgatggaatacgtcttggaggcgttgtggaggactgc

SEQ ID NO: 155566 - DNA, 641 bp, Zea Mays
tgggccggttctggcccaaacggcccaggaccagggcaaaacgcgcccgcgcgcgcccgcgccctggcggttttgcagaacggcccccgcgtttctggttaatccgaagtgagttcgattactattgcactgagtcgctgatggtttgcagaaaaacccttcgcgttctattcttttaccacaccaagtccccgacggtgttccgcacgggaggccgagctccggcgagctagaccggccggacgacgcgacggctgaagttcccaagcgacaggaacataattgaactcctacggatcatttcccccaaatcaattttatggttgggactacgaatcaatcggtccacggtgaccgagcggttgggtaagaggatgaacgcattccgagcaaacgacggcgaggacgaccgaattaaggttgggaaaaggttcatgggtgcactagggtctacggacatcctttgatttgggtagaacaagacccgaagaacaggtcgacggtgggggggggggtcacggcggtgtttgacagcgcataggtgcgttccggtaaggggcttcggtcaaactccaaattgttgcatccaggggtaataagagatcacatactaactaaaacaaagagtaatttgatcatta

SEQ ID NO: 155567 - DNA, 830 bp, Zea Mays
catattagtcttatgtgtagtatcaaaggtaactgcatcaccaaaatcaatgtactcggcttgctggctagcatgggaccaaaatatgcttaaaatcttcccttctttgtccagttgaaagtctgaaaaaaattgtggattatctttcttgcataatgaaaaaaagataatagctttgacacatcatttgcatttctttccctttgccatgcttttttcctgtcaaaaaatgtaatgattatgcactatatctaatttaacacattacgcttgtttcggtaatatataataccattattgtcaatgcataatacacttacaggttactcatgtcctgcacggttattggaacgttttctggaccaccatgcatctctgaaacaaaatccataatgcaatgttgtggaatcctgctttcttgcatcgcactaaggaactccatatattcacgatcatgcgttttgttgcattgtaattgccctttttctgtatctttcttcaagaattcatgattatgctcatagtttaccagatcaattcggactgaaataacattctctttagcatcatcgtagatttttttaagtttcatcccagctttgcactgtgttcgttttgaacatgtgttatgtatccttggatttccagctaccctttcagcattctttccttccattgaacaattcaaccatttacaattcttctgctccctatatttcttcaacggaaatccaacctcgtatgcatattgactataaaaattatacgcctcgtccacgttactaaatgtcataccgactttaggtatcaatcttatatcaatattgtcc

SEQ ID NO: 155568 - DNA, 856 bp, Zea Mays
gccgggcaatgtggaatacacgcagcatccaagacactagtcaggaaggtcttcaggtcaggattctattggccgtaagcgaagaatgacgcagccgagttagttcagaggtgtgaggcttgctagtacttgtcgaagcaacaacatctaccggcacagcaactgcagaccataccagtgacttggcccttcgcatgctggggactcgatatgattggacctttcaagaaggatcaaggaggatacactcatgtactggtagcaatcgacaaaatcaccaaatggatagaattcaaacccattgcttccttaacctgagctaaaaccgtggaattcatacaagacataatattcagattcgggataccaaacaacatcataactgacctaggatccaacttcaccagttcagaattcttcgatttttgcgagcaaaaaagcattcagatcaagtatgcttctgtagcacacccaagagccaacgggcaggttgagcgagccaacgggatgatactggaggcactcaggaaaaaggtctttgataagaatgaaaagttcgcaggaaagtggataagggaattgccctacgtcgtttggagcctaagaacccaacctagccgagctctgcatggaaacactcctttcttcatggtctatgggtcggaagcagtgttacccgctgatctcaagttcgaggtgccaaggctgatcttcgaaagcatagcagaagccgaagccactaggatggaggacattgatgtactcgaggaagaacgactgaatgcagtaatccaatcagctcggtaccagcagactctaaggcactatcacgacaaggccgtgcgacagcgatcct

SEQ ID NO: 155569 - DNA, 741 bp, Zea Mays
tactagatcaccagagcaatcactgtctgtgtatcctagtagagatagttcacaatttccccctttcttgagttttatcccatagttcagtgttcctactatatacctcacaattcttttaattgttgtccagtgctctttgttaggaccttatatgaacctgctcactagtccaacagcaaaggataagtcaggtcttgtgttcactaggtatctcagactaccaatcacactcctgtatctagtaacatccttttcagtccctttcttagcagcagtgagttttattctttgttccataggagtgtcagtggggttgcaaccagtcatgtgacacagctcaacaatctttgctacatatgaactttgacagattaatatcccaccctccttctgtgtaacctccatgcccaagtagtaactcagcaaaccaaggtcactcatgttgaaagtgtgcatcatatgcctcttgaattcttctattcttactactgatggtccacatattatgagatcatcaacatatactcccaccaccaaaagtgattcaccagctccctttctgtaaacaacatgttccacactgcattttttaaaacccaaagagatcagttcagcgtccaattttgtattccaagctccgggtgcctatttcaaaccatatagggccttgtgtaatttcaggaccttcttaaccttccctggatcttggaagcctggtggctgggacacatatacttc

SEQ ID NO: 155570 - DNA, 362 bp, Zea Mays
aaaggtgtaagcctatttccctttcagttagccgccaagatcttgaggcaaacaacaagctcctgaaggagcaaatggaggagacggtccacaagtcagtgtatgatgccttcattaacatggaccttggcaggacttacgagaggctggatcgacgattgtcccagattgtcgacagacttgctgtgttggagacgcaacaacaagcaccgccaccaccacctccttgtccacgtcttcccgatgatgatgtgattgatgaagaaggtaattatgatgaagcggccaccagagatttgcaccttcgttgtcgtcttcatcaaaacacacaaggtatgccacaccgccagcaaggtaataac

SEQ ID NO: 155571 - DNA, 498 bp, Zea Mays
gccttcccttttatagctcaagggaggcacatacaaggatgctgagccccgacatgtgggcccaggaacataacggaaggaatatattataggagtaactaacgcctgtgcaatctcctatgcgcctcgatgtccgcagtccatgcagtattggtatgcggcggctgcttccttggtaatgcgcgagtgatgatgagcatagtgcacgctgcagcatggatgtactgtctgtcaatggaatggacaaacacgctgcctgcggaatagactggtcgccgcctgctagcggaatggacagggctcaataaatgtcgtggcggcacatcgcctgccagtggaatggacatggctcattaaatgcggaggcggcacatctcctatcagtggaatggacaggcggtgcgccttatccgcaataaatgcagaggccgtgcagtcccgaggccttacgtcaggctccgcctgttggcttacgtcacgtgtagtaggccacacggc

SEQ ID NO: 155572 - DNA, 1019 bp, Zea Mays
tgtcccctttggatatttcagtttccgggcatagtattgagcttctcgcttttcttcttcagataacctttttcccaaagcatgtcgtacagaataatcaagtactttggaagatgcttcgggaataggagtggcgattttttcaggcaaaatttgttctgtagcttctttttctgtttctttttctccgatttccaaggatttcttcttggcgggctctgaaggcccagcttcggtctcgaccttgctctttgcagcttcggcttcggtcagtcttgtctcagactgcgtctttggagcttcgacagttttccttggagtagagcttgtctttattgtctccagcacatctagcacgttgatcattctttttcttttaggggtcgctgtatgacctttttgtgccctcggcactgtcacttctgccgaagggcttgtaacctctaatatctttgttccttcgaccactatctcttcaattgtatcggccttcagcttagctaatttgaccaaggatgccttcggctttacagccggctcttcaatcctttgtgtaagcgcaggttctttggcttcagtagccgaagaggtctcaccaccaaattcgggcactacggccagttcaatatatcgcggccggtgagtaagaaccttcacctttttcctcttcggcgcgggctcgcttggagcagctgaagcagcatccttcccaaaagttgcactctttctcttctgcccccgtggcgggtagcggtaatcagggtacatgaacccaatagcatcaaaaactctatttagccttttcttcttccggcttccgaaggccgcagataacgtgttatcttctacctttgaatatggcccaagcagttcatcgcttgtagcttcgatacatttcagccaatcatcatctggctcaacaaacttaccttcatatctaaaggtgtatttcaacctaaccaacccaccttcgtcagacttggtgatagtctcctttggcatttcccacttctctacaa

SEQ ID NO: 155573 - DNA, 618 bp, Zea Mays
ggagcttattgacaagctggatgaaggttccatgtcctggagtgagttccagatcgtggtgaggaagcaccatgagaacagactgggaggtccatatgagaggttgcgtggtgcaagtccaaggcaggaggaatacttctactcaaatccggtccccggatgcctctgcaaaagggttcagagtagatgatacggatctatctggattgagttgaaattgtttagcctggttgatacgtgtccacgatgttcagtgtgatgagtgattgtcaaagagaccatcatctttgattcagtttgagactaaccatgacgtgagtatgtggtgttgtgcaccatgtctcttgatttgtggtacgcagatctggagtacaagagcgatcgaagccaatggtgaaggttaagtgattcgtacttatgaactggaagcggcaaaggacgaacaacaccattagacttggacgagtgaggggctaccgtgggtggccgacatttgtggatatcgatgaaaagtgctcatgaagaagtagatcatgttgactaagtcaaaacaatgattgatagtggatgcgccggatgacttgagtgatcgtgtggtcgtggaaaaccacagtctat

SEQ ID NO: 155574 - DNA, 436 bp, Zea Mays
cgggcctaggcagtgaaacactaagacatcattagcctcccgcctccacggtccgcattttggaaagttgctggcaataagaaggctcatgccagcgttccagcaatgtttgaggaatggccaatgtcagtgatcccgtgtgtcctcatgcctcctcaggcacttcccagtgtggtggttatattcctcatcctcaggttcatgtcggtgatgctgcttgtactggtactcatacttcctgagcagatgttcggatgtcggttgttgatatcacacatgttggacctgcttaacatgttccttctcatctttttggggtcgatcgcctagactggccttacccttccgtgcgtcctgatgtctcacagatcctaccatattgatgtcgaacaagaaaacttggttggcacactccaccatgttgacgcctgggaac

SEQ ID NO: 155575 - DNA, 529 bp, Zea Mays
ggcgcctgcccatccacaatatcaatagtgacgtttctggatggttttgtgacgtaacgtacgcgggacgcaggggtctgccatgtgggacaaggatcgtggggtgggggtgggctgtggctgcgagtgctactgttaggtgcgaggtgcgtcagatttcttgtagaaacaatgtttttttaggccgctaggccgcgccgataattcatcacaaggtgcagcagcagtgattttgactttgtcatcgcctcacctcgcttccgtgatctatttttcatttccaaaagatcttaacctttactagatcccgcatctctggacagcccaaggcaaaaataatagtgcagaggcttgaaaaattacagtttacagtagtcctaaaaattgcatcaatattgctacatagggttgtatcatgcacaatctgcaacaaaatactcaattcaagagtcatcatcattcagtcctatttatagttcaatattctgcattttactaaatcagcgatagaattctcaaaatacatcgg

SEQ ID NO: 155576 - DNA, 798 bp, Zea Mays
gcgtgggtgaggtttcgcgaagtggtaggcaccgtcgtatggggatggagcgggaccgtcttcgagtagaccggattggtaaacgggaactattgtcctcgccgattgggacgagcataggtgagggggatctgtgaaatctttttgagggtgaggaattgagaataatgttgttcaattatagggagttcggtatcatcccgaaggttgagccgatgtagtatatggtgccctcgttgtgtgtatgtaactgcaacttgtattgtaatgtggcctgttggccgttttcgcacgcctgtgctgatccggctgcactcgtacgcgacttttgcgtcgagtgtcgattgacgtacatgttgcgcttatccggtggcacccttaggtgacttttgcacggagtgtcttttcggaaaaagacttcgattaacgcacttgtgctattccggctgcacctttaggcgtcttttacatggagtgtctttttaatgaaagacttcgattaacgcacttgttgtgttattctggctgcacccttaggcgtcttttgcacggagtgtctttttaagaaaaaacttcgattgacggacttgtgctattccgactgcacccttaggcgtcttttgcacggagtgtctttttaataaaagtcttcgattgaggcacttgttgtgctattccggctgcacccttaggcgtcttttgcatggagtgtctttttaataaaagacttcgattaacgcacttgttgtgctattccggctgcacccttaggcgtcttttgcacgaagtgtcttttta

SEQ ID NO: 155577 - DNA, 998 bp, Zea Mays
cattttgcttcaattgtgacatcgcaattgatcccatttctcgcacttttctgcatattttgtttgtaggagtgtgtacacggatactgcattctttccgcgtgaattgactgatctaacatctgtgtccacaagtgtatgagtggatgaggacgcatggagctgtatgatattaagtggcaacacacagagaagcaatatccgtatcagccatgatgatgccaatgaatcgacagtgactggtataattgtgagatttttcagcatgtcctgaaatatttacagttttatatcatcattcaactttaacaatgactagattttccctgaaatcttcacatttttatataattgttcaacttcaacaatgagtacggtttcatgcttatcctgaatcataatgtactgtaacagatctcgtgttttgtgtcattttgaataatagacctgtactgtatttctgttattgtgtgatagtgtgtacagatgcgtgctttacatgttagcttgttaagacagtcaactaatcatgacatatgtatttttgtaaacttaaattttgttggttgtattgttgtaaacttaatttttgttgattaaccaaattagttcgaaagtcagtgttgttgacatccatgacaccctgccagatattttttgctatgtgaaattgagatctgaaacgacatgctaattatcttaaaaaagaaatctactatggcattatcctcggagtttatgccactaatgtgtgttacacagtgtttttataattgtattgcaggtgttgtaaagttcagctgaacggtttggctgactgcctttttttttccatattacttgacaggtaccaggattagataaacatgccaacgtgtccaaattatagtcaggtcacaacctacaactttccaagccagattttagatttgttccgtatcttatgcctgtggaacaaaccacttacagaattactttcaccatatgttgttcaattc

SEQ ID NO: 155578 - DNA, 565 bp, Zea Mays
gaggacgatgaagtagggcgtgggagtttcgcgcgctggggagatcaactggagttgtgtgctagcaggaaattgcacgactacaatccccgcaatcattcttcaccgtctcctgtgcgccaatacacatagcagggagaagggggcaaacctagtatttggcagcgcaaggccagaagccagctgctacagaccattttggtccatcgattcatgcctgatgcctcccttgtccctcctttgactcattcctccctctctccaccgatttatgccttcaattcgtgcatccatccttagcatcctcttctccaccaattgacgccttcagttcgtgcattattcctcatctcgaccaatttgcacctctgattcacgcatccttcctctgccccccaccaattcccatccccattagcatgttgtcacaatctcatgggcacacatgtatctctctctctctcatacacctccctcttatggttgttgcttgaacgttgcattgcccctccagcttgtgtctgctctgctgtgatgcacctgcttgtgcctggatgtgaagttg

SEQ ID NO: 155579 - DNA, 938 bp, Zea Mays
accaaggttgttctcccagcgagattaagaagggatgccttccagttaggctacctcgtagcaatcttttcaacccaatcaatgaggtcgcttctttgcagtttcttgttggagatcggcaagcccaaataagtgcatgggaaggcagcatgcacacattgcagggtgctggagctttcatgcacaacaggcgcagcacaacagatagggattgcacaacttttattcatgttggcaaccagcccagatgcttctccaaagcagtcaaggatcaatttggtacaaaccagatcatcatccagaggcttgacaaagagaaccacatcatctgcgtacatggagagcctggacctaacatttgcagcccccaagctatgcagcagccctctagattcaccatgcctgaataagctaccaagcacgtccatcacaatgacaaaaagcatagaggacaaaggatcccctgacgcaaacctcgccgatgccaaatatgatcacttgggaccccactgagaagaacttgcgtagaggaagaggccaataggttggagattaagttacaccatttcagaccaaagtcaagatgggacagcacctccaagagaaaagcccaagagactgaatcgaaagcttttgtaatgtcaagcattaaaaacaggctagagaccttccgcccatgaagggacttgatcgaatgctgaacaaagatatagttatcatggatagaccttcccctcacaaaagcactttgatttgcagtcactaaccttggcaagagaggagccaaccggttagccaaaatcttggtccaatttggcaaaactatgaatgagacttatgggcctaaaatcagccgctgttgtggcatcaatcttcttggggatttgggacttaaattcttgttcttgtttttttaaatacataaattttgtaattat

SEQ ID NO: 155580 - DNA, 456 bp, Zea Mays
gtgaaattaaagcctggaatatcggatgggcgtgaattttttgcgaatatgttactggagatgttgtgaaggtgcctgaaaaatttgggttcaattggagcatttttggctggtttgggcatttcaccgaacacgtgggggcggagttttagggtttcggggaaatggccatttgaggtgtgaaacccctcccgaaggagctaggaacctgcaggaacgttcaaggcacatagagaaacacataccacaacttggtttcacaggatttgaaattgacacacaggggtggaagagaggggcttcactggtggcaggagcacacaaagagaaaaagggaaagagagagaaggggattctcaccagagagggaaggggatgcacttggacgccgccggtgaagagatcgtcggagaggaagggtggtcgccggcgagggggagattgccagagaccgag

SEQ ID NO: 155581 - DNA, 1099 bp, Zea Mays
ccttcgtctcgcgatgagggtccactatccgcaacagagccttccttttcttatttgaagactcctggagatctttgtccatcacaaatgttataacaatgccaatattccgcccgtaaggaaaaactttaaaatactaggccaaaaaatatgtaaaatcatcctcaccggaagccatagggatggggtcatccctgcaccactcacccctgtcacttccagcatccacacaaaggcttctcgttgaatgggcgaaggcatgacctcccctagctcaacacatgtcttagccaactcttcagcaaacttgtctgagcccttcccctagtctccacccttttcttcgtcgctcgcagtaccaaagctttccccttagaacacccctcgtctgtcgcaccatgtttcactccgcgtttctttatgcgttcatcgacgtctacatcgtcagcagagccctccacaggatcctgaccatagtggaggccgttcaactcgaacacgcaattcaaccaaacattcgagcctcgaatgtcctagatcctcggcatcaccgtcttcaacgaatacttgccaacattctttaccgcctcagcctccacttccctaacgaacgccacagcgtcctgccccctcaactccacggcaaaggccaggcttagcaccttctggttcttcaaaaacgacataagcagcaacttcaccacgcccacctcccaccgtgcgctagcagccacacaccacaagcgatgaactcttctaccaaatcacagtcgttgctcgtttttgacatgcggcgaagggcgtcctcgtttacatctccctttttactttaaactaggggaaggcaatgtagcagtgcgagcataggatggtcggagacagcctcagagccccctcggtttcctccatcgccacataaaaccaaaaatcccaccagttcccccacttgttcttagcacatggcacgagatccacaacttcaccagaagtcttcttggtcctcagtgtgaacaagcatgtgccaaactgcgcaatcttgccaccggtaaccatgttctgctagcaaaggcaataattctttgtaaaacctccactgacg

SEQ ID NO: 155582 - DNA, 522 bp, Zea Mays
ggtttatcgtggagaatcatgggaattccctcccccctcggtcagagagacaaccagatgttcgcactacgagttggactgaatcccccacagacctggaggtagctgaggcgggggctctgcttgccgaggttggattattgaaggagaagggtctaactgccgaggctatggttgccgattttgttttcaagaacattcatccactaaaagatagagcgtatccagcttatctgtatcgaggccttgctgattcaacccgggttaccaacagaaggattcctgctgtggatttggtgagccggtttgagatgatacttaaaggcaaggtgtctaatatcagtgctcctgttgcatactcagcctggaatctgcctccttccaaggccttcatcagttttgtgtcaaatcctcctactagtgatagcggtttgggccatagagtgcgaccttttcccgaagaggttgaggctttggttgcttcacttggcaaaatccccgacgacaagaggcaggttcatt

SEQ ID NO: 155583 - DNA, 681 bp, Zea Mays
cgggtggtggcgcctgtgctgagcgtcgcactcttgtcggcggcaatactgctgctcgccattttgcagtgttggtggaagacgacgagacgggcgaagaccgcagcgccggatgttctcgagggcaagaactaccagagagtgtcgtacgccgaactggccaaagccacgaacggcttcgcgtacacgaacctgatcggcgcagggaagttcgggtccgtgtatctgggcgccctgcccctgacgacaacgaagacgaagagcagggattcagattcagagcccgagagcgtcgccgtggcggtgaaggtgttcgacctcagccaggtcggcgcgtccaagacgttcgtgacagagtgcgaggcgctgcggaacgtccgtgttagggaatgtgagcacaaagcccatgccggcccatgttgctaaggaaaagactataaaggagtaacacggtctcaggaatggacatcgaagaattattcagagaacacatctccttctccattttgactgtacatcttccttcccacgcatccagttgcagggctctagctcgtctccctctgtgttctagtgctcctctcctctatccagaattccagattgtcttgcttgctgcaaaccttcattctcttgaggttaccagtgaatcgagtagttccgtgtacgagagagaggtgt

SEQ ID NO: 155584 - DNA, 341 bp, Zea Mays
cgacgaaggggtattggttgatctgcaccggccgattgactacggagcgccctgattagataggcccctagccaaatcatccgcttcccaactaccgttggatccgggatccatgtccgggatctgaccacgccagagccagatcacaaccgtcggatgtttagcacacggtacagatttataatgcaacgacaatgattcctactccatcttagtcgtaaaccccgaatcctacggtccccaggcatcttcttcaccccgtgcatgtaaacaccttgacccaattccagccgttggtggcaggatcgatggacaagggacgcctcctacctaacgacgcc

SEQ ID NO: 155585 - DNA, 650 bp, Zea Mays
tgagccaaatgatgactggctgaaatgtatcgaagctacaagtgatgaactgcttgggccgtactccaaagcagaagataatgcgttatttgcggccttcgggagccaaaaaaagaagaggctaaatagagtttttgatgctattggatttatgtatcctgactaccgctacccgccaaggggcagaagagaaagagtgcaacttatgggaaggatgttacttcagctgctccgagtgagcccgcgccgaagaggaggaaggtgaaggttcttagtcaccgaccgcgctatattgaatcggccacagtgcccgaatttggcggtgaaacctcttcggctactgatgccaaagaacctacgcttacgcagaagattgaagagccggctgcaataccaaaggcatcctcagccaaattagctgagccgaaggctgataatattgaagagatagaggtcgaaagaacaaagatattagaagttataagcccttcggcagaagtgagagtgtcgaaggcacaaaaagatcttacaatgacccccaagaggaaaaggatggtcaacgtactagatgtgctggagacgataaagacttcaagctctactccagggaaaactggcaaagcttcaaaaacgcagactgagacaaaact

SEQ ID NO: 155586 - DNA, 1662 bp, Zea Mays
cgtgtgtctgtctgtgcggctgtgccatggcgaccaaagggtcagaccctgcctccccggcgtcggcgccaccgccgccaccgaagcggcgaaagatcgagccgcccaggaggtaccggtttcgaccacactcccaaattctggtggcgagattcctagcaacatgtgttgcgactgctacgtgctcccaacgcccatgtccgaacgagctgcgctgcccttctagtttcgatgggtggattggagaggttccgtcctagctagtggagtggggggcagggcaggggtgactataagtgtaggtttcttttgttgtgtccattgttaggcacctctgttaactcaactccagttgtgggttgcaagtcaaatatgtttctgcttctttattcatttttatcatcactaatccatcaaaccagaaccatctatcctgtcagttaactccactgcgcgtgtagatttaagtatcagtattaggttatccggagggcatatcttatatataccataaaataacaaaaggaaatcatagtgcaattaaattcatgccctgtagttccttctcagatagaatagcgcaatgcaagccaaataggcttgtgtgtcttcctcagctcagtcaagacaaaaacaagtgattctgctatgaacttcacatcaaatgcttttttaatcattttctctgttaatgtattaagtaccagccaaatatactgtatcttctactccttttgtttaacagttaccgattcacaagcaagcagcaactgtactgaactattgtgttgttgcctgttccataatttatctcctctggaacacaggaccaggctttctcaagttaccatcgataacaagtcgtcttccaactcatcggtattccctgttccttgatattggcaacggccgctttatttcctgttccttgattgatattcgcaaacatcctttcttgatgtgaacaacaacacttttgcagactcctccgggttcgctgccagcgagagttgatctcaacaaagttagagaggcaaagagatttgccgtccttgaagcgcagcatgagggatgccttggaagctataaaagcttcgattccctctttgggaattaccttgttcctgtcataccaacgaacgatttctttcatcaggccgggaccaaatgatgaacaagaatggctatttgtaacgaacagaatgactactaaattttgcaatttcctttaagagcgcgacctgatacagcattactaagctatcaacggaagataacacgaagaccaagttttgtgtgtggtgttgtacgtaggccccctaacttgcaagatctcaaaaggtaaagattatcctgcacagttgcagatctaagtagtgaaaaagtttttgcattatggggagcatatgtcagtgtgtgttagctttctttttttttcccttctagtgcgaatttgtcaagacatattttccatgaatctatttatcactcaaaaaaacgttcggctgccatcacctacacagaatagttgagatgcagaacatggacttaggccttagggcctagggagttctaacgtgcatttgaagttcgaaattagaaagttcaccacatagaggttccagattggaaattgaagtcatggctttgataatgttcctc

SEQ ID NO: 155587 - DNA, 414 bp, Zea Mays
aggtccaatcaggggcctgaaaagcgacaaaggttggtaatccaatctttcaatcaaaactattcttcgcctcgtccaccctcctaccctttcaaatagcttgtattcatccgccctgccactgcccccacttcaacaactcaaccgagtgcccctggtgctcgtttcccgccctcccgagttcttcaaacgattgcttcaattgtgggaagtctagacattttatcaaagactgcccatatctgaagcagaacaggtccaataatcagcagaacccaggaagttgaagccatggcaagggaaacacgacaaataatgcagtgggcaaaaatataatgaagactgggcgaatctactatacacaagtggccactacaccggagggagagccggttatgatgggtacgtttctcg

SEQ ID NO: 155588 - DNA, 981 bp, Zea Mays
tcaaaatttgccagagacaattcttgtagaccaacgagagcagacaaagctggagaagaaacaccactactttccccgctggctatgtagcgccggttgttcttccgaattagagggacttcattctcctcttcctcatcttcatcaataatgcggacggtacacccattgggatcagctgtggtcagattacacccactgggttcagcatcatcaaggtcacacccattgggatcagcatcagtcgggtcacacccattgggattagcttcagcaaaaactggcactggcacttcctcagcagcaggagcagaaggaccggcatcctgatccaagcatgacactcggcgaagacgtctctttttctttttcttccccccagcaggagaagttggttgattggctcggcgaggacgcttcgggcgaacactatcagacctctgaatatccaaagctttgccggcctctgggatgggtgctacagccagtgtttcagcaggggctgcatcagaggaatcttcagccaacatatccagcatggcacttatctctgcatcacttggattcaaaggtacctcgaaatgaacctgcctctcgttgttagggatttcaccaagtgaggcaaccaaagcactaacctcttcgggagagggtcgcactctaaggcccaaaccgctatcaccagaacgaggatttgacacaaaactggtaaaggccttggaaggaggcagattccaggccgagtatgcaacaagagtgccgatgttcgacaccttgcctctgagtatcatctcgagccggctcaccaaatccacagcaggaatccttctgttggtaacccgggttgaatcagcgaggccttgatacagataagctgggtatcctttgtcttttagtggctgaatgttcttgaaaatgaaatcggtgaccacagcttctgcagtgagacccctctctttcaacaacccaacctcagcaagc

SEQ ID NO: 155589 - DNA, 603 bp, Zea Mays
gaactctcactttgcagacagcaagaaaaggagagccttcaagattattacaaaaagttcctctcgttgaaatcacagctaccctcggtagatgaccagatagtcatccactacgcagtcagtggccttcgtgcaggcgtcctatacagccattgcacgagagaccctccgaccaaccttcaggagttgcatcaactcttcgagaaatacgccagatcagaagagctccaccacagaaaaatcgaatcgcagcggaagccaaaagaaactccgcagaccagcaggacctggatcaggccttcgcagcaagacccgccgcctcaagggcacggccaactacaagttcacaacattgcaaaccagcaccagttaggcgaagtccagccccaacgacaaaaccaccctccgcagcaaaaccgcaacaccaacgtaaccaaaggcagaggcaggggtcgaggccctcagcagccaagacgattttactgcgtcttccatggcgaagactgcgaacaccctaccagagattgcccggagaccaaagcgaccaaagaccgaatggcaagggctgccccggcagacaaccaaagagccatcgctcacacc

SEQ ID NO: 155590 - DNA, 727 bp, Zea Mays
tggaatttgaattgaggcacgaaatgacatggaatggagccgatacttcacgaatatgtttatatgggtgaatatgagtgaagtgtgtgcttggtttgaatttaggcgaagaaaatgaaatttgggcactcggctcggaaacgatcgctcgaaacggaaaatttggtgaaattaaagcctggaatatcagatgggcgtgagatttggcgaatatgttactggaggtattgtgaagatgcctgaaaaatttgggttcaattggagcatttttggctggtttgggcatttcaccgaacacgtggcgtgcggagttttagggtttcggtgaaaagactatgtggggtggaaaaaccctcccgaaggagctagtaacctgcaaggatactcaagaagcacataggaacacttgctaccaataggtttcacagggattcacaagaattggaaaaaggcacataaggggagaaagagggggcttctctggtggcaggagctcagagagaaagggggaaagagagagaaggggatactcaccagagagggaaggggagaagcacttggacgccgccggtgaagagatttccggagaggggtggtcgccggcgagggagtgatcgccagagaccgagagaggggcagagaacagagcagagagactgcctggcctcgggcgcgagaggggaaagaatttttaaaaaccgagtatgggcgcaccggacagtctaca

SEQ ID NO: 155591 - DNA, 755 bp, Zea Mays
ggcaaacatggctaggggcatagcatcggcacaatggcgctggagggggcggttcacagcgaggcggctcgttggcggcgcaacactactccggcgagcaatcgcgcatgaccgagggaaatcaagggaaaaataggggcggagctggcttgcttacctctagagaagactccgggacccttgaacagcggcagggacacgacgagggcttgggtcgacggcgacggctctccggctacgcgagggaagctccagtgagcacgggcagagggaaccagagaagcagagagcaaattgaggtgcatctcaagtcgtgggcaccgaggcgggactcaccgaggtgaaaggcacggcgaagccccaacggtggtgacgaaacaggcgcgcgggcatggcgagtggcggcggtcttctgagagctctgataagagacgacgcacgagcgaaggcgagctggggtgtctacgagtggggggatggaagagcggatgggagggggcttgagtacgggttaggcgcgtgggtggtggctgggatgagcgcggatgtgggcacgaccatggcaggcgcgcggaccagaagctagaggagggggagagctgacaagcggggaccgccacacagcggctcaggaaattagatgcgcgagggaacgtgccgacaagcgggacccaggaggcaaagagagggagggagagagcgtgcgatcgtgaaaactaccgctgacaggtgggatccaccgatcagatggcgcg

SEQ ID NO: 155592 - DNA, 1298 bp, Zea Mays
cgcgcctgcgtttgcgcgccctcggtgcctgacaggcaggtcccgcctgtcggcgccaacccgtgcgccctctctccctctctcgctgccccgtgggccaggtttgtcggcgccgttcctctcgcacgcgcgccgctctctctctgtcccgccgaccccacctgtcagctcatccccaacctctcttccacgatccctcgccgtggatgcgcccacgaccgcgcgatcttcggccacctccgcacgtcctcgccacttttgagccccgctcctcgctcgcccaccttccctcgctcacttgcaccctcagccgaacactctcgcctctctctcgctctgcgcgcgcgaccagagagctccgccaccacccaccatcgactgtcgtccattctacgaccgtcgtcgagcccgcgccccgtatgttgcctcggtgagttccgccttgccgtcagctactcgagacaccctctggtttgcccttcccctctctagtttgcctggtccacgctcaccagagcgtttcttgcgcagccggagccccgccaccgtcgacctgaggctccatcgcactcctgccgttctccaagcgtcctggagttcgcactcgagttgagcacccttcccatgcctttatttcgccaagtatcaccctagagcccgcacaattgcacaccggagttagttgcgctgccgcgggacttttcccactgcggtctgcgttctttggcgcccccgtgccagttctgcgcccatggtcgtgttcgccgtgtcgccctgaacgtgcctgaccctttccctaagcccctagagcctcgctgtggccaccccctcgtctccggcgagccctcgccgcgggaccgagcgacaccaccgcgctcatgtccgcccccggccattggatcccgggcgtccgtccgagatctagcggtttaggtttaatcagtgtggatctaatctcagccctccaatccagatcagactgctcttctctctccccctcacccgtgcccctgccgctgggcccagctggtcagcccgccctggttcgctgaaaccccgtccccgcctatcattcgtgtccgtgcgcgcgtccgcgggatctaatcatgtccgttgatctctgatccgatggtcgagataaccccgtaccccttcgcgtgtatgttttgtttaagagaccctcaggttttaggaaattaacccgctgtcctgagttttagcgcgcagacccctggtttcttttaaatagccccctgtgcattttttaatcacagaatttgccctattttcatatttta

SEQ ID NO: 155593 - DNA, 499 bp, Zea Mays
ggataatcctgaatccgtatgtcctgggttcatgagccctttttcttttcttttcccgtttttggtgagaacttggatggcattgtccgctatgctgtgttggtatagccaagcttcttcacgatttattcatctggtgagatcatctttgcacctgtacacttggtaatgccctatgtccacgtaattgacttggttcagaatgctggatgttgctgttgtgcagggcacctggtctggtttctcttcatggcaacctgaagttttgtgttctagacttgtggtgtggcaagcaaatctgtatggtgaggcagcaaggagaactttggtagagtgggagaagcacaacgcgagatgtcaacagcgtcctcgtcggcgggcatagtcgatgatggctacgcagccggagccccgacttcggcgagcgctgcgtggtgaaacaacgggttaactgtgctgtagaaggaagacggaggagccatgcgacggccgcgcgcgc

SEQ ID NO: 155594 - DNA, 904 bp, Zea Mays
ctaatgtacttcactgctgccctaacatgcttcactgataggtccacttcttttagaccatcatgcacaattagattaacgatgtgagctgcacatctcatgtgcaagtacttgtcactagctagattagtggtactcaattgcctcctcaaataactaaaactggtatcactggcacttgcattatcaacaattattgtcatcactctctccaaacctcattcaaccatgcatctcagcacattttttccaatatcatcacccttgtgtccctttaccaagaagaaaccaataacttttttatggaacttccaattatcatcaataaagctagtagtcacagtcatgtagctatatagtttcttagaagtctaaccatctgttgtcaaacaaacccattgacaagagtctttgaagaatttctttagcttagctttctcttggaagaaacaacgcactacatatctagtacatgttcttctagatggcactagaaaacaagggcatgctttggacataaactttctaaatccaggtttctcaccaaagcaaaatggcaactcatcttgtattaccatctcggcaaaagcaacccttagtgtgccttgatcaaacctccacgtgctaacaccttcatgttgagttgcttgtagaataccttgagatggatctttgttaaacttatttggattgcgtttgcaagcaaccagatgcatcttcaatgaagatgtgccatggcgtccagcctccaccttcatgttttgatggcaatatttgcacttagcatgcataacaatgtctttatcatcctttatcttaataaaatgtcgccatacatctgaccttggtgctacttccttcctacccccatccttagtcaactcaggttcctcttgtctagcta

SEQ ID NO: 155595 - DNA, 517 bp, Zea Mays
aattcctctccttgcaaggttttcaacgtatatgcatcattgggaattgccttaataacactataagaccttctccagcagattacccatacccatttggggtgggatgggtaacccatgtagtcaggaacgcatacccatattctgagtcccgtctagcagtgtacccatacccatatcgtctctaagctcgttcccgtggttggcgtgaacattcaagtcgccttatccgaacctcgccccatttgttcgtctagctcggtcccgaccctacctcgtcgcaccatagtcactgcattcgtcaccccattcacacaaggccaccgaaaggagcttcatcgactacgggagctagcgggatggtgtggctagccttccttgtcgggctgaaggcgctaccctgccggcgatcagctaccggtgtgtacggactaggcggctactcccttctccagcgccgtagagtgtgcgccacagtgagcttccgaatccagccacatactgtcatctgaatcct

SEQ ID NO: 155596 - DNA, 310 bp, Zea Mays
tgcatttgaatcatatcgtctgcttgggcactccagtcatatcgaagatccatatgactatgtctaccataagttgccagatagacaccatgttctgcgaaaaatacctcgctgttgttattgcgaagccatgaaatttgaatttgagccacacggaatgtgttgcagaaagggaaagattaaagtgcacatacctgatgttcctactgagttgaaaaggttgttcaccagtcagggagatgacgatgcaaaatattttagaaaaaacatacggtacttcaactctcatttctccttcaccagtcttgga

SEQ ID NO: 155597 - DNA, 847 bp, Zea Mays
atcttaactgcagaagggatagaagtggacccttccaaggtagaagcagtgtcaaaatggaggcaaccaaccaacgtcagtgaagttcgaagcttcctaggaatggcagggtattaccgccgcttcatcaaaggattctccagcatcgcaaggccaatgacagaacttctcaagaaagaccataaatttgtgtggaccccaaaatgtgaagaaagtttccaaatcataaaagagaaactcacaacagcacccgttctatcactgccagatattcatcaagattttgtcgtcttctgtgatgcctcgaggcaaggcttagggtgtgtgctaatgcagaacgagagagtcattgcttacgcatcacgcctactcaagccgcatgagcagaattaccccacccatgatttggaattggcagccatagtgcatgccttaaagatatggaggcattacctaatcggaaacaaatgccatattttcaccgatcacaagagtctgaggtacatattcactcaacctgatctcaacctccgtcagcgaagatggttagaactgatcaaggattatgacctcgaaattcactatcaccccgggaaggccaatgtggtagccgacgctctcagccgaaaaccattcggaataaaagggactaactttctagaagactggaaggaagaatcagcacaactaaatgcatgtctgggaaacaatgacagtctcgaagtcaagccaatgctagaagacatcatctgcaaagctcaacatctagacccagagacggcaaggcttgtggagaaagcccgcaaggaacaactcccggatctcaggacagatgaccaaggagtcc

SEQ ID NO: 155598 - DNA, 865 bp, Zea Mays
gcaaaattagtccacttttggactaaagtgcaaaaaccaagccaaataagtttcttaagtcctttggttcacaaatatgtggacttgaaagccaaaccctaagttttggacttaaatgcaaaatggacctcatttgagttctatactaagtctgaaatttcagtgatattggctcaactttggagctctacatcttccaaattattgagaatttgccctaggtcaccacatcaactatgtagatctatcttaggtgaacaactttgcttaagtgggcaagtcatgttctagtgagaaatttagagattatcatgctcaaactttggctgtcaggttgattaagttctgaatttcagacaagtagtgcaattgcaagcactttgggcatgaattaatgcatgatcgagcaagtatttgcctaggattgctataacaatattgtagctggatcttagggctataactttgttaaagggtgtcgatcatgttactccacaaaattggaggttattggctctgtaaattcccctgtcagaagcactgctggagcattccatggtacagtaacccgagtggatcagaacgccagcgtagcctgctcgccgccggtgaccctccctgcgctaagattcgcgccgccaccgtctcaattcgtgctctggatgtcgtgataaacgctcggagcacaccgccgtggataagcccggcgattaaagtatcccgaccaccatacaaagttcaccgcggtggaaccagataacctcgccggtgcactgcccccttctggccttatgccgcgtgtcctaaccgcgccaccgcatcgccatgactccctctagcctctccgttgatcgccggaatgacc

SEQ ID NO: 155599 - DNA, 1199 bp, Zea Mays
ctgcacagcccttctctctgcgttgcgtgcgcgttcagtcaatgtcacgcgggtcccacctgtcggatcgatcttctctttccccgcacagcagcaatttgacctgggcattgtgtctcttccatccggccacatcatctccctcctccgctcaccacggctgggctagtaccgttggatcggacgagatctccgctaccagaagtctacgaaatccttggaagcgatctccttgccgcgcgacgtggacctccaccatggacgcatcgcgagcaccacgggtgagagctaggatttcggaatcctaacgaactcggacctcgggcgataaaggggagctcccgtgacctatttcttcccctctgctactctctcgcgcggatttctttcctcagaacaaaaaaatcgccgccaccagtgaggtataggaagcagcgccgccgtcggtgagagagaagaggcacagcagtccggtgtgggcgcgggaacatcgccgggccatactgggtacgaatgggagctcgccacggctgattggcgttgtcgcagcgcggggaatttctcggcggacggcgggggaagcaccgcgcctcgggtcgtcgcggactgcctcacctacaacaatattttgggtgagaacctcgccaataatttcactttgaactccacattgcgtaggtgaagttaattgcgatatgaaccactggttgccgaaatcgttgttcgccggaacctgtgcgccgccgtgggtttctggggtggcctcgccgtcggcattgaggagggagatggcgtctctgtcgtttgatctgagcgaacggtggagattagaagtcgcgtactctttcgtgcgaatggatctggaccgttgggttaggatcggtcgggtgtgagtaggtcgtggctactttgaatctgagccacagactctagatcggacggtcaggatgtgaccttagccgtattatctgctgaacgtcggatcgagatccaaccgtagaagttgtgtaccgtttgaatgccttggtgatctaatctgggccattcctcctccatcggacggccgaagtcagcccttaccccttcgtctctgtaaatttgcttaagagccctcgggcttctagagaatcaacccgccatccacgagagctgtgctctgtgtctgcggagttttactccgaagcccctgtagttcacag

SEQ ID NO: 155600 - DNA, 552 bp, Zea Mays
catctgctacattttcccacacactgctacctagagctccacctccaaagctcacttgtagtttcatagcaatcctcgcctctgaagctttttcatgctttttcaacaatttccatctccgagccactttgtcctaggactcacctttttcactcaagatgacatgcattaagatgactgctttggttcttactctcacgtcttctgaagcctttcaatgggagagtgctagcagcaccgaggagcattttagagagactatgatcaacattgtttaggtagtcaaagaaacaatgagcaatccagccagagcaaatgaagagaccgcagtgattcgtaatgaacctgaagatgatgattctacattcaaaaaggaagccaaagaatatgaaggggctctaagtctatagaagccaagttatatggacattgaaaaatcctatcgggtacctaggaacgaggtacccaaaggtaagcccacgaccatcttccgatccattagccaaccaactccccgacgagcaactctgcgaggtggggcggccaaccaac

SEQ ID NO: 155601 - DNA, 618 bp, Zea Mays
ataaaaattaaaaggaaaaaaaagaaaagaaccccaattgggctcactctcgcatctcggcccatctaccaatctccctctccgtggcccacttcatccgcgtcgcgccactcttcacacacgaggacaccgacgtgtgggtctggctgtcagtgtcgctttgccatttctttgtgcacgcgttgctctggcaggtgggtcccgtggacctggcgatgaagccgcgcgcgtgtgcctctgtggggtgggcctgggtcgccaaccactaaccaaaacctcgcgctcctcacccagtcactggtaggcggtcccgcactgtcagatgtccgtcttccccgcgttgtcggttgcaacggcttggccgagctcggcggatcttgcccaccggaatcggaccgcgttgaccccgcgcgggggggggggggggggaataaaacccgggccgcgacctttcttcgccgagaccagctccagaacctctccctcggctgcctaaccccaaaccgtgttgtgctccttcattgggttggcctcgcaccgccgtgaggaaaccttgcccacgctatcgtgttgtcgcggagagcagtgctagagcttcgacacgacttgtgggatctg

SEQ ID NO: 155602 - DNA, 654 bp, Zea Mays
gggtaactccaagcgataagcgacagaggccactttctccaatactttgtatggctcgaagaatctgaaggcaagtttgggacatggtcgagacaccactgactgctggatgtaaggctacagcttgagtagaaccaagtcgcccactgaaaactggcgttcagtacgcaacttatctgcctgcatcttcatacggttacgcgcagcagccaattgttcctgcgaaagagtcgtgaacacagctctttcagacaacaaggtagccacatctttgtcagtttcagatgtcaacatcggagcgacagcaaatggtggttcgtaaccataaagagctttgaagggtgagcatcccagagtagtgtggtaagacgagttgtaccagaattctacaatcgaaagccaagacttccatcgttgaggttgggcatggacagcacaacaaagatacatctccacacattggttaactcgctcactctgaccattggattgaggatgataggacgtactcattactcaagttcaacttggtgcccagcagtttgaacaagtgagtccaaaaagcaccggtgaatatcctgtctcggtcactgaccatcgacttgggcagtccatgaagtctgacacttgatctaacatcacctgagcggcctt

SEQ ID NO: 155603 - DNA, 1088 bp, Zea Mays
cagaggcgaagaccggctttgtgccgatggagctgcagaattccctgaagtcttggctgtcgaactgcttgtcgttgtcgaatgttagctcggacgggactccgaagcggcagataatgttttgccagaagaattttttagtggtcttcgctattataatggagactgccctggcctcgatccactttgtaaaatattcgacggcgatgaaggtgaactttaagtttccttgagccgtaggcagtggcctgactatgtccagcccccaacgctgaagtggccatgtgtgggcaaagagcttggtgtatggcgaaggtttgcctaagcgaggagagaacttttggcatgcctcgcatgacctggtgactcggttggccgtgtaaattatcgagggccagtaaaattcctaacgaatcaccttggccgtgagggcccagggtcctgagtgtgagccgcacattccaccgtggacttcgtggaggatttctaggccttcggtttcggttatgcatttcagcataggctggcttatgccctttttgtatagctggccctcgactattgcgaaatccctgctcctgtgttttggtcgtttgtcctcattgcgatcggttgggtggtagtggccctgcaagtacagtgttattggggctcgctaatcttcggccatgatgaggttgacgattcggtggccttcgacgtcttgagttatttgcatgccttcgaggttacgaatggctggtgtgccgatgacgtgatagaacacgtcggagggcagggcctcgcccttggctgctgccttggccaacgcatcggcatcttcgttcttgttgcagtcaacatgctggtgaagcccttgaactgtttttcgaggccgcaaatgacggtgaggtattgcatgagcacatgctcctttgctgaataatctttttcgatctggccagcgacgaccttggagtctgttcttgtaacagcccagtgttacctagggttttccagtaccccaacttatgaccattatcacatgtggctctaatgatgcatgaaacaccaaatttaaagggttaaaagcctaagcaaaatctttt

SEQ ID NO: 155604 - DNA, 677 bp, Zea Mays
ccagcagcctcggggtatatgtacacgactccatccgccccagccccctaaactagcatctaaaatccaagaccgccttaacaccgggggaagccctatgcaccgccccgggagaaccatcgccgtggtcgggcagcgccacactggggaagactctgcggcgatctctggcacctgggaccattactcgaccgcgccgcacgtacttgtagcgtcgttgtgcgggggaaccatccggggctccaggaatcgacagtcgggattcaccaccgtcgcaagccaccacgggccatggagaagggtccctgtcgtcaccatctccggtacgtgtgtgctcccatgttcgcaacctcgtccgcttcgagtagggttgattagagtcgagaatcgctaattggagcggattgggggagggctcaccgacgtactccaccatggggagttctggcgccgtcgtgggcaccgtcgggctaggaggatgccctcaatccatcgatcagacaacggacggtgtcgattaggttgggatctaccgatcctggagtgtgctctgggccgtcggattctgatcccgcgaacacggatagatatagaataattaaaatccgagccattgccctcggatccaatggtcgaggctgaatatcggttcacctcgtgggtgaattaatcgtggc

SEQ ID NO: 155605 - DNA, 318 bp, Zea Mays
gcaggatcttgtggtgctgtttactgcaggacggggcaaatgctgtgacagcggctgcttgaagaaactggggtctccttttcggttgcttcggttctggaaagagaagtgagcttgctttgcttaggaatggtgtgagacgaggcactaggtggcgccaagtcttagggctagctagtgtatacttcacttgcttcaaggtgggtaactggggatgcacatgctcatctcagtctagctagcagtagctgatctcttcgagccatagagagggcataacgcctgactctcttcgagttttgactttgatggttatcg

SEQ ID NO: 155606 - DNA, 679 bp, Zea Mays
gttgatttctcatctagtgaggcaaagctcacaacttgcttattctcaaaggcttcactaggttggttatggcatagaagacttggtcatgttggaatgaagcaactcaatcggttaaccaatcatgacttagttcgtggcttgaaagatgtgaagtttgagaagaacaaattgtgtagctcttgtcaagccaggaagcaagtgacaaatactcatctaaataaaagtcaaatgtccactcatcgacctttggatttacttcacatggatttatttgggcccacatcatttgtgagtattggtggtaattcctattgtcttctgattgtggatgattattcaagattcacttgggtttattttcttcgagataaatctaatgtgtttgaaatattcaagtcctttgctatattggctcaaaatcaatttgattttgatatcaagaaagttagaagtgataacgggtcggaattcaaaaatgtaagaattgatgaatattgtgatgataagagtattaaacatgaattctcttccaaatataccccagaacaaaatggtattgttgaaagaaagaatatgactctcattgatatggctaggtctatcttaacggaatataatgtatcggattcttattgggctgaggcaataaacaccgcttgtcattcatcaaatagac

SEQ ID NO: 155607 - DNA, 594 bp, Zea Mays
gatggctcacataataaggaaatatcacaagtaccagagagcgaggtttgcatatgcatacacaaattcaaaataaatggaagaacacagcgatttaatataacagcacgagattgttaattccatgtgaagcaagcaattacagaatgatcagtctacaggtattaatagcctgttacaatcacattagcatcctacgactacgaccatgcatgtcctctcactctcagccctcttcgttcaggtttacaaaggtgcccgctgcatttggaaagttataccgcgtgatcgtccatgccggatctcctcgcattaattgcgtcgcgagcaatccagcctccgatccgagctcagctcagacgatcacctccgggcaatcagctgctggacgcctagctgcctaggcaatcatcattacagaaaacccgttgaaagaccgtgagagcgaactgcctaggcaatcggtaatcgccggaacatgcatggaagcctacgaggcctagcccctctagcccctagccatgtctcgccccaccaccgtgttgcgtttgatccgccggccgccgcggcacgcagcgcctcctatatacacgc

SEQ ID NO: 155608 - DNA, 406 bp, Zea Mays
tgaatttgggcgagacgcccggcggtcggaggaggagaggagcactggcgcaagcgtttagtggttttcaccgtggtgctccctccggcgatcaccgtgcatgtgagacgcgacttacagcgacgtggtctaacgctttagcacgtggcaggcgaccaacgggcagccattgccgatgaactgatctgcgccgaccgtaaggcatggggggtacggcggccagctgccggagttatccccaggcgaagatcttttgccccgaagcgctatccggttaccagtgagcgcgaatcttaacggcggcgacgatcccggcgcggagtcatcggcggtgaggggagcggtcgatctgatcttcatcagatactgtaccatgggagccatcatcagagtgcctgactgagca

SEQ ID NO: 155609 - DNA, 629 bp, Zea Mays
cattttcctagtgttactttctataaaaagacgtagaaggaatacatgaactcccaattcatttttagggtttacaaattctaccccccttaaaaataatctcgtcctcgagattagtaagaaaggaatgtaaaaagccttatttatagtttagcttttagtttctaattagtttaatattaagaactttcatgttaattagaaagtgattaggaaagcatgggcatctatatgtataaccattttattatttaggataaaagatgggtaggttagggcaagaatagcctagggtaagatagtttatggtgaggaagaactccgtgttgggtgataatggatctgaagatcgagttcgacttcctcctttcttgacgaggttgagcttgtccttctctggtcttggtctcattggttcgagattagtgtatatcagcggagttgggggaatatggttaagatggttatggaagaaatagactacatgatgtaggtcaaaagtttgtttgagtttaggtggggatagacagattttgcaatccatcatgactctattggttgggtaagttatgtaactcgttatataggtaaagtgttgtgtatggccaagttgatacaagttactaatt

SEQ ID NO: 155610 - DNA, 282 bp, Zea Mays
ccgattaggctcgcccagatgtccacggtgtgtgatccgcgcgaaggcgaagaccggcgaggaagggcctactagcagagagaaagaagctacgagaggtcgctgtcgtgcggggtccagaggccagcgatccatgcgcgtgcgtgtgagattggcaggctgacaggtatggcccgcatgtcggcgtcgtgttactgagtgggctgcgcagagtaaaggggaggtgggccaaataggatagctgtcgacccatttaactttaaaccattttctttttatttt

SEQ ID NO: 155611 - DNA, 386 bp, Zea Mays
atttgattaaaacctcagcacgatggagatgagagaaaggcatggtcaccctacaatgcaaaaaaaaaaacacaagcttttccgtgatggcaacaggcgtgcgtgaaacgagagggcgagctttccctttttaaccccacctccatggccctcttcccccgtatcgcatcgcatcgcatctggcatgggccgcgcagcatatggcccagatgagcggggctagttcggtcatttccccccatgcggccacgccatgcctaaacaggcgcagcaacaagagaacaagggagcacgcacgcagtagggcgtcgctgtccgcgtctctcctccagatttgtcctacttaggcaggcacataacccacacccacccgagcccgatcggag

SEQ ID NO: 155612 - DNA, 589 bp, Zea Mays
acctaattcaattcttttgaattgagaaacaatctaacacaatatagacaaacatcaggggctagctagaaaaaatccacttcttctaccttccctcctctatttcttgcacgcaggggctggcgacgagcgaggttccgaccgattgtggacgaggtgagtaaaggatgtggacggtggagcttcgagctccggtcgacggcatggacggtggacagaggtgttccggtggtgacgaacgtcggagacgacgagacaatgtcggtcgacggcgacgtacgacgacaaggagagaggagaggcgtgggcgagctcggcagccgggggaaatggtccatgagcttggcgtcgagcttttatagagggagaagagagagagagagagcaccgggagagggagtaatggccgtcagcagccattaacgacatcaatggtgcggcttcaatggggagcgagattgggggggaggaagagggagaggcgcaatggtttctagtgctccacttgcggggaaggagaagaggtggggaggcggattggcgggcagccgggctcggcgctgggcaagtcgtaccgtggcggtggcgg

SEQ ID NO: 155613 - DNA, 491 bp, Zea Mays
gtcagagtaggttgaaaatgtaaaattatgcgacatgttattggtgtttgaagaagagatgtgcaaataatcagtttggtgtttcactcgtctagtcgataaatgttgttataaataattgcgctaaaacttggtcataagagtgcagtgggcacatggtgtaggttggatgtgataagtagattggaagtgtgggtttgttgagcactgtattgttgaaagggtatatcgaagtgcatggtagtggtaattgcatcaagttaatcggtagtgtctcgagtacacgccgccacatggttgtatgcgagacggggaaatataaggtgtgctcgacacgaaagttcggtcggtgtaggtagaaattgtcttggcttaattagagaggtgatgtcatgccgtaagtagtcatcacttcctctacaattataagtcgagtctatacatgttaggcgttccttaaattgtgcttcacaaataagtgtatgattgtg

SEQ ID NO: 155614 - DNA, 942 bp, Zea Mays
gtagaatccaagcaagcttaagagaaataaacaaaagagagggggaaatgatgtgtttagttttggactgctggactgcatacgtcatggtctgcaaacactataataaagttgtagtttatcggatccgattacatatagcttacgttagggattagggtttgagtgctagcctagtcgcacaagagaaaagagatgaagacgtgttgtactgctgatggtgtaggtctcggttggcgggcatacctggtggctggtggcgcccctgggagcctagagttgagggcggcggcgttgcacctgaaggcttggctgctccgcggtggtggcgcgcctggcgcttgaggctcgacctggcttggggccttggggaaggagatgaccggagaaggttggccctcgtcggcgccttccgcagccgtagtggcttgccgccctctagctctccactcacaagcgcacatccatggaagggacaggggagggctatactacgatagggcatttgggcatgtctccgctcatagggaggtgcttgaggctggttgtctggctagccgcgtggctgtggcgggccggtaggcctactgcaaagtgacaatatttttaggcagttaggctgtcgtgaatgggccaagaaaatatggtaaaaatacagaaatatgccggatttttctgaaatttcaaaaacggacggtaaaaatgtcgcgccattttctatatatcctgataaatccaaaaattattgggaaaatccgataagtgttaccggaaatgtactggatcgagaaaatttgttaagtggtacaaaaaattactagattttactgaatgttttcatccttgctggtgatgctcgtggagtggagagaagagtatttggtgtcatcgtgtgttcaaacagtccgtgaagacggatgcctcgttggatggactaaaatc

SEQ ID NO: 155615 - DNA, 1047 bp, Zea Mays
taacatgggtgtctttcctacaaatctcacaccataaatttttgctacagtctctagcatgatgaccttcatccccacatttctgacagaacaatttccttcccgaatcaatctcagtaagcgatgatggggcaatgggattaggaatacctgcgctctcgatttcccctgatgtcgacgaccccgggagaataaccttggggccacccctacccagaggtgggctgagccgccagctcagattccgatttcttccccatgggggagtcacctgctgatcacggggtcctctcctgtcccatccttgactccgctgcttcggatccatcatccggagacccttagctcccaacctcggccactcttcaagcacggatgggggtctgaatggtaaacgatgccagccacctccgtaaagagaaacgtaatcagtgggtaggagccacatccgagagacgaatgcggcgaggtgtgggagggtacgtgaacccactaggtcattcggacagctagaatccacgaccgtcggatgcaaattcggatgtgaacgaccccacgtgtcacccaacggagccttctcaaactgggccgtaaccctgttcccagctgggctgaaatccccaccactggaaaacgtctgcgcgatttcaacacccggcatccatcccgtccaaatttttccttgcaaatcatggaaagagcctgtacgatcatcagcttcaaactcccaatgctccagattcctggtattcgactcaggaagcggagccacagtgagtgaagcatgaattgacaaatgacggaaatcgcttctcatccccaatgctgaggaatggataaacacagaggagaaggaaggacaggggaaacgaccgacacgttcgtctgagttgtagaagaccgaatgatttctcgcaactcagaaccaccactaccaaatcacacccacccgaccaaacgaaatgaaatacaatcgacgaactcgaggaaaaaaatgtagaagcaaaacagagagcaatccactaagaacgagaagcggaaaaggcc

SEQ ID NO: 155616 - DNA, 325 bp, Zea Mays
ctcaataccctccaatcctcccaggatcccgggtcaccaaattagtcctaaaggtgaggttcttctcctgcaaggcgagatccgccgcccgcttatccagggaagcatccttctccttgaggttctcttcggccagggcaaggctgctggccctgtcatccagcccccgttgcagcctttgcaggctctccacagtcgcggcctgctggacccgctgctcctccagcatcttgttgaaggcattcagcttcgcttggagctccatgatgacctcctccctctggtccaagtgttcctccttcttggccaccttcttctccttccg

SEQ ID NO: 155617 - DNA, 468 bp, Zea Mays
ggggaaattcagaaattcagaaatctgaatttcagcccctttccaaagatcaatcgtgttctctgtttttaaaaactcaaatcaaacaagtccaaatatcaaagtggcgccaaattcccttgaacacaccgtggcaaagtttggaaacctctctccaccgtttgacacactcttgacatggttttacctcgggactcaaccttgtgacactgccacctttgtgacacgacaactctctgtacactgccccaaaccgctcgacttccacacataaacgacaaagctttgttgggggagcaaatcttgcacagtgatcatgcccaaattcgcgaagatcttcaacctatgagcgcttgaactcgggcagaagcaaagagccacgtgttcgatcgcttgcctgaccggccgagcgtggactggccgcggcagcgcgcgccccacgtgtggtcgccctgccccacgtgtgcc

SEQ ID NO: 155618 - DNA, 786 bp, Zea Mays
gctataaatgtttagatatggattcaggtcgagtctacatttcacgggatgtagtatttgacgaggctctatttccttttgctactccttcatcctccgttgaagaaccatcccagggcagtactagtgctatttggaacaataatcacttgtatactttgcttcctgctaactctgtgactgcagaccggtgtgctgtcccacatgtggctgatgctggacatgtgccatctgctcaggaccatgcaccgtccttgccccatgatgtggctggacatgtgccatctgctgaggaccatgcaccgcccttgccccatgacgtgccctctgccgaagactttgcgccagtcttagcccatgacgtggtaacagccgatatggtggcagccgacatcccctccacgtctggggctcatcaacctgtacaactgctggaaactacagcgacagattcttcccaggcggtctccactgctccgggtcttccagtttccaccactttgttgcatggcactgtttccacgctgcccccaacagatgttgcaccgaattctacgtcaactgcaggaaacaagccacacccgtatggtacacgtctacaaaatgctattcgtaagcctaaacttcgtactgatgggacagtgtcatattctgtggaacatatgtctactgtcgaaccacactcacacattgacgccctcaagcatccactctggcgtcaggctatgaatgatgaatttgcagctctcattagaaatcagacatggcacttggttcctccccgct

SEQ ID NO: 155619 - DNA, 357 bp, Zea Mays
caatgatcagattgagatggaaaagagaatattttaaagactggtataagataaacatcaaggtaagatatagatgtgataaggataaaggtgataatgatgaaaagcataaccatggacagagttaaggcaagactgacgaagtggagaaaacaagcaagggtaagataggtaagattccaacaaaatggttgaagtaatcaaaattattaccgagggaagttataaagaaatgatgatatcaccaaggatgtgcgaaatagaatggacgctcatggatcaccaagaaataagggtggtcaaaagcatgttaaccggaatgtcttaaacaagcattgagatataaaggtaagcatg

SEQ ID NO: 155620 - DNA, 723 bp, Zea Mays
gaggtcgtgtgctggccgccgtacccacttgctctacggcaggccaaaatgatcctcgccagagttggccgcttgccgcccatgcgccgcgtaagcagtagtgttaccacattgttgtaggttgaaatagatggcatgtccatcatctgagtcgttgctctagtgaatgccatggtaactcacgccagtgacctccccttctctccgggcgctcgcgtgtcttccccaaattggacgccaccgctgttgatctctacaaattgagcactcaacgtgctctgctaggttgttacgtgcccagtgcaccagtcctcgcctccgattagccaccatagctcgcaaatttcaaatttcccccaaatgggtcggaacgccgccgtgagacatctcatcgtggccatccctctacacgttagttcaaactattctgcttgatgttctagcctcccttaagtctcctgttgctcgtagacccgtttgattgagctagacctcactaaatcatcaagaacacctaagtttgtctctggttctcaccgtcgtcgtgagtagacgaactctgggccagattcgtgtaattaatggagggattagggtctccaggggtaggattaggtgacgaccaagttagagcacaggtggttgcgcatctcggccgatacaagttcgctggagagcgtgctcaccgttgtggacttggcgctgtgaagaaatagaagtgcg

SEQ ID NO: 155621 - DNA, 404 bp, Zea Mays
ggattgaagagacggctataatgctgaagttactttaagttaagctagttgagacgacgggtgataaggctgaagggtcaaaaattgaagaaataagaaaaatgccagagattttgagcccttcgacagaggcaacagtgtcgaaggcacaaaagagttctattgcaactcctaagaggagaaggatggcgaatgtgctagatgttgtgttagaaacaacaaaaaccttgagtcctgctcctacaagaaaaattgtcaaagcttccaaggcacaacccaaagctgaaacgaagaaggcagaagtcttcaagctaaaaccgaagctgggccttcagtgcccactgagacagagcctgccgcagttgaagaaaaggagacagagcaaattgcgtctaaaatggttg

SEQ ID NO: 155622 - DNA, 585 bp, Zea Mays
gtcaaaagctgaaaaaaaactcaaagaaacaggacgtaggtggtcagccaaatgccaaccctaactcgcctcatcgtatcccctccccatttccatttaccacggcgttgtcaagttccttctctcttcctccgatggctactatgacgaggtggaataaatgtctggtggtagacgttaatgtcgaggtagacccgtcgcacttggatcagaccaacgtcgccgacgatgctctacagcggggacaagggccgcgcgcaggatactttggtcgtcttcgaacgcgctctggtgcataagtgtagcttcgcatcaagggccttccgctacaccgacatcgagaggagaagcaaccgtcaacgtcgacccgagtgcacgtcgtctttggaggctaaccatggggccaggtgggctcgcctgcttccactgatcgtgaacctagagcaattggtgctggcgagtcaacctaggcgagaggatttctcgtcatagctgctgcgccaccacggaaccacagaacgcgtgggcagagcaatacaatgtcctaaattcaggtaatacggccatatatgtattcactttgac

SEQ ID NO: 155623 - DNA, 808 bp, Zea Mays
agcgagcttgcccaaccgtgctgcatatcgagcaaatcctgaggagactaaggagattcagcgccaagtccaagaccttttggaccgcggatatgtacgtgagagccttagtccttgttttgttcctgtcattttggttccaaagaaagatggcagttggcgcatgtgtgtagattgtagagccattaacaacatcactatccggtatcgtgatcctattcctcgattagatgatatgcttgatgagttaagtggttctaaaatattttctaagaatgatttgcgcagtgggtaccaccaaattagaatgaaattaggcgatgaatggaaaactgcttttaaaaccaagttcggcttgtatgagtggttagtgatgccttttggattaactaatgcccctagtacttttatgcgtttgatgaacaaggttttgtgcccatttattggaaaatttgtggtggtttattttgatgatatcttgatctacaagacttgtttatctgaacatcttgaccatctacatgctgtttttgatgctttgcgcgccgcacgcttatttgctaaccttgagaaatgcaccttttgcaccgaacttggctatgttgtcactccacagggtattgaggttgatgaggccaaggtgcatgctattcagagttggccaacgccatggacggtgacacaagtgcggagttttcttggacttgctggattttatcatcgtttcgtgaaggatttcagcaccatcgctaccccattacatgagttgaccaagaatggtgtttcattttattgggggcagtcacaa

SEQ ID NO: 155624 - DNA, 427 bp, Zea Mays
gtccgggtctggtggtcaatcactatggacttgagcttgctgaacagctcatccatggtgagagtctcgtaattgggcgactcaataatcgccaagaccttcacctcccaaacactctgatctagagcatatagcaatttcattgctctctcatgatcgtcatagggaagttacacattgttgacgcgcatcttgttcataattgactggaaccgagaaaacgtcatgtcaatggtctctccatccaactggacaaagttcatatattctcgttggtatatctcaaacagtctggtctttacatgatcatttccttcatggaatctctcaagggtagaccgaatccggtgagccgtagccaaatgtccaactcgctcaaaatcagcaagcgagggacatgagaacaaagtgtttcgagccttgttgt

SEQ ID NO: 155625 - DNA, 459 bp, Zea Mays
tcgcgcgtgaatccggacggcggcggcgcgaatcttcgcgcagggaggtcgccggcggtgagcacgcagcgctggcaatctgatccgtttcggtcactataccatggcgagcacttattcagagcgcctgacagtcaacatttaggctcgattttctcacaaatctatatggtaacatactccatgctctgccgcaaagttggagagctacaaatcaactacaagtttgtcatagctgccatgggcagattcttgcttgatcatagttgaattcatgctcaaagtctcagtggttgcactgtctgtctgaaaattcagaccttagtaacttgacagtccaactttagacttaattatctctaaattcttcttaacaactatgcttacactcttaagcaaagttgttctcctatgattgagctacaaatttgatgtggtgacatagggcaaaaaccctag

SEQ ID NO: 155626 - DNA, 442 bp, Zea Mays
caaagactgcacaaaaattcttctggcaaaacattgtttgccgcttcggagtaccgtccaaactcatagttgacaacgacaagcagtttggcagccaagacttcaaggatttttgcttctccattggcaccaagcttgccttcgcctcagtataccacccgcagaccaacggagttgtggaacgcgccaatggaaaaattttcacagctgtcaagaagatgctcctcgacgaaaaaagggcaggtgggccgatttgttacctgaagcggtctgggcgctaaacacgactgagtgcagggcgactgggttcacccctttctgccttctatatggatcggaggccatgaccccacaagaaataaaacatgggtccccgcgaacagtttcgtcagctgtccccgacgtggacgaacccacttcgaaggatcttatcaatggagac

SEQ ID NO: 155627 - DNA, 625 bp, Zea Mays
ttcaccttgtactggattccacagaaaatcttgttgaagaaaaaggcgtacagtagtaaatgagacaggtggaatttcgtgggactttcaaatgaaacactttgtaaaagttgggtggatgcagtcaaaaccagtgtttaaaatagcgggctaacccatttatccccggccttcttcagtggctacaaaaggatatatcgggatatatctgcagctaaatgttttagcggttttcactagacagtacacagtagacacttagacagatcctcccatgatcccaattcccagacctcacactagccactgattgcaacaagcaaagcagcccaaaatacatttatctcacaactagccgctgattccacaaacatccaagtcattgatctcacaactcacattctcacctacaatttaaaatgcacctcgaacaaaaacagctagccgctgattgcaacaagcaaagcagcccaaaatacatttaccattcacaaatgtaaacagctagcaaaacattcaccagaaaataatatacacattcagtcagccattcagcaagcaaaacagctagccgctgattgcaacaagcaaagcagctagccatgcacctacctcacctgttcac

SEQ ID NO: 155628 - DNA, 974 bp, Zea Mays
gtgcagccggataagcacaacaagtgcacgatacaaagtctttactaaaagacatccgaacaaaaagtcgaccaagggtgcagccggaaatgcacaacaaatgcgtcatacaaagtctttactataagttatccgagcaaaggccgcctaagggtgcagcggacttgcaaatacgcgacatcaccctaacgacgcaaagtgtattacgatcaccttaaaggtgcgatgtctctgctatctgacacggtcgaacaaaaatcacctactgacgcaactaggtacgtgtcataagcatccacacatcgccatggcaagcaaagtccccatctcatttcacaacaagcaatgtcgtcatagtttacatacacacagcgaagggccaccggccacattgcacaaataatacaaatcgcattttgttgccctccctctctattgcgagccgggggagggcagcgttttcgctcaccaccgcaacacataagcgagggcagcaaacatgctacatcagctcagccttcgggataaggtctgcctcacaaaaattaaacaacatcatcctcaactcctcaccttcaaaaagattccacagatccccctccccaatacacgtcccagaagtcgaggtcagcaaatctcgttggccacccctttctacccgaagacgggttcgttccatccccatccgtcgacgcctaccacttcgcgacatctcgccaacattatgcttcgacaccactctacgctggaggtgctcttcgatcatcaccctagccgggggagcagacgcttcgcgcacttcagactgcggcaaggactccgtcgcggccacatccaacgcaacaaaataatccagtccgcatctgaagactcctcagtccacgaaaacggactcccaaactcacccccgtcagatgaccaagacacagtttcagaaccagacaaattttcattaataggcactgcattcgcag

SEQ ID NO: 155629 - DNA, 1446 bp, Zea Mays
cagcagctcaaccaaggaaggttcgtctaaggaaagtggctagattagtggccaaattgataggccttaattgtaggggagttggtttccaaataagtcatttcctaaattagaagttacctagttggtcaggccagtggcctatttatatggaaccgtgaggcaatgaagggaataagaaatatatcaccttaatctcccatctccatgtactctctaagcctacggcggaggaatacctcgccgaaaaagatggacggcggatacgagctacgtagctgcggtccagctgctcgagggcttaacgcccttgacacaatgaggtttaagttagtagatggttaacctgttcgtaagggtttagggctacgtgtaaataggagcagacttctggttagggtgcaggcttcatctgttccatgtgtttttgtgtccatggtctgttggattgatctcacggatgctagtctatgtaataagcagtacctgaatcttcgtaagcagttgtggtagaaccttagtgacagtgaacgaggaacgatggcgcgttccgcgttccgggaacttcgtccaaaaacgaggaacgggaacgatcgggaacactccaagaaacgctcgcggaacgtcgtatatcaaagataggaacgcttaccttgaggaagccgtgtcgccacgctgctgtcgtccggccgccgtgctgggacgcgctgggatgatgcgtcgtctggccgccagacgttgtgtcgcgctgggaagaggatagccgcgtggaagaggaaggggaagaggaagggaagaggaatcgactgaccgttcgcgcagtggggaagaggaagaggaatcgcgcgccgcgtcgttgcagtggccgcccgtggaagaggaatcacgcgtcgcgtcgttgcagtggccacccgtggaagaggaatcgagcgccgcgtcattgcagtggtcgcccgtggaagaggaatcgcgtcgccgcgttgcagtggggaagagtaatggactggccgcccgccgcggcgcaggaagctgaggggttaggagaagaggaagggatagcggcgtagggtcgcagggagccgcgtaggaagggacagccgcgtagggttgcagggagccacgtaggaagggatagccgcgtagggttgcagggagccgcgtactggctggtatttaaatatacctcaatccaccaatgcacagcgccacagcccaactcaaacctcaacgcagacatggttttcagttcttcaagcaaaataaagtgtgcggatgaaaaagaagatgatgtgcaagtcgtccaagaggtgcctgtagatatccaagatggcggtgcagacacagacagcggtgacgaagatggggctgcggctactggtatgagacatccacttctagatgaaattaatattattggtgttccgagtggaaaaaatgttggtggaa

SEQ ID NO: 155630 - DNA, 760 bp, Zea Mays
gcggcatgggcctgcctatgaggcggcagccacgacgctcacgatccacggctcaggctcaccaacatactcgagcgatggcgcgtcagtacgccagcgaatatgtggcgacacagcctgtaacgcacccactgggccagtccgcccaaagcccaccatcgccagcgtcgggcgttcatgcgctcgtgggcaacctatttagacggccacctcgatctcaaaacctaggctgagagaggagggaggcctgccattataagtgcaccacgacccccttgactaggcgaggtggtactaacccagggcatgcataccggtctctcacatcccacccctaagcggcacaaagttctctcagacagcagcggcaatgtgggctccgataccaactgttagacaagagtatttcgttggtaagaggagaacttctccctcacctcctgtattggctactgccagttccaacgcgtattcagtcagattaggactgtaaaccaacacatcatccaagaaaactaccacacatttactgagtaaaggtgccaaaatatgattcatgaaatcctgaaatgttgctggtgcccttgtgagaccaaaaggcattaccctatactcataatgaccttgatgtgtttggaaagcagttttatactcatcaccctctttaattataatttggtggtacccagctttgtgatccaacgtagtaaagacagtagccccacacaactcatctgtgatttcatcaaatatgggcatt

SEQ ID NO: 155631 - DNA, 393 bp, Zea Mays
ggcatgcagcggcggcggcggcggcggcgagggctggggccatcgatgacgaccatggcccaacgaaagggctcatccatgatatgatcttgagaaaggacggcaggctgacgtcccatttgttcggcctgtgggatgccatcgcttgcaacaggacgtcgtcgaacgccgctggtgctgccagccacggcgcaagggtcgtcacaagcacggattggaacggcacctgcagctcatctcggcccctgtctgtgacaatgtcggcagctgcctccacaggtcttgcgatgggcagtcaccacctcatgtccaggggaagaggcggctccgctaacgacgtgacatcgttagatcatgccgtggtgacaaatgaagccctaggctcccgactcc

SEQ ID NO: 155632 - DNA, 621 bp, Zea Mays
gttggcgatattattataaaattaacgtaactgggacaagtcgagatggatttcaacgaaaaagatattgaacaattaacaattcacgagattacgacgacgtggcacatttctatcggacaagggctggctacacagagacatagatatcatggtcacagaggatcccgggatcatgcatgcaaggggtgacgtcgtgcacaacaagggaatcctgcatgcaaggtggggcctaacgatttttaagcacgtagtggagttttggtgaagtgcatgcaggtagtgcgtgtgtaggtgggcccatgcatggtttcctttttccacggcagaaaccgcacgggacgaaggaatcgaccatggccgtttggctgcgcggaggaagggctcgaccagcatggggcgatgctcgccgacgagggcaagcatggccgctgtgttgctcgaccgagcgccggctaggcagggacatcgccggccggtggcgaggctaggcggcgcctggtgagcggctgcgcgcattggggaaaggagtcgagagcatgggtgcatcgaggagctgtgtcgccatggccggcgacgttgtgctgcccggcggtggagcacgagaggggcgcgagggat

SEQ ID NO: 155633 - DNA, 722 bp, Zea Mays
cgattctttagataaggttgtttgttttaaagttaggggctgagataggactatttcaatgttgtcccataaaattagagggacaagaggggatatcagatgacattgttggaggaatataggacgagaatctctcctaattatagggtacaatttcctttagcacatgcaagggagatggaggattggaggggctacaattcctttgcttccaaacaagcctttagaattcattgctagagagagccatgttgcttggtttctcctctatcggtctggtatttgttaatcatgtccagttgcattttcttgacgcctaaaaattagttgatatggtagtcgaatttgttcaaacttgtttaaacgtgtaggaaacccattgtgtgcacttcaatctattttctttataaaaaacaccgtgtatgaaaagatgttcacatacacgcagttacaccttactttcgtgaatggttacgaaagccttggtcagccatatctgtcctcactattcaccgctcttgtgcgagatcatatgtgtgcacggagcaccagtaatagctctagaacagggtctttattttttagtttctctaacttttagaatttgattggttgcatggggattagaggggcatcccatgcaaccaaacaagctcttaagtgcctatgttctcagctccattctagcaatggcctttaaaacagaattctcaaactcattc

SEQ ID NO: 155634 - DNA, 979 bp, Zea Mays
tcgcctcataagagttgttcctcgtctcaactgcttatcaaaagtccattctttgataaaacttgaaataatttccaaactcatgctttgccatatgcacctttaaaaaaatataaaaaaaatacaacagttaaaatattttgcctcccaaatccccagacctccaaataccaaaaccgcagcaattttgggagccaaggtgcaccggaattgcactgtaattaccagaattacactggaattaccggaattataagcgattaactgttagaacaaatgcagttctgaaaaatagcaaaaatattccaccaaattccgaacccttacgaattgcattagaaaaaagacccagaggaagcacacgcgaaaagcagcaaatgtttcgcaggaagaggtcaaatcgttgggagatgtcctgtatgtgggggagtatcttttaggaagatgtacagatagggagaagaagtatgaagggaatggttggagatggccttccaaagcccgcaaattccaacccaaactgtccaaaattcagaaccacatcaacccgttgcatcccaggctcgcgcattcagtcagcccccatctcccccaaaccctagccctgaaaggccgaaaccagtcaaaacggcgtcgcatcgccgactgggcacccacagaaaggcaagccgcaagcgccaactccgtgcccgcaacctcccaaccacaaccacaaaacccgcctaaaaccccaccaaaacgggggtaaaacagcaccaatcgcgcccagaccgtgaagaagaggcagaggagacggatcacttacgtgcttgggtgccggggagcagggttcatcgtagatgctgctagaatctagttcgatggcctcgccagcgcgcggcagcgccagaggtagtaggcgctcgtatcggccgcttgcgtgggctagaattgggtgtgcgcgcagcacgtgccaggccacaagtgcggtgaggctgaa

SEQ ID NO: 155635 - DNA, 509 bp, Zea Mays
gttaagcttagggcccttctccttgtccgtttggttctttggtcctgtcattgttagtacaaaatagagaaaaaagacaacaaacaaaaagtgtcaaccctacaacttctactcttaggtgtggttgtggaacacaagttatgaaaacgtcttaccccgctcttacaaggttcttaccagcactatatgtggcaaactgtggctggtgtgactgcccaaagagcgtgggtgtgattgcaaaggattacctgttccgctcgagagaaaaggtggatctttgggaaggctcactaaatatatatctgtggcacacaagtcagtagcagagagcagtgttgagtaagtgttccaagtactcgtcctagttgctggcctaaaatgaaatagttggaccaaggcacccaaaggaggtaggaagggtgtaggtacatcaaggaaacaagttgggagcaaaacaaacagagaggtgcacagattgaagacgtttctccttatgtgctactcttttt

SEQ ID NO: 155636 - DNA, 736 bp, Zea Mays
gtccgagcgctgggcataggcggcgaagggcggttgcgaagcgtagagtgagtgaggtggatggcggtcggcttcgtgtgggcagggctggcaagcaggaattgttgtcctcgccggccgctgcgagtgtaggtgagggggagttgcggagtctttttgcgggtgaggagcttaggataatgctatttaactatagggagatgggaatcattctgaaggttgaaccgatgtaaggtgtgatgccctcgctgtacatatgtaactataatttgtatggtgaggttatgcgcctgcgcgcatccggctatgcttgtaaaggcgttgtgcgcttggtctagtacatttattgtgtcagtccggcgcgcctgtagtcagtctttgcgcggacagtttggtgtagtgtttagcacgggtagtcttttgaggaagacttcgatttttcgcacttgttgcgctagtctggctgcacccttaggcgacttttgcacggatagtctttttgtgaagacttcgaatttacgcacttgttgcgctagtccggctgcacccttgggcgacttttgcacggatagtctttttgagaagacttcgaatttacgcacttgttgtgctagtccggctgcacccttaggcgacttctgcacggatagtctttttgagaagacttcgaatttacgcacttgttgtgctagtccggctgcacccttaggtgacttttgcacggactgtcgcacgc

SEQ ID NO: 155637 - DNA, 710 bp, Zea Mays
gaaacacggacaaggagggcgagagcggacccggaggtggcttgccacgacgcggcgtcacacggcggcgcacaatggatttgggggaaacacgaaattagggcgctacggtggacgatcgggagcgaggagtggttcacttggttcgtaacgagtaggcagaacaggaggtgcctctaatttatagactccggccaagcttatcacgaattttggattgagattgaggttacagcggccaggatattttacggtggcttgctcactatggcgcgcgagagggaattggtccagggacgataaccggttgcttgccacgacccttacgacgcggaggagagatcattgcgtgtcacggccggagaaacggtgagctccggtgaagctaacgcgactgaccgcgacgggacacgatggccggtccggccagtgactgggttcaccctccctggatattttcaccccatcccggcgttatctatctctcccgtggcacgaatctcccaggcgagcgcgaattgcggcggaagatcactggcatcaggttcatggcactggagatctttccggtcactgtaccatggctatcttcgttagttcctttgttcgagcaacttgcagggccttgttctcaactttttgtgtggcagctcactctcctgcctgtatcaaagttgttgtcaaattgtaatacccaatttgtgagagat

SEQ ID NO: 155638 - DNA, 565 bp, Zea Mays
tgcaaatagaatggccatccaacacgcagaaacaaggaatcctagtaagtaaacttaaatttcagcaagcctattttaattttgtaataatctaaattgttacaaagcagaaaatacaaactaacaattgttacttctagttgattggtggtgcgcatatggtgccaaatgcattgagctacataggtttgctatgcgaatcattagcatttgtgcttcttccggttatgagagcaactggagcacctttgaatctgtaagttcactacaaacttatgtaatgtacaagaaaatctgtgtatcatattgttcggttagccttatgttctctttcaatgctatatagatgtataccaagaaaagaaaaccagttgttacacaagaagttgaatgactgtatatgtatcgtacaataggaagatggctgctagatttcaaaagaggtgtgaagaggagaccaaaggttatgatccattggtgttggatgagtttgattgggacaatgaatgggttaatgcatcatctaatcaaaccaatgatattgaaggtcatggccttatttaga

SEQ ID NO: 155639 - DNA, 595 bp, Zea Mays
ggttgataagcctttaactggtcaactagttgtgcaaattgttcaatataatcagagacactggaatattgacggatgtgcaggagttgtctaagaagagtttcgtgctggtttttgccaaatctctcacgaattaatagcccaaactcgtgccaagtgacctggtgaaggctgtgttcgatcgactgtaaccatctggctgcaggaccggtgaaactcattgtggctacttcaatccagacggatgggtctacggagtacatgcgaaaatatgattcacaacgtgtttgccatagtttggggtaggaaccgtcgcactcaggaaaattcagcttgggcaactggcctaagtaattggtgaactgggcgccataagcacgaccgtcgaacggtgcgggaggtgggttgagaccagtgcccgacgcgcccccagtgtggatatctgaagcaaatgaaggagctccctgaggatgagagtgcatacccatggccgggagggagtgatgggggtaaaaacccccaaaacccgtctcacgtggttgattgtcgatgcgttgcccgattgggccgtcggtgttccacgagggaggaggca

SEQ ID NO: 155640 - DNA, 286 bp, Zea Mays
cttagccgtgaggtactcaactgttgccatcatccgtggcttcttgatctagggtttagggtggatctaggaaatcaaatcctacactcgatctacagcctagtgctgctactgcctgagctgtagacatgccaaaatctagtcccctccgtcacgggtaagctcgcacaatctctccctacacatcttttttcttcgcctacctaatgctctatgcttttggagatgtgctagcccatttccatttgatgcccgagctcatggaagctacgattttagatgcaac

SEQ ID NO: 155641 - DNA, 801 bp, Zea Mays
ccttaattcccgaaaatcccagaagggatttaagtttccaaactagtcgtaaagagactttcgagacgaattgtcggtgactcactcggaacgagaaactgaccgaaattgtcatcttctagttagtgcttcacaaaatcagctcgttactccttcgttgattcagttttctttgcccttgggcctctaaaaattgtcaattttattttttgtggttggctatccacaatagatgctgaaaaaggacaacctagttaggtggagagggattccacacttagaacatacctagtgccttaaaacaatttactactttaaaatatagggtttaactcataaaaaacaacaccaatgtcctatttacaattttttatcaataaatatagggcacatctgtaagtgatccaaacacactacacccaagattagtgtcctattcttgttttctacatcatcttcaaccttttctttcctaacaatgtaattattttttaaaatatataatatggggcttaactgttgaagtttaatttgtttttagtgttctaaacactttaaatgtagtattttgatttttggtacactattttgatgcaccttgtcggagatgctcatgtgatcaagaagaggacaacatgcaacacatttccatctcatgtgtgttttactagatatgtgttctacatgttttaacaagtagatccctaagcattcttgtccaagttttgtggatgttgtgttcatttattgcctcctaggtagattaaggttgattccttggtggaccagatgctaaagaag

SEQ ID NO: 155642 - DNA, 276 bp, Zea Mays
cttgtcaccttcctccgagcaaatgccgacgtattcgcttgggagccgtcgtagatgcctgggatccctagggaagtgattgagcaccatctgaagatctatccggacgccaagccagtaagccagaagcctcggaggcagtccgtggagtggcaggacttcatccgtgaggaggttcagaagctgttgcacgctggcttcatagaagaggttcatcaccccgtgtggctggccaacccagtcatcgtgccaaaagcaaacgggaatctccggatg

SEQ ID NO: 155643 - DNA, 793 bp, Zea Mays
ggctaacaccaaattggaccctcctcgaaccattcccctaacttaattgcacgaatggtgacctattctactctgcccacgagaacagcgaaggttatgggcatttgctcgtgttcccggtgattggtgagctctcagtccaaattggtggtttggcaagcatcacagagttatgagaatgctcaaacgagggagaggggaggatgaactaaacggagttgtactggccacggtgaggtaggtttcacggtggcggaaacccaaattggggagactccaaaattcgtgagctccggcgaaacgattgctagcgattttcggtggctgggtgggcgatgaccttgcggggctggcggggggctcaatttataggaagcaagagcggcggtcgggaattttagcggtgacgcgcagcggtcggaggggcagggagttactggcgcgcgtgaactcgtgtctaccgtcgtggcgacctcaccggcgacgattagacggccatagagagtcacggcgacgcggtggaaaggcagggccacgcggcacaaggccgagaggcggcggtcaccggcaaagttatcggattctaccacggtgaatatggtacgacgaccggaattgtttatcggccggagtttatccccggcgacgtacaccgggtgttatccactcaccctgagaacagattggaccggcggcggcacgaatcatggtggaattcgatcgtcggcgatgaagcggctgcgctggcggtctgatctaattcagggtactgtaccatcgtgaacccccatca

SEQ ID NO: 155644 - DNA, 905 bp, Zea Mays
cgactgggccctctgggcagtctccattgttagtcggtagttggctttggccaatgacgtgcgggacctggttgtcatcactcacctcccgtgttcgtcgcgaatcttaacaaacctaagccaaccttgcgattccgccggcggtgtggggggaagctgtttgagatacttgtgggcgcactgcatcggccggtcttatctttccccccggtcctataaagtgctgggttcgcgaaccccctccttggatccccgcaagactgggaagtcatcgcctgagagagggagagcagtgcgtgaggaggagggccgccgcaccactacgcctccgttgctgctctgtggccaccgtgtggttgggtggactcgccttgatacaagtacgtgcatggacaaggttgaggccgtgggtgcaaccggctgctggtgaatttctcattggaattgcacgacaccaccataccgccacccgccgcggtcagctcggttgctgtcatcgttttggggaaaggagcacgacacaacattctccatcattgccggtacatatagcactatttgaagcgaagctataggcacgtgggcgagggtctggtgaactcctgcaatggcatgccgccgtgggccgcagaggcagagagctgcgccaccgtggccagctgcggggtagaagatgaacacgaaccgtccgtttgttgatgagcgccttagattagatgaggggagagcgcgttcgaccgtcgatcgacgaatgcacggtctggattagatccgcaccataccggttcaatggttgatcccagcccatggatctagatcgtgcgcaccagaatagatcacgacgttttaaaatcgggggccatcggatcatgatccagcagcccataatgcaccgtaccccttcg

SEQ ID NO: 155645 - DNA, 1394 bp, Zea Mays
gtagtttgtttgctactggtgaaacagtattgtcctgcggttttatcattgtatcatgtgaatagtagagatggaaagcaagtcatattttcatgtcaactgatggatgaatctaatatactaagtggttcaagttcttgatcagaaattatatgttcaagtatgaaactcttagctcattttggtgattgttgttctgcggtctgccgcatcacattctgtgtttgaaatgatattttgtcaacctttcatctgcacttctaatgaaaaactagctcagtagtgctaaatcatcaacacaagatacaattctaggcatctttctgttttgcatgtagagctatgcatgtttttcattatcatcgtgtttgtgcatcactcgtttcttgtttatttcatagatgctattttctgggacaattgctgaaaacattgcttatagagaccctgtgggagatattgacatgaatagggttgagtacgctgctaagattgccaatgctgaggagttcattaagatgttgccagaagggtacaattcaaatgtgggacagagaggttctagtttgagcggtggacagaagcaaaggtaaaatgctcactttccagtttccagactaccttgtatcacaaggtaaacatgttgaccatacactatccagtagcatcttttttgtaccggaacaggtccatttaatttgtacggtgtgtttttatccgcaggttatctattgccagggcaatctatcaaaattcctccatattgataatggatgaagcaacttctgctttggatatcagatctgagctgctactgaaagaagcgcttagtaatctaattgcaaaacactcagtaactgtaagttcttgtatgtgtggtcaggccattcctgcatcggcgtgctttccgatatcaattattgctaagtaacttcttcccttgctgtgactgaatacaggttatcatcattgctcatcgacaggaaatggtcctaatggctgacaggattatttcactagagcgcggtgaattgcgagagatgtcgaaacaggcatttttgtctcaagatggtcacttcagcttaccaaggatcaggagtccaaattagggtgtccaaactagggtgagacttggcatgggtaatggtagtttctctcgtgaagatttgttcatatatttggccatggaagaaaacgattgatagaatcacatttcttgcctgagccctgctcagaactttggcttcttggaaccttgtttcatcccaacagcaacaaatctgtcaacattatcgaaggtcgtctgccggagagaatagcaggctcctcagcggcattggctcctacctgctgcaagattctcctcaagacctcaacaggaaggtcaaagcaag

SEQ ID NO: 155646 - DNA, 307 bp, Zea Mays
gttgctatcattccggcctccttttgggtctcgtaaatggccaaaagaaggagcaacagcgacgtgcatcgccggggacaagctaaaagactgcactgcacttcccggtgcttgttgtcaatttgccaagagatcccagggtccatactgacaacaaaggatacttggacatcttcgtgagacagtgcataggtgggccgggtcaagtatgatgatggtgttgggccctgcttcgtgggaatgcctccatttgcaactgagacctaaccttaacggcgaagaaaacctcccatttatttgcttcgcc

SEQ ID NO: 155647 - DNA, 504 bp, Zea Mays
tttaatataaattgagtttgtgcatcgtcgagcccttcgggagcctaactatcgcttgtcgtccctccacccccaccctcacgaccctagatcgatcactctcttttgaagcggcaagcgatgacaacgcatcgtcgagctcttagggagccatcgatgacaaccgtcgaggtctgtgtccccacgtttgcgggcagacggagatctggatcttctttccttcgcttcactgctcgccagtctcgttgcggcagactgaggccacactcacctatgtctccaccatccaccttctccgacgaggtatctagcaaatgcccacgacgctgcgcctgcaagcagccagcaatgttgccaacgcctgtcccgtggatcctgcctactcaaccacgcccctaggtatggatcctgcctactcatatctagatccacgctttcatcttgattttcttgtacccaatgccatggatctgcaataccagcttagtttgattttttgagtgg

SEQ ID NO: 155648 - DNA, 431 bp, Zea Mays
gtcgccgcgttaagattaacgctcaccggtaaccggataatgctgcggggtagaaagatcgtcgtcgccgtcgagctggaagccaccccggtcagccgcaatactcctccccttgctcaccgccatgaataaagctgctcaccgtcgtcgtgccctcgccattgtccaccgcgtgtcccaacctcaccatcacgtcgccgtggcaccctctaaactccccgtcgaccaccggagttactgccacgccggtgaacacgtgttcgatgcaccaacgttctttctcactcccgaccgccgtgtgtcccgtccaaaattcgcggccaccgcccgtcctccctataaattgagcccgtgaccagctccgtagggttgtcagctaaccagccaccgccaattagccacagtcgttcgccggagctcgggaatttcgc

SEQ ID NO: 155649 - DNA, 329 bp, Zea Mays
gaaagagaatagccagccattgatccattttattccgaattcattttcgttgcaatttaatttctactgccattttagtccttttattatttaacaaacgaattgagcccgccccagtctaaagtccgaagaaaacagtagcatcgccatctgtagctgagctgtgatcactttcggaagccgacatgtcttctcccctctcccttgagacacaatttcatttcgggattaattctttgtttggtgccctggagggagctgtatgcagtacgtcaacttgtcaaccacccaaccaactgcagcactgcttattcggtcaaacaattgta

SEQ ID NO: 155650 - DNA, 484 bp, Zea Mays
ccagtgggtcgagtggctctgggggaggagatagttcagctgcggtagaagacataaattatttcgaagtcacaaaaacaaacgacgaagttacaagccaataagcaatacctatccgtctctcaagttctgcggctttctcagccttcttcgctgcttctcgagagtcgtggatatctttttcgttcttctttattatttcatgagctattcctcagccgccattgtcccaaatgtcagtaaaaaatttgccgcccagtaaacttgcttcggccgaagggtctttcgtgtcgtcaacagaaaaggcagcgtcggcctgtgccaaggttttaacatgttcgcaacccaccttctccaggacggccgcaactcccctagcaccagagaatgcacagacgtccccgtggtcactcaaaatctcttcaaaagcttcggcttcacaactgatccactcgatgacgccctcagggtcgccccgtatgaa

SEQ ID NO: 155651 - DNA, 366 bp, Zea Mays
gtgcacctattgccgaagctgaacaggctgacatcgaagaacaagatgctgatgaagaagaggaatactataacactctcatcccagcaaaacccagccactaggactttagaaaaatctactgtgtctgaggctgatgtacccatgatgatgaagttgggctacttcggagaaactgaaaagaaacttattcgttttgccggagaagaaaccactccagagcccaaaaatgatgaagtagtggtttttaagagctttttcaaagtggggttgcggtttcccttgaacgagatgattggggaagttttggataattacgagatctatcttcatcagctgacccctaacgctatcgttaggtttagc

SEQ ID NO: 155652 - DNA, 420 bp, Zea Mays
cccacctgaaaaatctgttttttggacagcaacataaccggattcaaacaacgatatctcctgaattataactccgaatcgagcgcataagtacttgttggaaagataacataaagccctacatgattctcatactgattaacactaattactcccgaaaaatccccagaaactgctaatactgctgctgttcatcccctgaaaaatctgtttttttggacagccacatacccggattcaaacggtgataactttcaatttataactccaaattgagcgcataaatactcgttggaaaggtaaggtaaagttctacatgatccccaaactgatttcccttaattcctcacgaaaaaaacacagaaactgctagactactgctgttcacccaccacctaaaattctggacagccccctcta

SEQ ID NO: 155653 - DNA, 444 bp, Zea Mays
tcctacgatccaaattaatactataatacgccaaaccggtacgcgatgtgggccgccagatacgagatcttcgtcctaaactaatctagccaaaccattacgctagatctaatcacgaccgttggtttcacgatccacagtcacgagttcatcttcttcttccctatgccagaggcgacgacggcttggccgccacagcgacgacctcaccagcacacagcgacccgccaaacccaagcgtgattcgggataacccatagtgcaaatataatgtgaacgacaccaaacacaatagggcatactcaccgtgaatcccgtcgtgaaacgttgtgcacccggtgaagcgcggatccctggtaaccccgaactccgataagagtttaacagacccctggggacctaaagcaacaacatatgagtgcaacacgtcgcagaggtcacaac

SEQ ID NO: 155654 - DNA, 304 bp, Zea Mays
tgggtggggtttttggtaatatccattgtgggtgaccagtggggtgttacagttggtatcagaggataggctgtaggtcctagcaagtggagtaataataaattgacacactgcacatgtaggatgggatttctggcttgctattgatatgttatgttattgcatgtgctagtttggcattatctgaagagatgttatgccaatcttatttacttattattctcatccctgtggctgcagctatgccgcctcgtagggctcggggtagtccgcaagctcctagtggggactcgatgagtccggc

SEQ ID NO: 155655 - DNA, 432 bp, Zea Mays
tgaatgatgcataaatgtttatagttagtttcactgaacaacaaaagtatttagaacaaaggactagaaattaatttgtacatatgcataaggacatctgaagaaacgccgacctccatcaattccaccctcaacgaacatctgcaccaagcaatccttaccatgcatgcactttggccaatcttctctcctattatcgtaggacctaagtctaacctctttgttgaaatcttttttactttgaactggaaagttaaaaaccgcctcttcaaaaaaatctggaccaagagggccatcaaaacacattggagttaacttccctccatccttttgtctctcatttactgcacccttgcccctagaagaccctgaagccattgtattgcacaatgaagcaaatgtacaaaggatcgtgtatatataggctaaagg

SEQ ID NO: 155656 - DNA, 478 bp, Zea Mays
gagaaactctgtcttcactgtgagagcattaagatttgagatgcctgtaatccacacaaaaatgatatgtgttgtcttttttcttgaccaaaatgacaactcactcttgctgggttgggtgatgcctgactgcaacatctttgtgacttgtttctcaatttctgtcttcaatgctagggcataccgatatggccgcatctgaacaggacgaacaccagttatgaatggaatgtgatgatcacaatcttgggatggaggaaaactctgtggaacctcaaaaatatcagcaaaggatgctaacaattgttgcaactcaagaggcaactgaagtataatggactgatccttagcaggaagaatgtcttgtggacagacctctagcacagcacactatgactcttgagctccgagaccccacaacttaagagatgaaccaccatatggaataaccaaccacttggttgcccaatgaaccaac

SEQ ID NO: 155657 - DNA, 487 bp, Zea Mays
cggaggttgtcaatattccaggagtgctccaggtcttcgtcgtttggcgtcgcgagcctgtaagcgctgggggaagctttcgtcttgacaatgaaggggccctcccacttgggctctagcttgcccctggactctgtccgagctgttcggacgagtacgaggtctccttcgctgaattccctcgggatcactgagtggtatcgccatgcttttgtctgagcttggtatttgtttagggcctgtaaggcgaagactcggtctccatcgatgagatcctttgaagttggctcgtccacgtctgggacggctgacggaactgttcgcggggacccatgctttatttcttgtggggtcatggcctacgatccgtatagaaggcggaaaggagtaaacccggtcgccctgcactcagtcgtgtttagtgcccagactgcctcgggtaataattcggtccatctgcccttcttttcgtcgaggagcatctttt

SEQ ID NO: 155658 - DNA, 679 bp, Zea Mays
tgcccacttttggacccaagtacaaaaatcatggtattagggcaccccaaagcacatggttcacacatttgaggatttccaagtcaaaagatgtggaaggggcttatttgcaaaaagccactcaattcctctcatgtggctaagtctgaaaatagttgaacaaggctgactttagagctctgtagttttaaaatacaaagaatttgcctagggtcaacatatcaaacttgtagagctcctataggagtacaactttgctatagggattaagccttggtgtcatgagaaattttgagataattagatccaaagtcgggctgtcaggcaaccctaagtctgaatcctcactagcagtaaagtaggatgaacttagagctcgatttagagttagattcattgctcgattgagggtagtttctatagcagaattatagttgaaataaagggctacaagtttgctacagatggattggtgagttttgacacaaaaatccgagatctggtcactgtaatcctatctgtcagatgctcttaatgagatttcccatggtacagtgcattgaaaatatccccagtacgctgaatgtcaccgccagcaatctccgcggttggattcacgccgccgttgtgattcgtgctcaccggtgcctggataatgcttctgggtaaaagatctttg

SEQ ID NO: 155659 - DNA, 516 bp, Zea Mays
gctgatggctccacggcggctcgcttctccctttactcacttctcacagtaatggcttcaatgatttggttcctacgctcaagcacgaaagtagtggagggaagaaaagggggcgcaacatataggaacgtggcggacggggtcacgcaacgtgctccggggttcgcgacacactccgccatggccgaagttccattgaggtgaagtcgcagaacagttgaggcggttgactaacagaccccactttcagcgaaacgcggagaacgggcgtgatggctagctgggtcccactcgccagcgggtttgcggaagcaagggcgtgcagcgcaactgacatgcgggtcccgcctgtcggcgcggacgcgtggtggaggagttgggctgcacgggcgaggacgaggtgggtcgggtttcaggattttcggcccatgcgcatctcttttccttttctttgttcttttcacttttctgatttctttttcctctttgtttttataatttaaatttgaatttaaa

SEQ ID NO: 155660 - DNA, 867 bp, Zea Mays
gtggaccccacccgtcagtcccctccgcgtccctaacctgccgcccatgttcccttgctgtagacgcgcccacgaccgcgcgttcttcggccacctctacacgccctcgcccctttagaagcccacacaccactcgcccactccccctgctcatttgggccctcaaccgagctctttcgcccactctctcgctctgcgcacgcgaccagccgagctccgccgccactcaccagggacctccgtcgttccgcgactctcgttgcgcccgcgtcgcgtccattgccccggtgagttccgcctcgccgtcagcagctcgggaaaacccctcggttcgcccctagcccctctggtttgcccagtccgcactcaccggagtgtttcctgtgcagccggagtccaccgccgtcgacccaggacttcaccgcctccatgtcgtcctccaggcgctcctgggtttgtgcttgtggtaagcaacctccccgcgcctctatttccccgttcattgccctagtcgtctcgcaattgctcatcggagtaagtttgcgccgccgcgggacctttctttcgcggtctgcgtcctcttgtgctctcgcgccggcgtgatgcccacggtcgtgctcgtcgtgtcgccctgaacgcgcctgaccctttccctaagaccctagagcctcgccgtgaccgtccccctcgtctccggcgagccctcgctgtgggaccgagcagcgccaccgcgctcatgtccggtccccggatgttggatcttgggcgtccgtccgaaatctggcggtttagatttaatcaaagcagatctgatcttagccctccgatccagatccagtcattccccacacttcccctctctctcgc

SEQ ID NO: 155661 - DNA, 556 bp, Zea Mays
ccaaatacgtccctgaccacggcgcgctcgccgtcgactatctcgctgctcggtctggccaaaaacttcggcggctacccaaaccagctgctgggtaagcatcactgacccgaggcaaccatagaacaggctccaatgtgactaacccggaccaggatgtgcttgaccacggtgatggcggacaccaagcatcgatcaatacgtttcggttgcatacgtaaggtaaaactccctgggttgcgtggataacaatcccgagcacatgagggcgctaaaacacgagcaacaagggcgaggacggacctggaatcagctggccgcaagtaggcggttcacgacggcgcagtcgaccgaattggggggaaaacggcgttgcggcgactctgggtgaaattgggggtggggattgaggctacacgaccgtaagaaactatagcttcaccgtgcagactcaatttgggagaagggggcagagacaacgcgaattttggattgcgatcagctcactggtgaagaggtaaacacctcgtcgtggctccctgctctatatataggc

SEQ ID NO: 155662 - DNA, 924 bp, Zea Mays
aggatcagtgtcgtatggctttatcatgatagcgcctcaaggtctgctggtatctggctgactgaattactgtgttcaatcgctcttcctccagcacatcaatatcctctagtttggtagtttttgcttgagctatgctttcgaagaccagcctcggtgccccaaacatgaggtcggcgggtagcaccgcttccaaaccatagaccacgaagaacggggtatttccatgtagagctcgactaggttgagttctcaagctccaaaccacatatggcagctctctgatccactttcctgcaagcttttcatttttgttgaacactttcttcctgagtgcttccagtatcattccattggctcttttcaccttaccattggctcttggatgcgctactgatgcatacttgatctggatacttcattgttcgcagaaatcgaagaattcagagctggtgaagttggatcccaggtcggttatgatgctatttgttatcccaaacctgaatattgtgtcttgtatgaactccactgccttggttgaggttaaagaagcaataggcttgtactctatccatttggtgaacttgtcaatggcaaccagcacgtgagtatagcctccctgagctttcttgaagggtccaatcatgtccagccctcagcatgcaaatggccatgttatagggatggtctacagctgttgtgccggtaaatgttgttgctttgacaagaattggcaagcttcacacctctggactaactcggcggcatcactcttcgtcgttggccaatagaaaccagacctgaaaactttcccaaccagagttctggatgctgcgtgtactccgcactgtccggcgtggatttcatccaatagctgcttcccagtagtcgaggaaatgcacttcatgaggactcccgtcgcac

SEQ ID NO: 155663 - DNA, 529 bp, Zea Mays
atgagtatgcaaatgtaaaagcacagcggattaaaattctacatcatatagcgtgctccaagtgcttggaaacaacggcaatattcattttataattcttgagttatagaaatcgccgttcaattaagagggatccgcaataagttaagtaagttatgcaatgagctcaattcaaattccttcaaatcctctaagagaacacttttctagatcatgaatgccctttgaaaaaccactcttactccacacaaaagttccaccttgtttcacttcagttctatcaaaacttgctcttcagtttaaaaaaccggttcaaccggacctgaaaccggttcaaccggtttctggactgtttcttctgccacctctgtcctgccagtctgacagtcaaaagctatcaaaaaagttgtgtgcagagattttttgaaaaccggttcaaccggatttgagcccggctcaaccgattttgagtccggtcgagtctccggctgagtagctcagtgaaccgagaaccccctggtggaaaccg

SEQ ID NO: 155664 - DNA, 957 bp, Zea Mays
agaatttggtgcatgagggtatcaaactgttcaatgtattcagtaactgtatcactttgtgtaatgtggaaaaattgtctaataagagagttgtgttgatcacgctcaaagcgagcacacactgcagcacaaaactccgaccacggtgccagacgcaacaccggatcagatgactgtaacgagaaggccgctgacccaacaaaatgcattgttgcaatcttaacccaaagctcccggggtacgatgaacacatcaaaataattctcacttttagccttccacattttaggatgatgtccgtcaaattgtggaaaattaagttggggtaaagttgcagctaaacgtgactgatacgatgcccaataaggatcttgcgcatgaatcaccggagtatgaaagacctcaggcggagggattttagatgtacctttgaccggaggtggagtcagggtggtcaccaccccaaatccatcgctccggtgcagagatgcaaggtgaagatcgtgctgtcctggactcgcctggtgcagcgataatcccagtgaagttgatggtaagaacccagcctccagagccccagcgtcgaacaccttcggaggagtggtatgcgcttctttactcgccatcaattcatccaacttatccgacagagctcccacatcttgacgaagattcaacacttaagtttcgatctgcggcttccacacagaaaaatccctcacagctgcggtattagcatctaaggactgcttgatggattcattttgcagttgcatcgcttgtagaagcgtcgtgagatcacccacgcttttctccatggtttgcagatcacgttgcaggcgagtcttgtattgcggacgaagaagatactccagaggatccactaggattgcaaccagaatccgataccaatttgtaagaccctcgacaactctagattacacctctatagctaag

SEQ ID NO: 155665 - DNA, 428 bp, Zea Mays
cgaatttgttgctattcttccgcatccgcccgggattcgcggcagcccgagctcctcgctcagggttataagacccggctcccgcatcctctgttctccccatagacattcgtggcgaccaaaagatagttgcgcagagagaagaatcgtcgttgttgaacctaggcttgcagcggtggtcaggggggccgtggaggtggtcgcttgaacctatcgctcgttcatggagcttatccgagcgggattgtgcaaggattgcagggaatcgctcaccgtgaatgggggagcagaacaaaggttgctttgtccgccaccacgggtgtgcgtactccttgctgttcggtgcgcaagctcggccttgggagctttgtcgtgatctcttgggctcggttttggcggcatctggcccggagaggccctggtggtcg

SEQ ID NO: 155666 - DNA, 478 bp, Zea Mays
gtcattttcgcgaggttgtcaaaccgcatttcctcctcatgaacgttgtgctgctcgcacacctgttacccctctatttcatataccatcgcctacctctgcctaactcagtctccatcgtttactgcatcgtgcaactcatcgcgtgaccgtcgctttcgctcggccaggacatgacatgcgacaaattttacaaccgccttccacatcctctcttttctataaatactgctctagccgttgcaaaacctcctgtctttccccagatccagatcacaggcgtgaaggacaacggtaccaggtatgcacaagatcctacttcctctcccttcccacgcgttcttctcccatccctctcctggccatggcaacgtgctcctcgcagacccctacgcttgcagcaacgatgtcctgcacgtcagctgacaggcacgtcggtcggtgcggcccatggtcggtggctgggcctctcccgcgc

SEQ ID NO: 155667 - DNA, 629 bp, Zea Mays
atgatattatgagtacatatttatgatgctgtttgtgccttgcaaatataacatacgattcacagttacatccagaatttactttttaacttatatttccattataatgtatgtcgttcattcatttgcatcactagttacaacagaaataaatccattgtctcataaatcttttggtattctactctctaccagatgaatcatcatctccgacatacatcgttcattttttgacgttgatgtctcattccactgtggtgctgcacctccgattttgttccttgaaccaggaggtcgtcttctcttgtgtctagctaggttagccaatcgaaccctattatcctccacagttaaacacggacgattgttgtgaacatcagcgatgccacacttttggcatatcctgctcatcttcttagctcctttcgcacccaaacttaagaacttgttgctcaccacttttgatcgttcttcccttaggcttggccttatctggtcttgctaagtttacaccttccctatgaaactccagtttctacaaatcaaagatattaagttaatttacattgtcacatactaatcatatattatagcattgttattacctttctagcttccacatttgtagc

SEQ ID NO: 155668 - DNA, 468 bp, Zea Mays
cgatgttgctgcgcttgacgatgcccttctagttgctgattgtgaatcaaggttggtgccataggtggtggtggtgctagctgagcccatgcagcttgagaatgacttgccgaagcaactgatgttgtgggttactagttgcccacatactcagagatatatggcgaaaagcatgaagtagtgtgcaggacctactttggctgattttgtcgtacttcggcttcagctaccacttattacttttggatcgtgacttggcacgtccttgttgtatgtcccttatcctcccccatagaataaatagaacaacctcctgggttcggagctgaaccttcctccgaagcttcttcctcctttgccccttggagctagtggcctgtaagagctttgttgcattcctgaagattgggagctttgttggttgccttgagtgtggtttgccctatcatcacttgagctgggattctg

SEQ ID NO: 155669 - DNA, 784 bp, Zea Mays
atttaacacagtcgctgacagttacaaagacaccctcgcacttctatccattctcggtttgaagtccacgacggcgatccgcgctgggagctgagctccggcgagctagaccggccgaatgacgccacggctggagctcccgagcgacagggacacaattgaacccttaccgaacacttcccccaaatcaatttcatcgttgggactacgaattaaccggtccatggcgacagggcggatggttatagggacgaacacgttccgaccaaacgacggcgaggatgaccaaattgaggctggggaaagtttcacggggtcaccagggtctatgtacacactttggtttgggcagaacaagaaccgaagagagggtcgatggtgaggggggtcacggcggcgttctacagagcaggcgcgtgttccggtgaaaggctttggccgaacttcaattggctggttccgagagcaataagagaccataatcgtgctaaaacaaggagcaattgggggaattactaacccgaggatgctgattacggtagagttccttacggcggagcaagaacagggaaggggagaaattgtggactgcgcaagttctctggtggaattgagtcaaatgcttaagcactgaggtgcggaatgtggagaataagccaaccccgagcgcaatttataggctaatggccagaactggatgaggatcacggattcctgaccgcgctggcgggcttatcgagcgggcgggtcacagcgatggtccggtggccgtcgattaaccgga

SEQ ID NO: 155670 - DNA, 430 bp, Zea Mays
cccattggcgtctgcggtgcaaccgcagcgaagtcttaatcgaggttgcgaccaccgatgttttggcggcgctcgcgcgccctctccaaagagacccgggcatcctctcccgcacgcttgcggttgagttcttcccggaggtcgttggtctgtgcgccccttactgagggcgagcgcatagacgctgacgcctcgtgttggcgccgggatgaccgtgtcctcgacctggtcaaggtagaatgtgccataccgagtagtcggtcgacgtcgtcccgccattgcttcatggcccctggtgaggccgtggagcttggagggtgtcacaacaactccctggccgccgacaatgccctcggagtcaccctcgatggagtccgggatgtttgtgcagccgtgtgctgccgtacggcgtgcacagtagcagtgcctg

SEQ ID NO: 155671 - DNA, 759 bp, Zea Mays
atacggactgtccgaacacgtatgtatagttgtacggtcaaactagagtagtcgtacgatcctgcaagactacggtcggtccgatgtatggtgttggccagtccatgacttggccgagcagtccgaggttagatctagactgtccgatcgtgtggggtattgtccgagtgtcgtgtgtcaggctcgttgtacctccaaacgatccaatgaaaggtattggatggtttgtgacggatggtctgaggttgtactcgaattgtccgtccatacccagaaccaactttgcgttgcatactgatggttgtgttggtggtacactatggatttgatgtgtcgtaggtgggagataatagtgctattgaggtgggtagcaaaactatttattttgtgcaacagtttgtcttgtgtagacgtacctggaggatccgacctaggtggccggatggtccagtgtgaagctagactatctgaggtaaggtgtcgaatggtccaccaagggaccagatggtccaaaattatatctaaactattcgatagtgtttggcaccgcctgtgtgcctcgtggcgagctcgacgctacactcgacatcccgacatatgaagccagacggtccacaagagggccagacagtccgtgattgtacacggacttttcggtcgtaatcagcgcggacctatcataccatgcagttaatggaagctattgctcttggtatgagtttatcatcataccatgatatagctaggactaagaaagcc

SEQ ID NO: 155672 - DNA, 554 bp, Zea Mays
atgcctgtaagtgaagtaacagctcatttttctgccatttcatgctccatttccaatttcaaactctctatgggacaattcatcgttcaaacgtcgttctcgtgccgtttgacatccgtctttccaaatctctcaaattccatggcataactctttgtgtatgtatttactcacatttcatatgcttatgactatgtgactaatacatgcttacctcttctgtcattttagtgtgcctgcttgccctcctgcgagactcagggcgtacccaggtagctaatcaattcaacatcttcacatacatattgctttgctgcctttgcttatcttttctcattatcgtgcaacgtgttagtgcaggatggtaaggacgactggactgacagggtcggcccatggcacagaggcacgggcacgcgtccgggggaaacggtttggcgctgacgggccgggcccgccttgtagtgggagagcggggcgggtgcgcgtgcgggcaagctaggcctagtgggctggctggctgagagagatggaggtttgggctgctttggttt

SEQ ID NO: 155673 - DNA, 581 bp, Zea Mays
gtggaggccaactaacgcgtacccatacatagggtaccctaaaatcaacataaaaggcactcttagagattaaaacatcatattgtcatgatgaactctgacctaatatctcgatcagatggaacctaaccaaacccaacctcggtgagccctaattcgaccctcgaccaaaaacaagccaaaccaggtgagacacaactaagggaggtctgaccaaaatccccaaccaaaggcatattgaccaagagaaacctatttgatattcccacaacccgaattatcggctaggtcgaacgtgaccccaagcacgttaggaccagttgtctaggcgtacactcttgatagaacacaatagctcgagagaagcatgcaattaaaggaagggatggtgcattttttactctaaacacttgttgcatgccttttaccctgtcaaaggatgaccataaacatgtaccatacggacaacttcgagccgcttctgttcgattgcctatctcttggaaatacaaggaaaggtaaggcggacaataatgagctgtacaaggatgctcctcgaggacacacaacatgatcatgta

SEQ ID NO: 155674 - DNA, 600 bp, Zea Mays
gcaagaatagctaggggtaaatacagaaggattggtctggaattcagttttttttttaactctgattggttccaaaaattcagagtctcattttttttatggtcaatagtgggtgattaggagagcatgggtatctatatgtatagtcattttattatgttggatgaaaatgggtaggttagggcaagagtagcctaaggtaagacagtttatggtgagaaaggactccttgttgggtggtaatgcatctgaagatcgagtttgacttctctccttccttgacgaggttgatcttgttcttttctggtcttggtctcattgagtcggggtcagtgtttatcatcggagttaccggagaatggttaagatagatatggatgagatagactacatgatgtaggtcaaaagtttgtttgatgttaggtggagataggcaaattatgcaatccatcatgactctattggttgggttagatcatgatcatggtgggataagtcaagtggttttggtcacgcaaatataacttagatccagtctcattattttggattagatccttgttgttactttaggatgatataagtaaactggttaggata

SEQ ID NO: 155675 - DNA, 548 bp, Zea Mays
cgctaacacagagtaaacccctgtccacggtggagatgcggcccgacggcggagtcacgtgaccggcgagcaatcccagcatccctatcatctacacgcacctccgcgatgcactggaacgggtcccaggaattaggcgaagatcccgaccgcccatccgacccgatgcccgaggttggaccatcggcaaggacgagacccaccagcactttctccgatcttcaatggcgacaacgatgctcgagggttgatggaggatggcatggggggaggtgccgggatttatagaagaggtgatcccgcagcccgccccgaacaacccgagctttgcgcgcgggataggaagccccgttgggattgggggagcggcgtacggagtccgagccaggaagccgcgcgttcgtttggggaagacccgaccccggtgtggcccaccggtcagcggagaactcaacccaggcgcgcgcagtacgttggaagcgggatcccagcagctcgcgcagggtggttgagatacggggatgaagaagctgaccacacgggttcac

SEQ ID NO: 155676 - DNA, 699 bp, Zea Mays
gaactttctgataaatggtttcaatatgtcattcatcaagctctgaaatgtagatggggcgttagtgagcccaaagggcatgactagaaactcaaaatggccacgatgggtgcggaacactgttttttccacatctgctgggtacatgcgtacttgatggtagccacttcttaaatctaacttggtaaagaatacagcaccacggagttcatccaataattcatcgaccactgggattggaaatttgtcttttactgttttgtcattaagggcgcgataatccacacaaaacctccaggaaccatcagactttttcacaagaagcaccggggatgaaaaagaggaggtgcattctctaatgataccttgttgtaacatagcgtcacactgctgctctatttcttccttcaacaattgagggtaccgatatggtcatactgccacaggtggagtaccgggcagtaatctgatcttgtggtcatggcggcgagatggagggaggccgtgaggttccctgaaaatatcctcaaaggaatggagcaaagcctccatgagatcacctcctgatgctaaagctgcacactgtggtggcagagcaccaattccagtccactgaatgttactgcctcgatataagaatgacatggagagggcctcaaaattccacaaaattggtccgagagtgcgaagccaatggac

SEQ ID NO: 155677 - DNA, 997 bp, Zea Mays
gctcgagtcactgtcgtgtggggtcaggatcgccagcgtcttcttcgccaaccgctcgacggatctcggtggatcacacgcgcaccgcagccccgccttgacatagaccctcgggcccggctggcccacggccatccgcacgcctgcccctcgtcaccacctccatcttggcccaactcagtcagccctcctcatcccgaacccaggtcgaacaaccataccgggagaaccgagattcggttataaccgcccagatcgccagctagctaccgacgtggaattcgtgggctatataagctcggtcggggttgccctcgccgataggaaacccatagcccaggatcaccccaccgccattgctgagaagggagtgagagggagcgccgggagccgccacacaagaatctcgcctgcgactttgctaagaccctgaagagtggtccgactgcatagtcgggactagtggaagtttcgaccacctccaacgcgtataacctcggtgcattgtggatttctcgtcggagtagccgcacctccgtggagccgcccctctccgtgaaccgctcacgtcggcctccttaccgtcggtatgattccttctatcaagttaattgtgctctcctctctgtttttctcgagctcgcacacgggttattagaccatcacgtcggggatcaggtaggattccggagaactcgccgcctgcgggacgcaacaccgtcgcacggttaggtgtggagagggagaatgatttggaccattgatttgctgcttgatggttgcgattagagggaggcaacgattcagtcttgtatgttgtataccgtccatccattgataagcagtaatgatcacgacataacgtggacgtctctggagtcaatgatctgagatctaacggacgcaagcgcataccagttcggtttagtttaaaatctaatctgagccgttctgaatggaccgtgtggctcataacgcaccataccccttcgcctag

SEQ ID NO: 155678 - DNA, 801 bp, Zea Mays
tggaagaactaggccctagggacgtcgaagaggggggtggagagggtcttgcaacgttgggggcctccccctcaatcccctccaatcttccagtgatcctcttgtcaccaaatcaacccttaggatgccgaggggcctctggccctctggggctatcaagaccctctgaggttgttaagattatcgaaccatccgaggccaatgtggtgtagtgtggcattgtccatgaccgtgctatgtgagtgagctagttacacactcgagcaatttaatgaaagagttagtggttggattgatagaggtataatctatattataaagcacgagtttcttcgtgcgtcctctgcactcgcgccctctcagcgaaatctccctcccgcgcgctcaaaccgaaatcctgttgcgcgctatgtcgaggtccaagcgaaataaacaaaaaaaacaaggagcgcctaggacttgaagtgtgacaccaggtttgaaacgctcgccctctgaccactagaactcatgttcatctgttatatacaagcgaaatatatatctactatattatgtgggagtttctcctttgtcctttctctagggttcgaaccgtctcgctctacacttccacaccaggttctaactactagggctcacaaccatttgtgttcaacaaaaaaatatattgtaaatattctgaatatagaatccgtagtaatgcacgtgcaaccgactagtagacgtataatgtacgaagtaatggatgtatgttacagtaattactccaactttttaatcttcctgcatttcctgcca

SEQ ID NO: 155679 - DNA, 648 bp, Zea Mays
atctgaaccctaattccatcttgcaagtttccatttttgtacatctgtgtgaggcctttctcgggattctcccccatttcggtctctggaaatacctgtatcattgtcggctcgggatggtggggggacagcaccaactcgttggcggtgcaagcctagagctttgtcacgggagaaaagcagagtacctcgacattccccttaaggacaacattaaggggtggcgtctcgagtggttcattgtggagaaccactgcaagtcactccccctaggttagggaggcagccagatgtccgcacatcgagctgtatagaatctccgactccttcggagataagagaggctagagtactgcttgtcgaggtctgcttgctgaaggatagaggtctgactgctgaagttgtggttgctgatttcgttttcaagaacatccaacctttgaaggacaaggcgtaccctgcttatttgtacaatggtgtcaacgattctacccaggttacgaataggagaatccctactgaagatctgatgagccgactggatatgatcccgaggggtagagtttcaaatgctggtgctcctattgcgtattatgcttggaacctgccaccatttaagccattttccgcgtttgtgtccaatcctcc

SEQ ID NO: 155680 - DNA, 582 bp, Zea Mays
aagctttgatgtgtggtcgagtgttggcggattccgacgatggcgccgccgccggggtgagcaccgtcgcggctcggcgtccaggggggaagaaaacccgtcggccattggtttggcgaagtagggctaggatctaatcctgtgtaccgtttcggcctgacccttggataagaaagggaacgaccctgattagatcctgataccggttcagcctaaaatcatcccggccgtccgatgcggatcgggcgcgtgagaagcaatcttaggattttaaatctagaagcttgatcgttgatctgacggtgaagatttcgtaccgcttcgcttaaatgagtggtgtaatctggggcgcataatcctaatccaacggcctggatagatctataccccttcgtgggtctaattttcacttgagcccctcggtttatgtcaaaacaacccgcggtccacatataggagattctgagtctagagatttattacaccagggcccctggactttccagatattgacgcccactccagagctcatgaaaatcaaataaataaattcagaaatggatttttaatataaaaacaatt

SEQ ID NO: 155681 - DNA, 585 bp, Zea Mays
ccgctccctctctctcagtcccgtgggccagtcctgtcggcgttgtttccctcgcgcgcacccgctccctctctctctctgtcccactgtccccacctgtcagcccgtctctaacctctcgcccacgatctccccaccgtggacgcgcccaagaccgcgcgttctccggccatgtccgagccccgacgccccttttgagccctgcgccctgctcgcccacctctcctctctcatttgcgccctctgcccagctctctcaccctctctctcgctcagcccacgcaaacagggagctccgccaccgcccgccgatgcccaccgcctgttccgtggccgccgttgcgtccgtgccccgtccagtgccacagtgagcttcgccttactgtcagctgctcgggacacccttcagtgtgccctcttcctccctattgcatatggtccacgctcactggagcgttttcttgcgcagccagagtccgccaccgtcgcctcgtcgaacctcgcgcctccgccgttgcttcgcgacaccagcgcttctgctcgaggtgagcaacctgcccttgcccttatcttgatcatcctcgc

SEQ ID NO: 155682 - DNA, 1687 bp, Zea Mays
ttaatggcctttcatatgtgaacattattttagaatacagttggcatatttctatttacctcttcatcgttgggaatatagtcagcatcaagctcatctgatgttttttcttccttggaggtataggaggaaaaggattgtcgtcactagaactatcctccccgctcccttcaccggagttgctcgatgtctgccattcaagtttggtcgcgtcttcatcaactatgttagacacaccggtgcaaaccacatccatcctagtaggtacctagtgcacagctggttccatcaataagggggtcgaccgaggatatactgttagtctgatatactggttccatcaataagggaacttggagaaaaggtgattcaaaagaaatcgagtccaaaccctagctgtacccggccaccaccaccggtggcctccccatctgccgacggcggtgaaggcgatggcggcgcctcaaggccccatctgccgccgtcgatagaagtgcactttccaatgcagttagatagagaaggcatggctgtgatgttataatgctgaaggaccccaagaagagattatggcctgtcatttaccaccaccacttgttatttgtgggcttcaccgagggctggaaacatttggtggcagcaaacgaccttcggactggggacgtctgcgagcttgttaaggggccagacgatggtgagccagtgtactctgtccggatgtgtggtcacaaaatttaaagcgcccggcttcatctgtgcgcttctcttctcttaggtgggctgctcgtttgctgccaccaaatgtttccagccctcggtgaagcccacaaataacaggcggtggtggtaaatgacagaacataatctcttcttggggtccttcagcattataacatcacaaccatgccttctctgtctatctgcattggaatgtgcacttctatctgctccgtgcttcccggcccgatttaggcattcagccaaagccattctccataagtcccaaacagatatgtgcttccatggtttttggcaactgtcctagccaccaaatgtttctaggagcttattctatacactcatgaacaacaaggggaaaacgaaaatttgagaaaagcattagctgtcctaaaggatatggacacaaggtccaactttcttcttgagggcactagtgctcaactactaccatctataataaattcaactagatatgataagaggagttgtggaacttcttctgtagtgcgaaagttccctccaaacatctcaaacatgagaaatcttgtggcaacaaaagagaacaaaatttccccatgaggtgcctatcaaagatgtggttcaaaatatcatgagtttgtgataaatgcttattagagacccacctttatcaatacatatatgtgataagtgggttgataagatgatacatatatgtgacaagtccaaatttcttcttgagggcactagtgctcaactactagcatctataatgaatctaactagatatgagaagagaactcgtggaacttctttcgtactgcaaaagttccttccaaacatctcgaacatgagaaagcttgtggcaacaacaagagataagaacaaaatttcccatgaggtgcctaccaaagatgcggttcaaaataacaagagtttctaataagtgcttatcagagacccgcct

SEQ ID NO: 155683 - DNA, 685 bp, Zea Mays
ggagactaggacatggggtggagaaacaccggtggacgacacctggaatgtgtagaggggcccgacgctgtcacatcgggcgagtggggtcctggtggccagatccttcacaaaaaaacaagtagggtcaaactcaatggaataagaattgtcggtgttgaaccgacagatagagaggagattgtgagtgatgtgaggggctacaagaacgtcgttgaggtagaacggtccagggagaaccgaggcacctattgaggtgactagaagagtggagctgttgccaacgatgatcgaggtagggtgtgtggaaggaggtgggtgagagtgagatagcatgcctgtagtgggagtggtgtggtaggaagcaccggagtcgatgacccagtcagaggatggtggagccaacgccatggtgttgtaggcagcagcgagagcgctggcgtcccagcctccagccaacagggaccatggtggtgtggtagatgtccccataggctgaagtggaactggtgctgagtttgtcggtggcgcgccgtacggtggtgtgccgaaggctggtggcatggtcagaagagccagcgtcagtgccggagggcgagaggcaccgggagtctgaccccgccacatggagatggtgccggtccaagggttgtagaatgacgaccagttctagctgccaccccgg

SEQ ID NO: 155684 - DNA, 524 bp, Zea Mays
gcttttcgagatcctactttcagcagagaggataaggcttatattactcgcaccgtagtgcctgtagtaggggtttacaagcacagcgggagaggtgaagtccccaagttcctagagatgattgaagcaagtgccaatatctaagacagagtgagaaggcaagaactcgtcaacgtgtgtctccctctgttgatggagggaccactgccctatttatacacccaggggagcatccatggcgaagttgagtcttgtatttgaaggagcgatgccctggcatctcacgtcacggcgaaccgtgcagtagattcacgcctgcctgctgacttcccgtagagagccgagaacgaggagtcgttcgtacgctcgagctcccgagggagaggccgcctgtgtcgtagtggttgtaacagcgctgggtatgggccaaaggctgcttacggggtgcgtcatcgtcctggcgcgtgatgacgtcgagattctcttcagcacttatcgagatcatagtcctcgcttggttaatg

SEQ ID NO: 155685 - DNA, 570 bp, Zea Mays
gttttagttgcttgtagacagcagttagtcagtcctggttagggattattattatttgggtggagaggggtggggtgggggtgttggacatgatgtacgaggatgcactgtaagttgtgttaagatgtgttctgacagcaagcactccactgcattgcaatgctgaggtgatggattagtaaagtttgactattttttctcatggtgacattcgtaaccattttgaatttgaattggtataaatgttactaggagtactgtggtcttcttagacatgtaggcttatattttttcattttgattccattcctgtctggttaactctgaggtgtcattttttggagaaaagatgttttggtgaatagagttgtctttataatgtttgccaaaaaaatcacatgatatgggcatcccaattctgttttgttttcatgggaatgtcccttatgtgatatgttagtagttatttacaaaagtcatattagtgtccgtgtgtgtgagtatacttccatttgtccttggagaaataatgcaagtactgcactcatatgcaaagtgcaaacaaattct

SEQ ID NO: 155686 - DNA, 733 bp, Zea Mays
cccaatcaatctccccctggtgtgtgctttcaaaggcagaatatatttgtgtcattgataattcccggacacccagggaataaaatgggcgtgtacatggagcctttgatcgatgaattggtatgtgcctaggaggaaggggtatggacgtatgaccaaggtacgaagacaaacttcagaatgcatgttttgtaccagtactccatgcatgacttaccggcgtatgggctattctgcgcctggtgtgttcatggtaagttcccatgcccagtttgcaaggaagctctcaggttcatttggttgaaaaagggtggcaaatattcgtccttcgataaacatcaacaatttctccctcctgaccatccattctgcctaaacatcaagaactttacgaaaggtgtcgtagtgacagaccgcccacctgcaacgatgactggtgccaaaattcatcaatagatagatgggctcgtggccaacacagaaggtggttttgtgggatatggtgagcaacatatgtggacacataagtctggcttgactcggctcccctattatgacgacctgctccttccacacaatattgacgtgatgcacactgaaaagaatgttgctgaggcactgtgggcaacaattatggacattcctcataagtcaaaggataacgtaaaggcaagagtggatctgacagcattatgtgatagaccaaaccaagagatgaagtcgccaagtggtg

SEQ ID NO: 155687 - DNA, 694 bp, Zea Mays
tcttggcattaggtatgcggatgatgacgtgaacgaacgaacaaaacgtagatacacgacgatgcttgagtttgttagataccacacacactataggttgtgtgatgcaaactcgtacacttgctatggtaggctcagtgatcagattggtgtcgatgcgtattctacagtcgaagcctctagattacaatttatagctgaccaccagaaagatttgtgatatgaaacagtgcagggtgtgtctgatgccattgataagggtttggttagtgctgattccgttggaagcaggatgatcgttccttcatcgtttactggtggtagaaggtatcatgtgatgaactaccaagatgctatggcaatatgtagagtctttggccctcctgacttgtttgtgaccttcacgtgcaacactaagtggaaagaaattacggatggcattcgctttgaaaccggacagcagccatgtgatcgctccgacgtaattgttcgtgtcttccacatgaaagtcgatgagttcgtagctgatatcagggagggaaagacgtttggccctgtacttgcaggtatgctgacgtttgtggccttttaggtgttcttcccacaacctatcactttccatctgaaaacctcgtgtttacacaaacatttctgcaacgctatatactgtggagttccagaaacgtggcctacc

SEQ ID NO: 155688 - DNA, 400 bp, Zea Mays
tgccgtggggttcggccgggggcatgctcctacacggttgacgtatccacctctcccaactaactaacgggccccagcgatcaggggctctttcctcagcgcactctctgaatggtgggtcctagataccagggatcatttccacgacagtagccccagagccctcgaggggagagtatctcccttcagaggttgatgatgggtcggacgatgtcctatttttttcgttccttaagaaatcatggtggcgtcccctcaaaatttgacgacgtctttatggtgatcggtcgtctctcggggtggagtcaggcgcttctccgtctcgttttataaaccttggatagtcgttcacctgccagtcattcttgacacgtccctcgatctcgccttcgacttggtc

SEQ ID NO: 155689 - DNA, 2142 bp, Zea Mays
tgctgatgtcgatggagatggctgggtgacgatcgtggatcgccgttctcgctggcgccgttcccgccttcaaagccacctcccaagccctttccacccaacttgagtgggaagtgtttcacctgtctctctccctctcatcacgaggttgggcgtcgtagtccggtgcggaccttagtgtttcaggctgccggggcacgcaccgtccttggcggaccttagtgtggcgccctatcgcccgcacgccgttcgctatggaggtctctgcccgcaaggatggccatcatgaagatggtggtgaaggcgcaggcttcaggggtggcggtcatcgtcgtcgcactcgacggggtcaaagaaggcagaggcccagagaccgtttggatgttaatgatcggattgatcctgcgggattccgccggtagttgatggcagtccttctatgaaccccgcctagcctcttcacttcatcaagcgttccagaaggatctcccaagctggatacgatctctggcgtgccctgatcatcattgtggtgggtcgggatggttttggctgcgccgaggtctttgctgcgctcatctcgaggttcgatcttgagattgatgtgcttggccttcgtcgtgccgcgccgaacaccttcatcgctcttctaccaacatggagttggctgatcgtgtttccactcaagccaggcagcgatcatttgctgtgcatcccagcgcagaggtccccgaagaagaagagcggtccggtgcagacttcgcggcctggcctgacggtctctcaggaagcatgcggagatgattggatagtggtggaatccaggcgttcgaagaggcagcgcttgaagttggaacgtcagagagctgtgtcgttggacctcgtcgggcgttgctttaactgcctcgcccaggggcacttcgccttccagtgtttgaagaggaccagatgcttccgctgtcgtgagcttgggcatcgttcctacaagtgtgtgagggccaaagctcctgtctggcagagaatttctaccgctgggtcgtcgtcggggtgcggtgatctttctcgacctgagtctcagggctcggtctggaggaggatcagcccgtcatcggacgcctcggccagtgctcgctgtgggggcggtattcctcgacctgaggcaagagcttcggtctggaggagaatcaccccaccggcctttcgtccggagttgaaactgttgccgtcgaccaagtcttctaggcagatgtggaagcgtatcactcatcggccttcctccggggtggacgcgtctggggatagtccttcacatgctagtgggaaggaggctgctggttgcatctccagtgctcccctgccggttggcgttggcgtccgccccaagagaaagagggttaggaagcgacgttctagagcaaatccttcaggtgccccacctccatattcctcggatcgtccagtctgcatggcggccactgctgctttggtagccccagtgcaccacgttcctccgtgtatcttgggatggagccaccatatgacgagagcagatgatgatcttcaatacgcggtaatggtgactgcgatcagcgatcggtcttcggtccgggtttcggagatagttgatctacttgccccaaggctggaaatggaagctagttctctggtgttgcgacgggtttcagcgtcaaattatcttcttgtcctcccatgtcgtgacaaggtagaggagttggctggtagatgggccactctcagagctgggtctttttctgtggtttgtaagaaatggtcccgtctcatggagtccaggggcgccttactcccggtgttgatcaatgttgagctccagggaattcctatacatgcttgggagacaagcaccgtggatcatttgctaaacccttttgcttggatacatcaagtgcaccccgatactttgaatctgaagaatgtggctgttttccgctgctccgcgtggtgcttggacccttctgttattcctccttctaaagagctttggattgtagaacctccttttgctgttgagggtgatcctgtaggaaaacgagtgttggtttactctgtgaatattgcggtttcgatcaccctccggcaggatggctccggtccagttcttcg

SEQ ID NO: 155690 - DNA, 540 bp, Zea Mays
taagggcaagggcatgaggagagttgtgacaagcttcgtggaaaagaccatagtggcattgacgacaagtagcacaaccgcaaaactccttacctactgcatctgatacctcccaacctcctctatagatgtgagggcatcagaacccacatgggcaactactgccggacaaaagtggcctaaatcagtgacaattggagtcaaaggtcatcccattagggctcgcggacgctcccgaaacaacatagtgaggggtgactggaagtaggcacactaacaaccaagaccttagcgaaccagcgctaagaccgcttccagaccacgttcaaggagatgcctgactcatggtttatcatgaagagaggaagtgagccatcgatcctggtcgaacggagccaataactatatgagttggcacctagaaatatgagaacaatcaccatcggaccccatgattggctcttgcgaaaggaaccatggcctcactcggattacccatttgtaactcgtcgagcgccatgaactcgatcaccgagggaa

SEQ ID NO: 155691 - DNA, 345 bp, Zea Mays
cagaatcaccacaccagggcgatgttcatctacaagcgtggccaacgaatagctgtttacgtacaagcgtggccaacgctgttcgttcaccgatcgagacaggaatgagcgttacattacacagacacgcagtgcagcaacagatgaggaggaggggctccgtcccacatcacatcacattcacatggggctagctatagcttgcttgcatacgtcctcgagacgatgctcacttgcccagcgccacctgcccatgagggtgacgacggtatgcacagcaaattaatcgcagcctccctacccccgggctgttagtactagtacagtagcaagattatatttatt

SEQ ID NO: 155692 - DNA, 1375 bp, Zea Mays
cagaggccacccttttcttctgctctctggctctcccctctctcagtgaccacacccctctccggcgatcttcctcgctggcggctgtcctccggcgaccaagctcctccctgtgccctccttcttcctccaactcggtgagctcctcccccctctgttgtttccccttttctctctgtctctctatgcaaaccttgcctctcaccacccctttgtgcaaattcttcaatctctgtcaaatttgtgaatccaagtgcatcgataggttcctatatgcttgttgaatacccctacaggttcctagctccttagggagggttttaccacctcaaatggccatttcttctaaaacctagaacgctgcacgccacgtgctcggtgaaatgcccaaaccaaccaaaaatgctccaatcgatcccaaatttttcaggcaccttcacgatacctccagtaacatattcgcaaaatctcacgccaatccaatatcccaggtttcaattttacagaaatccccatttttagcaatcgattccgagccgagtgcccaaattccactttcttcgcctaaaatctaaccaagcacacacttcactcatatgtacccatataaacctattcgtgaagtatcggctcaattccaagtcatttcatgcctcatttccaatttcaaacctcctatggcactattcctcgttcaaacgccctttttcgcgtcgtttgacctctctttcgccaaatcactcaatttctgtgccataactctctgtgtatgtatttattcacatttcatataattatgactatgtgactaatatgtgctcaccacttctgtcatttcagtgatctcgcctgcctgtgagctgtctcctgtcctgcctggattctcttcctctctcatgagatttccaggtagttatccattcttttgttatcctatcggctgctatcttctcgtgcttagtttttctcgctcacatgcagacttcaggtcaggatggtgcgcacgaagaatgtgttagcgccagggggaggagacgacgaggaccctcctcgccccttcaggcaggtcaaggggaagactatctatttggagcagcaggaaggccgcaagaagcagcttttggatagagcagcccaagcagctctagccacagcagcagtagctgagcaggcagagagaggtggtcagctgcagatatcatcagatcatattgcttaccgagtttgtcgactcgcctctcggcctcgctcctccgctccatccactcccgccactgctaccactccacctcccacttcacccgctccagtcactcctgcgccatccaccacctcagccatacctaccacctctaccactcctgcttccactgct

SEQ ID NO: 155693 - DNA, 705 bp, Zea Mays
cgcagggatcgtcgcgctagatgttttgggagcgtcgtgctgatggcaggtaccacgagcgaaaaactggcatattgcacgaccaaagagaacacaaagtcacaaacaatacgcacgcaaaaaagtgaatcaaaagggcttataagtggagaagggccgttcacatgggccgggcctatgctggctttaaaaagaccatggtcaatatactagcccgatttgagtacatgggttaggcctgacatgccttttctttttccttgagtttttcagactagctggcaacaaacagagttcccatacgaaagaaatatctacacggtccacagcacaggtcactgaacatccaggtcatcatcataacatgaacatgaacatgaacagggccggacatggttccaaacaaccatttgaatttcattaccgatatgcgtgctgctgccagcatctttacaacacgaattaagaaacaaccaagtgatgctagctatattggctttcagtctcagcatttcagcaatatgctttcgtacgaagtccatacattatgaatgcagcaaaggtacacgcacgcacatcagcatttggttttccacatggatgtaatgtacctctaccaattcaactatgcccacgtgatgatagtattggcacaaaggtacatagttatgtagcaccacatcagctccagcagtacatgaacag

SEQ ID NO: 155694 - DNA, 576 bp, Zea Mays
aaagtcgcccaagggtgcagccggactatcacaataagtgcaaaaaatcgaagtcttttccaaaagaccctccgcgcaaaagtcgcctacgggtgcagccggaatactatatcgaaaaaatcaaagcctacgggagcggcctgatcaacaaaagcgcgcagcttcatcacacaagagtatggttacatacatacaacgagggcattgcacattacattggctcaaccttcgggatgatacccatctccctatagttgaacaacattattctcaattcttcacccgcaaacagacttcgcagctccccctcacccacactcgccccagccggcgaggacaacaattcccgcttgccagccctgtccacacgaaggcgaccaccttccacctcaccacgatgacgcccactcaccctccgtttcgccaccgcccttcgccgcctatgcccaacactcgcacccggaaggtcctcatcacccattacacgcggcgacacctccgccgcagccacatccaatgccgcaaagtattccaaatcctcatccaaagactcctctgtccacacaatcgaactcc

SEQ ID NO: 155695 - DNA, 1025 bp, Zea Mays
ttcagctgtccccaacgtagacgaaccaacatccaaggacctcatcgacggagaccgtgtcttcgccttgtaggccctcaacaaataccaagctcaaacaaaggcatgcacgaccacacagtcgtccgaagagaattcaatgaaggggacctcgtacttgtccggacaactcggacagagtcacggggcaagctggagccaaagtgggagggtcccttcatcgtcaagacgaaggcgtcccccagcgcgtacaggctaacaacgccatccggcgaggacctagagcattcctggaatatagataatctccgtaaattttttgtttgaatcctcagggctaacacgcccttgtaattcaccaaacagtatcattctggcccgcactcttttcctcctgggggggtgaggtttttaaagaggcggaagccatgtaatatacacgcaaaaatctcccgcaaaaactaagacacaatatgtcgaaaaagactgcatcgacggtcttcggcattcgaccacaccgaagtcaccgcgaggggcagcgttgaccaccctcgcgtgcgacactccgcgcaaaagtctcctaagggtgcagccggaatggcacaataagtgcgcaaaatcgaagtcttttccaaaagactcttcgtgcaaaagtcgcctaagggtgcagccggactctccgtgccaaagtcgcctaagggtgcagccggaataataggtgtgcacaatcgaagtcgctcccaaaagactctccgtgcagaagtggcctatgggcacggctgtatcaacgaagtcgtgcagccttatcatacaaattatggttacatacacacagcgagagcatcacatattacattggctcaaccttcaggatgatacccatctccctgtagttgaacaacattatcctcaattcctcaccctcaaaaatatttcgcagctccccttcacccacactagccccagccggcgaggacaacaattcccgcttaccagtcccgtccacgcgaagatgaccactctcc

SEQ ID NO: 155696 - DNA, 709 bp, Zea Mays
tcatttcaatgaaagctgccaaagagttatacacaattatttttctttgtgatgctaaggttgagttgctaatcctacatggcacatatacttatttcaatttgctgatgcaacattcaaaatctggttgctcagtttgatacaagccacaactttagcattatggagggagaggaatcactgccacacaactcacttgaaattattgcccaaaaattaagtgcagaaaccatatctctactatctcagatcgtcctgtttcaacaatagagaagccatcaccactgattcatggatcatccaacattccaacacaagcaattcatacaccattgaactatgcaatgcaatggtgcacacagcagcaggtgagaggaattaccctgagagaggctacatttggtagcctaagcatcctgctcacccttttgaatccgaagaaattaacgatcttagtctgcgtcatcgaaaaacctaaagatccccacaaagaaaatagaagggaaaagtgagatataataccacaaggctagaggtaagggacaagtgaaggaaaatggtgagatggaggcggcgaggagggcgagagaaagacgcactcttgagtgccttggcgggtgaggcgcagacggggcagaactgggtagatccgcggatggagaccttggcggcgatgggaggaggcagaagatgtgaagcccgcggtcgc

SEQ ID NO: 155697 - DNA, 539 bp, Zea Mays
gccgcgcgcgctgtccgactagcaacaggagacttcgggtttcatcagtgtgtgaggggaaagaacgaggttcaatagctaacaccagcagccgaattcatcaggaaaacaacaaggacgctggatcaactgcccaggatttggcattgcccgatgcctataggatgctcgacgaattggtcacatgacagatggcagcgtacaagaaggcacataagctcctggcctcctgctgctcctacgggttgataacactaatcgcaagcgcgcgagacatgaggggcaatctatctacaatatctgcctgtacggttggtatcatagctcggggagggggcgggggcttggagaaacaaggaaagaaagcgtgcggacttagctagccagacgagaaccaatggagaaaaagccggcaaataaataagaccaaggcaatagatagttaagaaggccaaataacagtctttcaaataatagcattacaaatatacttttagggatgtaaatagtagagatattattctttggtattcaaattc

SEQ ID NO: 155698 - DNA, 793 bp, Zea Mays
ggagttgttccttgcgggctttctctatgagtcttgctgtctcagagtctagacgttgagctttgcaaatgaggtcttccatcattggtttgacttcgacactgtcgttgtttcccagacatgcatttagttgcgctgattctttcttccaatcttctaaaaagttggttccttttttcccgaatggttttcgactgagggcgccggctaccacgttggccttcccggggtgatagtgaatttctaggtcgtaatctttgatcagctctaaccatcttcgctgacggaggttgaggtctggttgagtgaatatatacctcagacttttgtgatcggtgaaaatgtggcatttgtttccgattaggtaatgcctccatatcttcaaggcgtgcactatggctgccaattccaaatcatgggtggggtaattctgttcgtgcggcttgagtaggcgtgatgcgtaagcaatgaccttctcgttttgcattagcacacaccctaagccttgcctcgaggcatcacagaagacgacaaaattttgatgaatatctggcagtgatagaacgagtgctgtcgtaagtttctcctttatgacctggaaactcccttcacattttggggtccacacaaatttatggtctttcttgagaagttctgtcatcggtcttgctatgctggagaatcctttgatgaagcggcggtaataccctgccattcctaggaagcttcgaacttcactgacgttggttggctgcctccattttgatactgcttccaccttggaagggtccac

SEQ ID NO: 155699 - DNA, 679 bp, Zea Mays
gctacccgccgacctcaagttcggggcgccaaggctggtcttcgaaagcatagctgaagcagaagctaccaggctagaggatattgatgtgctggagaaaaagcgattgaacacagtaatttagtcagccagataccagcagaccttgaggcgctatcatgataaagctatacgacatcaatcctttgtagtgggagatttggtccttcgccgaattctaacgggggaaggacgacacaagttgtcaccactataggaatggccattcattgtatcggaggtcactcggccaggatcataccggcttactcaaatggatggtacggaagtggggaattcatggaacatagaacatcttagaaagttttacccttagcatgacctcgaaagctatcggagcaacattgtgctctataatgggagaatacatcatcaataaagttttcattttcaagggcattcaaactgttaactattacttgacttcgattcaattggacttggattcaacacgcttactcgactcagggtgaccactataccctactaacgaagcaaatggcttaagtcggcgacgacttaagacagtgcaacatgctcgtgcttacttgacttatggtgaccactataccctactaacggagcaatcggcttaagtcggcgacgacataagacgatg

SEQ ID NO: 155700 - DNA, 366 bp, Zea Mays
gctatctccagcagcttatccatacccatactcattttcaaacttcactctacgaacattacactctacagtgtagaacagtgcaaaacagtgttttttaataaactatggatatactgctgcacacggccttagcacatagactttcctcaactcactattgcttctcctctctcctaccagccaccacgagatttgctagtgcaatagctgccattatatttggctacataagcctacgcacattgcaaatagccaattatcaatttgcttaatttaatttcactttacgcgtgctttaaactatatcaaaaaacactgccaaatagtattagtttaaatgattatgttgatcatcgaacataa

SEQ ID NO: 155701 - DNA, 727 bp, Zea Mays
acctagcgcccatctacccaagcggattagtgctacacgaagtcatggagatggcgaattgtttggtggatcccataccttgaatcgagatggcaggggacccaatcacgcaccgcaacggcacccgacgcgcctaggaaattgcgtaggccgcggatggagttgagaggtggcaaccagggaatcctacacggcggctgcccaaccaacactccccagctggcggcagaggtaggtttaggcagtcaatggcggcggatccaagctcgggcgagagctccaggttttctgtgcgcgaggtatttcgtaggaggtagctaggccaaggacggcggcggcagacggtcttatgcccccaccttcccgcgggaaccggtccacggttgttgtacggtgcccgagaagcgtgcggagcacacggcgtgttcgttacccagcggcgcggatcgtgcggggagaagaacggaagcagcgaagaaaggggaggggtagggctgacggatgggacccacgacccagtgtgaggcaagagccagcgtgagtcggacgagtgggccccggatgtcagcgtggagcgcgcgcgcggtagatgagtttgggccgcgcggcgcgtcttccagagatgggccagataggatggctgtcggcccaaccagggttttgatctttctcctttttattttctagtttcttttctctttctttatttccaaactccaatttaaat

SEQ ID NO: 155702 - DNA, 514 bp, Zea Mays
gtgggtggtatgcactggcaagaaatgagcagtcttggtcagcctgtccacgataacccaaatagaatcatgatgtctggaggtattgggtaatcccactatgaagtccatgcaaatgtcctcccatttccaagatggtatgggaaggggttgcaaagggcctgctgccttcaagtgactggcttttaccctctggcaagtgtcacactctgatacatacttggcaatttccctcttcattctagtccaccaatatagagatctgagatcatgatacatcttgttgctaccacggtgcatggagaatttggaaaggtaagcttcatccagtatcctctttctaagctcagggtccttaggaacaaccaatcgatctccaaaccatagaattcccttgctatcctgtcggaaacacttgtatttttctgccttttgcttgaccatatctttgataacctgaactcccttatccccaagctgtgcctgaactatttgctcttgcaatgtgggttcc

SEQ ID NO: 155703 - DNA, 512 bp, Zea Mays
aggaactcgcgctcgtcgctttccttcaggcaaatgccgacgtgttcgcatgggagccgtcgcagatgcttaggatccctagggaggtgatcaagcactgcctgaagattaaccccaatgccaggccggtgagccagaagcctcacagactgtctgttgagcgacaggacttcattcaaaaggaggtccggaaactgctagacgctggcttcatcgaagaggttcatcacccaatatggctggccaacctagtcatcgtccccaaagtgaatgggaagcttcggatgtgcatcaactacaccagcctgaataaggcctgtcccaaggacccatatccagtgccatgtatagaccaaatcttggattctacctccgggtgcgatctgttaccattcttagacgcttactctggtttccatcaaatccagatgtctagggaagataggaagcatactgcttttgtaacagtggatgggctttactgctatgttgttatgccgtacggtctgaaa

SEQ ID NO: 155704 - DNA, 508 bp, Zea Mays
gggccatcgcgggattgttttgtcaaaacgcgaaaggtgggtgccgaatgttggtaccgattggcacgtggtcaaacgggcccaaacactcaggaaaagagggtactcaggtgctcaacaaatgacaggcatggaactgtagcgtctttattaagcgtgtcccatcaatgtacagtgcaggagtatttataggtaaccgggtaggtgggtgtgccctcccaagtacaattatgccccattacctgctacagcttcagaatatttcccgtacaggatcattacaacgatgttaagtacaacctaatcaaatacacagtaaacgctaccccagggagggcttacaaatgggcccgaatgacaacagaacacggcctgaacccgccattgggtggcgcggtcctcgcccgcgcgtggcacccttcgccctaaggtaccaggtcttcgatttttgccaaggttatagctcggaaccgttcaagctggcggggccgccttcgcgaagtcatga

SEQ ID NO: 155705 - DNA, 293 bp, Zea Mays
caggcagagaacagttacaggaagatggaagagtttgtcataaacaggctgagagaaattatgaggtcaaacagatttgattttttcattccaaaggtaccatgtgcacccttagctttatgatttcactgggttatttgtgggtatagtttcacttatttgtttgcctgactccagttttcttcatttaagacaaatgcgaactgcgttatgaaatcatagatgttatctctgttcttcatagaaccttttgcttacacttgtatgtctttgcagatagagcccatagtcag

SEQ ID NO: 155706 - DNA, 392 bp, Zea Mays
tctcagtctgcccatcagtctgaggatggtaagtcgaactaaaattcaatcttgtatccaaggactcgtgcaacttcttccaataccgagaggtaaactgtgatccccggtctgacataatcttctttggcacaccatgtaagtagacaatccgtgccatgtacaactctgccaacttggcacctgaatatgtggtcttcactggaataaagtgggctactttagttagcctgttcacaatcacccatatagaatcatatccagcagatgtgcggggcaatctagttatgaaatccataccaatctcttcccacttccactcaggtatcttcagttgatgcagtagtccagccggcctctggtgttcagccttaactctttgacacacatcg

SEQ ID NO: 155707 - DNA, 433 bp, Zea Mays
cagggttcactacgtaaaaatctgggttctattgcaattactttgcacaagccgaggatggcgggttcataacaccgaaccccaaggactcatatgcaaaaatgcagccacgaaggggtatgactaagttctggctattcgatcagaaaccgacggccaggattagatcgcagttctcatagatggatacgataagctcaccatggggtctatattggatggttcacgttttatgaagcctgatctaattttgcccctccgattagatctcaacgacccgagtcccacccaagtgaacgggtacacacttcaattttgtgcgttgatgatagatcagacagtgcacgacaccgagacgaagggggaagtccgcttttaatcctagacgtccatccccagatggacggcagtcgcaccatcttccccctctcgc

SEQ ID NO: 155708 - DNA, 603 bp, Zea Mays
cattttaacttagacatcacatgagcactactacttttcatccgcgaccataaacatacgcatttagactacaacaagcaaatcaccgtgactacaagcttaactaaagtcatctaatgagtcggctagctagagcaacgacacaatctgctagacaacatacacgttggcttgcctattattatcacaattcgagacacaacatatatataacaatcacttaacacaatcaactccttcctaacatgagttggctattgacgtgaactatttcccaattaccatcacacaccgcctttcgccatttttggataaccggcaccacacacagctattataatacatctcaagttcattcaacccatcagtggagcactagcatatttcagaaaatttcctgagactacgacgacaaggcatcgatcttatcatgcacataaaagcatcacaagcatatttacgaaacatatcagttaacttgatcgacacactatacatgttctttcgcctttcaaatttttttgcacaacaggaatcatcccacttgctaatgacaccaacaagacctacttatctattattcacaacacgaacacagttaca

SEQ ID NO: 155709 - DNA, 469 bp, Zea Mays
ttatttgttttgtaaaatttgggacaacgttctgtttgttgtgtttacctcttagacacctaacaatgtgtttttctagctttgcaactttctcaccattcttgaatttattctgaaacactatattttgatgacagatttacaataagtgaaagacagtggattgaagcacatgttgagaatgctaaatagcaggttatagtgttatactctatattgaaagcacaactgtcatctgacgaggctcatacacatacgggtatccattctcttaggtaaatgttatgctatgtttattgatcccgactcatcagttttcctgctttgtaccatataaatagattatatacttatatgcataactgcgaataaattcctagagcagaaacaaagatttatttaattatcttataagccctcatgtatctgtggcatttgcctttagggaagttgttggagagcataatga

SEQ ID NO: 155710 - DNA, 325 bp, Zea Mays
ctcagctacttccataggaccaggacgatccaagtcagtctcccgaccctcgagatcgcgctctaaggtcaacgaggcatgggatgacctcaacccagcatcgagcacatcagcgcaaacctccatcacaccatcatccactggctccgataacaagtcctctggaaccatatcctcaagagtctgatcaaagttggctaaggacagttcttgcagaccaatgagagcagacaaagcaggagagggaaccccactactttcaccgatggcgatgaactgtcgactatttttccgagtcaaaggaacttcatcttcctcctcctcg

SEQ ID NO: 155711 - DNA, 467 bp, Zea Mays
gtgcgcaaggggagggcgaggtcaaggatgttcatataggcgcgagaaccgggcgggggttagctgatccttcggtcagtcgttgaagtccgcccatcgagcggcgcacagcccatagaaattcatcggggtttgttggggtagctgcgccatggcggtagagacagggttgcggagggggtcccacgccgcggtgacttggcgagagcctggccacatgggcccgctagtcagcgcatgacgtgctcccagacgggcagggcacaggaagaaggccggcgcgaggtaatgctagtgggccgcgcagagggattcagcccgcgcgcacagtcgttctcgcttttgtttttcttttagaatttctaatttctttccctttttgattcattttcttttcatttgaatctctaatttgaattggagtcttgttgtgaaattcacctttgagtcaaatgtacacatttaat

SEQ ID NO: 155712 - DNA, 1201 bp, Zea Mays
ctttattacgatatggaccgactcttctcagtggcggacgcagaacaaaattctaggtggggccgacagtgcaagagacaaatcaatagactagaccataaatatagattaatgataataacatgaatattaaatgataatatctagtgtttccaaaatgatatgaataccaaaaaacctttttggctaccaaaaggagatctagagagagaaaataggtggactgaccgaggacgaggcactagggcggagcagccgcatcggcgcgttgttctggcgaatcattgaaattgtcgtgagatggcgttggtgagacgacgacagctaggaggagcgagtgcaggaagcaaggtagcgatagatgacggtgacagcaagcgacacccattgtcgtgttgcaacggcgcgatgggactctaatgagttagcgagggacaggtgacgccacggtcccaccaacaacttgcccatctgctggtgcggactaggagacaaaatatcaacattgtctgcaggatcccgacgagtcgacaagctgatgagtgatgagaaggcaaggtgcgctgcagcgggcggattaggtcaccgacttactggtcagtcgatgaccgaagaagcgagtgagctacgactgggcttgcgctagggaagagaatcaaatggcttaggtgaagagtggactgagcagtgaagcgtcggcagaaaaatagatcaaaacttagttttcattagatttgtccacgctaactatacaaaaatttgtttattttagtgtgtacctaaatcttggtataaggagttaaaaaaattgaggtggggccatggcccaccttgcccaccccttggatccgcccctgactcttctagcgtcgttggcgactgcaacttgctgacttgagcatgcgtagcaataacacgcatggtgggggtggtggttgggaacaaactaactacccctgctacggttacggacggttacgtccgcagcactcatggttgccgcacggttggtcccccgtcgctttcctttcatgcgcgcccgcccgatccgcttcatgggatgctggttagttgcgggctttatggctgtctgccattcgtcttccccgggacggcctctttacactttgagtttcagctcagctgcacctgcacgcgcgcgcggcgatgatcacactctcatcagattcggccccctaaa

SEQ ID NO: 155713 - DNA, 316 bp, Zea Mays
gtttttccatgaatgactcagttataaatgaatgagatgcttcagagtcaaataaaactgaagcaggtatggagttaataagaaacataccatacaccacgtcggcatcctcaggaactgattccgctgtcacgtgattaacccttcctctattctggttctgcagagttttgttctatgcagatccacgagtaggggtgttctggttaattctttgactgctgttcttctgaggtgtctgttggttgcgccttgggcagttgttagcatagtggccaagttcgccgcacttgaaacaaccattgggttggactgg

SEQ ID NO: 155714 - DNA, 390 bp, Zea Mays
ggtgctacttatcagagggctatgaatttgatctttcacgagttgttgggaaataccgtggaagtctacattgatgatattgtagtcaaatcggctgagtttagttctcatatagctgacctgcgaaaagcttttgataaaatgcgtcggtatggtctgaaaatgaacccacgtaaatgtgcttttggagtgttggctggtaagttcttaggattcatcattcatgaacatggtatagagatagaccatgaccgaattaaatccattcggaatgtgggacctccgacctataaacttgaagtgcagaagtctgtcggtaagataaattatttatggaggtttatttctaacctagccaggaagattgatgccttcactcctatccttcgg

SEQ ID NO: 155715 - DNA, 1252 bp, Zea Mays
gcaaaggccttgtttgatgtgtctgttacatccatagttggcaatgggaagactgtgaagttctggactgatcgttggctctttggtcaaactgttgctgaatgctgcccatccttaattaaatcaattcctaaaaagggccttaaagcaacgaacagtagcagagggaatcacagactgcaagtgggtttctgatataagaggagcactgtccgtgcaagttctactggaatacttgcagctctggaatttggttgaggggtgtcggtgttttaaacccgccggttctaaccaactagtaaatttgtgctgcgtgctcttatcccggatggttgatgaaagaagacacacaaggtttatcctggttcgggcaagagaaggccctacatccagcggggggaggagacttatattatcttgcatctaagtgctcgtagtaggggatacaagcaagtcgagagagggagtgagtcctaagtctctgagtatgattgaggcgagtgccaatatcaggagtggagtgaggagtgaacggtgaagtgttgtccttgacctccttatagaaggccccgggctcttccttttatagctgcaaggaggaggcccaggggtacaggtgttgctatgctattgctgtggtaggaggaggtgtgtccgagccctgtagcggtatggccggcgggatggccctcgtccttgatgtcgtctttggtcaggagaaggacgcccgatccctgtagcctgtcctttgactaggtagagagccgaggccgggtttgggagcatgggcgtctgcccgagctcgtcctgtacaggggtgcgaatgagacgtttccgagggtgtcgagtcggagtggttgaaacagagctcggcatggtgaaaaagtgtgtggtaatctggtccggatgtcattctggatggtggaaagtggattggacactggtcttgttgtttctgtagccttcctgtcttcagcgggagagcaggtggcatttaatgcgcgtgcttccctgttggggcagttggccgaggtcaagctcgggcgaggcgaagatttcttccgaggccgaggccgtgattagacgttgcatgtagtcacgctctgggtggttgaaacagtggtcggagtgggggaatagtacccctgtattcgtgccctgaccatcgttgtgggtggtaaaagtagattagaccgtgggcgtgtcgtcctttgttgactttggcacctgctgcggggcaggtggccgtaca

SEQ ID NO: 155716 - DNA, 1146 bp, Zea Mays
agaaaaccctaaacctaaaccctaaggggctaagagcaaaatcagtgcacttttggactaaaatgcaaaaaccatgataataaagcatcttaagtcatatgatccacaatcatgaaggtttgcaatccaaaacttaagatttgggcttatttgcaaaagagccacacttgaactgttttggttaggtcggaaaccagtgatattggccccactttgaagccctatattccccaatttatgaggattttgttctatgtcaccacatcaatattgtaaacctatcaaaggagaacaattttgcttaagagtgtaagcaaggttgttatgaagaatttggagataattaaacctaaagtcaggctgtcaggctgttaaagtttgaatttcagactcacagtgcaactgcagtgactttgggcatgaattcaagcaggattgagcaagaatttgcttaggatttctataacaatattgtagctagatcttagagctaaaactttgctaaagggtgatgatcatgttactgcacaaaatcgggagtaaacagccctacaaatcgctctgtcaggtgactgaatgggctttcccatggtacagtaacctgaaacggatcaggacggcagctcaactcgccgccgacgatccccaccacgattcatgcaggcgccatcctgattcgtgcctggtgaggaacggataacgccgaggatggataactcgtacgtggcgccatctcccgagtccagccgaagttcttcatcggcggccaccgtgactcggtaactttcgccgcggtgtcactcatgccgcgatctgcctcactgtgcttcctatcgacgtggtatgcatgcgctagcaatgctatccgtggctggagatcgtctgtcgggtcgccgtggttataaatagcacggtggtccacggcgaggtgtgaccatcacacacatagtgagttgaatcgaagccgaattcgcgctacctctgccccctcctctcaaattaagtgtgcgcagtaaaactagagttctttgctaagccgaagcacccgctaccaccctcgattagccaccatagccggagaatcaccaatttcccccaaatcggtcagccgcgccaccgagaatagcccgatcgtggccagcccgc

SEQ ID NO: 155717 - DNA, 333 bp, Zea Mays
tcttccagtaccaagaagtaaattgtgatccccggtctgacacaattttcttaggtaccccatgtaagcatacaatccgtgccatgtacaactctgctaacttggctcctgaatacgtggtcttcactagaataaagtgggctactttagttagcctatccgcaatcacccatatagagtcatacccagcagatgtgcggggtaagctcacaatgaagtccatgccaatctcttcccatttccactcaggtatcttaagcgggtgtagtaaaccagcaggtctttgatgttccgctttcaccctctggcaaacatcacatagagcaacatgtg

SEQ ID NO: 155718 - DNA, 900 bp, Zea Mays
catagttaaagcagaagctaccaggctagaagatattgacgtgctggaggaagagcgattgaatatagtaattcagtcagctagataccagcagaccctgaggcgctatcatgataaggctatacgacatcgatcctttgtagtgggagacttggtcctacgccgaattctaacgggataaggacgacacaaattgtcaccgatatgggaagggtcattcatggtatcggaagtcactcggccaggatcatatcggcttactcaaatggatggcacgaaagtggggaattcatggaatatagagcatcttaggaagttttacccttagcaagagctatcggagcaacgttgtactctgtaatcggaaaatacgtcatcaataaaagatttcattctcgaaggcattcaaactattggttatcaattgactttgacttgattagacttggaatcaacacacttactcgatttagggtgaccactataccctactaacggagcaatcggcttacgtcggcaatgacttaagacagtgcaacatgctcacgcttactcgacttagggtgaccactataccctactaacggagcaatcggcttaagtcggcaatgacttaagacggtgcaacatgctcacgcttactcaacttagggtgaccactataccctactaacggagcaatcggcttaagtcggcaatgacttaagacggtgtaacatgctcactcttactcaacttagggtgaccactataccctactaacggagcaatcgacttaagtcggcaatgacttaagacggtgcaacatgctcacacttactcgacttagggtgaccactataccctactaacggagcaatcgacttaagtcggcaatgacttaagacggtgcaacatgct

SEQ ID NO: 155719 - DNA, 410 bp, Zea Mays
caacggatggagcttacaatggcacgactgaaccgttggtgcgtcatttctctaggatggcacaaaatctcaaacggcagcataggagccaggagaatagaaggttctattctactactctacatccagccccagcacgtgagcgtcacgtggcagtgaccgacaaaactcgtgtacaggcagtggatgagctgagatgttgtcagcaaccgaagctgcttggctgccttgcccttgcctgctgtaaaatgaaatgcagcctgagcccgtgacactgcctgaatttggctactgcttattttgcttgattggctgcggctgggacacctgaattgacgtatatataaagtggattggatggcactgaactactgaacagagacgcttctccgtcacggttcttgtccgac

SEQ ID NO: 155720 - DNA, 444 bp, Zea Mays
tgtccgcgcccctgcgcccccaaatcgcgtggacctatctctccctggaaggtcgatccgcgcgatccaatcgccccgatctgcctcacctccatgcaagtactcgatctgccacgcccaatctctctctggaatgtcaatccgcgcgatccactcccccacatccgcttcacctccatggaagtacctgatgtgccgctcccactctctgcatcgcgttgacgctccctggagtccccgtacacgcgatttactccccctcgatctgccgctcctaatctctccctggaagaccgatctgcatcgcgtggacgctccatggagtccccatacatgtgatttactccctccccaaagtctcgcgccgcacccgatcggcctcgcccgcgcaatccacgcgtcctaaccttcaatcaaggcttcggggcaaggtttgcattgacg

SEQ ID NO: 155721 - DNA, 568 bp, Zea Mays
gcaccagagcgcgtcgagggcggaacgcaactcccttcacctcgcgtcatcgttctagtgagaccgactactctttaccgctccccttgcgctgctcgctgtatattatgcgttgggatctagggtcgggctgccggtttcggttgtggaactcaccatgtctagacatggcgccgccatgggggggggggaagacgcggtgccatcacttttgttcggagttgggaccggaggccgtctgccgctggatgacgaacggatgattgggattaaaaggggaaaataccgcttcacgtgatggaatggtggtcgtggatccgcgagcggacgggccgatgccatttaatcgtaattaaaacttaagcattgatccttgatccggcggtcatcatcgcacacctgctcaggtgggatcacgatctaatccaggcttttgggatcggatccaacgacccataagtagcgataccccttagcccgaacgcattttcataagatcccctggcgaataacggaatcaacccgccgtccgtgggtgctgttcactgagtcctgggagttttgcaga

SEQ ID NO: 155722 - DNA, 711 bp, Zea Mays
agttgatcgaaaagaactcggtgcggttgcgtcaggcaaaaagcctgcttagcctgtagattgagcctatttgccagaaggggcacagaggataggagaggtgaggtagtgtcctgtgtgcggactgccgaatgctgctactgttacacctacagtaatcctttcgtgatgcccgcattattgcttacagtacagggctaaggcctacagcgttattggctggcaggtcaaggcaccttggtccataggaaacagtagctttgcttagaaagcgaaagatccttttactaacaggcatctaatccacgagcgcagtttgcatctaatcagttgatcgcgtcatgaatgaatgtgtcatgggcaaacacaggactggaatcacgcattttgagacgtctgatcgagcgttggttgcagcttgctgcgtcacggcctgcattaagggaggtgtttggtttctactctttaaactttagtgactaaaatttagtttttttagtttctaaaatgccaaacagtataactaaaagatgcatctctaatagaaattttaggtactaaagtttagaagggtgataaaaggaaccaaacacccctaaaacataaacgagggagaaagtgtgtggtgcacatacagccatagtcggatgagtatgtgcggacggtagtctttatttatagtgtaaggttaggatctaagctagatgagcc

SEQ ID NO: 155723 - DNA, 986 bp, Zea Mays
ctcaccttaggggaggatgcgagcctgcaggtggggccaaagtttgactggtgatcggctcgctgctcctccacatccattgatgcagttactgtcggcccgtttatggtcacgccgactgccacgcctgcccccgcggctgactggcccgtgacctccgtacttaatgtctttgttgggccatgcgcggggtgcctcgagtcgctgcatcggttttgaaaatttatctcctcagccttctgcgagggccttgagaaggcgcggtattggcgtgagcggtggtgcgactttcctgcacccaggaaccggcgcaccggatgtatgacatgtgggcctggggccccatgccagaggttggaccactggttgcagaaaagctgagggggcgcgcaaccgcggggcggttgcatgctccttgtgcggcggttcgcctccttgaccgctggttgtggtgaagatggaagggcgaataaccgcaggacggttgcacgctccttgtgcggcggttcgccttcttgaccgctggctgcggtgaaggtggaagggcgtgtaaccgcagggcagttgcatgctccctgtgcgacgattcgccttcttcgcgcttagggccagcttgtacgacatgtgaggcctggcccccatgtcatagaatgggaaccctggcgcacgtcgggggagaccttgcccgtgacgcttcaggacacgagcggggaaatctgcctttaaaaaggagttcatccctcgggcagtagccaagcctcgcttttcttgcattcaccgcgcccttccaccttccgtgcctctggatggggcacgccagtgttcgctagagggatccacgtcagggccatccccccagcggtctcaccgccggggagctcgcgcttttcgtttcctgcgcggtggtgctgccgatcttgtcttcttcttgttgttgttggaggagcgcggcctcatgggggttggcgctcttctgccatcgctcg

SEQ ID NO: 155724 - DNA, 281 bp, Zea Mays
gggttagagagatatgggggtgggaagtcggctatgtcagagatgtccaaaccgagacaaaaatggtgccaagtcatatcaaacgccttagggtaggtgtcaactttttccagggcattctagggttaatttggcgccactttgtcaattgggtcgaagtgttttgaagtttgaatgagggtgaacatgtgtgatctttggccaaaggttagtttttggacttaggcaatttctgatttttcttttgtgctcaaacctttggtgaaccttttggggctttt

SEQ ID NO: 155725 - DNA, 999 bp, Zea Mays
gaaaaatgtaatcaacatcttcaactgaagcttcgggggcaggggattttgctttttctgccataccctgccctgctgtcatgccgctatctgaagtttgttgatcagctttgtcttcaggcgcgacaaccttcgtctcaatgggcactacaggcccaacttcggcttcggcctggaccttggcaacttcggcaactttcttaataggagcaggggtcaaggcctttgtggtctccataacagcgtctagcacgctggccatcctcctcctcttgggagttgcggtaggacctttttgcatcttcggcaaatttgcctctgccggtgggctcagaatttctggcatttttactgtttcttccacctttggctcttcgaccgtatcatccttagcttcggctggcccgactgtaggcaccttcgcattacaatagactcttcagcgctctgcacgatggaagcagcttgttttgcttcagtagttgaagaggtccctttgccaaattcaggcactacggccggttcaatatatcgcggtcggtgggtcagaaccttcattttcttgtccttcggcatagcagtggtggccgaagcgacattttttctcttcttcccttgccttcgcagcgggtagtgataatcagggtatacgaagccgattgcatcaaataccctattcaatcttttcttcccttggcccccgaaggctgcggacaaggcatcatcttcggccttggaatatgtcccgagtagctcatcgctggtagcttcaatgcatttcaaccagtcatcatttggtttatcaaacttctctctaaatctgaagtatacttcaattgaactaagccatttccattggattcagcagtagtctccttcggcatatcctagctctccacaagtggccacaccctataggctatgtgctcttggactatatctcttgtgccaatgaaggcgcaaatattgctaaatgccttctggcatgcttcgacatca

SEQ ID NO: 155726 - DNA, 477 bp, Zea Mays
catgtataagggagttggggtctgacacgtgggactaggaatactaaaatatggagcacagagtgatggatagatctggtggaccaaggtcttctcccgcagtgggcataaatcttctcttggtcgtcgtgcaagatcctcttgccagactcgtcttcgccccgtcttgtcagtgtgtgggtcagtgggtgaaggctctggtgtaggctgcggcgtagactgactcatcgacttgcataggggagtaggtgggtggtgttgtcttgtcccctccgcctatctccgtcgtctgcctgtgtagcaggaatagtagaaatcattatgggagttgcccatgcgcgacacagtggttcaatggtctttgcctcggtaacgtgtgggttactgacgtgccccaggccttgtgtgattgcacatgccgcctacgtttaatgtgagacgcaatgccgcctgcctgtggtgtgaataggcgggcac

SEQ ID NO: 155727 - DNA, 311 bp, Zea Mays
gattggggggattcgatctggtccgttagatgattgatcggatggctcgggatggacttctagtgttttaaatctggagcgccagtttttgatcgtgcggtgatcgttctgtaccaattcggccggggataagtctaatcctagcggtcgaattctaatcggacggcccacgttagtccataccccttcgcgggtcagaattattaaagagcccctgcagaaaatagaaatcaacccgccatccatacgcaactgttcactgtgtcttggacatcttaccccgagccccctatgttcctgtttaaatgagc

SEQ ID NO: 155728 - DNA, 1884 bp, Zea Mays
agtcgatcaccacagctttagtggtcagacccctgtcttttaaaccagcaatctcaactaacaagatttttgcctcggcaactttagagtcggttggggcctctatccaacttggcacacgcacatctagctgccttctagcatgagcaggcaaggagttgttgtgattctccatagtgaaccactcaaagcgccatcccttgatgttgtcctttagagggatatctaggtagtcgaccttcctaccccgacgatgttcaaggctggccccaccaactacttgatgatgtccacctgccatccccgacttgcaatggtagacatacttccacagtccaaagtgtgggctaatcccaagataggctttgcaaagatgcacgaagatggcaatttgaagaacataattagggtttagatgagttagattgagggagtggaaatcaaggaaggcatgaaaaaagggggaatgaacaaacctaggcctcaaattaagaaagggacaaaaaccacggattcatgggtatcctccatgggcacggtaatcccttgccaaatccgctaggcacacaattccttcaatggaagaacaccaatttaaactagatggagtaagtcagattcagaaacaacagaagcataattatacagaagggaagttggctgttgggatcgataggggggtgatgggcacaacaccccccagtttcttcttctagggcgccataagacctcatgaaggtgtggaatctagcacgggctcaccgaggtgccgaaattttacagagaagagttgcggtgaaagaacagagctagggttatcttgccagaaaccatcaaatggtaggcatgtatatatgtgtccactatagacctatcacaagcttcggtgcgggggaaatagattttcagatcgaagggagtaaatgctaagtcagataagtttaattggacgggttcagacgaatgagctaaatgagacagaaagcatgtttctatgcaggattagttaggagaacttagtcggggcacaagaaattgatcagaacaagaaactcagtactcatggtggataatactagcaagctttattcatataagcggaagtagtattacagaagaagatccagttcattatgaaccgaccctgcagaataccccttctaccactactcctactcactaccactacatcctactactacattacactatactaatatctaagccggtggtgccttgccatcggtgttgccgccctcgcctccgccactgtcgtccttgccgctaccgccattactgttgtcatccttgcctccctcgtcgtcgccgtcgtagccaccctcgtccgctctatcgttgtcctccttctcggagtcgtcctcctcggagccctcctcttggagtcctcctcctccaagccctggatccccgctcgctagacaacccatatgtacgccctatccaccgtagagagccccatcgagtcgtccgaaccatcagacgacggcatgggggcaccgtcggtggggactcatcccctcggaagaaaaccgctcctccgagtactctgattcgccaaagtcctccgacgcaggagtcagagggttcttccgcttgccacctcgacctttcttctcacgcttgcccttgtcgctcttgcttctcgccatcgatgttttccgagtgggtgaagtggaaataggaaatgagacaggagttagtgaagaagatagtcgaatgcggacgaccaatttaaagaagccaggggtgacctttcggctctcgtccatatagagaaaggtcactaagccttcaagagccgtgtaaatttccaagaaactgcacgccactaacaccccttggcataacatggcaccaaagagg

SEQ ID NO: 155729 - DNA, 535 bp, Zea Mays
tcagagagtcgcaacccaatttgtgtgtgtaggggtcttggtttgcttcctgtcgtactgaagactccaatccgcgacaaaccgaacccacacgatgtgagtgcggtgacggtgccgctcgcaagctctcaatctctctcttcctctcctcggatttctttctccatcgattttgcgttggcgctcggttccagctcagatgtgacgaaacggggaggccgaagtggtcgtggctggtggctttgtactagcgatgcaggtcgggatggctgtaacggccccgaagctcacggcgcgacgcggcatgcgcggagcgagagacgcgcggagaagacggacacattctgttgaagggaggctgacgaggcgatcccacgtaccagtgacaaggaaagaatccgcgcaaggaaggagtggctgaccaggtgggtcctacctgtcggcacacagatgcggatgggctgcgcggtagtgaggtgagatgtggtttgggccgagcgcaggtgaatccggcccaacagacttcttttccctt

SEQ ID NO: 155730 - DNA, 289 bp, Zea Mays
cgacaatcaatctttggccccacctgcaggctcgtgtcctcccctgaggcgggcccgggggccactgtcggtaccctgaatcaggggtaccccttactacagtatgaaggcgtggagtccatgcggctatctctagtcacgtggcaaaacagcgcccaaacccaccgcgtgggcggctccggggctgccacatagccagaggagacgataaactccatggtgtcaacaatgggtccggacccccacgggaaagtgtcagacccctggatacacagaccggacctccagg

SEQ ID NO: 155731 - DNA, 928 bp, Zea Mays
ggcctggctttagttcaaatgatatgcattctgttttcttcattttgttcatcatgtcattaatagccttttgtaccctttcatcaatagtctcttcaagggtccttttcgacttctcgtgtttcctatatgacgccgcatactctggatatgcctctctctaggaaatcttagaagagattccccgagcccgtccagtgtgtttaggattgcctagttctgcagttagtatgtcattctctctccgaggcttaaattcgcccttctttctctgttctgcatattcttgaatttttgtcgaaacttcgcctaccaattctggatgcaaaagtttgtcgtcctcagtcaaacctgcccgacctaagatccaacgaatagctcgctcatcgatatcttttaatattgggtccaaagtgtcgttagctatagcttcctcgattatcatgttccactgcacaactttatggtgatatccggttgaccccaggcgatgggggtgtttgttcatcttcgctctctgagaattagtttcgcccagttctttggccttcagttcagtcttctgacgaataaattcctcccactgagcatgagtgattttccccattttcttgggaggaggaaccttattcttcttaacaaaatccctattcatctcggccttccacccacgaaacatcttagccatagcagagagcatcgactttcttactgcatcctctgtgccttttgggaccttgaatgactcggacaacttagcccataccttattgcgggtgtcttcatctaaatccttccattttcgaagtgtgattggcactatatctctaacagtagacccacaggaatttcaaaactttgtaaccacatcaagtggttcttcaggaaacccctctgcattgagttttgttacgtacataactgtacc

SEQ ID NO: 155732 - DNA, 885 bp, Zea Mays
gtagtgctcagtgatcgaaatggttagaatggtgactctgactcggtatgataattgatccatgaaggagactatgcgggaggaagcagggttgctcttgagtagtaggatttttgccaagtgtataatgcttccatctgatggggcggtaaggaccatagtaccagaccttgttgggcatctattagtgggagttttgctcgtatccctcctctggcgtgagagtggatgtgacaagacttgtgatcgcttgttggtagatcgaagtggtattattgattttgagagtgaatccgactaggcttagaccgcaattatccaatggcctaaaaccccactcaaaagaattggttgtgttcaagttggactcatacttgtagttagaccgagcttggacgatagttatttgatgtcacaatgactagcttggaaaactttgccgtgtctacgctggacttgtaaaagaaatttcatcgaaattccgttaagtccttttaccatgtctcaacaatttgtcaatgaagtttgggtcatcatagtctctatgaggtgcccatcaagcatgttagagttttttgtcatacacatctaggagccaaaaatgaaggttgatcctaccaaaaatatgatgatatccatcaagcttttagttgtccttttcctgaagccatgcctgacatgctagatgtccatgtttgatgatcaataatcctgctatgggatttacctagaatttgaattgatgtgattcaacgtataccaaacttgatgatgaacattatggaaatgattttatactggttcagactgttgaatagtgtaatagcctatatcaagttagacatgttgacttgtgtttgattgttggttatgttttgttttcgt

SEQ ID NO: 155733 - DNA, 409 bp, Zea Mays
gctgatttcccagatccttgcgaagcattagattgattttgcctaggatatgggcagtctttgatgaagtgtcccgacttgccgcaattaaaacacccagttgaagaactaggcaaggcaggaaatcgagtgcctggggcacccggctgttttggggtagtggggatattgttggggcggataatgattggctgtttgaagggaaataaaggtggacgagaaaaagggcgattttggcttgaaggtcggatcacaaaccgtggtttcttcgcctggccctgattaggcctctcaccaccgaatcccttattcttcccagaatttgtgtacttggcttcaacagataaggttgtgctgacagcctttccatacgtaaggtctatgcatgtggccattttcctttgtagcc

SEQ ID NO: 155734 - DNA, 420 bp, Zea Mays
cgaaactagttttttaaagaaaaaacttctgagaaaaagtgacacagagagggttccccccttctagccctcgagggaggttcggtctggtgaagacaagatcaagcctcacttgaaggttagactttttattcataagcgtttgaatacatatcagcctggaaagctaagggtagaagcgatgtagttgtttgttgttttaggcgttctcgtagacttctccttgttcattgcagagtttgtatgtcccaagctttagcaccttcgcgatgatgaagggtccttcctagggaggagtgagcttctagcgccctcggttgtcttgtcataactgaagtaccatatctccctcctggattccccgaggctggacatgccttgcgtggtagcgccggagcgactgctcgtacctggcggagt

SEQ ID NO: 155735 - DNA, 692 bp, Zea Mays
cagaaagtgctaaggtaaggatggcatatttccctttaggcgcgagtctcgcggggacctggcccgaatgtggcaaggatggggctaaaattgcctcgcgggaatggaagggcgagaacccaaaatttaatggacaggggtagggatgaaaattatcccgttggggcccgaattaggagtcagacctcccccgtgtggcttatgaaggtcgaattaaataaattgtctcattacatgcaaaatcctcacttactacctcaaccctcatttccttcacttgattgtcgctcgtccacgtagcaatccttatttgtatgtgtatatcataatatttgtactcaacaattgatccccacgggttccccaaggggttcggttcctgacggggatggggacaaggaggaaatccttctcgttaagcattttagggccaaataacattcgaagacctggaagcacttatctaggcccaccccatcccattgtcatccctaagctaaggtagtgtttggttccatgtcctatttggacgaagcgactctattctaaactctgaggaaagaatggctatgttttgtgtttggcagtcagattggttctagagtgaagcataatagggtggctctatcctgtgtttgatttatgagtgcacaaatagatgatttcctaaccatgccacatccatatattca

SEQ ID NO: 155736 - DNA, 587 bp, Zea Mays
agttgatctagtgcttcctaagcacctggtccagacagtttcatggggagattttataaaacatgctggagtatcatcaaggggtgatgttatggcggctgttgcaaccatatggggtcgcacgtttagcaatcttggcaaactgaacacaacttacattatccttttgccaaagaaagaagaggctaataaagttaaagatttgagaccaattagtcttgtacataactttgctaagctctttaccaagctgctggttttggtgtttgtgacccgactgcgcaacacggggttacccacgtgatgcttttgggtaggacgacattgttgatcgcaactcgatggttcgtgtagaggcatgctaggatcactcatagaattatacaagatcgggccacttagaattgcgtaatatgctacttcatgttgtggtttgatattgatctttggagtacaaggattacaagctgggggtttgtggttgaagatgagttggagtgattagtgatgagatgaaatcgtaggccccccctcgaccttatatacacgaccagagagagttaacccattacaagttgtgattatta

SEQ ID NO: 155737 - DNA, 660 bp, Zea Mays
ttgcaattgctcctagaaacgtgctacgaacggtgctcctctgtctgacacaatagtcttggtattccatgcaaacgaactatctggtcaatataaatttctgcatacttttctgccctctgggtggtatgtactagcaagaaatgagttgtcttggtcaatctatccacgatgacccaaatagaatcgtggtgtcgggatgtgttgggtaaacccacaataaagtccatgcaaatatcctcccatttccaagatggtatgggaaggggctgtaaggtgcctgctaccttcaaatgactggccttgaccctttggcaagtgtcgcattcagatatatacttagcaatttccctcttcattctggtccaccagtacaaagatctgagatcatgatacatcttgttactgccggggtgcatggagaatttggaaaggtgagcttcgtccaatattttctttctgatctcggaatttttaggaacaaccaatcggtctccaaaccataaaactcccttgcagtcctgacggaagcatttgtatttgtccaccttctgttcgatcatttccttaatgacttggacacccttgtcaccaatctgtgccatgactatctgctcatgtaacatgggctccactgaaatataactcaaggcacctgag

SEQ ID NO: 155738 - DNA, 627 bp, Zea Mays
ggacaaaagggcagtaacggccgaattaagggcacaggaaggtttctcacctcgagtgcgaactccggaacgcttggggacgacaggggtgcggtggagcctcaggttgacggcagcggactctggctgcgcaagaactgctccaatgagcgcggaccgggcaaaccagggagggaaaaggcaaaccgaagggtgtccagagtagctggcggcgaggcggaactcaccgaggcaacagatggggcgcgggctcgacgacggtcgcagaacggacgttggtcttcggtgagcggcggcggagctacctggtcgcgtgtgcagagcgagagagggggcgagagggttcggcttagggcgcaagtgagcaaggggaagtgggcgagcggggcacagggctcaaaaggggcgaggacgtgcggagatggccggagatcaagcggttgtgggcgcgtccatggtgggggaacgtgggtgggaggttggtgacgatctgacatgtggggtcggcgggacagaaggagaagcaggcgcgcatgcgagaggaacgacgccgacaagcctggcccactgggcagcagaagggagagagggagagaacgcgcgggcgagacagactaacaggcgggg

SEQ ID NO: 155739 - DNA, 673 bp, Zea Mays
ctcatccttggtccccgaccactctgatgccttccaagcgaggaccgtgaaggctgccaccgtgggcctattccccatcgtcgacgtcggggaggcggtcgaactgctcatcccctggcgcccaacggaggtgcgttggctcgtcgatgatgtgtcatgtgatggctcaaaggttggccgatttctaccctgtttatgctaccactttcggtgcttgatgagtgtttgtaagctttcttctattatatgttgtctttttcattaatcagtcacttcaatttagacgattgtgaatccttatcttattgggagtgattttgtgtataatcttacatacgccgtataatatgagttcattaagatactactggccaaaatcataatgtcattatgtgcaaatattatatgatatatggtattttcagaaacgtctactccataggaagttcagattgccagatggaccttcatggtatttgatttttttagtaagactgcagactatatttggagtctcagctcgaccatgtaagtatcttgcatcctactcctctttagatagcagcgtaagctagacgttgctttcaggaatgggtccatacaatgagttatctctgatatcaagctcctcaatatttgctagatttctatgaaacagaggaccacagacatc

SEQ ID NO: 155740 - DNA, 391 bp, Zea Mays
ctgttcaccgtgcggctagagattgccgcacgggcaccgtgcctttatactgtagtaaggggtacccctgattcagggtaccgacacttaccatataggggttgatgacgaaatttttactgagattattatgttttttgtagataggagtctgtccgactcgaccttcggttgcttgactcatctgtgatcttaggcttaccttgtcgtacattataaataccttggcggggaggaaaagaaagagtggcgcacagggagagagaaggaggcgactggagaattagcttcctacttgacgcgcaagatctatggtgctgagctaggggccacgtcagccctccccggatagcgagtaacatacctcggcgccatagtcagtggcgccgag

SEQ ID NO: 155741 - DNA, 500 bp, Zea Mays
tgagcttgaggagaaacatcttcaacatcaagccgactcaacccgatggtactccaagcttaaggagaagtattcccaaggtcagatcgacctggctcgggtgtctgcttctttggatgatgcacattttttgaattcttcgctcaatgctcagcttgactctgaaagggcggctcacgaggtaaacttacttaactggctccactgtacttactgtttactggatgcttgagagttgactcttgtttgtaggaggagagacgagcactcgcagcttctcgtgacaatctggacaggttgtatcgtgatgccagcaatttcttaaccatcttggagagaagccatcgctttactatgttagatctggaccatcatcgccgcgaactgcaagtgtcccaagatgaggtcctgcggcttaggcagctggtgtcaagcaaggactccatcattaaagacctgtgttcctccaagaagttagttacccaggagctagaggccgc

SEQ ID NO: 155742 - DNA, 963 bp, Zea Mays
gcgcattccattccatctctagtggtgatgctacacaagcatcaaccttcaacaagccatttgtaatcaacacaaatcaatacttgacttgatctctcttgaatgatatgatccactccatgtcatcatgtggacttgttggtttgttgatcgcaactccgcttgctcttgaccattgcctcggtccatcggcgccaagttcttgctcaagcttctccgccatgtgcggtccatcgtgctaaagcctctaacttgcccttcacacttgcaatctggttgtcatagtcaagtcatgtctcttgatcttctctatctagccatgtggcaccatgtcatggctcatgtgcaatgagctccttcatcataactaattgagcactatcaacatgaccaagacacctcttcaccatggcttcaagtgttgttcacactagtgtacctttggattaagcacatggtatctcaacataaacacatattagtccaggttgtcactcagttacgaaaatcaaaccagggtctttcactagcaataagatcgaagtgggcagttggctatgcaacaacaaggcctttagtcccaagtaagttggtgtgcataggcagaggctagagatgaaacccaacaaaagaatgatgaagtaaagttaaataaatataaaacagtaatatagcatcagtggtaataaaagtagtgaaggatgtttgattatcatggttctggcatgtggatcgttaattcctattcagtaaaaaattgttgcctacttccagtctttcttgcctatttttactacatccatgcaaattttgcctcatttctacctctccttgaatggcattggtccctcaagtataggtggtaaggtggattatgatgtaatgttagggtcctctagactttgtgccttagacttggatgtcatacataattttactgtggagtatgctactgtgtaggag

SEQ ID NO: 155743 - DNA, 898 bp, Zea Mays
aaaattcagagcattatgcagaactgtgaatataggtgcttcacaaacggacacatatctcactaagtttcatgtcattggactacaactacatggtttgagctacatttcttagttttgtttgttttcttccttgacatttgtactatttgttcatctagcctctacaaatttacttcatgcatagatgtctctttttggactatttactattttttgtgggttaaatgccttcatagccaaaaataaataaataaatagcaattttggtcaaaaaatagtgaaacttggcatggactcatgttttggccttatttgcctaaggtaaaaaattcagagcattatgcagaagtgtgaatataggtgcttcacaaacgggcacatatctcactaagtttcatgtcattggactacaactacatggtttgagctacatttcttagatttgtttgttttcttccttgaaatttgtactatttgttcatctagcctctacaaacttacttcatgcatagatgtccctttttggactatttactattttttgtgggttaaatgccttcatagccaaaaataaataaacaaataacaaatttggtcaaaaaaatagtgaaacttgacaaggactcatgttgtggccttatttgctgaaggtaaaaattcagagcattatgcagaagtgtgaatataggtgcttcacaaaggggcacatatctcactaagtttcatgacattggactacaactacatggtttgagctacatttcttagttttgtttgttttcttccttgaaatttgtactatttgttcatctagcctctacaaacttacttcatgcatagatgtccttgttttggactatttactattttttgtgggttaaatgccttcatagcc

SEQ ID NO: 155744 - DNA, 651 bp, Zea Mays
gcggtggctagacagtgtaacgtcgggcaagagacgacagcctgggcctagagcaattcgggaaggtacagtggcggcagcgacaacagcctgatgctccctcaccgtccgcatctcctcgttgctgatggccgcaaccacctcctccatctcgcaatggcacatgggatctaggagacacagttgaatgcatacaagtcagcaccgacatcattccttcggtctcgaacgacagacaagagtcgtggcttgaagaacagcatattctgttagggtatgggatatagaggtaggagaagacagaggtaggagatagagataggagagaacgaggagctctatttagagttttctattgtttagattcttgataccccgcccaaagcagagtttactacttattacagacagcctgaggcacacaccacagggacgcagccccacgtgacagacacgcacagatcacttcactctaggcccaccagtcggacgttggcacggcgctctcttcttccaggctcgcgacgaaggggcaccttctgtggtgtatccgctgatggtagagaggctgtaacattccctcccccttggaagcctgcttgaccccaagcaggggcaaaagggaagcattggcgtagagcttcaaggtcc

SEQ ID NO: 155745 - DNA, 620 bp, Zea Mays
attgaagatactttggaagagaaaaacttcaattttcaagatatactgggacaagagttatcagagactgaaaaagaagagctaaagaaatatgctgtatcctgtgggtacaaaccagtggctctgttgtttggcggagtcaatgaagggaaactaagatgccttcggaatcgaaccgaggccaaggttgttaggactttttcaaagaacgttggcctgccgaagattgaagcggacctttgcaggtatcagtgacagcatatcgccggtagcttgttctacgctaattacaaggtaaaaactctcaactttttattgtttttttgaattaagatgttttctgacgaaggatgttttggcagagtatattactaagtaaagtgctgaggatgcaacaagatcttgaggacgagaaaaacgaagctaccatcaaatatctagaaaacaaagtcgaaaattacgaagctgctttgaagaaaaaggacttcgtcattcgagaccttgaaaataaagttaaagatcacgaagctgccttggagaagaaagacttcgttattcactctatggaaggttcagtggctgaagctcaagccgaaattgacaaattaaacagcgaatta

SEQ ID NO: 155746 - DNA, 812 bp, Zea Mays
ttctatgctttatatttgctttgatttgtgtcggtgtttggaccgtgggtccttaaccaaccagtgaatgtggcgcgtggctgactctagatggtgtgcgaggagacacaagcgtttatcctggttcgggctactcaaggccctaattccagcaaagaggatgagacttatattactcgcaccgtggtgcctgttgtaggggtttgcaagcacagtgggagaggggaagtccccaagtccctagagatgattgaggcaagtgccaatatctaagacataatggaagagcgagtgtttgtctacgagtgtcgtgtgcgcgttgatgtcttcgatgtccccctgtggagggaccacaaccctatttatacgccaaaccgagcgtccttagggaagtagggtcttgtattcgaagaagagatgcctgacgtctgacgctacgacatactgtgcagtagattcatgcctgctaacttcccgtagagagccaaggccgagaccgaggtgttgtcagtacacccgagcccccgagggagaggttgtccatgccgtagtggttgtaagagcgtcggggtatgggtcaaaggctgcttgcggggtgcgtcatcgtcgtggcgtgtgatgacatcgagattccccacagcactcgtcaagatcatagcccctgcttggttgatgcagaagtcttctcgaggcgttagccgagctgtccctcgacgtgcgctacagtcgggcggagtggctgtctacgggattcgcgacgtagtcggtggctggggccgagctcgggcgaggcggagaactcgcttgacggc

SEQ ID NO: 155747 - DNA, 272 bp, Zea Mays
agccccaaaggaggattagagctcacgcccaaggcaacacttagtgggaccttagctccaacagcgtgcagcggattcccagcgcccgattcactgacctctaaagtgatcagaccaacaagagcagtaggaaggcttgtcaacactggctcctcagactgaactggtggtgatccgacatgaacgtccatagaagcagccaaggagccgtgctcggcaccctcaggggttgggtcatcctcagcagcaccctcgagggctgggttatcctc

SEQ ID NO: 155748 - DNA, 284 bp, Zea Mays
attctagttctcttaaagggaggagagttaagaaacgacgacacacatccaagctaagtggcgaggagcatgttttagagttgcttgaagggcatgtcaagaactgtcgagtagcattcagaatggaacctggaatttttagagccctagccagctatcttaggaaggaaaggttggtacgtgacacaaggataaaagttgaggaatcatgttgaaaggactttgggggttgtgaagaagcgctttcccattctaaaagctgccacatttcacaaaataaggaa

SEQ ID NO: 155749 - DNA, 547 bp, Zea Mays
ctgctggtcctttctgtgttgtgcgcctgccctttatttccaccccagcgccattggtaaattgcagtacggggtaactaggcaccacacctttcggtctccaagttcatgatggggaaggtaactgcggacacatcggcgcaaaagaaaagtgagtgaaagtgagcgaatcaactgatccgatcccacagaatagagagaaaaaaaagacacatctatcgatattattagttaatccatgcattggttcataatttatatgattaggcggtctgcgtagcaatccttagatcttctgaatctcacgccaaaagcacatgtctaagacccaatcctaactgcgaccgttctcacaatgccctatatatggtgccgctttacgagtttacttcacctgtcttcttcttaatacaatattcggggactgttttaccctatgcaggaggttagttaggtgttgcttgtttagccatgcttcgaacttaaggaaacttctccattaataataatccctgtcagaaatgaatcatgccacgtagaagatccc

SEQ ID NO: 155750 - DNA, 528 bp, Zea Mays
tctccagttgtccaacttcggcgagcacttctccagccagggctcaagctctttccctccctgggtgataacccccctctttcctctccctttctatctgtttctcaccaagtgaagaccccccttcacacccctcactaaatctccaaatcctatgaaaacttgtgaaatctgtgtgtgcaaatatgtcctatgttctctagtgatattcccttgcagatactgagctccctagggagggtttcacatcccaaatagccatttcaccgtcgtttaaaaaaacccacaagccaagtgcttggtgaaaagcataaaccagtcaaaatagctcaaatcaaccccaattttttccagcacactacaactactgccagtacctctcacgccaaatttcacacatatccgatatttcagacacctgtttcacaacctatttatctttatggtgatccgtttcgagccgagtgccaaaaatgtttttcctctgccaaacttcaaaccaagcactcatttcactcattttcatac

SEQ ID NO: 155751 - DNA, 403 bp, Zea Mays
gcgacctcttgtctttcttagatgcttactctggttccatcagatccagatgtctagggaagataggaagcataccgcttttgtaacagtggatgggctttactgttatgttgtaatgccttatggtctgaaaaacgccttgccgacatttgtacgagcgatgagtaagacctttggggacctgattagggacatgatagagatatacgtcgatgacatcatggtcaagactaagagagggtcgactctagtggaagacttgaccctggtctttgacaagctgcgggcaacgcgcacaaagctgaacccagagaagtgtgtctttggtgtctccacagggaagttgctgggattcctggtattgcaccggggcattgaagcaaacctggagaagatcagggca

SEQ ID NO: 155752 - DNA, 1102 bp, Zea Mays
cggcaggaggcagttgatgaatgaacagagacagagaagggaggtagaagatagtgaatgacaaatgtgccccatttgcataagtaacgacgtcgatcagtgaatgggcggcgatggcatcaagggattcaaaatctaaaaccgatggcatagagggaatgttaccatttccagtgtcacataaagaatcagtataatttctaatggcatagagggaattttctcatgtatgtacgtagagaccgatatatagttggtttttaaaggattgatggagaagggttaaacatcagctaattgtacgtaagtaaaactgatagcttggttggtctagctaactaggtaaaagtctgaaacaaaactcaactcaaagccatcgatcgggaaggtagcgcgacgccgacgcattagtgctctctgcattaattgcttccgctttgcttgctgatccatcacacatcagtctcggatgacagggacctcagcttcccctccccctcgtcctcgtgtggcaatgcatccaaacgcgcaaacgcaaatgcagtgcactcctctgtcccatctatattcctccattcatccaccgcttgcaattgcatgcccaatgcgtactactactactacactgtagatgcaccatgcatgcatatacagcgggccgtctctattttacatctcgcaacagccgagtcaaactcaaacctgggagatagatcatcaacacggatatattctatgggtcgcctgacagaccccgataagcagtgcgtactatcgggctgcattcaggtgaaacaagatcagacgaaacaagatgacgcggcgagcggggaacaaactcgaagaatatgacacgagaacactatcctacaacagcactgcacatgactttggacagccactcttattttctgtgaccacggacacaaccaccaaatatatagccttattttcgcagacaactgacacatccgtcgaaaataaagccttattttcagcggccgatccctggccaccgaaaattaggcgttttacagccgctgccaaccttcttctttcttctctctgtttctctcacatgcacaccagcacgctcgccggc

SEQ ID NO: 155753 - DNA, 846 bp, Zea Mays
acagccgagctccggcgagcactagcaccggccgattagggcaacggcagggttctccgagcagcggacactaaatcagtactaccccgagcatttcccccaaatcaattgcaaggatggctactaggtttgctctggccgcagtgaccgtggaccttgcgggcagatgaatgtgttcccgtcgattcatggcagtctagttcaattggatggtttggagagcatcaagggcacatgagaatgttagaacaagactgaggatggcagtatcggacctgatttgcgctggccgcggcgagctcgatcatgcggtgttttggaacagggttggggaaaacttggaattggagctcacggttgcaggactgggggtgatactggacgatggggtacgtgatgaggttgcggagctaacggtgggctcaatttcaagactccgggagcggtggctctcaatttgcccacggcgagctggcagccggaggtgaggaagaagcctggcgcgcgtgaatacgtggctaacgccgtggcaagcacaccggcgacaattagatggccgtagcgagtcacggtgtcgcggtggaaagcaaaaccacgcggcgcgatgccgggaagcagcggttctccggcgagctaatccgctccagccgcaaagcgggggggaaagaaatggaaggtcgtcggagtggtgtccagctcaccggcagtgaagatttttactgggcgatgcttatctgatggccacggcgcacgaatcacggcgagcggcaatcgacggcgacggccaccggcgatgggcaggaggggtgaatcgtgatcttcatcagtgtagatctactgtaccat

SEQ ID NO: 155754 - DNA, 273 bp, Zea Mays
gggaaggggaaaggtgacttattctgacgggagatggaggagagacggcgtcggtgagaccgtaagggcataaatggtacaacggggctatgggcccacctgtcaggtctaccacaacatctgtgacctattttgatgaacgacacagcttgagcgattccaaccaagacgtcatttgccaaactgcatctctatcacttactcatatgtcaaaagcacgcatgggcaagccaatccagcgccttgttgtgccggcatctcattcccatccca

SEQ ID NO: 155755 - DNA, 893 bp, Zea Mays
cacccacgcccgcgagggagactttgcagaagggtccttgtcttcttgaatatcccgacagagtccaaggcactatttaacacagtcgctgacagttacaaagacaccctcgcacttctatccattctcggtttgaagtccacgatggcgatcctcgctgggagctgagctctggcgagctagaccggccggatgatgccacggctggagctcccgagcgacagggacacaattgaacccttaccgaacacttcacccaaatcaatttcatcgttgggactacgaattaaccggtccatggcgacagggcggatggttatagggacgaacacgttccgaccaaacgacggcgaggatgaccaaattgaggctggggaaagtttcacggggtcaccagggtctatgtacacactttggtttgggcagaacaagaaccgaagagcgggtcgacggtgaggggggtcacgggggcgttcttcagagcaggcacgtgttccggtgaaaggcttcggccgaccttcaattggccgcttccgagagaaataagagatcaaagaccgactagaacaggaagaaatttgataaatactgacccgaggagcgatggccacgggtgttgcttcacggtggagctaagaacagggagaacagaaatttgcggactgtgtacgctctccggttaaagtgagtcaattgcacaggcactcgtgcttgcgatgtggtgaagaagcagcgccagggctcaatttataggctgctggacggagacggatgaggatcacagatctcttgatcgcgctggcgagcataccgcgcggcggattccggtgatggcacggtggtcgccgtttaaccggagcctgccaccttagtgatttgctgccacgttgccg

SEQ ID NO: 155756 - DNA, 399 bp, Zea Mays
catccatccgtccgtcgatttgcttcctagctaccgtgtgcatgcatgtcaggatcagcgctgctggcccggcccgaagcgtcgtcgcaggagtcaggagtgccatgatgccttcactactactagagctaccgagcgaagacgtacgacgacggtgtgcaggctgctgggcgcaccaccgcagccgagccagcacagcacagcactgtacataaatggaaacaggcaggggccgcgacagtgacgcgagaatgggaatggtaacagacaaatcgcatgcatgatgctttgggcgccgttgccgggtgccccgcccgcccgctcgctctgcctgctgctgagctctagctagctaggcctagtggcctggcttttgggttttcagtttctgaagaaacg

SEQ ID NO: 155757 - DNA, 601 bp, Zea Mays
ctcatcttctctcagcatcgctgcgagcctattacgaaggaagtttttggtatcaatttcctgggtggacaacaagaccgtttcagctttcttatcgaggatgtctaatttactcaggatctctttcttttcttttttgttagatccgctaatatttttagcccaccctctcagatgttgtctaacttttctgattttattctgccatttctccaaggccgaagtgccaccccagtcttgtgaccaaatctgagcaaccatatctcgaaacccatccctcagtagccatccgagttcaaacttgaacatcggttggatattactcgggagactgtctccagtgttaagcaacaggggcgtatggtcagaaatatccctagagtgtgctaccaccgacgccttagggaagtgtagctcccattcagtagacactaggattcggtctagcttttcgtaggttgggttgaccctagaattggcccacgtaaattgtctattcaataactctagttccatgaggttcaatccgtctatgactgcgttaaacaagaacgaccacctcgggttaaagttgtcgttgtttttctcagatgacttcctg

SEQ ID NO: 155758 - DNA, 845 bp, Zea Mays
ttcgacaagaatgagaagttcgcaggaaagtggattagagagttgtcgtatgttgtttggagcctgagaactcaacctagccgagctctatatggaaatactcctttcttcatggtctacggttcggaggcagtgctacccgctgatctcaagtttggggcaccgaggttgatctttgaaaacatagcagaagctgaggccaccagactggaggatgttgatatactagaagaagagcgattgaacacggtgattcagtcagcacggtatcagcaaactctgaggcgctatcacgacaaggtcatacgacatcgatccttcgcagtgggagacctcgtcctctgacgaattcttacgggggagggacgacacaaactttcaccactatgggaaggaccgttcatagtagcagaagtcactcggcctggatcatatcgtctcactcaaatggacggcacgaaaattgggaactcatggaacatagaacatctcaggaagttttacccctagctatatctcaacagctattgggacgacaatgtattctgtaaactgggaaatatatcatcaataaaaagacttcaaaggcactcaaattgttcactgtcaacctgcatgcttacttaaatcggggtgaccactataccctactaacggagcaatcggcttaagtcggcaacggcttaaggcggtgcgacatgctcacgcttacttaactcggggtgaccactataccctactaacggagcaatcagcttaagtcggcaacggtttaaggcggtgcgacatgctcacacttacttaactcggggtgaccactataccctactaacggagcaatcggc

SEQ ID NO: 155759 - DNA, 769 bp, Zea Mays
cttcaggttgaccataccaacaccaagaatagaagcagtttatccgtttcccatcaagatggacgaatgttgtgtcccctagtaagaagagaacatagacaagtaagagtagacatgaacattggcacccgtatcaacccaccaatctgtagattgaatggctgaaaaaacaaatggtgaattaccatacccggaaggatcggtcccatcatcgttgttttttccaatggtcatattcacattcttgttttgttgtccatcttctttgtatttgcggtagcggcaatcttttgcaagatgcccttctttaccacacacaaaacatgctctgttatctttctcacttttcttcttcttgaagttagtggttttcttggctttaccaccagcctgcatcttagccttttaattatttttcttggtattttttcccaaccatgtttgcattagcaccattttctgtagcagcagatgtgctaggagcatcctttgcccttgctttttcctccgcgtcgacgacaataattagattatcggtggagatatcttccctcctgtgtttcaggcttgtggcaaaatccctccaagacacaaggggttctaaaataatggccgctgccacaaacatgttaggcaaagcagatcccaaatatgcgatctctccggccaatagctgcatctcgtgagcttgagcaacaacaggctttgcagcatcaatgctgaaatcaagagttgctcacaagagtacaacatgcgaccagctttagag

SEQ ID NO: 155760 - DNA, 738 bp, Zea Mays
ctgccgtgaatttgcgaaccggtcgtcccttcggtccaagcttgtggtcgggaatctacatcggtgtatgccgcatggtccgggcgcttcctcgtgcagcttgggtggtcgggagcaatggaattgcttgccggagttctgtgaatgcctcgggtccgcatggctccattggcagtgtgttccgttgctcgaaaccaggtattaaggcctccctcgagttcacctaccttcttccgttcgtattcgattagcctcggtcattagagtaggctagggcgcggattgggctgctctccggtgagccgccgccacgatgggcccctatgcgctgccgctctgcccggcgtgtgggaagacatctcgggaccatccgattgactttgggcggttaggattagaagtaaagtctaaccttcggcgctttaaaaacgtggccgtagatcgcttgatctgacggtgctcgtcgcgtgatcgaatcagaaccgtagatctgggatcgagtggttggattggtgttgaaccctaatttgatctgggccgtccatttcgaatcagacgcctttcattgtgtacccattcggattgatgggaatctaatctcaaccatccagactcgatctggcggcccatgatcttacgataccccttcgccttgtcaaaattgctaaagagaccccgtaatgtttacaaattaacccgtcgtccatattcactatgtaatgagtcttaggaatcttg

SEQ ID NO: 155761 - DNA, 1205 bp, Zea Mays
ctacgtcggaggcgtccccaaacttgacggagcctcggacgctagagtcaagctcggtgaagaactcccgtcggccgatcatgtgatgagtggcgccggtgtcgaggcaccatccttcgatcatgtctttgttggagccgtcgacgaggaaagcgcgtgctttcgactcatcaaggtggagtgccactgcggccggtgccgctggagatagctcgatgcttgcatgtgctaggagcagagcctcctcctccgcctccgcttgtgcgacgttggcctgaccacgtcgtggatgtcgacagtccctggcccagtggccaagcttgccgcagttgtgacagccgtcgtctcgtgccggcttcttgttgccgacggcgccgccttgggcacctccacgggcaccaccctcagcatgtcctcgcgccccggcctgggcgcctccacgcgccttgcgcggcttgccgcgtttgcggcctcgtgtcgaggaggactcccccatcttcttgtcaccctgacaggcctcccactgctcccgagtgagatgtagcttcctgccgatagtgataggcccagagggagcatgtggttcgtggccgtcgaccaccttgagacgaccaatcgcctcttcgatcgtcatcgtggagaggtctagcagagactcgatcgagcgagcaatttgcttgtacttctcggggatgcaacggaagagcttctcaacagctctctcctcatcgtaggtgtcgtcgccgaactgcaccatcttctgcaacagagtgttgaggcggagagcaaagtcatcaacatcctcacctggattgaagaccaggttctcccactccttgcgaagtccctgcagtgtggtcttgcgggcacggtcgctaccgatgcgggtcgcagcgatggcgtcccaggcctccttggcagtccgcttctgggaaagcgaaaactacatctcggacgggactgcagcaatgagggcatccagcgcccgtcgatcctcgtggtagtcgacgtcgccgtaccgaactgcttcccacatgtggcgaacctggagccgtaccctcatcaccgcggcccactcgacgtagttggtcttggtgagggtaggccacccaccgccgggaccgatgtccctgataatggcctgggccatgcggcgaccatggtaccgatccggggagggagagtcgcgccgcctgtagaggccg

SEQ ID NO: 155762 - DNA, 387 bp, Zea Mays
gggaggtacatacaaggatgctgagctccgacatgcgggcccaggagcataatggaaggaatacattatgtgaataattaatgctgacagcacacaaagatctttgctggacgttgtgttgcttctccaactggctactgccacgtcttgccgtgcacgtaggtgggtgatggtttgttgaagtagaatacagagtagcctggtacgcctgttgtgcgtagaggcgtataggcggagccgttcagattccctccgccttagtaacgcatgagtaatcagtgggagtcatgatgactgcagtccatgcagcattgataggcagtgacccttttcttggaaacgtgcgagtaatggtgagtcattgtccttgctatggtaacgtgtgag

SEQ ID NO: 155763 - DNA, 541 bp, Zea Mays
cctttcttttggtggtttgctgtccacatatcagtagttacagcaattcgagattggcactgttggaaggaattcactaaagaaagtctttgcacctcatacatatccaatatgtcttttttaatagtgtttctggacactactttgaaaaggggttgtagtgctgcacaaaatcttctgaacccaacatgatcaaccatagaaagtgggtactcatgcacacagatcattagcgcaagttcttttctagcaactacttgatcaaaaacatacttctcaaccacagctcctcccttctcatttttgcccaacttcaatattgattgctttaggcctttttgacactgcttagattgacaagtttttagatgactacgcaagtgagttgtgccagatttactatctccaacaaaatgctttttacaccaattgcattcagcttttaatttgcctcctactgtcacttgttcaaactctagccatacatcagatttgagctttcttttgcttccaacagttacattagcatcttccccagcta

SEQ ID NO: 155764 - DNA, 277 bp, Zea Mays
atcacgaatccatggaaccttccgtccagagatccatttcgaaaccgctacctagctccgtcacaatcaaaacacaggataatttaattagggcgacgacagtttgtacgccccagcatacggccacagctagcgagaggggggccaaaaccgccgtccgtccgtccgatgtgttagactgtccgcaaccgtgcccctaaatttttccccctaaatgttactatgcagccacgtcagcaagattccatcccctatattcactcgtcccgcaaccgtt

SEQ ID NO: 155765 - DNA, 356 bp, Zea Mays
agaaaatagacaaggaggtccaacgacaaaaagatcaggtgctcaaggtggcggataaatggttcctctcgcacttcagggtggattgccaccagaagaccgtccaagagagggaaatagacgccgattacatgtcatccgtgctgcaacagctccccacaataggtgatgctaggtcagtcgatgatattccatctattaaaatttcttttgataatcggattaaaagtatcacagaggatatagaaaagatggcgcatgcattaggaaaaactcacatgcctagttttttatcacataaattaggcgccaaaacaattgcgccaaacacatcggcaacaaatgggtttccccag

SEQ ID NO: 155766 - DNA, 709 bp, Zea Mays
ctcccgcacatcgaccaggtcatggactccaccatcgggtgtgagctcctttcctttttggatgcctactcaggctaccaccagatcaccatgaaagaaactgaccaacacgctaccaccttcgtcaccccatttggaatgttctgctatatctacatgccctttgggttgaagaacactagggctacataccagtgttgcatgcttcagtgcttcaccgaccaagtcaggtgcaacgtggaggtctaggtcgacgacatcgtcgtgacgaacaagaagtatgacgacctcatcaccgacgtagaggagacattcaccaacaatcaaagtttctagatcaagttgaaccccgagcagtgtgtcttcgaggtcggtaaggataagctcctaggtttcatggtctccaactgtgggatcaaagctaaccaagaaaagatagaaagcatccgacgtatgggaaccaatcagaacctcaaggaagtgcattggctagttggaggtgtcgtcgtgctcagctagtttgtctctaggctcgaggaaaagggcatgcccctttacaaactccttagaaataacgaccatttttcttggacgactgaagcccaggaggccctcgaccggataaaggtgttactgacctcaccatcggtcttggtcatgcctgacccaggcaaaaccctcctctacttgtagccaccacccaggtggt

SEQ ID NO: 155767 - DNA, 528 bp, Zea Mays
gcatcatggacgcttcgccgcataatgcttatgatccatgcgcccgtagagaagagcggagctctctgcgccgttgtggacggtccgaaggccaaccacagaccatctagtgacctactgcagacggttcgccaacctatcgtggatggttcggcgacccatagagaagtccccaaggttctacacaacgcgcgcatgtcctagggatagtagtatttgtccaaaaagacgccaacaacatagtaaagtttgaaatatgggtaagagaaagaatgtcggagatggttgaggcggagaattaggggactaccctccacgtgaaaaagatcacacatcttttgcactacaccatgtccgcgtacagtgctcatcccagatacaggtgaccttgtttgtccaaaaagacgccaacaacatagtaaagtttgaaatatgggtaagagaaagaatgtcggagatggttgaggcggagaatcaggggactaccctccacgtgaaaaagatcacacatcttttgcactacacctt

SEQ ID NO: 155768 - DNA, 592 bp, Zea Mays
ccttcaatgttaccatcagagatgctacctgggcggagtttgaaacggctttccgggagcaccatgtgccccaagggatcgttcagctcaaggaagatgaattccgggaactgactcaagacggaagatctgtcagtgagtacgtgcacaaattcacagagttagcccgctacgcgccagatgacgtcagcaccgaagtcaagaagatggcccgcttcctgaaggggctcataccagaactcaagaccatcctagccagccaagacttccttagtttctcacacctctccaacaaagccatgcaagtggaaagggcaaaggaagaagaaaaaggccacctcaagaggaaattccaagtcctccgagctcagcagcaagaccggcaccagaaaactcgatcctttggatttccacccaagggaccaagcttcagtagaccagctggacccaccccatcacggttcagtcagtagagtcagagctcctttcatgccccctcagttgcaagcaaccaaccaccagcgaatgcgtgttggcactgcagagatcccagtcacttcaagaacaactgtccccagctgaagccatcagg

SEQ ID NO: 155769 - DNA, 673 bp, Zea Mays
atcacagtagacaacccatctatcgcctaaggcctcgccatggtggtagccacggtcacccgcgccagcacacttctctctccgcccgccagcacctcccttccaaattcggagccgccgctcaaagactctaaaatttatgccccagcttactccgctaagtaattgtgcacccagtgaaccatccctcatctccaatagtcccccatagctccccaatttgggatttcaccaattctgttctctgcgccaccgcgaaccaccacgtcgtggactgtcgtttctaggttcgttcataccctcctgaccctcattttggcactcttgtgtgctatagatggttatcggcccagccaattaagttagaccccgtcagattactgggaacaccttagattgtcctcggtgtgcgccatcaccgtggacagggagatgttgagctagaactttgcaattgattggggggttaaggtcgttataggtgggattcggtgttagccaggttagggctctgatcattgagcatatctgccgatacgagttcaccggaaagcatgctcaccggtgatctccatcggggacttgacgttctaaagaaatcagactccgagggtctttgtgcaaacgtgagtgagacaaggaaatagtgcccagggttcttcactatttgttc

SEQ ID NO: 155770 - DNA, 442 bp, Zea Mays
gtcagcaaaatcattcccctatgttctccttgagttccgtttagggctagactagtttgatttggtcgggcctcgtcggccatatggcacggccgtgggcattccctgccagagggtgctcggctcaccgggagagcggaagaaaggagaaagcactagatccgttgatctcaggatgaacgacccagggtcagatagggtttggaccgtgggatggttgttgtgcggctcagatcaaacagtagtatacctccttcgcgcattaggtcgtgaccgtcgatttcgtgatcaacgatcctcggcgcgtaacggttcattaaagactagattcaatccaggccagtgaatcctgatcgtccgccccacagtgcacgataccccttcggccgtccaaaattacaaaataaaccccgggcttgttataaattaacccgccgtccat

SEQ ID NO: 155771 - DNA, 529 bp, Zea Mays
gctcactcaaataacaaaatgcctgaccgtcatctgaaatgaataaagtttggtttcccggaggaggaatgggcaacggctcgacacagcccgctcgctaaacctgttcgtggagctctctctctctatctctctctctctgaaagatgggcgaaagaggcgactaactagaactggaacgttctgtagcccagcgtgcatctaaattctatgggctgggtgttaaggcaactggttttcgaagaggtaaggtacgaagaagggcagagcgtcatcgaaattctgtagcccgccgtgtcgcattcccatctcgcacaggtaagggaattggtggctgtcgtcacgggcgttcggtttagctccaggcggttgacacaattcgggcggtgcgttcgccacaccgcagtgctggcccagagccccgtgttccatcaagtcggcctcacatcacccactttggctggcgcacccagcagcacagctgcgaaaggcaaccctccggtaggtaacgcgccggcaccacagctag

SEQ ID NO: 155772 - DNA, 537 bp, Zea Mays
gctaatattaggctttcgattgtacagtaaaacagctctttattctgtgttgttaatagtatgagatacgtcattccttgctgcaggtctattgtacaagggatacatgcaacaaaacttgcgaagccatggctacccaagaagaaaccatggtaactgaatcatcaccctctagtgattcatctatcactattgggttggccgtgagcagctccaagtccagcaagtatgcagtgaattgggctctgaaaaacttcggtaccagacagaggataaggttcatgctcattcatgtccggcaaaaggtcacactcgttccaaccccgagtaagtaggcattcttcagttcaaatgtgtacattttcttgcagctgcaaatctagttggcaaacaaaatttcttgtttctttgtagtgggcaactatgttcctgttgatcaagtgagggatgacattgccagtgcatatgaaaaagaagtcgaatgtgaggcccaaaatatgctccttatgtacaagaacatgtgtgatggcaaggttt

SEQ ID NO: 155773 - DNA, 449 bp, Zea Mays
tcatacactattagcaataaataaagtcgtctgctaggattctattatactgatcttccataaagctacagttccctttggataaacttactgtttaaattcagatgcttcttgtttacactagtcatttcttgcactatgttttccttaggcaatatctttgcctctttgttcaatctcacggaatgagcatttatggttctattcttgtttatttcctttcaggattggataacttacagtttgcttcgcctgtccatgtgtggaacatgagagaacaccggaagtagtagaagcccgtacgaactggagaacaccagaagaagcagtagacgccggtacaaattaaagtcaaacgaatagacctaagagtattatattcccagctgaccatagtcatatgattcaggtttattgttgtccactaaaagaaagaaataactttagtt

SEQ ID NO: 155774 - DNA, 1152 bp, Zea Mays
tggggtttgtcgaagcactgtgatatcgaatgtgtatatcgaagtgcattgtagtggtaattgtgttaagttaatcggtagtgtctcgagtgcacgccacaatatggttgtatgcgagacagagttatgcgcatgatgggtttagtaaaaatccatcagtgtcactggtgttaagttgaggtttagttgtgcgtggaaagtaataatatgtttaatacttagaactcttagtcaatggtagaaattgtctcggcttaagtataggggtggtgacatgccaaggtagtcatcatttcctctatgtttatcagtcgagtcgagtcgatgcacattatgtgttcgttaattatgctttgcacatagtgtatggtggtgttcattacttcgaatagatgttttcgagtggaaaaatagtttcctaatgcaattatgtgtaaggtgtttgtagtgacactttatctcaaaaagtgttaagtctgcgcataaataagagataagtgtattttgtgtagtgtggattgattttgagtgcatgtgtcgcaagaaatgaattagtgcgcatataggcgatgaatgggtgtgatgaaatggtgacatgccttcgtagtcatcatgtcgtctgttggtggcctaactgaaggtcttagagaagggtcgattacctgtgtgttattattgtcaccttgcggttctgtatgaattgcaatgtgaagtagtaggctctctatgtgatgctagatgtctaggtagtgaattgtggtgctcggaccgtcgagatgaaggttaagtcgatcgatgccgattaagtagttaaaatgattaatggaataatcatgaggctaaaactagaaactagtgttctcgcacccgtttgggatgttgtagcccaattgcgcatggttatggtcgcggaagaaaaatattagtgctcttgtgatgtctaagttgaaatgcaaattattgagtgaaaagcgtttcgatgtacatatatgccggatttgatgattgtggtgaatgcgttgattaattgtgtatggtagttctagcgcacgaaatgactcggatgaaatgtgtaagtctacttgttagccttcatttgattaatttaactctaacaaatggtaaagtgttagaataattcgagtcgctaga

SEQ ID NO: 155775 - DNA, 910 bp, Zea Mays
agggagtccaacaaatgaagtcctttgctgacacggcaccgaccacctcataggcggccttgttgtacccttgataaggttctcgaagaccacggacggggtgccccgagaaggcatcgataggacacggatgtcaaccccaatagctgccccgcggtggatgctgaggtccacgacgttccgaacgcggctcggaatgtcgagcaggcgctatacgcgagttgctccacgtgcacagatgctctgggtcaccgaatcgacctcccagcacagctccgccaacttggtttcctgtcatgttcagaagacaaaaaggaacattagtttcgatgcccccgagaggcagaaagggattcagaagcagggtgagtggcatactcgccgcacgggcctccacgatggccaatgatcgagacgattccagtcgaccccgtagatcggcgatcgccaacaacggaaaggccgaggatgcaaccttgcaagacggcgcatgaggttctccaccggtcactttccatgggactcgccggtcagtgagcgtaggtcggcgatcgcgaacagcggaaaggccgaggatgcaacctcgcgagacgacacatgaggttctccaccgatcactttccatgggactcgccgatcagtgagcgcgctatgggaagagcccctaatcgctgggcacattagttagtcggaagaggcaggtgcaccaaccccggaaggattcgcccccgatcgaaccctacaacatcgagcctagggtcaggcgtggtggagcatgacaagggaggacatgcgtgttaaaagggaatcactcgagtgggtctcgcgcccgggcccggattgaaccgccataaatgactgaccgtattaaccacgtctggcaccaagccacagcgtgggcgcggaccgc

SEQ ID NO: 155776 - DNA, 467 bp, Zea Mays
ggacaagagacacccgatcccttctcgtcctccgcggcttcatgattgtcgtctacttccgctgcctcaaccaacaccaaggattggcgcgacatctacatagtctcctcttgatatgcacaataaatttatgagctcctcttagtccgcataacaaccatatgaactcattctttacctctccggcacaatgatctgattacaaccgtgtacaaacttgaattggatcaccaacaaactctctgactgatcgtcgtactcttgatcatcaccaaactgtctagaacatgtcgaccaccgagagtaacaagcacaaacttttcacttgatctaatcaaggctagtgagaacagtaggtgcacactaactattctcaacacgctaatgaaatcgctaatcgagtgattatcaactctaaaatccttcattagacaaaggctcttcctcacacacaaatgagtttcttc

SEQ ID NO: 155777 - DNA, 354 bp, Zea Mays
cacaaggtcaatagattgtgagtgagggacattatttcccccctttctttactagggatgcagcggtaccttctgggattctttgggagaggttgtgttgacccaggatgatgatcagcatgtgtggaggcacgaggcttctggttggttttcatctaaatcttgctacaaggtcctattcataggatccatcccttttgagccatggaagaggctatggaaaagttggtaccctcctgaatgcaagacctttctatggctggctatgaggaataaatgttggacagctgatactttggcaaaaagaggtctcccacatccggaagcatgccctctttgtgaccaggaccaaga

SEQ ID NO: 155778 - DNA, 484 bp, Zea Mays
aacaaggactaacacacgtggctttcatgctcaagatccacaccagccacgacttagctcaaatatctgctttgtccagttattcaaatagagagtagagcagataagggctcattgtccacaaatatccaaccaatccactgaatacagacaggagtagagacagacaaaaactctactgtggtaggctcaaacaggtgcaaaactgatatttttctgcagagggggactgaacctcgagccccatattgcccaccccaagtctatctcagtttgtgcacataagtggaggacagcagggatgtgaagatctttcttcagatttttgtagcaactcccagtacctgttgaactctgatctctccctattcacctccctcaatcccacaatttcccatagtaacatggggagcacacttactaaaactggtcgattaaacaaccctctaccaattcttcataaagacttcagccttaaacccct

SEQ ID NO: 155779 - DNA, 419 bp, Zea Mays
ataacttgtgtcttttgagactaattgtttcttgagtgatcttgtatagtctcaaggtggaaaaaggaatatgagcaagaaatggagcaatcaggacttgggtacctccataagtcaagtattataacttgttctaagtctggtatcttagcaacaagaaaaggtcaggataaaggatcaggcacaagtgtgaaggagcttcctaaagattaaactctcaaaatggaaagtacatcacaacagggtaaaggtacaaaaggaagtgttgaccttttacgtatttgtatcttaaattttctccaatgcttgtgttgcatatatctactgtgtaaggtggagtaatgttagtgtgttgtattttaccaactaaatacccagcgtcctttgacatcatcctatgttcttgcttgaatgtggtt

SEQ ID NO: 155780 - DNA, 768 bp, Zea Mays
gcagaagtcactcggcccggatcatatcgcctcactcagatggatggcacagaagtcgggaactcctggaacatagaacacctcaggaagttttatccctagctgtatctcaaaaagctatcgggacgacgatgtactctgtaaagtgaaaatatgtcatcaataaaaaaggggtttcaaagacactcaatttgttcacgattgacttgcatccttacttaactcggggtgaccactatgccctgctaacggagcaatcgacttaagtcggcaacgacttaaggcggtgcgacatgctcacgcttacttaactcggggtgaccactatgccctgctaacggagcaattgacttaagtcggcaacgacttaaggcggtgcgacatgctcacgcttacttaactcggggtgaccactatgccctgctaacggagcaatcgacttaagtcggcaacgacttaaggcggtgcgacatgctcatgcttacttaactcggggtgaccactatgccctgctaacggagcaatcgacttaagtaggtaacgacttaaggcggtgcgacatgctcacgcttacttaactcgggatgaccactatgccctgctaacggagcaatcgacttaagtcggcaacgacttaaggcggtgcgacgtactcacgcttacttaattcagggtgaccactacgccctattaacaaatgcgagcgacttaagtcagcagcgacttaaggcgatctggcgagattacaattactcatataaagatgac

SEQ ID NO: 155781 - DNA, 892 bp, Zea Mays
acggcactaacgtcgtgcttgcctcgccagcccaggcggcgatgcgctgggccccggcgcgttgctcagcccggaggtcgtcgagtgtcttcctcatcacctccaccgcctgggggcccgaggccgtctgcgtcgcctgagcagcttgcgctgcctggaactggcggacctgctactccagtgcccgcactttcccctccaaacgcttccttttctcctctgcctcgagctcaagctcatccagcagcttgttccgccttgcccacatctcctccatgaaggcgaggtcctcctcctgccaggtgagatcagttgcccgtttcgccagggaagcttccctcgccttgaggctttcctcggcgcgagcaatgtcgctggccttatcggcgagttcctgctgcagcttcgcctcagtcgcatcctgcttgttctgatgtttctccagcaccgtattatcagctttcagcttatcatggagcgttgtgacggcctcctccctttggtctaagtgttacttctttttgaccaagcttttctccttccgggtcacctcttcctctcggtcagacaccttccggatgtcctcctggaagtcctcgcgctcctgctcaaactcggcccgctctgaggcgaattggcaggacgctgccttagtgcgcttctccagttgagtgcactagtcgccaaggcgatggtgctcggtctcgagcgcctcccactcccgcgcggatagccacctcggtttcctagagggcctagtgagcgcgcgacagaaactgggggaggggggtcagcgttgcttcaggttcgatgccagaccggagcggtcgcccaaggataacctctggagcctccggagttggcggcgggacagagctggatgcgcccccca

SEQ ID NO: 155782 - DNA, 1038 bp, Zea Mays
cactgcttttttggatgttggttttcagccctgaagcttatccaaaaatctctaaaattttgagaaccagttgaatatcagattcttttggatgcaaaaacatgatcacatcatcagcatacaaggacactctgtgttgcaaaggtctagaagataatggttgtagcagattttccaactcaacttttgagattaaccaacctagcacatccatgacaactatgaacaacataggtgagagggggtctccctgtcttaagccctttttaagttgaattttttcaccagcaacaccattaagcattacttgtgtggacgaggtagatagcagtccacacagaacatccgtccaaatctgcccaaaccccagtttttgaagaacttcgaggaggaaaggctaggatactgagtcaaaagctttagtaatgtctagcttcaaaaggattcttgtttgtctttgctgatggagaagtctggcagtttgttgcacaatcataaaattgtcttggatgaaccgacctttgatggatgcactttgcctttgagagaccatagattgtagcttatcccccattctgttagctaggattttagtgactagcttggccatgctatgcactaaactaataggcctaaagtccttgacttggtcaccaccctccttttttggaataagggtgacaaaagctgaatttaatttgctaaagtgaccaaatttcctgtcccaaatagctgccaaaacctgcatcacattttccttaatggtaggccagcaagccttgtaaaatctttctatgaacccatcaggtccaggagctttgtcggacggcatctctttaatggcttcaaagacttctttttctgtaattggtaagtccaaatccttcagattatgagagggcagccccaagtagttaagattaatagtgacagttctattcaatcttgttcccagcaggcttctatagaaatcatctaccagcatggctttgtgagcatgatcagtaaacacattatctccagagaccaattttgcca

SEQ ID NO: 155783 - DNA, 545 bp, Zea Mays
ggaaccccccggagtcagagggggtagcccgaggcacgctgtagagtgtcatggcgggagcggaggtcgtagtggcggagaggcgaagctcctcgagaagtagatcgttcttcaccttcgcaaaagtggcaaacggcttcatgcgggtgaggatgggcgtcatgcgatcgaaacgagggctcaaaccgtgtaggaggttgaacacgaggctctcatcggtgatgggggccccgagggtgcggagagtgtccgccatcgtcttcatctggtggcagtactcgtccacagagagatcgccttgagcaagctggcggaaaggtgtctcgagatatagaatccgagtctggcggttgccgagaaactgagcctcaagggcaccccagatccggtgagccgtatcgttgacacacgaacgatgccatgaagttcgaccgtgagggtgccatggatccaagaaagcaccacttcatccatcaggagccaatcctccgtcgggtaagggaccggggagaggacgtgctcggcgagggcgtagcggcggaggg

SEQ ID NO: 155784 - DNA, 598 bp, Zea Mays
tcatctcctccgatcaccgttctcaacagaagttcatcgcgtggaaacactgtaaccacccgcgcgaatcccgggggattctgctacaactacgctgaaccgacctagtcgggattataaagccatacagttggaccgacctagccaggattataaagccatatagctggtttccctctcccctcatcccatctttgcagtgcacgtgagctgccggagtcgaaagcgtgagggagagagagtgagtgcgtgaggagcaagccgtcggtacactccgcactgcccggtcctcgtccgatacgcaaggggattcatccgtgatcgtggagtctacgtcaaggtgttctggggcgtcggacgctcggaatctagggcaattcctggccggagttcttgctccaccgcgaattcgccttctaccaaggacccgcttcaccacctcgtcgttgccacatctaaagaaatgataatttgcttctctaaattatcatcacaatcagagaacatatgtgtagcaatttcagctcatgcttaacaagatttaatttgactaccgagcaagattgtcgatgaaacaccactaatacttagattttaa

SEQ ID NO: 155785 - DNA, 345 bp, Zea Mays
cgtgcctataaatagaaccctacgtctgactggtttgtgtgctcattcctattcttcgaaactagagatatcagcctgatttataggatgtctaggcgtggtaaatctgctaaacaaaggtaagtgttggatccgcctcttattttgtgagtctattatatttgtgattgttatagagcttatggaaatttaggaagggtcctttgaccggaactgccttcgacccgctgcctttgccaagtggtgttccagtgcctatgtgtttttgtggtgatccttgtaaggttgataagtctgaggatcatgacacctatcgacagaggtattggatgtgtgctaactttg

SEQ ID NO: 155786 - DNA, 474 bp, Zea Mays
gaaaggactaatcaagtattggaggacgtgttgagagcttgtgcccttcaacatggtagtagttgggacaagagtccaccttatgctgaattctcatataataatagttaccagtccagtctgaagatgtcaccgttcgaggctctacatggcaggaaatgcaggactcctctatattaggaccagaccggaggaagccagttctttggacctgaacttattcaagaggcagaagaacaagtctgtataatcagggaaaacttgagggtagctcagaccaggcaaaagagctacgatgataatagaagaagaccaccggagtttgaggaaggtgatcatgtgtacctcaaggtgtcaccacttcatggaatgaagagatttaaagtcaagggcaaattgtcccctcgctttattggaccattcatgatctttaggcgagttggggagatggcataccaactcgagctacctgat

SEQ ID NO: 155787 - DNA, 355 bp, Zea Mays
gggggatagtgtttcccgctaatctcatagtaatgggtactcagggaatagatgtcatcctagggatgaattggctagataagtatcaggcagttatcagttgtgataagaggacaatcaagttggtgtccccactaggagaggaagtggtgaccgagttagtcccacctgagccaaagaaaggaagttgttatcaggtggctgtcgatagcagtgaagcagacccgattgagagtatcaaggtcgtgtccgagtttccagatgtgtttcccaaggacttaccgggtatgccactagagcgaaaagttgaatttgccatagagcttcttcctggaaccgcccccatctttaagag

SEQ ID NO: 155788 - DNA, 700 bp, Zea Mays
cttgtttgccaattctttcgtcgctagctatactcgactggcatgatccccaccaccccacacacgtacacacaccactcccaatatattccatctgttgtttataattttcaggtatatgatatgactgatattttctgtcgcgcgcatagtgaatgctttttatggtggtctacatggatatcatatgcgacaaaacattagataccaccctttgacaatttcttttgtaccatttgttggttgttttagcatgaactaggaaccgtcaactttgtagtcctacatagaggccactagaataataagtggacgctgcttttccagtggaaaacaagtcatggatcagtgcaaattgtaccctggagctgctttcagatgtcatacgctgttttcagcaatagtgaaactaattcgcagtatctcgttccagaaattgattgcgacgactacggatcatacgttctgctttgcatctcagcttcgtactaacaatagcgactggtgccggacttgaaaagacattgcctgataaatgacacccgcccatctacctcaaataaaagaaaaactttgcatgcaccaacagatcagatgttgctatccaataatttggggaagtgaaatcatgctacgagagagtctgctgctaaggtacagtagcaagatatcttaacactgaagttgttctataccttac

SEQ ID NO: 155789 - DNA, 605 bp, Zea Mays
tcgccctactacccactcatacaacctaagaagtcgagatcattccaatctggtatcagatatgtcaggtcacgatgaggaagatagcacggcagccgctgccctccagccatccttagcgtccatcgccgcgacactaggagaagttcaacatcagctctgcgactttgcccagcagatgtcctccatctcctcttgtgttgtggtcgtcgaggcatgtccatcttcatccacacctgttgggttacgatggtatccccaaggtatcggtgaacaccgatcctttgtcagtcacgacacatcctagctccatagcccccttccaatccatcgtctaccccttcctcattccccatcaccactaccatcattcccctcaccaccaccagagtattcaggagcaccattctcgcaaccagcgacaagtgttcctcgctttcatcgactggagttttcattgtttgatggtaaagaagaccccattggatggatcaacggatgcgagcaattctttgaaggtcagcaaacgctgtaagaagagaaggtgtggtttgcctcatatcacatggcgggagtcgctcagacttggtattgtcaactccagc

SEQ ID NO: 155790 - DNA, 509 bp, Zea Mays
tcctactccttggccgcgtggccggcccagcgccgcgcccctctcctcgagctgtctgcgccccaccctggccgtgtgcccggcccaacgccgcgcttgatctgcgtagcccagcggtgcccaccctgtgctccccagccacccacgcctatctcaccagcaaaaccacccacgtcgcagtcctgctttcccctccccattcttctcgcctagaacccgcatgccacttggagatcgaaccacctggagcgccatccgccggtgtagccgtccgcctgctgctggccaagcctcagttccgacaagctgcacgccgcgcgagccgcttaagctccatcgagcgagctccctactgcaccattgtcgtctagtcccggctaaggcgagcagccatcgctgtcagccatggaagagaaaggtaattgttttttgtttgtgtcgtgcatgggatctgggagagaagaaaataaccgttcgtgggccccgcatgcatgtctcctacacatctc

SEQ ID NO: 155791 - DNA, 1006 bp, Zea Mays
ctgaaccccattcgcgatggtacagtgtcccaaacagatcacactgccagcgtagcttgctcaccgccgacgaccgatttccgccgtgattcgtgccgccgccggtccaatttgtgctcggggtgagtggatagcgctcggggtcccagaaatatcaccgccgtggataactccggtcactaaataagtccgaccaccgtaccaagttgccacggccactgcggatagcttcgccggtgaaccgcagcctctcggccttgtgccgcgtggctttgcctttccaccgcatcgccacgacttaccctcgctccccgctgatcgccggagcagttgccacggcactggacacgcagccgctgcaccagtgaacttcttctttctctggccgccgcgcgttgtcgctcgattccccggccaccgcttgcgagcgctataaaattgagcccgcggctagctgcgctacatcatcacgaaaccagagcctcaatcccaccctcaatcgttcgccagagctcgcgaattttgaattcgccccaaatcagttctccgccgccgtgaatcacaccctgtcgtggctagccctccacaggtctgctcatcccctctttgttcctgttctagcatctgtgcatgctggtgatgcttgccgaaccaccaatttgcactgagtagccttagatcaccgggaacacgagcaaatgcccacaatcttcgctgttcttgtgggcagagtagaataggtcaccattcgtgcaattaagttaggggaaacattctctaggtcatggatttggtttagtccgaagctgagcaccggtcttggccttctccggccggtctagctcgccggagttggatttcccgtgcggagcgccgtcaaggacgtgtcgggtaaaggaatataagaccgagggtttttctgcaatctgtcagcgacacaatgaaatagtaaatgaactcgttcccagttagccaagaacccgaggccctctgtgcaaagttgcca

SEQ ID NO: 155792 - DNA, 369 bp, Zea Mays
gctggtctgagtcacccgactcccatgaaggtggctactgcagaagacccatcccccgagggtggtgctagcagttacccagcccccaagggtattgccggtagtgatccggctctggtgggtagcgcaaactgcaacccagcccccgagggtgttcaggtgggctctccttgccacatctccatggacgtccatgttgggtcgtccccacctcgttccgatggggcgacgacggtacgtgcttccacggttttaaccagacaagtcaccttagaggttggcgaactagatgcgaggagcctgctgtctgctggtggggctgagatcacccctgataatgcccttcagattgttcctgctgaccttccc

SEQ ID NO: 155793 - DNA, 532 bp, Zea Mays
tgaagggctactctactagccttcatggcgaagggcatagcctagttgtcgtaatatggcaatggcaaccctcccaaaactgctagagagccagtgggttttttggaggtttaggccatcacgacataacaccatatgtccttttttggatcagattcaagagaaacgactgagtcctatcatagttggctagccagatcctgagagtatgaatgcgtggagttgtctgatttggtgaacgttgtccctcgggtttcctgccttaggtcgattgagattgtttgagtggtattgactcgggttgtctgcctctatagtggaggcctcccctcccttttatagaccaatggagagagagttacatatgataggtggggcatggggctagattgaatgcctgtattgtcctccatttatgggtgcccccatcccacatttatggaagccctgttgatgtcagtctatcgttctaggagtgttagtggcgcagtaggcactcgcaccacctgtaccagatatcccaggcatcgtg

SEQ ID NO: 155794 - DNA, 337 bp, Zea Mays
aatagacgtcttcaccgagtgtcatgcttggatcaggatgccggtccttctgctcctgctgatgaggaagtgccagtgccgatttttgctgaagctgatctcaatgggtgtgacccgactgatgctgaccccaatgggtgtgacctcgatgatgctgatcccaatgggtgtaatccggccaaagctgatcccaatgggtgtactgtccgttttttgatgaagatgaggaagaggaggatgaaatccctctaattcggaagaacaaccggcgctacatagccagcggggagagtagtggtgttccttctccagctttgtctactctcgttggtctgca

SEQ ID NO: 155795 - DNA, 933 bp, Zea Mays
gtcatcctacacggtgataggttttcttagtacatagcagcttgaggaaaatgtccgatttcgatgaacaggatgacatattcttggagacatctgatgatacaagaagttcggcatatttttcagctaggtgcagcacaagtgaacaattatcagcatcatggggacctgaggatgagctctggacaagtgaattgctgagtgtcaatgaaaggcggcatagattcctggttcggatgggctttgctaaacctattcctactggaatcaccttttcacagtggcagggagaaattttggctgatcgtgcatttcgcgacctggaggacagaattaacagcatctgttcttcatatcggccgtctttttctcatggcgcatctgcaccagatagtactaggaacagcgtcgtgcttgagcttgatgaaatcgagcaccatgaactgaccggaatacttgatgaggttggaacagacagaaccatgaatacaaaccagtcagatggttttcctagtttccctcaacttgttcatttgtttttgcagaagggcagtggtcgtagtccggcaaggggaatggaaatagaattcagtgagaagcaaaatgatcccaagagcttttgtggaaggttcaaaagaaaggaggaggaagatataatctgtatgcacgacacacgtatgaaaagcctgaagagtggaacattgtttgcaacaaaagttgatcagcaaaacaagaagtggatggacttctctgctctgtacatgtgccaagaaatccatgcccacggcggttcaatcagcgtcatgaagttcagtacatctgggaggtatttagcgagtgtgggcgaagactgcgttgtgcgcatctggaggatacacgaagttgaatcctctcctgatctgtacatcagagagacgcctgtcaaatccatgg

SEQ ID NO: 155796 - DNA, 611 bp, Zea Mays
gtttggggcaccaaggttaatctttgaaaacatagcagaagttgaagctactaggctggaagacgttgatgtactcgaagaagagcgattgaatacggtgattcaatcagcgcgatatcagcaaactctgaggcgctatcatgataaggccatacgacgtcgatccttcgcagtgggagatctcgtcctccaccgaattctaacgggggagggacggcataaattgtcacctctatgggaaggaccattcatagtagcagaagtcactcggccgggatcatatcgtctcactcagatggacaacacggaaattgggaactcatggaacatagaacacctcaggaagttttacccctagctacatcccagaagctctcggaacgacgatgtattctgtaaatcgagaaaaatatcatcaataaaaaggtttcaaaggcactcagattgttcattgtcaattggcacgcttacttaactcggggtgaccactatgccctaccaatggagcaatcggcttaagtcagcaatgacttaagacggtgcgacatgctcacacttacttaactcggggtgaccactatgccctactaacggagcaatcgacttaagtc

SEQ ID NO: 155797 - DNA, 701 bp, Zea Mays
ctcttgtaataattggcttctacttcatctacagcttgggagaatagctaatcctcatcctcagcctcaacctcagcctcatcacacttctgcttgtaataagcggcctctacctcttcggcggcctaagacataaactcatcctcctcctcctgagcacgtaatcctgcctcagttagtgcgatgagctcactcaaccttgatgtgtcgtcctcctcttcccatgtaatcctgcctcagcgagagcgataagctcactcaaccttgatgtgtcctcctcctccatcagctccaccatcaccatttttttctgaacgtatcttacacgagcctcatctgcaagatagttcacagcacatccaatctctgcaaatgtaatgagacaaataagtttgcaaagtcaggataaataaattgtacaagtgaaactatcatgtcatttttctcactcacttccactgagacgatcagcatgattccccaacatctgtttctcggctctagccgcctcccattcccttgcatcatgtgctctcttctcatttgccgccttcaatctcctctgctctgcacgcatcgggctgtcaaaactcattgatttcgcgaaccttcgcatgtcctgtatgcgatcgttaatgtatgaatcgacgagctaagatccacaatgcatcttatgccccattagtctcttggactttatt

SEQ ID NO: 155798 - DNA, 631 bp, Zea Mays
cacactcattgggatcagcatcatcaaggtcacacccattgggatcagccccattaaaaagttccaccggtacttcttcagcagcaggaacagaagggccagcatcctaattcaaacatgacactcgctgaagcctcctctttttcttcttcttcccctcggtaggagcagttggatgactggccgggcgaaggcgctttgggcgagcaccatcagatttttgagcagtcaaggttttttcaggctcggggacagttgcaatagctacggtttcagcagggacggagtcagatgaatcctcagccaacatgtccagcatagcacttatctctgcatcaatcgggtttataggcatctcaaagtgaacttgcttttcatcattggggagatcaccaagtgaagcaactagagcctcgacttcttcaggagagggtcgcactctaagacccaggccactgtcgctagcaggaggattggacacaaaactgaaaaagtcttggaaggtggcagattctaggcagaatatgcaacaggagcaccagtattcgacactttgcctcaaagaatcatctccaatcggctcaccaaatccacaacaggaatcctcttgttggtaacccgggtagaatct

SEQ ID NO: 155799 - DNA, 880 bp, Zea Mays
ggaagacgctaatttcagctcagttctctgcaaatttctctgtaataaagtttatatagctatgtagttagaatcacactaaacactgttaactttagcaaatttcttagaatatgttaatcacgcattcacacacccgtgctactaaactgctattggtagctaacaaaccatttggtggttcacggcactggtcatttcaattcctcgcactagttcagttgtaagtgagatctcatgagctcgaaaatctcaatccttggatgtttacagacaacatgccattgttcacttttaatttaattttagtgttctgcagggatcagatatgagcaataataatcttgaggcagtgacactccttataatcttccttcgaatctccagagcttgtgagtcatttagttatgtttatatgtgtacttaactattcccatttatgttttaaaaatatttttgggggtcttacttacctgctatttagaaatcttgttgtaaataacttcatgtgggacagtaccttactccatcttccccttactgacttgtaagttcatccttaccacctactctatttacaagtttacgttcttaaaccaacatttagcaatctttgcagaaatgtcaaaaacaaccaattcaccggttgagtacctgataaactaaaggggatcgataatctccaataagtacctttactgcaacagttgtggtgacttttatttgacacactatgttttgtataaaaccggctcagggcttttttaaatcctagatccgccaccgtccgcaagggtgaagcagctgtccttcctaaggttatgccctttgttcctagttcttctctgctttagtttattatgtatgtctaaaggtattt

SEQ ID NO: 155800 - DNA, 587 bp, Zea Mays
gagaagagttcgttcactcgatttattagtattctccctacttatcatctttcaactacttggtgctatagcatcagtctgtctgtggggaaattcagaaaacagcattcatctcacgcacgattcagaaaacaacactgaaaaaatgggtattcacaaaatagcactggttttgccaagggaatttataaaatgacactatgtttaacactagttccttcttcacacacaattataccaaatttctgatgatgtttctacggcatcattttttcccaactgatgatgcagccctttctttctcagatagaacaaagaggcgtttgattgggtagtggcaatagatggtcctgtaacattacatactcttggtcttcctttaacaaaaaaatccttcttcggagaatacttcctaaaaaaatattatcagcgggtagtgtatttggcctggcaaacgaatgattttttttgaagagatgataaaggatgaggcatgcgtttttctgactgctctcgctgcctgcagtgctatttcgtgaatactcggattcgcagtgttgtttactgaatcacctcacagaccagtg

SEQ ID NO: 155801 - DNA, 774 bp, Zea Mays
agcggcggcgatactcccgcaacccacgacgatggcgcacggcgcggcgtctagggctccaacagggaggttgctgcagcgcgacccaggcgggaaccagtggctcgtccaccggtcccaggctagagggaggagggtgaagttcacggtcgaggcgcgatgcggaaaggggatggcgtggcagtgagtgtgcgacagcagcgtgcaggcggtggcagagcatctaggtcaggcctcgggcttcacggctggtttatatgcgggtgctagggatctcgcgatgcgcatttggaggagcgatccgcgcggaggccgtggggtctgtttacgccgcgctattcttgcggggaagaagaagaccggatggcgtgagggcccactaacagcggaagtagcggtagttgatgcgcggggtgagtggctcagggcagcaactgtgtttgtttacgcgagatccacgggcggacgatggaaattcgttgtgccgtggactcaggggagaagatgacctccgacagcacggacccacgcgtcagagaaagagataacggtacgcgcagcgggcgactgacaactaggacccaccagcgagtgacagcgtgagacggcgctagacgaccacatacgtcggtcggcgctgtttcctggattgggctgcgcagaaggagatcgcaagatgggctgaataggtggtctcggctcaaacagcgctttcactttttttcttttttttctattctccttctctaatcttttttattcaaattttgaatt

SEQ ID NO: 155802 - DNA, 281 bp, Zea Mays
catcacaataggtcactatagatggcctgtctatcagctgagtcgttgctccggtaaatgccacggtagcttgcgctagtgaactccctccctccttggctgccagcgcatcttctcaaaattgggtgccaccgctgatgatcactataaattgagtgtccagtgagctccgttagattgttacgtgcctagtgcaccagccctcgcctctgattagccaccgtagctcacgaatttcaaacttcccccaattcggttctccgcgccgccatgaaccatcg

SEQ ID NO: 155803 - DNA, 799 bp, Zea Mays
agcgatttgaaaaacccttaaagagcccgcaacactattgctttgtctcactgacattagcatcgaggtctttcccctttctatgtcttcacaacctgagatccccgaccgtggacgacagagcagtggctccggcgatcccgtaccggtcgaaaaacgcaacgaccggtgcttcggtgtggctgacacctaattctacccctaacgaccatttcccctcaatcaattgcaaagttctagctcctaatctctctgtccatggtgatagcgcaaactacggctgaaccgaggtgttcccagtgatcctacgtgttctagttcaattggctgggtcgagatgcatcaagaacacataagagtagtgaaacaagagcgaggagggcgtgatcggacctgtggagagctggccacggcgagctcacacacggtggggttcttgactgatttgggggaaatcccaaattggggagttgtgagggacgattagaggtgagggctggttcactgggtgcacaattacttagcggagcaggctggggcaccaatttatagtttccaagggcggtggctcctaattttggcatggcgtgctggtggctggagaagaagaaggtcactggtggctcatgtgtggcgttcaccggtgcagcggtttggagatggtaagcctaggcgtgccatggttactaccgcgcagtaaagagccacggcgtggcataattgaggtcgccggaatttccacgatgacaccggcggtccggctacgtcgcacgactacaggagcggttgataagcttca

SEQ ID NO: 155804 - DNA, 466 bp, Zea Mays
cagggtgtattatgttcaaaacagccccccttgagaatgaggacgagcttaaggttatgtttggacccattgtctgcgccaatgaaacaacccttgttcctggagttgaggatgcaaattcttcatctgatgaccacgtccaagccaatttaggcgggggtgaaaacaacacacctgacccctgctcaaatgcgtaaggtgctgcatgattcacctaaacctaagaagaaaaaagatacgaaggatgaatacatgaaacgcctagtggaggcttttgagtcgcgttccatgaacactaacaagtccataacctcatttgagaccgacccagttcgtgtagaggttgctgctcagttgcaacaagtcatcgaagatggttcagaggaaggcagcgacttacatttatttgccactcatttgttgatggagaaatggtatagagatgtatttgcaaccctgaagacca

SEQ ID NO: 155805 - DNA, 455 bp, Zea Mays
tcagggggaaactttgcaacccttctgctacgccgaggcctgaaattgctcggcaacaactttctgcgcttaacgctgagaggaggattaggcaacagctgagccgttggcaaaataatatcatttctgaaatcctgcaattggggtgacagcaccaaattttcaaccgtcaatgtcttctgccttctggagtagaccttgaaacatggcggcttggcactcaaccagcaattcagcaaaggcccagccctcccatgcagatttagggaaggaccaaagggatccgcaatgttgacatcagcaccccccaaaactgtagggcaaaaattggaatcaacagcagcagccagatcactcgggagagttacggcatcaactggtacagcagacccaggcgccagcgactctacaaccgaagcatccaagacatttgggagagctgcagcatcaactgg

SEQ ID NO: 155806 - DNA, 566 bp, Zea Mays
gctcatctttgtgaccttgtaacttctaaacaaaggagattttgccctaggtcaccacatcaaaattgtagcccaatcatagaagaacaattttgctgaagagggcaagccatgttcttgtgggtaatttggagataatcatgctcaaactttggctgtcaggctgcttaagtctgaaaatcagactgacagtgggcggacactgacttcaaactcaattctgagcatgatccaatgaaaatctaccttgggctgctatggcaaagttatagctggttggtagcactccacttttgctgcagagggtcggacctggtaccatagaaaatctggagaaaaagagctatgaagttgctctgtcaggcatgtatcaagaaactgaaactgaactcctgatggtacagtgacccgagtggatcagaactccagcatagcctgctcgccgccagcaaccctccctgcgctaagagttgcgtcgccgtcgtctcaattcgtgctcaggatgacttgataaacgctcggagcacaccgccggggataagcccggccattaaagtatcccggcc

SEQ ID NO: 155807 - DNA, 683 bp, Zea Mays
cgcgcgagaaatatccgcacagggcgtttcataatctctctccctcaccgctccgctcgatggaggtgctccatgcccgattctctctctccggcgaggtagccatcagctacatcattggctccctcgaggttggatgaaaggaggtcctgcagtcgcatttataggttgggaacgaagtcaatccgttggcgaagatcccggtctgttaccataatcccagggaagatcagcggcggatgagggaaggagtccgtggggaagacgaccagtgatagggacccacctggcagcggcaagagcgtgaggcaaaacgtgatcggtgcgggcccaccagcagtggcgcaggagcgatcacccacaagctgtccacacgaggtggtgtggtgcgacatgtgggccccgccctggtagtgcgcgcacgcatgtggcaggaggaaagttgggcgcagagatgagctagtggaggctgtgcggtggagttggggagctaggacacacatctgttttggcccaggtaacacttcctcccttttcttttctacctttcatttctgtttccaaatttcgaatttaaatgtagacttgaaattttaagaataagcagaatacactaatcaaagaaccaacacgatgcatgtataattgtatactaattatttatctatttagataaatgcttg

SEQ ID NO: 155808 - DNA, 1371 bp, Zea Mays
gtagccgttttcttcccgctcttcatgcttttgagcaaatcagcatctatagtaccatcgtctatgagcttttgtatgatattcttaaccacgaaacagtctttgagagtgtgacccaagatgcgatgatagtggcagaagtttggttcatcaactttagaggattcttcgggtctttttggtttagggagctcaatgagtcctaggtcccgtaagcccataaagaggtcttccacttcttcagcagggaaggaaaacttctgattttgacgctcgctaagagttggcctcctagaagctgatgcaccccctttatttggcaatcttgcagcagtgcccccagtttggaatttgtggggagctactgttgcttccattgcttgcatttgctttggcttggaaggtacttgcttatcccgttggttgtttttgtcaaacggcttgttgaatgcccttgacggacgagacacatgattcatgtagttctctatatccgttgccttcgaggacaactcctcaaaagttattggtctcataccttgcaaatgaatagccatgtccgggctcaaattattcatgcacatccgaactgcctctggttctgtgattggttgtgggcaatggagacttaaattcctccatctatttatgaagtcagcagccttctcatttgccctttgcatggtttgagtcagttcggttatccccactgtcctttgagtgctatagaagcgttctaagaaagcctcttgcatttgctcccatgtacggatggagctgggtgccaacttactataccaagtgaaggctggacctgataatgtctatacaaattggcggaggagaagagctccattatgtgcagtatcttgacaggcagcaagaaaatgggccacatgttcatgtggtgacccagttccattgaacttgctaaattgtggctaccgatagttgcttggaaaaggaaccatgtcaacttccgacggatatggtttcacataccctggacgcatggagtagtgtgtttgcatgtattgcgcccttacgccctcagaaatcatcctttgtatgcttttgagggagatttcaggtggagggtgaggaggaggacctccttggctagttgaggcattggcatcacttgttctatttctggtgttagccacttgctcacggagggcagccaactcttcttccttttgttgaagtgcagccatcatttgattcatttgctcttcaacggactgaccttgatttgtggtaagtacttgttcagcatcacgttcggattcactaggctcaccctcactatgcggagaccgtaagtcatcatcagttgcagtctgtggatcttcaccacttgatgggttc

SEQ ID NO: 155809 - DNA, 738 bp, Zea Mays
tcgggttatatggctccggtgggggtgaaagttcagctacatcatgaaaaaatgtttgttaattccgaagctaaaaacaaattccgaagctaaacctcagtaaagatacctataagccttgcacactcggcagcttcttcaactcgtttggcttcttcttgagcgtcgtgagattattttcattctttctaatagcttcatcagctatctcacggtcgcccttcatccacacctcagagtaaaatttcccgcctagcgcataagcttcgaccgaagggtttttaatgtctttgtctgagaaaacaaatcctggctgaactacagccttggcatgttcgcagccaactttctctaagatcgacgaggccccccgtgctccagcgaaggcgcagaaatctcctcggtcatttaaaatttcgtcaaaaacttcggcttctccgctgatccactggacaactccatcagggtcgccacggatgaacttttgctcagaagaatatgccccaaccttagcaaagctgacctttaacttcttggcgcattccaaggatacctcataacatttttctttcgaagcacggagctcatcggcgttcttttgtgctcttgacctcttgatctcgcaaatctcatgcttcacagcttcgacttcaaattttctggttgcttcagcaaccttcgtttttagctcttccacttcggctttatgagcttcgacttgtgcagcaagactagcct

SEQ ID NO: 155810 - DNA, 445 bp, Zea Mays
ccgtcagggacgctacctgggtagaatttgaaaccgctttccatgagcaccatataccccaggggatcgttcaactcaaggaagatgaattccgggaactaactcaaggtggaagatctatcagtgagtacgtgcacaaattcacagagttggctcgttacacgcttgacgatgtcagcaccgagaccaggaagatggcccattttctgaaagggctaagaccagaactcaagaccatcctcgccagccaagatttcctcaacttctcgcacctctccaacaaagccatacaagtggaaagggcaaaagaggaagaaaaagggcacctcaagaggaaattctaggttctccgagctcagcagcaagactgtcaccagagagctcgatccttcgggcttccacccaagggaccaagcttcaatagaccagctggacccactccgtc

SEQ ID NO: 155811 - DNA, 721 bp, Zea Mays
agtttgcgctgaaaagagagttcgaaaaaactataaatatcttgcagaatgaggtacctctgatttaatgtgctttctgaggtaaatattaatttagtatacttgtcatggttcaagatccttcggttggtgtgcagaatgtgcatcagagtatcaaagcaacttcttatttggactcatgagcatgcatattgggttgctttttagtttctcacgtcttttattaaaccccgctgggtttgggcacactagagaattccggacgaagtgctcctcaacgtggaggccacatcgcctggaaccagctagccgcaagaagtttgtatttagtattttacattaactcatagctgacagtcacagaatcattgtatagtactatagtatccacttaaacaagaaacacaaccaagacaagcaaacaatggataaagccaagaaaaatagagtattttacattaactccagctgcaagaatgtggtcagggctaggtcagtagcactctcatccaatttagcctgatttatttttgtagattttgttaatggtactttatacatccattagttcgcctaaaatgtgtgggcatcatgttgagatgtgccaatacataaaataaacttttaaggtcaaacaacctatttgattgatgtgccactgctgatgcagtagcgttattgtgccaaatggatacatgaggattaggatgctaatccaaag

SEQ ID NO: 155812 - DNA, 960 bp, Zea Mays
gaccgccgctcgggccgccggggcgacagaagacgtaatgacagcgtatttgtccatcgtcctggggcaagacgcactgcaatggctacaacatctgccccgacactgcatcgacgatttgagtgacttcagtcggcggttcatcgccaacttctagtctctctctgacaagccggcgtagccatgggacctcaaatccatcaggtgccagggaaatgaaacacttcgttcatacctcaagaggtttcagaccatgaggaaccgcatccccaaagtcgccgaggcagcggtgattgaagatttctaccggggatccaatgactcggccttcgtctgagccatactgcaaaaagcgcccgccacctccgaacaactgtttcgagaggcagacctctacatcaccgtggatgagtgggcccaggacctcatcggaggtacgaaacatgctccacctgcgtcacagcgcgacgcgaagcagcaacctgataggcgcttggagaagaggcctcatgaggaggtacacgccgccggaccacccatcgctcaagcccgtggtgcgcccagcggaggtgaacggacactggatgacatcctcgacgcccagtgcctgtaccacaaggacatgcgccacaccctacagaactgtagggatttcaagcactccgttggacacgaccaaccgttccagcctctaccacctcccccaccttgaggagggcctggcgagcccagacagcctcagcagcaagaagggggagggggcggagcattcccgcgtattgacagggaggtcaacgtcatcttcggaggacatagagcacatgagaaaaggaggcagcaaaagctcaacgaccgacaggtcctggcggcaaccaccagtgcctcgctccctattagtggtcggagcacgcaataaccttcatctgagcggatcaatggctcaacttcgaccaccccggc

SEQ ID NO: 155813 - DNA, 1103 bp, Zea Mays
aagaattcaaagatcgcgcgacgaccaatgaagcagaagttgggactagatcggcttggctctgagagtatttctccttgaagtcggagcactattgggtcaacttggcccaactttgtgaatacttttcttcaagatcagagcaccgctgggccatatctgacaatgtagctgaaaagggacgcatgattaagaacaaggatgatcgataaaaacagctaagaaaactgcaaggtcgctaaccagcgtttgatgccttcgagttagcaatctgtttctgaagtagcaaggggttccattgcattagagacagagcttcttccggaacagcggcaccgcacaacctcagctggacagacattccatcaaccaaagcctacgattgcagacagatgagcaaaaggaagataattcactaatatgggcaatataaggcaacaggacgactcgcctgaagattggagaggaacgatggcagacccaaggcagaagaagctacatcatggcttgacgagggaagatcagcaggaacaatttgaagggcattatcagggcaatctcagccccgccagcagatagcaggtttctcgcatctggatcatcgacctctaaggcaacttgttcgttcaaagctgtggaagcatgcgccgttgtcgcccatcgaaccaaggtggggacgacccgacgtggacatccatggaagtatgggaaggagagcccacctgaacacccttggggctgggttgcagctcgcgctacccaccagagccggatcactaccaacaacactcttaggggctgggttgtagctcgcgctacccaccagagctggatcactaccgacaacacccccgggggctaggtaaccgccagcaccaccctcgggggttgggtcttccgcagtagccacctctaaggctgagagctcttttgtaacctccatgggagtcaggtgactcaaaccagcatcttgacattgaagactgccttccaaagtcgacgatgcgcgagataccacttgggatacctccaatccatcgcctggaacctctaagcaaatagccatcacatcatcggcagtcggctctgtcagcatgtcctcg

SEQ ID NO: 155814 - DNA, 1149 bp, Zea Mays
ggttattgggtctgaattttcagacaaacagtgcaactcttgagactttgagcatggattcaattatgatccagcatggatctgcccatggcagctatgacaaacttgtagctggttaatagctctccaactttactgcagagcatggagtatgttaccatagggatttgtgagcaaatcgagcctaaatattgactgtcacgccaactgaatgagttagcctatggtacagtaacctgcttgggttcagaacacttcatcgccgtcgatcactcctccgccgcgattcgtgccgccggcgttaggattcacgctcggggtgggtggataacgtcgcgagatgaaagatctttgccgtcggtgagctggaggtcactccggtgactcaccatcaccttctcctttctgttttgcgactgagcagataagctcgccggggaaccgtcgtcgcacgaccttgcgccacgtatccgagtacctccaccgcatcgccgtgattcgttttagcttcctgtcgatcaccggagtagtcgacatgacggttgccacgagttcacttgcaccagtaacctttcccctctccggccgccaccgcgccatcatcaattcaagcgccaccgcccctggaatctataaattgagcccaccgttagctctgcaacctcatcacgcaccacaccgtctagtatcgctcccaatcttgcaaccgtgagctctaatttcaagttttccccaattctgttctgaaacaccgcagggtcgagctcaccgtggctagtcctccacaggtttaatcataccatccttgttcttgttttagcatctctgtgtgctggtgatgctcaccaactcgcccaattaagctaagatcccatgaatcaccgggaacgtgtagcttgttagttcatccgcgcgctcaccgtggccacagacattggtgtagttgtttatgaaattaacttggggaaaaccttcactcggccctgaatttggtttagaccaacgtagagcgccagtacttgccccaatcggtcgacctacgtgctcaccggagctcgaccgcgcgcgacgccgtcgtggatcaagcagtgtaaagaaatagaaacttagggtcctttctgcagttgtcagtgacgtgctaaatagtgc

SEQ ID NO: 155815 - DNA, 437 bp, Zea Mays
taggcggcgaagggcggtggcgaaacagagagtgagtgagttgtcgcgaagtgataggcgtcatcgtggtgaggtggagggtggtcgtcttcgtgtagacgggactggcaatcgggaattgttggcctcgccggctggggcaagtgtaggtgagggagagctgcgaagtctttttgagggtgatgagttgaggataacactgttcaactacagggagatgggtatcatctctagggttgagccaatgtaatgtgtgatgccctcgctgtatgtatgtaactataatttgtatgataaggttgcgtgccttcgctgatccggccgcgcacgtaggcgacttgtgcacttgatgttgcacatttattgtgttagtccggctgcacccgtaggtgatttttgcacggagggtccggctgcacccttaggcgacttttgca

SEQ ID NO: 155816 - DNA, 471 bp, Zea Mays
ggcacatacgttcccatcatttcagaggctgcttgataaggctctagctattgaacacaagcgtgttcagctaggagatttgaagaggaaggctatatcccaaggacaaggaagcagcagtgtttgtcctcgctacaattcaccctagggtacaccagttcgcactggtggaggccagcgcccagttcagcaatcacctcagaggaccccaccgactcgtcaggctacccccactggcacctcgacgaagttttcaggacagagtgcaggcactacttgcttcaagtgtgggaagactggacattatgcaaatgtttgcccacagaggattgctactaccccagtttagaataagcagcggactctaggatctgtcaaggggtactctattgacagggttaatcaagtcaccgctgatgctactacggaaggagctaacattacacttggtattttttacattaatgcaat

SEQ ID NO: 155817 - DNA, 471 bp, Zea Mays
gtagcacccccattgggatcagcaacagacggagcacccacattgggatcagtagcagtttgggtacacccattggggtcggcgtcagtaagtccagtcgcaggcactcctccagtagcaggaactgaggtaccagcgtcctcatcaaaactggatactcaccggaggcgtcttcttttcttcttttgctcatcagcagaaggctcaggctgattggttcggctaggacgcctcggacgagtactgacaggtttctggacatccaaagttgtatcaacctctggaaggggcaccactgccaacgtatcaacaggagcagcgtcggaggaatcctcagctagcagatcaagcatgtcatttatgtccgcatcactagggttcaggggcacttcaaaatgaacctgccgttcatcatcaggaatctccccaagcgaagcaaccaaagtattgacttcttcagcagagggtcgc

SEQ ID NO: 155818 - DNA, 893 bp, Zea Mays
cggtggtatgcggttccacggtgaagcaccaaatccggcgagaaattagaagcgctccaacccccaatcgagcacgacgataagccagacaggttagaaagacaccggtgatcacatccatggcctctgcaaggcatatgctcccttcctcctcgaattccactgcgacggcttcctttctctctctctctctgcgctcacaagacagcggcgccgctcacagccaccgtgccgaacccatcggaatcctatggtccgcggcccagtgccctaatcctgagtcaaaccggtgctaatcgaagattggggaagcggcgaaatgcatcgagggccttaccaggtgtccggtgtggccgagagctccagccaacaaccaatcccggcgacgcgccacgcacggcggaactccctagccggagcgcgcgcgaatcactacctagagctccgatcttcccatttgatccccaacgcatgaagaagaccgttaagcgaggcgattttgggaatacctcgacggcgaggcacggtcgacgacacaccagggattccggtgcgcaatccagtcgaattcggccgatgattgacgcccccaagtggataagcacgagcggcaagcttcaaggattgccccagtgaagtctggaccgtagtctagcgcagctcgaccggcggcggcgtactttcctctcccctattctctgttggcggcgcgggtgggtgaacaagctacgaagcctggccaggtcgggaagaaagaggaactgccctggccacctttatacggaggagagaaggttggtagcgcctggattgcagatatggccgagaatcacggcagctcaggcagggtccgtgcggcttcctagcgctggtagtttacccgagcgcgagga

SEQ ID NO: 155819 - DNA, 578 bp, Zea Mays
aatttgtcctcttgttcttcattggcttcctcattgttgttatcttcctcttcttcttcatcctcgtcatcttcatcattgtcaccagaatcatctggatcgtcgccttcaggggcaggggcttggactgctggtgctggcggtgctgcaaatgacactccagctgcaaaggctagtgattctgccaatggggtgggcgtcgacagaaactcctctaagctatcctccagaacaactccgttgtccacacgaagatgagggaggtccatagggacttcctcgactaccactaggtagacgtgagcctgtcgtggcggaggaatgtagttggtgttgactcaggtggtttggattgtacgcaccatctacaagagaaaatgtaaacttagttgaattttaaagaggtaagattaatcaaataaatttttaagagcaaaataagcatattttgaatagactaggctttccatttctaactagtctaacgacctagagtcagcatagctttgataccacttctgtcatagccggttttggcgtcaaaaccgaaggcatagcatatgtgtgttaggatccat

SEQ ID NO: 155820 - DNA, 1018 bp, Zea Mays
cggtccttctaatgctggaaagagggcaacccagattgatgttgttgtaccaaatgacacattaagtaatgcacagttaaagaaaaaagaggtccacataagaagttcaaaggggcaaacatttgggtgggaaggaaagcataagggaaaaaaaggacaaagcaaaaatctgttgcaggtacaagtaccgaaggtatgtcaaaatcctgaacacgagcatgccattcaatattcagttccatgtatatctgatttttttattttgtttcttgcaaggcccgagaggtaggggaagcaagcaatcaagccggcattgccattcattttcataaagaatataacaccatcaattcctccactcaacttgtgattggagcaaaaaaaactgaaaaaatatttttgttctgaagcaagtcagtgttattttgttgtttatggttgtttttttgttattgctaattgcaaggcagatggaatattcagtgaaaacaatctcaaatggatgaatacttgtattctctttctttcaaatccagcttaacaatctcaattagcatgagattttgcttctctgcactctgtttggttgaacaatgtcaggctgtgtactgctggatagggcgtcggcttggctcaactacgacccctcgtcggcggcttggagagctggggcctgcaggcgcatggcgcgggtgaacgtggcgtcgtttggtcttggcgacatcgttgtctcagcgacaacatcattggcttgacggcattgggcgggcatcattactcattggtttggccggatgaaagaaatgagggaagtggactgggagattgctcggcagggccgctccatacaccgctgaagggggaggattgtgaagatcaacgagtgcaccgcacgatgcagtaatgcagcggatctggttcctactctgcacgtccacaaccaagtaccattgtcaacataagtttgttgattctcgacaacgctctacagtagacagccagtatagtcctcatcatc

SEQ ID NO: 155821 - DNA, 521 bp, Zea Mays
cccggatcaatctcgcgaaacggtaagatgtggtttaatctagaccgtcgatggccatctaacggctgagcggtcgtcttctacatcgcccatcacccgaccgaacacctagccgcgacgttcaccagacacggccaagccattgccggccgcacctaaagctcgagtcccgcctgtaaacttcactccggcaaccgcaaaacaaagagcagtggattgcgagactggtacatgagttctcaccacggttggtagcgcggacagccctggccacgggaacctgcggattcaccaacaccggcaagggatttcgcgatctccggtgatcttccccttcgattgcgcccacgcccgacttcaacgcgaccagcactcccaactcgattgaccctgaccacccagcagatcgcgaccgacggcgagggtggggaacggcgttgtcagcggatcttctatctcccgctctcggtggacatggcagcagagaatgggcagcacgaaattcatgcggtaggaaggag

SEQ ID NO: 155822 - DNA, 1030 bp, Zea Mays
aaattaatttctgatattaatttctgattttcaatgctctctggattgggcctcaaatttcagaaagcgcaggggctaccacgaaaaatatcctaagactcagactgacactgttgcggactgcgggttctatttcaaaaaaatacagggtctcattaacaaaagtctccgcgaaggggtatcgcggatccagggccattggatctaagtcacgtggccgagattaggttgatcaccatccgaaagcgttgagcaatgagatcctctggatcctgcaccaacggtgtggattttaagtgcatacgatttgctttcacccacacgatcccggatcaacggttaaggccaaccggtacgcagagactaatcgggaccgcccatccacgaatcaacggctctagtgccgtcctcaaccccctgactccctctctctctctggctaatccccacgaccgagcgccattgacaccgcgctcagatccagcaactcgaaccccaatcctttgatcccgatagagctacgtataaagcaggtagtagcaggggcgatgagatgatgctcaccagcgaaccaacgacgaagaattctagccgcgagaaggtgcgatccggtgatgagatacggactccaacgagcagttggcggccacctagcaccaagctctatccgcaggagacacgagcagcttccccgcaatcaagcgaagctcgtctgccagtcgcgcgctccgattgctagggatgcgtaggtttcccaccgcggcggacccctcccgcgtggtggtggtgcttctgtcctttcggcgatggcgagctgcgagaaggtatggcggcggctagtagggcgagaacaacagaggggtagggatacaatcgagtagggagtcgtggccttaaagcgtggagctgcacgtgccgcggattccgagtcagccggtggaagcgcgcggatccgttgcaaccgttcgccgtgaggaaaggggagaacctgacgtgcgggacccacgcagcagcgacggatgcaacacga

SEQ ID NO: 155823 - DNA, 341 bp, Zea Mays
ttctggactaactcggctacatcactctttgctgttggccagtagaaacccgacctgaagaccttcccaaccagggtcctagatgctgcgtgtaccccgcattgctcagcatggacctcatccagaagttgttttccagtagctgagagaatgcatttcatgaggactcctgacgcgctccttctgtataacgtttccccaatgagagtgtaatgagctgactgcctcgcaatgcgttcggctacatttttgtcatctggttcctcctcattctttatatacctgatgatcggctccctctagtcatctagctctggttggctcagaatattgcattcctc

SEQ ID NO: 155824 - DNA, 746 bp, Zea Mays
aaacaatcatatttgtagtgttcataattggtgtgattggtccttttccttggtttgtgccgatcaatatactcttgttccatatccaactttggcatgtcgtgttcttcacaaaagaacattacattatcgagtaaagaatcccaaccatcatatctgatttgttgaaatttctgttttgttaacttcacctctatcatggcctccaagatgtcttttatctttcctttgtaaagatagtgacagtgaatttgcatgccccaaaataagcagcattaactctaaatggaacacaaagtcaaaatccttgagatagtccataagaccacgagcttgacgtctcttagcatcattcaggccttcattttcaacatattggagcacttcaatgacatctgagaatagactacttatcctcttaagggttttataatgagaagaccaacgggtgtcaccagctcctgtaagtgattgttcttgatttaatcctgtcccactactaagctgtccacttcctatttctttactgactctttcttgttggctctcatgaatcatatcctttcgtttgcaagaggctccagcaacattaatcaatagagataccatgtcaaagaaatcactaatatcatctttcttcttagctactgcaacaatgactaactacaattgatgtgcaaaacaatggatataacatgcagagctattttctctcacaattaaagctcttagaccattgaactcac

SEQ ID NO: 155825 - DNA, 710 bp, Zea Mays
ctcggacgcattccggcagacattggcgcggctgctggttctacagttgtgtgtcgcggggcgggatgtccttgcgctcgcccgcacagctgccaccgagatcctgtcggtacccttctccgcgcgctcccactcctgcccaggaccaatccattcgcctgttcgtccactcagcgacagtcacggccacacctcgccgttgttcgtcctcgacagcgggatcaccatgcgtcgtggtcgtggtcagctctcatcgccgcttcaaactttcggtatgacaccttctggcgtttgccgtcatctcctcttgctcgtttaataccctgataggtcgccggaggcgggatttaggttctccggtgattatgccaccgtagtggggatcgccaccgtgccctgtagccggggaagaagacgagcccagaaccattgatctcgcgatgaacagttaggactagaagagggctccggatggtaggatttgagacggacggtagagattagtttgagcataccctttcgatctattgatcatgcgccgtcggatcacgatcgtgtggttataattacataccggttcataacccagcgcgatctaatctcatccgctgcacacagatcggacgtcacatattggcccgtaccccttcggccaactcttttgcataagagcccctccgtttctgcggattaaacccgcggtccactgc

SEQ ID NO: 155826 - DNA, 968 bp, Zea Mays
actcactagtggtcataatccaagtaaacaaagactgggattgctcgaccgactcaatgaacaaatattgcacaacggtacgaaagctagaggacaaattcgaaggattagagttccaccatgtggaaagggatcacaatgtagtggctgacgcactatcgaagatggggtccaattaggcccaagttccacctgggttttcgtccaagaaatatagcaaccgagtgtcaccacagatcagatggaggaatgtcacgttctaagtcaggcagaggcagatccaaatgactagagagagccaatcatcaaatacataagaaatgaggaagaaccagatgacaaggctgcggcggagcgcaccgcgagacagtcggtccactacaccattatagggggcttactgtacagaagaggtgcaggggtagtccccatgaagtgtattcacttggccactgggaagcagttgttggatgaaatccatgctgggcaatgtggcgtgcatgcagcgttatggactctggtaggaaaagctttcaggtccgggttctactagccaacagctaagaatgatgtagctgagttagtctagaagtgcgaggcgtgccaattcttatcaaagcagcagcatctacccgcttaacagttgcagactattcctgtgacctggccgtttgcatgctggggactggacatgattgggcccttcaagaaagctcaaggggatatacacacgtactagttgccattgataaattcacaaagtggatagaatacaaacccatcgcctctttaacctcagtaaaggcagtggacttgattcaagaaataatgttcaggtttggaatacccaacagcatcattacagacctggaatctaacttcaccagctcagagttcttcgacttctgcgagcagaggagcatccagatcaagtatgcatcagtggcacacccaagagctaatgggca

SEQ ID NO: 155827 - DNA, 582 bp, Zea Mays
ctccctttgggaggttttactcacagaaatagtcgtttcaccaacgttctaaaacctcgtgcatcaagtgctcagtgaaatgcccaaacttgtcaaaatagcgcaaatcgaccccaaatttttctagcacacttcagctactactagtacctcacacaccaaattccacacctatccgatattccagacacctgtttcacaaccttttatctctatggtaatccgttttgagccgagtgcgaaaaatgtttttcctctgccaaacatcaaaccgagcactcacttcactcattttcatacatatatacctatctatgaagtatcggctcaattcccagtcatttcttgcctcatttcgaatttcaaccctctatggcacaattcaccgttcaagcatcgttctcgcgccgtttgacctctgtttcttcaaatcactccatttttgtatcataactctatgtgtaagtatttattcacatttaatatacttatgactatgtgactaatacatgctcacatcttctgtcattttagtgatttcacctgctcgcctacgcgtctcctatcctgcctggttcctct

SEQ ID NO: 155828 - DNA, 526 bp, Zea Mays
tacaattggttcttcaacgctctgtgcaattgaagcagcttgtcttgcttcagcagttgaagaggctccttcgacaaatttaggcaccacggttggttcaatgtaacggggccggtgggtcagaaccttcatctttttgcccttcggctcagctacagtggccgaagtggtagtcttcctcttttttccttgcccccacagcgggaagcgataatcggggtatatgaagccaattgcatcaaagaccttgttcagtcttttcttcccccggcctccaaaggctgcggacaaagcattatcttcggccttggagtaagctccaagtagctcatcactggtagcttcaatacacttcagccagtcgtcgtttggctcatcaaacttctccctaaatctgaaggtatacttgagtcggactagaccaccatcactagagtcggtggtggtctccttcggcatttcccagctttccacaagtggccataccctgaaggatatatgctcttgaatcaaatcccttgtgcca

SEQ ID NO: 155829 - DNA, 540 bp, Zea Mays
ggtttgttagtgcgtagtagattttattacaaagttaacgcaacttgaatggatgaaatcggagttataatgtgagagatatcaattaactagatttctagattaagttttaaactaacatcattttgtagcataaacctatattattttatgcacggatggatggctgcatcaatttttgataaaggtcagggttattcctataaatttcgggacctattagtaatgattttgatgaatacagggatggcggtttgtttccactaaaacacaggggctcttttgcatattcgctcggctgaaggggtgtgggttgtttctggccgcacgatctgagatcaagggcccagattagattgcgaagcggtacgcgatatcagtcatcggtacaacatcggacgatcgacattagatcatacccttacgtgcactagtagcgcgatatgaccacaggatcatgatcaaacgaccaagattaccagtgacgaagagttatgcagtcgtctgatgtacaccgcaggtgactgatccaatggccac

SEQ ID NO: 155830 - DNA, 528 bp, Zea Mays
tgtttggttcccccattccttccatatgtgaagcaatcccctgatttccctatttgtcacagcggatctgtctgggggcgccccatctttttttctactcctccctgcgcattctgtctgccacaaaaggggagggtgaaccgtaccatgcttccctcaatggtcgagttcatggcgctcggtgagctccaaatgggtgatcttgaatgaggccctagtgccttttgcaaactccaggcgtgggtccattgggggttgtcctcatactcctaggtgtcaactcatatagttgacaaccccactcatccgggtccaacggcttgatgcctctctttgcgataaataatgattcatacatttcttgagactcgaacacaatctagaagtgcccttagcgctcgtgtgctgggtcctagccgctaggtgcccaccacctgaccacccctcgctctgtggtttcaggagcgactatgaacccttcgcgagctgaccttcgaactccgaatttgtggctctggtccgaccttg

SEQ ID NO: 155831 - DNA, 748 bp, Zea Mays
aggcacactcttgctcttcagtagacatctcgccatctctaccactattcgattatggtgctccacgacgccattttgttgtggtgtgtatggcatggtggtgaaatactttatgccgttgtcatcacaatattctttgaacagaatagaattgagctctccaccatggtcattatgaaaggtacgaagcttgccaccatgttcagtttctacaagtgccttcacacgcttgaagcacttgaaggcctcatcctttgttgttagaaattccacccacatgtatcggctatgatcatcaacaataagtaggaagtagctctttccccctggtgtcttcggtctaatctacccacaaagatctgtgtggaacaaatcgagtggcttgtcagccctataatttgccacctatgggaacaaatgtcgatgttgttttttgagtgcaccgtcacaaaattcttccacccgattcatcaaaggtagtccttggaccatccctttcatgccgagctctcagagtgtccataaattgagattgtaacacccgtggtgttacgagaactaaaactttggcatgacatcatatgcactggcatttcattatgtatgttacacctagagtgcatccactaggctaaaattccaaaacaaacatgtgatgtgatgttttaatttgatcaaggtctttgaccctaggatagggtattttcctaaggattagaagcattgagatgtgtaaggggagaactag

SEQ ID NO: 155832 - DNA, 601 bp, Zea Mays
caaacggtgaaggttatccctaataatctcactacatgctcctctcgggtggaacacaggaacacgctctaatgtatcctaccaagctcttacaagtgtctgtcgaaatacaagcaaaggatggtacaatcggaggctggttcgtgatacttaccaagaggtagtgaaaccgcgattgcaaggtcacagctgtattgatcagaagaaagtatgtggagcttgggaggccaaaaattaatatcaaggattagcaaaattcgagtgcagattagcgcagttcaataagtgtccaaagcacaagtcacaattactggctaagacgtgtcctatcgaagcacaacaaggtaaaggtaacaaggaatggtggacaaaaacttaaataaccagcagaatggcagttctgaaaatagcgcagatttttcagcactagtagaaatcaaaggcgcgtttccaaaggagtaccagcaaaagagctcgaaatattatgaattttttatcactgattcaaaatcacaaatcatggaagcacacaaaatttcacttgaaacagagttgtattgtggcctagagaaaatcacaaaggatctctgaaattcctgaa

SEQ ID NO: 155833 - DNA, 391 bp, Zea Mays
tgggatccaacttcactagctctgaattctttgatttctgcgagcaacggagcatccagatcaaatatgcatcagtagcacacccaagagctaatggtcaggtggaaagggctaatggaataatactagaagaactcaggaagaaagtcttcgacaagaatgaaaagttcgcaggaaagtggatcagagagttgccttatgtggtctggagcctaagaactcaacccagtcgagctctgcatggaaacacccccttcttcatggtctatggttcggaggcagtgctacctgccgacctcaggtttggagcaccaaggctggtcttcgaaagcatagctgaagcagaagccaccaggctagaagatattgatgtgctggaggaagagcgatt

SEQ ID NO: 155834 - DNA, 546 bp, Zea Mays
tttgtaatgaatttggatctttgtaacgattgtcaccaaggtgtgggcatcccctgccacatggtgtagttagtaataaagtcagttatttagttgggcaacccatttgtttccactttcctctttatctgagaagatgtgtttggctgttttgggagtcagtaaagatggtcaattgttcagtgttttgaagatttccatatatcttttcttatgctgaaagactgcaaagttagatctgatgtgtgtgtgctttctacagatgtctgaaaataggtgtagaggtggaaggcgtgctcagcaagcaccccaagatgaggcaccttagtagcagttgccaccaccaccctcgatgaccattgagtagatgttcctgatgcaaacacaagcagtccaagcaattggccagacattagtagcaatgcagcaggtgcagcagcagcaacccccacctcaacctcagatgcaagctcagatgccaccaatgcctagagacaagcgggtggagttcatgaggggtcatctccctgtctttgcccattctgt

SEQ ID NO: 155835 - DNA, 334 bp, Zea Mays
cgtcaaccatctccaacaagtatacaccccctttggttgcgcatttgtgatcagcagagtacttctcagaacaattgtagcactcaccattagcccttttggttgcaagttcttccggggacaggcgacaaaaaccttggtttggccgctggagatttggacagggaggtagtcagagatggcttggctgtcagtggtcctgtggtcctgctgcacggcttggcttgttatctgggtgactctagagcacacatatctcataagctctggccagtctcatggctgtctgcagatctatgggcgcatgaagttccacgtcggtgcgcagtggctg

SEQ ID NO: 155836 - DNA, 648 bp, Zea Mays
cgactacaccaacctcaataaggcctatcccaaggacccatatccacttccacgaatagatcaaatcgtggattctaccttagggtgcaacctgttgtccttcctagatgcttactctggtttccatcagatccagatgtctaggcaagataggaagcataccgcttttgtaaccgtggatgggcttgacggttatgttgtaatgccttacggtctgaaaaacgccttgccaacatttgtacgggcgatgagtaagacttttggtgacttgattagggacatggtagaggtatacgtcaatgacatcatggtcaagactaagaaagggtcgacactagtggaagacttaactctggtctttgacaagttgtgggcaacacacacgaagctgaaccctgaaaagtgcgtctttggtgtctctgcagggaagttgctgggattcctggtttcacaccggggcattgaagcaaacccagagaagatcaaagcaattgagacaatgaggcctccggcccgaatcaaggacgtccagaagcttatggggtcactggccgcccttagccgcttcatctcaagactagccgagagggcactaaccttcttcaagctattacggaagtccgacccattctcttggaccgaggaggc

SEQ ID NO: 155837 - DNA, 292 bp, Zea Mays
ccgtactagaaaggatgggggccaggatcgacggggaagtggtgggggagtctcaccggcgccagactggaagcgcgaagtggcgatgacagcttggactgaagagcaaggagcggttgggcgggtggctagcataggcaagaaggggcagccaaggtgtaggaaggagcagcgcgacatggactgaagagccgagagcggttgggctggcgatgtgggagatagatgtcccccgggtccctgcgacaaggattcaatctatgggctgttaaaaggcctccatgggtaagga

SEQ ID NO: 155838 - DNA, 1073 bp, Zea Mays
caggggtttgctacctacatttgcaagcatagctctctatagcgtagtctggcacgtgtctatttataaagattgagatgttgtctacctactacgcgacatcaacaatattgtattgtaggtgtcctctcctgctctactatagcgcatcatcgattgggtcaactctgaggtcgccatgacaaactttggcgttctccaacacttccttggcatctctatcatgcgctgctccaacgacttgctcatgtcacaaagatagtacgccgtcattctgctccagtgggttggcatggctgagtgtcaccccacgatggctccagatgacttggttgagtattatcccacggcgactctagttggctataagtccaagttgtctacgactgatggtgaccctattgctgaccccttattggagtctggttggcgctctacagtacctcacacaatcacgctgacatagcccaacctcacctacgccgtttagcaagtatgtctcttcgaacatgactaacaagagccccacctcgcactgatctagcacatcctatgctaggagaagggcaccctcgatgtcggtcttcacctaggcactagcggtgtgtcatccatcgctgcctactctgatgtcgactagacagactacccaaactcccggtgttctaccttgagcttctgcacctttctcagtgacaccttggtctcctggtcttccaagtggcagactacaatgtcctgtttcagttgtggagtgttgctggctatgatagttgctttagaagcttcatgtccggattccttctgcgactattgtctactgtcaattcagtcgatatgactgccaatccaattcatcatcgtcgcacgaagcacattgagatcgacatccacttcgtccgtgaggttgctttaaggcaagttcaagtgctacatgtcgcatctacacatcagttcacgaacatcatgactaagagattgcatctacatttgtttagtgacttttgggccggtctctgcatccaattccctccccttgtgactgtggatgagtattagagatatgtatagtc

SEQ ID NO: 155839 - DNA, 273 bp, Zea Mays
gtcgtcaggagcacgattgttattaccttgctggcggtgtggcataccttctgtgttttgatgaagacgacgacggaggcgcaaatctctggtggctgcttcatcataattaccttcttcatcaatcactgcatcatcgggaagacgtggacgaggaggtggtggtggcggtgcttgttgttgcgtctccaacatagcaagtctgtcgatgatctgtgacaatcgtcgatctagcctctcgtaagtcctgccaaggtccatgttaatgaaggc

SEQ ID NO: 155840 - DNA, 408 bp, Zea Mays
ggctgtgcgcggctagacgcgagaagcacgggagagggtgaaaggaggctgggaaggagtttggcgagagcaggcacgcgatttatatccggggaggaggaacgggcgctgggatggcactaatggagaagaaactgtcgccattaacggggaagaaacggatgactctaatggacagggatatggacagtaaagaagaggagaggagagggcgcgacagttggggaggagaacgggacagacgcggtgctgatggtctccactacgggttggcggccgtgggaggcgaggcgacatccgttggtggcttcaactgacggcggcgacaattcagtgcgcagcaacgaacgggagaagaggcaggtagaagagatacgatgaatggggttgggcccacctggaagggag

SEQ ID NO: 155841 - DNA, 898 bp, Zea Mays
ctatcatgataaagccatacgacatcgagctttcgcagtgggagatcttgtcctctgtcgaattctaagggggaaggacgacacaaattgttgccactatgggaaggaccattcatactagcagaagtcactcgacttggatcatatcgtcttactcaaatggatggcacgaaaatagggaactcatggaatatagagcatctcagaaagttttacccctagctagattttaaaagctattgggacggcattgtattctgtaattggataatacaccatcaataaaaagacttcgttctcaaaggcactcgaactgtttattgtcaatctgcatgcttactcgactcagggtgaccactataccctactaacggagcaatcgacttaagttggcaatgacttaaggcggtgtgacatgctcacgcttacttaactcagggtgaccactatgccctactaacagagcaatcggcttaagtcggcgatgacttaagacggtgtgacatgctcacgcttacttaattcagggtgatcactatgccctactaacggagcaatcggcgatgacttaaggcggtgtgacatgctcacgcttacttaacttagggtgaccactatgccctactaacggagcaatcggcttaagttggcgatgacttaagacggtgtgacatgctcacgcttacttaattcagggtcaccactatgccctactaacggagcaatcggcttaagtcggcgatgacttaagacggtgtgacatgctcacgcttacttaatttagggtgaccactataccctactaacgaagcaatcaccttaagtcggcgatgacttatgacggtgtgacatgctcacgcttacttaattcatggtgaccactataccctactaacag

SEQ ID NO: 155842 - DNA, 741 bp, Zea Mays
ccgccatgatcgaccagggcatcatccgccgtagtgactcagcgttctcttccccggtcatcctcgtcaagaagccgaacgggtcatggcgcttctgcgtcgactaccgcgtgttgaacgtgctcactgtcaaagaagcgtttccgattccggtcgtcgacgagctccatggcgcacgcctcttcaccaagctggacctgcggtcggggtatcaccaagtgcggatgcggtaggaggacgtccataaaacggcgttccgcacccacgatggcctctacgagttcctggtgatgccgttcgggctgtgcaacgccccagccatattccaggctttgatgaatgatgtcctgcgaacctacctctgccggtttgtgcttgtcttctttgacgacatcttgatatacatcacctcatgggcggaccacctccggcacctccgcgtcatcctcaacaccctgcgccagcatcgactctttgtcaagaggtccaagtgctcttttggtgttgactttgtcgcctacctcggccatgtcatttcagcggctggcgtcgctatggaccccgcgaaggtccaagccatccacgactagccccaacctcgttcggcgcgagccatgcgtggcttcctcgatttggcaggctactatcgcaagtccgtccacaactatggtgccattgcagcacccctcacgacactcttgaagaaagaggggttcgtatggttcgacgaggcaaccgccg

SEQ ID NO: 155843 - DNA, 457 bp, Zea Mays
gctactacgcctgctcagcgcccgaccccacctagctaccacatcgcgcaaaaaagtgtagagcgagcactcgaacccacaccctcagctccgtaaatctcgggatgggtgaatgatccactcgagtggattcaatttggttcaccccggcccctgtttagctccaccgcgccgaccctaggctcgttgtcgcagggcttgttcggggacatgttcatccagggtagacgttacctatctcctctagttgaccgatgggcctagttaccagaggctttccccaatgcgctcactgactgatgggccctatggtcccgggatcttatcctcgacacatcattttttatggtcagaactatccagagtgggctttgtgttcagattgcactgtgtggtcatggtttactttttcacttaaccgaggatccacctgctctacatgaggaccatatgccga

SEQ ID NO: 155844 - DNA, 567 bp, Zea Mays
tggcctggttcccactattgtaacgaagagagccctcctgagatttgcctcttcccgtgccatgtcagcattgaactcaagaatacaagatgaccttgtcccccagctcatctctccttgatcatccggcctcggatcaggggactggctaatcatcggagctatggcttcatcagacgaggtcagtgacgcctgaccaggggcggcgacaggcttctttgaaccttttccgtgcttcgaccgtcttctctttcttttgttgcggaggcttctatgagactacccctcagcagccatcctaggggaatcctccatcttcgcaacaacctctggtgtgttgatcttaacccacaccaaacgtcgcctatgggggacagcacactccgaggttgctgacgaggccccgcgctgctccgagaggcgctgccacacagacccccttgcttgttgtttttccaatctctgccacactgtcttcttcctctacacttctcggcggcctagacacctgacagcctgatgtccagtcttgaaacacttgaaacagcgcgtgggtcgacggcagac

SEQ ID NO: 155845 - DNA, 663 bp, Zea Mays
cagctttccgggagcaccatgtgccccaagggctcgttcagctcaaggaagacgaattccgggaactgactcaagacggaagatctgtcagcaaatatgtgcacaagttcacggaattagcccggtacgcaccagatgacgtcagtaccgaagtcaagaagatggcccgcttcctgaagggactcaggccagaactcaagaccatcctagccagccaagacttcctcagtttctctcacctctccaacaaagccatgcaagtggaaagggcaaaagaggaagaaaaaggccatctcaagaggaaattccaagtcctccaggctcagcagcaagatcggcaccagaaaactcgatcctttggatttccacccaagggaccaagcttcagtagaccagctggacccaccacgtcacgtttcagtcagcagagtcagagctcctttcatgccccctcagttgcaagcaaccaacccccggcgaatgagttttggcactgcggagatcctagtcactacaagaacaactgtccccagctgaagccatcaggacctgcttactccaactcggtgaatggccccaagaataccatcgcatccacccccaaggcaccctcctccatcagccagcagaacaagaccccgtatcaaggaagggctcgagtaa

SEQ ID NO: 155846 - DNA, 806 bp, Zea Mays
agaccagctggtttactacacccgcttaagatacctgagtggaaatgggaagagattggcatggacttcattgtgggattaccccgcacatctgctgggtatgactctatatgggtgattgtggacaggctaactaaagtagcctactttattccattgaagaccacgtattcaggagccaagctaacagagttgtacatggcatagattgtttgcttacatggtgtgccaaagaagattgtgtcagaccggggatcacagtttacttctcggtactggaagaagttgcacaagtgcttggatacaagattgaattttagttcggcttaacatcctcaaactgatgggcacgccaagaggatcaaccaagtactagaagatatgttaagagcttgtgctcttaaacatggtggtagttgggataagagtttactgtatgcagagttctcctacaataacaactaccaggccagtttgaagatgtcccgtttgaggctttgtatggcagaaagtgcaggactccactgtattgggatcaaactagtgaaaggcagttctttggacctgaaattatacaagaggcagaggaacaagtccatcaaataagggaaaaatttgagaactgcacagtcaaggcagaaaagctatgctgatacccgaagaagactgctagagtttaaggagggtgatcatgtatatttgaaggtgtcaccaatctggggtatgagaagattcaaagttaaacggaagttgtcccctcgcttcattggacccttcttaatcctaaagcgagtgggagaggtggc

SEQ ID NO: 155847 - DNA, 681 bp, Zea Mays
tttttgttgtatggcaatgtgatgcttgctttgtcaaatattgcattccattcccattagataaataaatgtcttgttgatcgattagaggtcttatatgagcgttatcgcagccaataattattggaagcgagtagcgttcataagtcggtccttgttaaaattgaagaacaatccgataacatatgcacataagtgctttaggtccttcagtagaaaatgtaagtcttatggagtttatgccatgtgttaatgcctctatgttagaccccctaaaatatactattttaggtgacttatgtgttaactaatttaagttgatcagtggttaagaaacactgattaatctgctccaacccatgtttttgagttgcaatgtctaaaatggttcgctaagtcttatacggtgattagccaactcatgttaagtaggaatcgattgcgtaagtgattgtgatatatatgttgtgtctcggattgcgataataataggcaagccgacgggtaggttatttagcgggctatgtcgttgctctagttagccgaattgttagatgttttgggttaagttcgtggtcacgatgaattgcttgttgtagtctaaatgcgtatggttatggtcgcggatgaaaagtagtagtgctcatgtgatgtctacgctaaaatgcaaactattgggtg

SEQ ID NO: 155848 - DNA, 1569 bp, Zea Mays
gatctatgtagaactccacttctctttctggcggcattcctagcaattcttccgggaatacatccatgaattcttctaccacagatatgctttctgctgctagattaaacaccattggatccttggcgggtggctgagcctgacaagaaactgactttccttggtggtcagtgagaagaacggtcttatttgcgcaacttatgatgcccttgtgtttggttaactaatccattcctaagatcacatcaatcccttgggatggcaagatggttaagtctgccaagaacactaccccacttaaaagaattctgacttgggagcatttgagctggcatataaggtctaaccctggggttcgggtgaccaagggaatttataggtgtgtagagggaatgccatgtttctccataaaactagtggctataaacgaatgggatgctcctgaatcaaaaagtacagtagcgggagtaaattcaactaggaactcaccgagcactactctcggagcttgctgagcctcttgagcatcgacgtggtttactcgtgccctgccatgatactgggtcttgctctgctggctgatggaggagggtgccttggagtcaggcgctggggcattcttggggccattcaccgagttggagtaagtaggtcctgatgccttcaactgggggtagttattcttggagtgactggggtctccgtagtgccaacaggcgttagctggtggttggttggttgtgactgagggggcctgaaaggagctctgactctgctaactgaaacgtgatggagtgggttctattggcttattgaagcttggtcccttgggtggaaacccaaaggatcgagttctctggtgccggtcttgctgctgagctcggaggacttggaatttcctcttgaggtgacctttttcttcttcccttgccctttccacttgtatggctttgtttgagaggtgcgagaagctgaggaaatcctggctggcaaggatggtcttgagttctggtcttagccctttcaaaaagcggaccatcttcttggcttctgtgctgacgtcgtcaagcgcgtagcgagccaattctgtgaatttgtgcacatactcactgacagatcttccaccttgagttagttcccgaaattcatcttccttgagctgaacgatcccttggggcacatgatgttctcggaaagcagtttcgtattctgcctaggtagcatctctgacggtagcgctgaatgtatcccaccaggatagggccatcccggaaagttgatgagcagccaaatgaacacgctgattctcagggcatccgatggcttctaacttcctttttatcgtgcgcagccagtcatcagcatcgaggggattgctggatccagcgaatgtgggaggcttgagccttagaaaatctcccatcctgtcctgtggtcttccaccatttgggcgctgattctccagacttctagtgaggacttcaatgagtcgggtttggttggctagaacttgggctaaatctaatggcagctccggaggtgcgaggaggtgggtctcactcccttctc

SEQ ID NO: 155849 - DNA, 526 bp, Zea Mays
acacattactacaacaaaacataaagtagttgttgtaacaatatacaaaccaactatatgaaggtccacaatatttatgtatcctccagtcgtatacaagggtgacaaaaaatttgggatgaagtagaggaatacaataagggacgacatacacctaacaattataatgaacatcattcatactaactaaggaagtaatggaccctctgatatgttcatgacagttttaagaagtttaataaacaatgaacattacccttggttggctaaggtaacacattttgcctgaccctacgatgaatctttctggtactttagtaaaatgagttgttgttctggacagtggggatcacaaattaattcgcagaagacttgacagttttaggcactatcgaagtgaagccgtagtgtagggattacaaattaatgcaatctgcagaccattaggccgtaatactttgcactaccattccttgcagttaatatggaggatattcagcgggtgagtaccatataaatgtgtaac

SEQ ID NO: 155850 - DNA, 695 bp, Zea Mays
gtcaaatccatgccataactcatccaaatcccgaagccatcatcaaggtggggatctttatatgggccatgaggagccaaggactggaaccaaatgcaagatgcttttgcaacattcatgagttgtcttatgagatgaaggctactggaaaggagcaatatcacaacaactttggttgttacagtttcatgcctcggtctgaagtgagctacccagttcccacattttggcagaggtgaccgggttcatggatgcaggaatggttttacgtgaaaaatgatccaagtgcaagggaggatgtgagagggattatccaacgccctatatggtctcgcttcggcataaggaggtcagccactgtccttgggaatgaaatacaaacatgccagacggctttcaatacagtgtgtacttacataggcacaagagatttagtgaaggaacacattgcttatagagtgtggccacttgcacatgggtgggaaatgcgaaggagactgctactggttctagccaaggtggtttagtctacctgaagtataccttcaggtacaggagccaacatggactattcgaatagatttttaagtttgcgtagaggtgtacactttacccattagtccggtttctgcaatcccactgttgtgagattcgaataccgaaactctctcctcccttgcacgaatttaaattaa

SEQ ID NO: 155851 - DNA, 439 bp, Zea Mays
gtcgttgttcaggtactttgcgcgctactaacctcgggaggtgccgccgggctcggtcttgtcgtggacaaccagcgaatcaacgggaaatccttcgactctgctcacagaaaattctacgctgccttcgacgcctcgtgtggtttgctcctagccgccgccgtctgcaccgtgatcatggtcatgctttcagtttcttcttccaagtagctggcagaggtttgcacgtacggtcatgtggcatggataatttttgtttctctttattattttatgcgtcctgctttatgatgaggatcgacaggccggacagaaactataatatatatgttgtgtgttgtccgcgtggaccccaaggatcatggatggtccttaggaaaataagatggtttttagtgcttcgatcggttacagcaatatatactaatatatattgtgg

SEQ ID NO: 155852 - DNA, 451 bp, Zea Mays
tccgcctcgaaatcaggagccagccagagtatgatggtcgtgaattcatcgagcatggcacagagaagtgtgtcgtgactgtatacattggatctagtccgcaccatgtgaaatggagtgtcactgctgctggacacagattcaaagacacctgccaagtcgtcggtcgcaaggcattgagggccctgtgtcagatctatgaagaagaagtggccgacacaccgctcagattctttccgccctttcaaagagaccgtccagtttggatggccagaatgcgtgcattggaagggaagcagctgcttgaggacgacccctcagtcgtgtacctcaccgcatacctgctcaccctggatgcacagtatgatttcttggctcggcaccaccgtcagatgattgctcgagcagaagatgcagagaagctcaaccatcagctccatgtgaatctcac

SEQ ID NO: 155853 - DNA, 272 bp, Zea Mays
caaatgtagaggactgcatggagcgggtgggagaggatcgtcgagacctcgataccaggttgtcaagggcacggtgatcccgagtagctggccctcgactgtggagctcgtagtcggtggccgattcctccagggcggaggttatgcccctcacggccgcctgggctttaacactagggagagagagattgatagttgatcttgcttgcccctttcataatctgagtacaatgtatatataggccaaccggccaacaacttatggaaacaaa

SEQ ID NO: 155854 - DNA, 413 bp, Zea Mays
cttcaacatcctcttcggagttttcatctttctgattttccacatgatcaactaacttgatgctagcggccctaacaagcaaattagcgccctcctgaattaagtcctggagctccttttttcttaaacctgcccaaaaattcatcaatgcacaagcatgacagatgatgtcttaagagatttaattaacattttttcaaagcacactttgtttctagacttccaaagacccagcagattgctgaaacggccacaatatgaatgcttttcaaatcagcagcatatttctccaaccacttccagcattgactcaaattattaggaaccaaacatgtattgaaacaacttgctacaatcccccaaatcactaagaccacagagcaactaaaaaagagctagtcaatcgatttaga

SEQ ID NO: 155855 - DNA, 1248 bp, Zea Mays
tgagcgggttgctagatccggcgaatgtgggaggcttgagccttaggaactctcccattctgtcctgaggtcttcctccaatcgggcgctggttctcgaggcttctagtgagaacctcaatgagtcgggtttggttgggcagaacttgggctaggtctaatggcagttccggaggcgcggggaggtgggtctcactcccttctctaccgaattccccttcaatacctaggggaatccttgctccaattcccgaggcggtaggcgtggttttatctgaagccatctgctagaggggagaaaggattactactatgcatatgccatcatttttttaaacatgttattttatttagtactccagttcattacaagcataacaaccaccacagattacactacgcatgagcgttatccgctaaagtgtccccaaactccctgaggagatcatcaaggctagcgagggacacttcctcgacgtcggaaaagttctctatccctagggagggtagtgttggcggggcttcttcctttgggtcagtctggcatccttggctcttgaaacgctttcagatcttcttgacggggcaagcttcttcagcctcttagcatagtccatctttagggtccggtatgcctcacgagtgttggcttcttcgccttctgccatctcgagactgtcttgaagagccgtcttttcttccttcaattccttgatttgctgctctaggctttccacccggagtttaagtgggtacagtgggagaaaaggtcgtcatagtggttgtcaagggtgtggagatatcctgccatgtagactactgtagggtcatcttcattaggatctctccctgacaaggcctggagtcttttcctccaagcaggagtatttttgttgctagatggaaagtagcgaaggggtgtctcagagacctctctgctgtagttttggcatagctggcggagggctttttgggcagcattctggcaggtgtctagggagcagtgtccagtggcggtgatctgaaagggagggtgatttgggtagttttggctttctcccaagtagactgccatagagcatttctcaatcccgttctcgtggtattctttccagacatactccagcttcttgcggatccccatgcgaagcgcacaactctgacgaaggtgagggaatccttccacctccgagcaataggatgtcttaaggacaaaggtgccttccatctggtagcaagagaagaaggg

SEQ ID NO: 155856 - DNA, 314 bp, Zea Mays
ccacctctgcgctttccctctcctcccacctcgacgccgcggcctctctcgcctccgcagccaccgcagtggcacccctctcgtcctgctccgcgcgcgcgcagtgcgtcacgctggtatcgtgatcgacatcgacgagatggtcgagaatgaggaccgtgacctacccgtggacgtatcgttcacgaggaggcttcctcccgcgctcactttcggtgacggcctcgacgcactgctgcgggccgccaacgaggtcaaggccaccccgcctgctggcgccaggagcggcgtgatcaggttcgaggtaaggtgtg

SEQ ID NO: 155857 - DNA, 831 bp, Zea Mays
gtccttgatgaaatgtctggacttcccacaattaaagtagccattagagaaattgagtagagcagggaaacgggcaccaggggcactcaactgattgttctgggcgagggcaggagtgggacggatgaacactggttgcttgaaaggatatgtggatggacgaggagaagagcgatttgggttgaaaggaagaatgaccaaccttgaccgcttttcagacccttgagacaatccttcacccccatatctctttgtttttccttgtcccgaattcttggcttccactgaaagcgttgtgcttatagccctgctataagtgagatccaggcatgtggccatcttgcgctggagtcgatcattcaaacctctcatgaagcaatttttcttctttaaatccgtgtccacttggtcgatagcatgttgggagagatgattgaacttgttgagatattgcattaccgagtctcccccttgctttaaacgtataaactcctccagcttcatgtgtaaaaccccttctggaacataatgttccctgaatgcctgcttgaattctgcccacgtgacaagatgtcctcgaggctgaatagctgtaaaatttccccaccgggttctggcaggacctctcaattgttgggtggcgaacaggggcttctgggtttcagtacaccagatcagtccgaatgtttggtccatgactcgtatccatttatccgcttccaaaagattcttcaagtttaacaaaaagcggtggacgagtttcagaaaactccaagtatgtggtgtctcggggcccttggggttgacctcggcctccatgctgctgaaact

SEQ ID NO: 155858 - DNA, 697 bp, Zea Mays
gaaaaattatgcaaatcaattcatgaaatgaaacctataccaaagatgaagtacattaataaatctacaaaatgtagtaagggaagtattacaagaaggcccaacaaaaaccccaaatcaagcccctaagtggagagcacactagagccatccatttttctctaagtccaaaaatcagccctaacctaaagatcagaagtgttcacccctttgctggcaccaaaaccacatggtccaaataacaaaaagtggccaaactacccaaggggcacccctgaaaaatttgaaaccaaaccagggtcgtttgacctggtttggcatccattttgtcacggggtgaacagtgcagacatacaagacttggcgccaccatatcttccaagctaggccagatctccccttggaactcacatgaactagatagctctaggtgcagggaagaaatcttacacaaggcatatggaaacattcgcacatttgggacctttgcaggcgcaagaactcgggcagattaacacggccacgtgttcgacgcgccctagcaacgccagagcatgccccgacgctcggccccgcgctgcgtcgaccccacgcccacacctgcgctcgcggctataaagcccaccccggtctcgaccgtacgcccccgctcactcccaaccctgcccgagcacgagttcaccggcgtttgcccaga

SEQ ID NO: 155859 - DNA, 444 bp, Zea Mays
attaccagtcgtgggatcatgatcgagcggtgcggattagattagcttcatctgaaaggggtacgcaatctaaagcctcggatccagatccaatgggtgatattcaacaaagatgcgcatcagccccaacccttcgatccgatcggacggtccacgtttattttgaacccgatctaatctgcgccatcaaacccggatccgacgcccgcggttcatcttcttccctctaacctttctctctcactttgcactgacgaaccacaggcggcggggtgcgccaccacggtggctgccatggccggccagcgcgccaacaaagctgtacctatgcccaaccgacgctaatcaacgcgggtattaatgcgaagacgacaggggatcacataccgtagctggtagacgatggcgtgctggccacatcggattgcagtcaggcgacgaatc

SEQ ID NO: 155860 - DNA, 402 bp, Zea Mays
gtcaccgatccggggtatgaagagattcaaagttaaaggaaagttgtcccctcgcttcattggacctttcttgattttaaagcgagtgggagaagttgcatatcaactgaagctacccgatcacctgtcagatgtacatgatgtattccatgtgtcccagctaaagaagtgtctcagggtacctaaggagcaactaccgatggaggaccttagtgttcaagatgacctgacttatgttgagtaccccatcaagattttggatactttgactcgagtaacgaggaataaggttataaagatgtgcaaagtgcaatggagtcaccatggcgaagatgaagcaacatgggaaagagaagaagagcttcgcatagattttccgcatctttttcctagatcttctta

SEQ ID NO: 155861 - DNA, 740 bp, Zea Mays
ataaattgctcaaaaaggtggacaagtttcagtggaccacagaggcacatgaagctctagaggcactgaaaaagttcctgactacaccagtactcaagccaccacgccgaatcagccagcagaagatctgttgttatacatctcctgcacaactcacgtggtgagcaccgcgttagtagtcgagcgggtggaggaaggacatacatacccggtgcagcatctggtctacttcatcagcgaagttctcgggcccttaaaaaaatgaagtatccccaagtccagaaactgctatacgtggtacttctaaccgctcgcaagctccgtcactactttgacgaccacaaagtcatagtaggatttccaataggggacattcttcacaacaaagaagctatcggaaggatagccaagtgggcgtgcgagctgggagctcacgacatagagttccggccccgcacggctatcaagactcaggcactggttgacttcgtatctgagtgtactgaacaccaggtcctagacaacctggagactaccgaagtatggagaatgtactttgatgactcgctgaagttgcaaggagcaggtgcaaggattctctttattgctcctggaggtgaacaactcaagtatgcactccaactattgtttccggcatcaaataatgcagcagaatatgaagcactgatccacggattaaacatcgccgtatcactcagcatcaagaagctgatggtata

SEQ ID NO: 155862 - DNA, 773 bp, Zea Mays
tagatatcccccgggtcaccaccgtccggagactttttgtgggccatctgaaaggcccttgatgggtcgctcgatgggccttggtcgagcgggagcagttggagtccgaggaaggtgtgggtgtgcatacgcgagaaaccagacatgttcagtaagcgcagcgcgcagaaaccggcaaacaactcgtttgaccgtagcccagcgcgacgagaggtagaataagcggaacatggagatcatggactcttagtagtttctctttaaccccaattcagtcagcaataaggctgaagaggggtgtcggtgcttcgtacctcgctccgataagtaaatttatagtgcgtgttccgggctcggagggtgtgcgcgaagggcgcaagatttatactggttcgggcagaacatccctgcatctagtcattggtggctttctctaccggcaccatagatgatcaaactcatagtaggggttacaagcagtcgagagagggaggagagcatcctagatctcttatcgggtggaagtagagcttagaagattagaggtggagtcctagctaactcttggcttggtggggctccgacctcctggtcctcgttggtgctcttcctctttttgtccttgtgggctcgtctccatctgaaggcgtccggtcgtccctcagttcgtccttctattcctcgatcggtcgatccccttgccctaaggcggccctctccctttcataggccaggagaggggtcgaccagcggtggctcctctaggaaggaac

SEQ ID NO: 155863 - DNA, 881 bp, Zea Mays
ggtggagactccaaagacgcacttctccgggttcagtttcgtgcgtgatgcccgcagcttgtcaaagaccagggtcaagtcttccactagagtcgaccctctcttagtcttgaccacgatgtcatcaacatatatctctatcttgtccctaatcaggtccccaaaggtcttactcatcgcccgtacaattgtcggcaaggcgtttttcagaccgtaaggcattacaacataacagtaaagctcatccactgttacaaaagcggtatgcttcctatcttccctaaacatctggatctgatggaaaccatagtaagcatctaagaaggacaagaggtcgcacccggaggtggaatccacgatttgatctatgcatggaagtggatacgggtccttgggacaagccttattaaggctggtgtagtcgatgcacatccgaagcttcccgtttgcctttggaacaatgattgggttggccagccacactgggtgatgaacctcttcgatgaagccaacgtgtagtagcttccggacctcctcacggatgaagtcctgtcgctcaacagactgtctccgaggcttctgagtcaccggtttggcatcagggtggatcttcagatggtgctcaatcacctccctggggatcccaggcatctgtgatggttcccatgcgaacacgtcggcatttgcctggaagaaggcgacgagcgcgagttcctatttctcctcaagattgcccgcgatgcgggtggtctaggaggagtccacgccgacctggatggccttgacgggaccgtcgtctgcttcagatggctgcacctttggcaccttggcaggcgccttggtaccggaagttgaggggtccctccctccatcgtccgggc

SEQ ID NO: 155864 - DNA, 293 bp, Zea Mays
gaagattgaagatccggctgtaatgccaaaggcatcctcagccaaattagctgagccgaaggccaataatattgaagagataggggtcgaaggaacaaagatattagaagttacaagcccttcgacagaagtgacagtgtcgaaggcacataaaggtcttacagcgaccctaagaggaaaagaatggtcaacgtactagatgcgctggagacaataaagacaagctctactccaaggaaaattgccgaagctccaaagacgcagtctgagacaggacctaccgaagccgaagc

SEQ ID NO: 155865 - DNA, 862 bp, Zea Mays
ctaggaacgagcttcgctttgatgcgtatacgcagaggatgttctacccatgcgcatggcggaacccgcgacgtcgagaccgtgttcccaatcacacatacccgaattggttaaatgggcgtcacgataggcttcctgggtatgcaaaactactgaaacaatactcgagatggatagaaccttaccagagtggtcaagccatggagcgcgacgaactttggcttgctggtgacagaggaaggggaaaactggtgtcgcggcggctctgggtgaaattgggggtggagattgaggctacacggccataaaggactagattttcactgtgcactaccaattttgggaaaggtggagagaattccacgaatttggacttcgactgagctcactggtgaagaggtaaacacctcgccgtggtccgtggtgccttttatagccacagcgagccggctaatgatctgcggccgcggatagcatggcaaacgcatgcctaccacgtagaggagatgcacaatgagggaaatcaaagcatgtgtgacagcgcggcgagagttaactgagtcacggtggtcgccggtgaagactccggctgggcttgggagatggcgccatgcatgagttatccctcctcggcgttatccattccataccgcgcacgaatcaggacggcagcggcacaaatctacgcgcggagaggtcaccgacggtgagattgccgcgctggcggtaccattgcacagcttcattagtcggtctgacagagcaggtttggtgttgatttactcccgattttgtgtagtgaccggaccagctctctgtaccaaagttatagcttaataaaccagctttaactttgttatat

SEQ ID NO: 155866 - DNA, 390 bp, Zea Mays
caggttacgaggttcctgataactttcttgcatcgatgttagggatacgatttatactggtcaattaacaaatgaatgcattattgaaagaaatcctatgcttaatataatatcagcaaagataagaaagcttaatatacaaatcactaatgaattaatgggcgaacctgtttcatatgtccttggatgcggtctcttttccgagtctatgtcatgttgctttctgacatgcctattgaaaatagggatccacaaatatgttcaggtagttattgtgcaattctaacatgggtactaaccatcctactgaatcagtaatcctaatcgtttagatgggcttgaattgtgaattataatgctttctttaaaaaaacatatgataggtgctat

SEQ ID NO: 155867 - DNA, 628 bp, Zea Mays
gacaaaaaatcaaaatcattagttcgagggggcaaggctgcgaaagggaagcaagtctcatcaaagacaacatgacgagatgttaagacccgatttgtggatagatctagacagcgataacctttatgctcagtagaataccctagaaaaacacacctagtagaacggggagcaagcttatgcggcgcggtggcagagaggttcggatagcaagcacatccaaagactcgaagctgcgcatatgtgggaggtgtgttgtatagggcagcaaagggacaagaggcgtggacagttttagtgggaaggcaattgagaagataagtggttgtatgaagagcatctacccaatagcgaggaggcatggacgcctagagcagcaaggtgcggatcatattgttggtggtgcggagcatgcgttcggctttaccgttctgcgacgatgtataggggcaagacatacgaagtttcacaccattggtgagaaataaggtccgggtagaggagttgtcaaactcccgaccattatcacattggacttacttgatcgtgcgcccaaactgagtatgggcataagagaaaaaatgagagatggttgaaaaggtgtcagatttgaggcacagaggaaaag

SEQ ID NO: 155868 - DNA, 562 bp, Zea Mays
ttattacgaatgaactcggttgctgcttgccgttcagctgctcttcctatctgctctattcctcttcctcagttgctctgcataatgaatactgttccacagggacgacgacgagccacgagactgttttcttttaaaatttacatacgaggcaggtaatattcccacacgaaaaaacgctgttgctcggtacactgatttggttgacacacattctatgttttccgtagcccaatcaacttgttcaggcaatgtaacaggttggcagaccacctttggagtttggacgactggagtgtgaggcaccccaaatgcttccatcgagggttgttctagttctagtacgtgggtaacaaaatctcaatccaaacataagacacgttatgtgtagagtggtaggagaggcttcgtgcgtggagctggagcaaatgaattttacgcgaaaaatactgaaagttattcatcgtactagtgttatttcggcgccgagcgtccacaggttaaaatgggttaaaatgaagggaaaaaaacctggaatggttcagttcaaattacgccggag

SEQ ID NO: 155869 - DNA, 917 bp, Zea Mays
aaaggaaatgttgtatgtctatcagtctgcaccatctttatagcaagatctccaaggtcattgcaacatgtaaaacttgcatccacccttgcatcattaacaaacatctcaagttggttgcgaaggacaatgcaatcatattgggtgaagtcaacaacataaatttgagcaagttctattaatttatcttcatcaaagtttgcaaaagaattccgtgggtctaaacaagcaatgcatctcaatagttgagtggacctttcagcaaaacgattatttaattccacaattatttggtcatggacaacattaaagatttcatttttgaagtgatgaaaatatgttaccaactgtccaccacgacctcttgagcgacctcaaaaagttaatgtatcatccgtctttggcacaatgatgtgatgtagaagacaaaagttttctacctttgcaaataactcgtcccaaccattctcccgtatgtcattcattttctgcagtgttgtcccaatcaaccctatagcacgaacaatattttgatccttcttttgcaaacactgtgacagatcattagttttgcccaatagtctgatcataagatgcagtacaagaacaaactcaaaactctccatttgttttaacaatccagctgctgtgtatttcttttccccactagaggcatcatcggatacaatctctaacacctctagaactgcatcccacatgtgaataatacgacataaggtcttatgatgtgaaccccatcgagtatccccaggtcgcacaaggttggtttcttgattttccctctcccggaaacaagttcacctctatccaacatgttcactaaattttcatggtgttgttgggccaattgatcccttcgcttacaggatgcattgacagtgttcacaattagagta

SEQ ID NO: 155870 - DNA, 589 bp, Zea Mays
cgtagtgcgggggattttgcgccctagtttgtgcactagggtctcgctagtggtccgagagacaaaagagctgatgacgtccacatcggcgaggttagagagttcattgcattgccatgagaaaacttcggatgtaatcttggagagtctcccttgacttctatcagcaatttacgaggtcccaagggttcccggggtgtatgtacgtgctctagaaatctccaacaaaaatgttgacaaggtcggcctagctctggatgtagctgggcctcatgtcttctagccaggctcgagctgagtcgaccaggtataaggggaggttatggatgataaattagtcatgatctggtcccctaggcaccctagcctagcacgctagcggtagtgttcgagccataggttggggtttgatttccctaagtacttgatgacattcgtaggtgcgcggtattgctgggggaccgatgcctggaggatatggtggtcgaaggtgtgggtgcttggaggcgatgggcttgggcttcagtctttatttggatcgtattgctcctagcatcgattatacccatggccttcgatgggatgctcg

SEQ ID NO: 155871 - DNA, 415 bp, Zea Mays
ggccttcctttagattagttggcaagtcatgatgagccccaaccagaggtagaggggcaataggaggagggagctccctatccggttctgcgacagataaccagacctccttgggaatatcacaagggtccgagcaccaagcccaaagaacaaaggatctcgtgcgctccgtgcgcctcgagtgctcctggacatagtgaatagcacggctccttcccaaatccctagcagccacatcttctccccagcagtgaatcggaattccctccactctgaccttcactctgaactcaaagctgatcttcctggcatagcactcctctgaccagtccccgaagtgaaacacccgaccacgataggagactgacctcctatccagcgcccattgcttggttcttgaatcagagaagatgat

SEQ ID NO: 155872 - DNA, 381 bp, Zea Mays
gagctgatgccgccgtttggatttgtgcggtgacacataattcactgtaaattactcaaactactagcaatagctagctagtgcagtacagtatacttatatgattccatttgatgcgtacggtctacaacgtgtaagtactagtatttagcgttgccaataattagcgacagggcacgctccggcagcgagtggtgctgttgttgttggcggtgtgctttagtgagcattcatcattaagtattgggtttacgttcaaagtaacttcgctgggaactttaagcttgtggttgaattcagctgggtgaccactaccgctgacatcaaaagtccaagcctgtaatcgtgaaaagctgatgacgacgaaaagatgaaagcgtg

SEQ ID NO: 155873 - DNA, 613 bp, Zea Mays
gataaggaaagttgtatggactttcctcatcagcatgcttaatccacagagtagaataaaactgagcaatgatttcatcattccaatcatattggaatgtcatgatagtcttcatcctcttttgctcacaggccctcaatgactgtgtcatctcaggatccccaatagcttcgcacccactctagttgataaaacgctgatggaggatgggctggtgcttctttggaaggataactgaattatagaaatcgacatgaaggagagttcagaagcgattaccatcaatcctgacaacacgaacatggaaggtaggattctagaagcgcatatcttgaagaagggcagaccctccactgacactgaaatcaataacctgttcgttggtggaaccacgggcctgcactttgtgcagcactaatccctagataatgggggcatgagcaggaggtagattaacatcatcatcctttcctccttcgtcatcactagtagcctcccaggcctgtggattcgtcgcgggacgagaccgactcgaggggttccgagccgttcgtccgcgagctccatgatacctagaggcctcaccacctggcatgacattgccagatctgcg

SEQ ID NO: 155874 - DNA, 381 bp, Zea Mays
ggcttgctatttagctcctcgatcgccagagagagaatcgtacgttaaggccggtaggaaacacggcaacagatcatctgtctcctcgctgtctgtctcgctcgattgatattcgctctgtcccgcgatctgtcttggatcgctgagagcgtgattggacgtccagctcgtgggcgcaaggctcgcggtggcctggatgcgcagggatgctccctcaccgtatctccacgcatgcaaattgacacaataaaaagccactaagttgcatcggtgcgtacaagctcgtctccatacatacagcccaccaatcactggttaaatgcggtcaacggaatgtggagagcccagacgcacgcggccaggtatccaatcacgcggtga

SEQ ID NO: 155875 - DNA, 626 bp, Zea Mays
gtagttagtagtgtagtgtagtgtaagtagtaaggtattgtaatgtaatgtagtaaccagggtaaaagaagtcgactcataatgagttggcttcgagtttgtgttaccccctccagtatgaatcaagaatttggttgcttcgaatgaccactattttgttgatttccatttgcgtgtttgaaagtttgcccatatgcttgacattgctggcattttagaggtaactgccgagtgatgtctgaggctttttcttttccgagtagtgatctagcactttagagataatgcttgacccaagaaaccccatttatactcgcgctgacgtgcccttttgatttccgaaccctaacttcactttttcccttcagtcgctcctctgcttccctgaaattctgagcccgctcatcctacccaaaagattgcgatggctcccaagcagaagaggcaaagcaccattgctgcgatcatctcgcccatcgaccccaacagccagcttccgtttgctggtaaccacatgtctattacctccgaatctgaccttctccatcttgttgagattgaggttttgctgccaaaagagctttgttcttggtgaatctgccgcggtgtcaccgttccgaaagagg

SEQ ID NO: 155876 - DNA, 719 bp, Zea Mays
gggtggcgcgctgtgctggctttaaaaggctataccgccgcactcctcgcgactcaaccattggatagcccaaatttcttgtcgccattgacggagggagagaaccgggtgggagagttcgctgccggtctggggtggcgaagaagcttgtctgtggcgcatcaccggactccgccgcgaccttgcgctgccctctactcgaccgcttccgggctctgcgcccttttactctgctcggcgccctattccttgagtcaacggttcatcgccgaccaacgccgcaccgtgagctaagcttctgcgcgccatcaccttcggtgagaattctacccctcggttcaccatcgttgccgtagtgtgtagcacagtttacatcgaggattggggtagtggtcggtgttttcgctctcaccagttatggcgccgccgcggctgaaatcacgtcaccatggtaggagttgggggatagaagaaggctaggcgtcgtcagtttagcagtcaacggtgcagatctatctagggtgtagccttccgcgggtgggcgatctggtccattagatcataaatggacagccgcgatgtgatcctgacgttttaaatccaaaccgtcgaggtccgatctcgcggctgtgattgcataccggttcagggataatcgatctaatctggggcgtccagatctaatcctgtggccgaggatgctccataccccttcggcc

SEQ ID NO: 155877 - DNA, 820 bp, Zea Mays
cactagggtcgaccctctcttagtcttgaccacaatgtcatcaacgtatacctctaccctgtccctaatcaggtcaccaaaggtcttactcatcgcccgtacaaatgtcggcaaggcatcgtaaggcattacaacataacagtaaaacccatccacaattacaaaagcggtatgcttcctatcttgcctagacatttggatctgatggaaaccagagtaagcatctaggaaggacaggaggtcgcacctaatggtagaatccatgatttgatctattcatggaagtggatatgggtccttgggacaggccttattgaggttggtgtagtcgatgcacatccgaagcttcccgttagccttgggaacaatgactggattggccagccatacagggtgatggacctcttcgatgaagccaacgcgcagcagcttctggacctcctcacggatgaaatccttccgctcaatggactgtctccgaggcttctaactcaccggtttggcgtcagggtggatcttcatatggtgctcgatcacctccctggggatcctaggcatctgagacgtttcccatgcgaatacgttggcatttacctggaggaaggcgacgagcgcgatttcctatttctcctccagattgcccacgatgcgagtggtctgggaggaatccacgccgacctggatggtcttaacgggaccgccgtctgctctagatggttgcaccttaggcacctcggtaggcgccttggtacaggaagtcgaggggtccctccccccatcatccaggcgagcggtttctgccgccaggacgtgcaacttc

SEQ ID NO: 155878 - DNA, 1054 bp, Zea Mays
gcagggaatctcaacgtcatcccgtgcaaggacgctgacgaaccctgtaagcagcttttagccataccctggcgttgttacaccaactacggcatgggcagcctctccctcgagggctctggcgtacggacaacccctcagactctacctcggctctcagcggggatccagcgaacacaagtcaacaccaatgtgcatcatcatgtcggcttgtcggacgccaagacgtccctacttcaggcacaacaccccgcttcattgcggatgctccccttcgtatataaataaggcaacagggtcccttcaatggagacatcgagacatgaagctgaccagcagcagaacacaacacaagacgagcagcgcaccggcgaacacttagttctccactcggtctactcgaacttagatattggcacttgcctcaatcatttctagggacttggggacctcccctctcccgatgtgcttgtaaacccctactacaggcacctcgatgcgagtaatataagcctcatccccctctgctggaagtagggcctcgtgttgcccgaaccaggataaattgcttgtgtctactcgtacaccatctagagtctagccacgcgacatcatttactagtcggttaggacccccccccggtttccaaaagaccgacagttggcacgtcaggtaggggcttgtcgcgtgaaacacttccagttcccgcgcaaggctctagatggcaggtttctaccacccactcacgcttgggacagtgatcaagttcgagagtctcaagttcatgtctcttggcatcgagtatgacatggtactcctcccacctatccctcttgagcgtccaagctcccatcgccgcccttctcgtcgtaggaggcagagatggagcaatcacgatcgtgccactcatggcactccgtgcactagaggagcctccgggatggttgatggcatcgactccctctagagggatctagccagcatcaacattgcacccggagcaccaccagttgcacctacaccagcattactggcaccactgaaagtcgtcta

SEQ ID NO: 155879 - DNA, 645 bp, Zea Mays
tcattgctgacttaagccgattgctccgttagtagggtatagtggtcaccctaagtcgagtaagcgtgagcatgttgcaccgtcttaagtcattgtcgacttaagccgattgctccgttagtagggtatagtggtcaccctaagtcgagtaagtgcgagcatgttgcaccgtcttaagtcattgccgacttaagccgattgctccgttagtagggtatagtggccaccctaagtcgagtaagtgtgttgattccaagtctagtcgaagtcaattgataaccaatagtgtgaatgcctttgagaaggaaatcttttattgatgacgtattttccaattacagagtacaacattgctctgatagctttttgagtcttgctaaggataaaacttcctgaggtgctccatgttccatgagttccccacttccgtgccatccatttgagtaagccgatatgatcctggccgagtgacctccgacaccacgaatggcccctcccatagcagcaacaatttgtgccgaccttctctcgttagaattcggcgaaggaccaagtctcccattacgaaggatcgatgtcctatagccttatcatgatagcgcctcagggtctgctggtatctagctgactaaaatactgtattca

SEQ ID NO: 155880 - DNA, 709 bp, Zea Mays
gctcctgctgctgaggaggttcccgtgcctgatttcactgacgccgaccccaatgggtgtgctccatctgctgctgatcccaatgggtgtgccccatccgatgctgatcccaatgggtgtgccccatccgatgctgatcccaatgggtgtgctgcttatgttgttgatgaaaacgacagggaggaagaagatgaggtccctctgacccggaagaacagtcggcagtatattgccagtggggagagtagcggagttccttctcctactttgtcagccctcgttggcctacaggagttatctctggcaaactttgatcagaccctggacgatatggttccagaggaccttttgttagagccagcggatgatggtgtgatggaggtttgtgctgatgtgcttgatgctgggttgaggtcatcccgcgcctcatcgaccttagagcgcggtcttgaaggccaggagactgatttggatcgtctcggtcccatggaagcaactgaggggccttcagccttagaggtggccactgcagagaactcagctctcaaggatggtgttgacgcttacccagcccccgagggtgttgccgagggtgactcggcccgggtgggaagtgcaagccactgtccagcccccgagggtactgccggagatgatccggctcgcgtgggtagcgcaaactatggcccagcccccgagagtgtccgag

SEQ ID NO: 155881 - DNA, 874 bp, Zea Mays
ttgaaaagaactactcttgaaaatttaagccccatctttgaagttgttgcatatgtactatttttttaaaacctttccttgctgaattaataatgagatctgtatgtttcttgcatgtttgtcatgtattcttccacgcaacagtatttgtttcgttcttttttgtgtggggtggggggggggggggggctctttacgcttaaatatgttgaacatgaaattctatttaatttccagcatacactggcctaccacgtctaccttgcttgctcctggcctgctaggtgctggacatgaacaatgcatttatatgcaggaaggcaatacatatgtctgagacatagaaatttgctatttgagagacagtagccgaaccttttatgcacagtttcggtgtagccattttgtcttagtaacctgcaacataacctggaaatctaggttgccttgttaaccgagggcaacgtgtatatatagttttttgtgtacattgttgccttagtgtgagttatttcagcaaaaaagtttgactggtttcttacttttgtccgtgaagttaaatttctgtttaacacttcagatcgatatatagatgtgtttgtgctgccttttatatgtcctagatacattgaccaactacctgtttatctgctaccttattagtatctttaaacaatgcaaatacagctcctgtgttgttttgtctcatttcctctgaattttttttttatattcagtggggctgctgcaagccgctttcccaatgattgattaccttgcctagtagtagagcaaagtgtgagatcgccacactgctttgcagactttatcaagtgctcctcagtgtcccaacatgctggtaggccgccgtact

SEQ ID NO: 155882 - DNA, 628 bp, Zea Mays
caacatgctcacgcttacctaagttggggtgaccactataccctgctaacagagcaatcggcttaagtcggcaacgacttaagacggtgcaacatgctcacgcttacctaactcggggtgaccactataccctgctaacggagcaatcggcttaagtcggcaacgacttaagacggtgcaacatgctcacgcttacctaacttggggtgaccactataccctgctaacggagcaatcggcttaagtcagcaacgacttaagacggtgcaacatgctcacgcttacctaactcggggtgaccactataccctgctaacgcagcaatcggcttaggtcggcaacaacttaagacgatgcaacatgctcgcgcttacttaactcggggtgaccactataccctaccaatggagcaatcggcttaagtcgacaaggacttaaggcggtgcgacatgctcgcacttacttaattcggggtgatcactataccctataacgggacaatcggtcgaagtcgttaatgactaaaatcggctcggtaccctcacgcctacttagtccaacaccagcacgtttgcaactactcatcctaaggcgacctctatgctccacgaagaaatttcaaaaccat

SEQ ID NO: 155883 - DNA, 293 bp, Zea Mays
cccagattagagggttataaatctgaaccggtattcaacaatagccgctggatcctatatctacggctcggatccaaaataaccgagatcgaatcgtatccataggattgcagatctacggtccacgcgtaagggtacccctgatctaatcatggccgttcgtgaacagatcagcggcacaaacaccatctccctcccccgcggcgaacaacggcgaacagagccgcggcgcccgaccaccctccggcgaggacaaccaccgaccccagagcgccatcctcaatcataaccgc

SEQ ID NO: 155884 - DNA, 396 bp, Zea Mays
cgtgaactcgccaccgcgatcggttcgaagagttcccagcttcgttcctaccttagattgcgccagtgcctgaaaggatatgaaggcccttatggtttggtccttcgtcaacatcagagtcacccatataaaccggcttagagtcacccacagatccctgactcagccacggtattattcactaatgcagaaatgtaaacaaacaagctatgacgctgcaactaactaacagtaggcactggtatgggaaaatggtgaatgaaagtatagctgaacaagctgatgactagaattgtgactgatatctgggccgacattgcgactcaatctcaggcatagtctcagtcttacggactcacaaaacctaacatgccggtagcagccacattatcacac

SEQ ID NO: 155885 - DNA, 1003 bp, Zea Mays
ctaatgcttcacgccaagtaatgaagcatgaagtcaactatccaacgcatgatttggagcttggcgctattgttcatgcattaaaaatttggaggcactatctactaggaaatgtgtgcaacatcttcaccaatcacaaaagcctaaagtacatcttcactcaaccagatcttaatatgaggcaacgcatgtgggggatggatatcccctgggtccaaatgaggcatattctctacatgggtcgactgactgactcaggcccgaggccaacggactgaacaaacttggcgcacaagacaagaactctattgtaatctaaaccgtctaggagatatataaggaaactgacttataacccaagccacattggattatataaggcgagctagggatccctctcaaggcacgtcttaggggatctaatcttatacacgcccccgctctctcatcaaacatccaaaccctagccctcgttgtaaacctccagatatcaaagcaatacaacccaccacaaacatgatgtagggtattatgcatctcgcagcccgaacctatataaatcgtgtgttttgtcgcatctcaaagcgaaccatcgagcaacagttgatgttgccgactcacaaaagcataccatggtacaccccgtggtgcattgccggtactaaacatcgacagttggcgcgccaggtaggggaggtgacatcgacattagctagctccatggatcatcttcaacaacaaacaagttcaagacggagcagatccaatatactaccaagccgtcgccaatggctgttctatcatcgtccaacagatctgctttggcacatgtgctgctgtcgcacgaggatcaacaaggcggatttcaaccaagatcccacggttcctatcggagacaagttccaccagattgaattgaagaatacagttttagaccaacgattggaatcctctgctagagtcacaagccaggagttttcataccaggctacttggtccctgc

SEQ ID NO: 155886 - DNA, 442 bp, Zea Mays
ctcagtcttctgtgcaaacgttggaatcgtttggccggtgcccttggtcgtgtgctgccgtccttgattgatgtggagcttcgtggcatccctgcccatgtgtgggagacgtctactgctgatcgtcttttgtgcccttatgcctggatacagcaagtgcatcctgatacgctggggctgttggacctgtcaagtttcagatgtctggcttggtgttctgatctgtccaagcttccttcttccagggaactctgggtagttgaaccgccgtcgggcatcgttgaagtccctcctgtgaaacgggtgttatcctatccagttgagtttcggttctcggaggttcgcgctcctgctgcgcctagtcctcccgcgtctgatggcagagatgaggacgatggtggtgactcctccaggggtcgtcggcgtcggctccgctctcctt

SEQ ID NO: 155887 - DNA, 1009 bp, Zea Mays
aaaatgttgcatcatgttgagctccaaatattttttgaattattgcacatgtttgatttggactgaatttgaaacttgatttgaatttgaattggaaaccatagagaaaataaatcgaaaagcaattagaaattccctgaaaatgggaaaaacccaattcagcccaagtcggcccagcaggcccagcctcgctcgcgcactctcagcccctgagaggcggaccccacctgtcggcgccagcccacgcgccctttctctctctctctctctccctctcgctgctctgtgggtcggcctgtcggcgccgattccctcgcgctcgcgcccattctctcccgctgcccagtggatcctttccgtcagtgttgatcgcccattcgcgaattcccctcgctgccccatggaccccacctgtctgcgtcctccgcttccctaacctctcgcccatgccccagccatggacgcggccacgaccgcgcgttctccggccacgtcctcacgcccgcaccccgctcgcccacctccccctgctcatttgcgccctcagctgagctctctcgcccctctctcgctctgcgcacgcgaccaggtagccccgccgtagctcaccgaagcccgacgtccgttctgcgaccgccgtcgagcccgcgccacgtctgttgcctcggtaagttccacctcgccgtcagctacttgagacacccctcagttcacccccagcaccctggtccgtccggtccgcgcttagctttttccccgcgcaggtcggtgttcaccgccgtcgcggttattcgacgtccggccattcggagtctcctcgagccacgccaagccaccccgagtcccgtcccgaggtgagatgtccgttcccacactcaatttctcccgattccccctggtattggccaatttgactccgccggcgatgaccattgtggttcgccgcgcccgtgtggtggccgattgttttagtccgatcccgtgcctctgtgttagcccctaatgttcc

SEQ ID NO: 155888 - DNA, 645 bp, Zea Mays
atctgaagacaaatttgtcacaagatttgaatctaatttggaattgaaatttgaagttggaaaagaagaagataaaataggaaaatataaaagaaaagaagaagcacctgcgcatgggccgactatccctaatctcgcccatttaacctttcttaactcagcataggcccaaacggatctcgctcgaccgcgcacgccagctccagtgaccacctgtcacgtgggccccactggccagccgctcgccctcaggccgcgcgctgttgtgctgtcaccgctgtgtgggccactcatgtcagctctatcctccccaacagtttctgccaatcatggcgggattgcgccgggttggcctgggagagctgtctgaccgtagatctaccagcagacgacccggattagaacttatcctaccagttcgggcaagtaatttgtgtcgtctgtttttgggcggacggttggaaatgaattatgtttattttaaatcatggccgacgatctgtgaatccacgttccctgttccataccacttctcgatctaatatgaacccatcgtttggaatccaacggtggaatcgcgcccgggggtaagcagccttgccgcatttgcaaataaatccctagaagacgtaggaactaacccgc

SEQ ID NO: 155889 - DNA, 397 bp, Zea Mays
cgtgcgcgggcgaacgccagtgcgtgctctggcgcctggcacagcgtcgagcacgaggcagcgcagagagaggtcgagttcaagcacggattggctccaaatctttgagattatggccatgatcccgttgagagatctcttcccctgacattcctttgtcgtttgtgtgtggaggcttgcaggttttgctgactggatcaagagatagagaggggagaaattgggtttgtctcactgtcgcgcacagagagaagatcccgggtttgacgtgtccagagcacgcgtcccgatgccatcttctggtatgaggtagaggggttagttaggcacatttttgtcaatggggtcattaggatttgagctagggatcaaggtgaacacgctcggtctttggctc

SEQ ID NO: 155890 - DNA, 382 bp, Zea Mays
gcggcaaatggttgagcgagtcgtcaaccgtccaggtgttgataggtcgatgctcacatcatattttgaggcgaataggctacacgatgaggttcgttgcatcccatatcgtgatttccctcagtggtacacttggcagagtggtaagggcaaagtatggcaacagaggaaatgagaaacaggtggacaagtcggtagaatagtctctgctcatccggccgagggggagcgctactatcttcgtgttctcctaaaccgcgtgactggcgccacctcctatgtggatctaaggacagttgatggtgttaccctaccgacttttcgtgaggcagcagagagaaggggactgcttgagtcggacaacacattagatgagtgtctc

SEQ ID NO: 155891 - DNA, 433 bp, Zea Mays
tctgcgaacaacggagtatccagattaagtatgcatcagtagcgcatccaagagccaatggtcaggtggaaagagccaatggaatgatactagaagcactcaggaagaaagtgttcgacaataatgaaaagcttgcaggaaagtggatcaaagagctgccatatgtggtttggagcttgagaactcaaccaagtcgagctctacatgaaataccccgttcttcatggtctatggttcggaggcagtgctacccgccgacctcaggtttggggcaccgaggctagtcttcgaaagcatagctgaagcagaaactacaaggctagaggatattgatgtgctggaggaagagcgattgaatacaataattcagttggccagataccaatagaccttgaggcgctatcatgataaagccatacgacaccgatccttt

SEQ ID NO: 155892 - DNA, 283 bp, Zea Mays
ctcacctagaacttgagcacgttcaccttgatccctagctcaaatccttaagtccccattgacaaaattgttctaaactaaccctctacaacatgtgtgaagatggcatcgagattcgtgccctagacatgtcaaatctaggatttcctctcggagttcagcagtgagacaaaccaaacttcatcactccatatctttggctccattcagcaaaacccataagcctccacacacaaacgacaaaggaatgtcaggggaagagatctctcaacgggatcatggc

SEQ ID NO: 155893 - DNA, 440 bp, Zea Mays
agagagagcggggtggggggaaacccgaagcgaggcacaagaagaggccaccgcagcgggcgggcggccaggcggcgagcgagacacctccacacgtctctcccccttccgtttcctcccgtccctgctcacacctctgtagctgcgcccgaccgaacccctcctaccccggaatcctccccccgatgcggcgccgataagggggcgagaccggcggaagagcggggaatggcggggcgcggcgagaagcggcgccggacaggaggggcccacgaggagcccgaggaggaggaccgcatctcggaccttcccgacgtgctgcgcctgcagattctgagcctgctgccgctcaaatcggccatccgcaccggcgcgctctcctcgcgctggcgccgcctctgggcgtaccgctggccggagccgtcctcggtgagcatccg

SEQ ID NO: 155894 - DNA, 1056 bp, Zea Mays
atttatcaagatgtttagcagggaattcaaaatggaggatgttgtacgaaatggaagtatccccaattgtcaaggatggctatctagactcaaggagctgtttaaatttctttttatactttgaatttgagtttaggaaacgccgtactaggggaattctagaacagttagccaactgttgaaccaaatgttcaaactacaagaataacatcctcatacctagccaaaccagccacagaaaattcacacacagttctctggtttggccagggcggcagcgccgcccataaactaaccgttggctgaaggggtacaaatacccttctgactgctcccaacggtcacttcttcttcctcctcgcgttcagttgattcagaacagaaaacagtgagctccctctcccaccattattgcccaaccacctctcaaccactccattgaattccatctacaaatctgagagaaaagggcagcaaacttcaagttcagagtagctccattgattgccaactgaaaaagagcacttggttctcgtttggcctgcggttctagggtttgttacccttggagcttgctcctagccggctaggcgtcgcccttgagcttgccaactcgtgtggcagccttgggaggtttgtaaccaccttgtgaagctaagaaatcacccctcacttcaagagttagctgtcttgacttgagaacgaggatagggcaagcctttgtggcaagcctaagcctttttgtggctttctcaacaacgtggaggtaggcaagcctttgtgatgagctgaaccacgggataaatcacttgtctcgcgtgctctgtttaccttcttgcaagttcatattgataaattagggtttgtggtcgatctatttacttacttgagtattgcctattttagctattggtctgtcatttatatacctgtagtaaggctagaaatttacccgatctaattttcactggttaaatttttaattatttcaaagtcctctgcgtaggccggcagtgccgccctctggtctgaaagaatttggagttgaatttttac

SEQ ID NO: 155895 - DNA, 841 bp, Zea Mays
gttttgcagcaggaaggacatccagtggcctatatcagtcaagctttaggtcccaagaatttgggcctctccatctatgaaaaagaatgtttagccattgttttttctgtcgagcattggtgtccataccttcaacatggtgaatttatcattcaaacagaccaccagagcctgactcatttggatgatcagaggttgtctacaccatggcagcagaaagctttaactaagctgcttgggttacaatataaaatccaatacaaacaaggtagtgagaaccgggttgctgatgccctgtccaaaagacccaatatggatcatgatatggtcattgcacaactgaatacaacatcagtatctactattacacctgattggttgctgcaggttactcaaggttatgaccaagatccggtagcccagaaaatattaactcagctagctgttggtgggcaattggcacactacacgatcactcaaggtgttattcggttcaaaggaaggatttggctgggcagtaaccaagagatgcatcagaaggtgatgtcggcattacacgatagtgtagttggaggtcattctggatttccggttacctacagaaggattaaatctaattttgcctggccaggcatgaagcgccacgtccgtgaatttgttcaagggtgtcagatctgtcaacaagctaaaccggaaagggttaagtacccaggattactattaccgcttccggttccgaaacaagcatggcaaacggttagtcttgattttatttccggacttcctccaacaagcaaaggaaattgtattctggtggttgtggacaagctatccaagtatg

SEQ ID NO: 155896 - DNA, 520 bp, Zea Mays
ttctgggcaaggggtacttattcttgatggtgacctcattcagagctcaataatcgatacacatccttctggtgccatctttcttctccacgaacaagacaggggcggcccaaggcgaggtgcttggccggatgtaacctttctctgacagctcatcaatttgctttttgagttcaaccaactctggtctggatactctataagctctcttaaagatgggggcggtgccaggaagaagctctatggcaaattcgactttccgctctggtggcatacctggtaagtcctttggaaacatatctggaaactcggacataaccttgatactctcaattgggtctgcttcactgctatcaacagccatctgataacaacttcctttctttggctcaggcgggactaactcggtcaccacttcctctcctagtggggacaccaacttgattgtcctcttatcacaactgataactgtctgatacttatctagccaattcatccctaggatgacatctattccctg

SEQ ID NO: 155897 - DNA, 744 bp, Zea Mays
gtacccacatgtgccatagttgtgaggcgaggtgaatggttttaatggcacgacggaattcagtggatttttgtgtttccactggttttgctgacagtcgattcaaggtttgtagggcgttgatcttgaactgattcatgggagtgaatataattggtgattagctttgtctaagatgagcgagtccagtttccttgtttgcccatgtggagtaagcatgtctgagatgagcgagttcaattttcttgtttgcccatgtggaaataacaaatgttatatgaattggttggtttttatacattgttagggttcctttaaggcttgtgtaaactcattagaaattcccatcatcattttctataggtttttggcacatgtggtttttgtttgacaaacaattaaattattggggttatgtcacctaattcttttgtatggtccatgttattgttatatgtaaatgccaaaattaaaaattctatgttagttcaccatggaacttggtatttgttcaataccatgttccatttctaattgaaattgcttatgtgtgcatttttagcttgtttgctcaaattgttacttgatgctctttaatctattcattgtggttgaaaatatatctgacaaccagccatctatttagtttatagttttagtccttaagcttcagagaaaatatcttctcagggatgattttagcttgaaggttcgagctttgcgggtgagtattcacgttgaggc

SEQ ID NO: 155898 - DNA, 753 bp, Zea Mays
attaccttggtggcggtgtggcataccttctgtgctttgatgaagacgacgatgtaggcgcaaatctctggtggccgcttcatcatgattaccttcttcaccaaacaccgcatcatcgagaagacgtggacgaggaggtggtggtggcggtgcttgttgttgcgtctccaacacagcaagtctgtcgacgatctcggacaatcgtcgatccagcctctcgtaagtcttgccaaggttcatgtcaatgaaggcatcatgcactaacttgtggaccgtctcctccatttgctccttcaggagcttgttgtttgcctcaagatcttggtggctaacacattcatcgaagtctgtagggatccttgcttcttcttcgtcgcctgccatcgaaacacaaaaataggaaacaaacggtgaaggttatcctaataatttcactacactatcctctcaggtggaacacaggaacacactctatcgtatcttaccaagctcttacaagtgtctaacgaaatacaaagcaaaggatggtacaatcggaggctggttcatgatacttaccaagaggtagtgaaaccacgattgcaaggtcaaatatgtattgatcagaaggtatagtatgtggagttgtaggacaggcacaatatgtatgtgaatgtggaacaaaattgagtgcagatgagcgaagttcaataaatatccaaagaacaagtcacagttgctggctaagagatgtatccgaggcgtagcacaaca

SEQ ID NO: 155899 - DNA, 345 bp, Zea Mays
tagataacgatcgagcaactgatcttagctgctgttttgctgcgtgctgatgagacagttgctgaggcaagtcggtcctccagaacgcgcggtgaactcatggaagtaacaagagtagctaagcatgggaggcagttccaagggaaacaagagggtgggctactacctctgctccattggaagagtatcgtatactcctcgaagttttgctcagttacttactgctggtgtgccggcccttttctttgctgctcatatgggggatgtgtctgtctctggtgtggtttctgtaccgtctactctgaaatgtgcaatggtatcatcaatatatttggtcgaattttg

SEQ ID NO: 155900 - DNA, 1280 bp, Zea Mays
gcagaaaggcgcccgcgcgcgcgcccgcgctggcggctttgcagaaaggacctcgggtttctggttaaatgtgaacgagttcagttactatttgtatcagtcgctgacaaattgcaccggggtccctgaggttctatttctccacaggtgaggtccctgacgtcggcagcgcgcggaggagctccggcgagcgcgtagaccggccgagcggggccatgaccggtgctcccgagcggcggacatcacatcggacttaccccgagtgtttcccctaacctaattgcacaaatggtgagctatcaagctctgtccgcgtgaaccgaatgggtggcggacagttgatcgtgttcccggtgaccagggagcccttagttcaattcaatggctcggcaagcatcgtagatgcacgagaatgcttaaacaagggagcagaggggagggactaaccggagtatggctggcgacggtgagcttggtttcacggtggcggaaatcggatttggggaaattccaaattcaagctctctggtgggaggtttgggatgcaagcgggtgcaatagctggtagagtacatggcgaagccgagggggggctcaatttatagactccgagagcggtggctctcaatttgcccacggcgagctggcggccggaggtgaagaagaagcctggcgcgcgtggttacgtgtcctagggcgtggcagtaactccggtgatcaccggacatgcaccgaatgactcaccgcgacgagagctagcgctaaggcacgtggtgtgcgacggtgacagcacgacggcggtgagagttatccgagcgaccgacggctgggaggaaagtacggcatgcttagccgtgatcgagctcgagtggaccagacgctgggatatttacttgtttgtgcttatccaaggccacggcgcacgaatcgcagcacgcaatcgatcaacggcgacggccaccggcggcgagatcttttgggcgctggcggtctgatcttcaacagagcactgtaccatggtgaacaccccattcagagcgactgacagagcaagttcaagtcacattttctctaaattttccttagcaactcatccaaggctctgcatcaaagttgtagtgctacataccagctacaactcgactatagggatgaaacttatttgagcactagatcaaggtttaattcacactcaaagtcgaccctgttacactgaaaagctgagtttcagaatgaatccagcctgacagtccaacttaggttgagattttcttcagttt

SEQ ID NO: 155901 - DNA, 317 bp, Zea Mays
tctgaagctaaatctcagtaaaggtacctataagccttgcacgctcggcagcttcttcagctcgtttggtttcttcttgagtgtcgtaagattgtttttcattctttctaataccttcattaggtatctcacggccgcccttcatccacacctcggagtaaaatttcctgcctagcgcagaagcttcggccaaagggcttttaatatcctccgttgagaaaacaaatcctggcggaactacagccttggcatgttcgtagctagctttctctaagatcgacgtggcccccatgcaccagcgaaggcgcagaaatctc

SEQ ID NO: 155902 - DNA, 526 bp, Zea Mays
ctcagctaaatgcatgtctgggagacaacggtagcctggaagtcaagccaattctagaagatctcatacgcaaggctcaacgcctggacgcagagacatccagacttatggagagagctcgcaaggagcaacctccggatcttaggacagatgagcaaggagtcctctggttcaagaaccgcctgtgtgtaccaatgggagaggcacgagaagtcctgctcaatgaagcccacaactcagcttactccatccacccagggaccaccaagatgtacctggacctcaaaaccagatactggtggaaagggatgaagaaggaaatagcacagtatgtggcccggtgtgacacctgtcagcgaacgaaggccaaacatcagaagcctgcaggcctgctacaacccctctcagtacctgaatggaagtgggaagaaatagacatggatttcgtgaccggactgccccgaacgcagaaaggaaatgattctatctgggtaataattgatcgtctcaccaaggtggcccactt

SEQ ID NO: 155903 - DNA, 495 bp, Zea Mays
tcaattttaacaaggactgactcatgaacgctactcgccttcaataattattgggctgagataacgctcatataagacctctaatcgatcaacaagacatttatttatccaaagggaatggaatgcaataatgacaaagcaaggcatcgatccgccatacattagaaagcatgatgacaccgatagatgctatcaactaatcgttttaaaaatattaaacttacttctcgctttgccactacactaccctttagtcacatgaccatcgtgagcatccttcacacgattatacgatagcgacctaagcgttgtgctacacaatgcatacatcttttctcgtcgcgagtataaccataatacggcatatacctgcacatctcactcaaatatcttacgccaccaccactacaatacaccacggcacacacacatacgtgtccccactgcattctcatgcccaattttagcacaattatttatgacaacgtttatcga

SEQ ID NO: 155904 - DNA, 581 bp, Zea Mays
gcacagcgtcggtgggctccggtcggctggatgacgaggaaacatagcggcggtggtcactggtctacactaggagggggtcaaacatggacgggacagaggggccaagaaaaggggaaactgaggtaggttcccgatgcattgtacttagacggagctaaccgtggcaatggcgacggcagtggctcagcaacgacggcggaaaggccatgagacggtggcggcgttattgcgtgctaggtgggaaaatgggtagggagagtgtgaatgaggggcggggtgcgctggtgggtctggggtcttcactttgaagctagggcgatgtgcgtgggactgggatcatggggtgtgggtggcgattatccgcgcggagcgtgcggtgtgggcgcgagcacgacggagcgggcagatgtggggagggggacgagactgatgagtgggaccagggcgttagtggactagcgcgagcgagcaggcagggagtgctgacatggtggggcccatggtgcagagggagggaaggagcgggtgggccggttgggctgaaaggccgacgtgaagggggttcctgtgcttctttc

SEQ ID NO: 155905 - DNA, 723 bp, Zea Mays
gccgaaggctcaaaaacggtatgtataataaaagtttcatgcaacgcaaagaaatgagttacaaaaaccatttatacattacataagcactaaatattacaagcatagtccagcaaatgttacagcaatgtttttacaatatctattattcttccttcaaaactttgtctgcagcttcggttagcagttgagtaacgacttcgtccaaaatgcttttggccattttaataatttctgttggttccttagcctctggcttgttcaatgactcgaggggctccgggggaggagatagttcggctgcggtagaaaacataaataagttcgaagtcacaaaaatgaaaaataaagttaaaagctattaagcaatacctattcgccttttgagttccgcagctttttcagctgccttcgttgcttcccttgcatcgtgagtatccttttcactcttttttattatttcgtgggccatccctcggccgccatttttctagatgtcagtaaagaattttccaccaactaagctcgcttcggccgaggggtccttcgtgtcatcaatagataaagtagcttcggcttgggccaaagctttcacatgatcgcaacctgacttttccaaaatagccgcaattcccctcgcacctgataaggcgcagacgtccccacggccatttaaaatctcctcaaaggcttcggcctcgtcgctaatccactcaattggcc

SEQ ID NO: 155906 - DNA, 1137 bp, Zea Mays
gggctcaaacgtaaaagtaatcaagacacagacgcaaccccgcggtggatggcgggttgataaatgtaaaagacagggtctcttttgcaaggttacaccaccaaaagggtatatcgcgatatcgtccgcccgatctagaatcaagggctctgattagaccgagccctatacgaaccagtacgtgcgcggtgtcgttggatttacatccgatggtttagatctaatgtacccgagttctaatctcgcgcatccgatccgaaatggacggctctcgctaccctaacccaaacgatacgccatttctaatctggaccgtatgccctagatccaacggtacatgatcgacgtcgtctacccggctcatggccacggcggcgccattccttgcggcaataatcccgccggcgatcgccgtcccggctattccgagcacatcacacctatttctctagcgcaaaaccaagggaatgaccgcacgaatacggaggttgggtgctcaccggcgattagggcacggaggtcccaggcgacggcgaggtgtggctctgcggtgaagatcgactccggcgacaaattcccgcggtagatcagcagttcagctccccgtatcgcccccgtgtagacccccgatggctctaggaacaccacgaccttgcccgacagcttctacggcgatggttgggaaactccacggcggcggcaattttctcccgtgcggtgcgcgacggcgtactagtggcgaggagttggggataagagaggagaggagaaaataacgcgtgcgctacctacttgtatcccgttcgggaggccgggaagtgggcgcgagctggtcaagcctccggcgaagttgcggcgacagttgcgcgtggatttggtggaagggaggagtccgacggcttgggcccacgactcagagacaggtagccagcgcgtgcggtggagagtggtaggggctcaggtatcagtgttgagcaggcaggccgcgtgggagggctaggtcaattgggccggtagcgcggatttgggcccagcacgagtttttccatttccttttcttttctttttctgttttgttttatctcctctttccaaattccaagcttcaaactaaatttaaactttgtggaacctttg

SEQ ID NO: 155907 - DNA, 941 bp, Zea Mays
gctggactcaaatacagatacgccgtgcatctcagctttgcactcgagtcagacaaatgcacaaacaacatcgctgagtatgaagcggttgtcttaggactttgcaagctgtgagctcttggagtgaccacctgcattatcaaaactgattccaaggtcgtcgccgaccagaatgaaaaaagattactccaccaaagagcctatattaatgcaatatatggccgctattcgaagcctagaaaaacaattcaaaggcttcacattacaacatattgagcggaacaagaatgaagaggctgacatactagctaaagcagcagcgaagggtgaacccttgtcatcctatgtattttatcacatagtcggcacaccagccataagaaacctaagggtctgcaaataacacaagacgaagacgggcatcagatagtcaacctgataatggccgaagactggcgggcaccaatcaccctatatcttcagggccactaccacccctctgaccatatcgaagctaaaagattaaaacacagaagcatagactttgctatagtcaacggacatctctacaaattggggataagtcaacccatgttgaaatgcataactgaagccaaaggaaaagaacttctccgtgaagtccacaggggtatacgtggatcacattcgggaccaagggcccttgctgctaaagtcatacgtcaaggcttctattggtcagcaattgtgtgcacgaccaaccgggtaacccattcgtgcgaagcatgccggaaattatcacctcgaacaagcgccccttcgcaactcacaaagcttattgcacgtacctgtccactacaacgttggggactagacatcgtcggaccactgcccacagtacaaggcaacctaaaaatcaccttcgttgtcgttgaatacttcaccaactggatcgaggacag

SEQ ID NO: 155908 - DNA, 445 bp, Zea Mays
ctaatgccaaagctttttgccgggtgcacgagctacactaccagacgaaggctagagcagatggccttcacaagaactttggctattataattttgcgtatcggaaggatacgaaggccccggttattggctatcgcaccaagtggccaaccgggtggactaatgaatggttttacatgaaagctgatgagaagaagagggaaaactcatgagtatggtaatgagtcccttgaagctgaacttcggcatgactcgacccttatgcaacatgcagttatggcccccttgccaattggccgaagtagaatttagagtggtggctgggcacatcagtactagggacttagtgcaagagtacttatcaaacagaacatatccaacttctagtggttggggaatgccgaagagaaaagaagtgggaaagaagcatgagcttgtacgactc

SEQ ID NO: 155909 - DNA, 1070 bp, Zea Mays
ttccacgcaaagtaagctaagggagcaccagcattcgagaccctgcccctcagtatcatatccagtcggctcagcaagtcctcattgggaatctatctgtttgtgacccgagtggaatcattgatgccggtatacaaattaagcagagataaactctgtctttcaaaggttgaatattcttgaagacaaagtcggcgaccacgggccgcagtagtcagacccttatccttcagcgagtagatttcagcaagtagcacattggcttcggctagctctaaaaaagtgggagactctacccaactaggcgtacgaacgtctggttgccttcttgaccgaggggggagggatttgtcgtgattctccatggtgaaccactcgagacgccatcctttaatgctgtccttgagggggatatcaaggtattccatttcctcccccgatgaagctctaaacttgtgccgccgacaagctgatgctgtcctccagccatcctgggccgacagtgatagaggtacctccagagtctgaaatggtggagaattccaagaataacctcacatagatgtacgaaaatggcaacttgaagaacggagttagggtttaagtgtgtcagattcaaatcgtagaaatcaaagagaccgcaaaaaaggagagatgggaagagcaagtccacggatgagaaaaggaacgtaaacaacggattcatgggtgtcctctgtcggaatagtgaccccgcgccagatccaccatgaatagagttcttttggcggcaaaccccaatctcaaaaaggtggaaaagatcagattcagagatgatagacatatgattaccagcgaacggaagctggatgttggggtcgatgggcgggatggtcggagcaacaacgctctgcctcttccgcttgggagccattgcaatctcttgggtggaacaagtgggctcagaaatttagaaaagcagagaagcggcagaggaaaagtgaagttagggctcagaaatcaaaaagacacgttggcacgagtataaatgggctccttgggtcgggcattacctctaaagtgccagatca

SEQ ID NO: 155910 - DNA, 647 bp, Zea Mays
caatccaccaatggagaatgcagcacaccaaaggaggaaccagggggcggctagggtttagagggaggtgggtgcagcaccttggggaggagaggagcggctgcaatggggggggagctgcaaaaatgagggaaggagggggcggctgctgctatgagggaaggggaggggcggctagggtttttgagaagaggagtgagcgatgcccccgatgcccttgatgcgaaaccgacggctcacaaccaaatcccccatccatgccccgattcagacaaatgaatactcaaatgtatcgtttaaatgagatcttcacatctgcggactccgaacttccaacggctcacaaccattttccctcatccacacaccgaagatcaacttttggtcaacaattgatttgggatattacattctaccccccttaaaaagaattcgtcctcgaattcgaccactcacagcagaacatccaaggtaccccaaatagcaccaccattcaaaacatgaatccattattggtattaatcaacacaagaacttctacctcggactaatggtataaggaagctacacaacctaacaacaagcatgaaacagcatgcaatgaagctcaaagcaagtcatagatgcaatcaacactacgatttcac

SEQ ID NO: 155911 - DNA, 728 bp, Zea Mays
attcgaattgcgcgaaatcttgcgcgaggttttgatccactttattcttcggcacactctgtaaaataataaaatcaactgtgtttaggcatcgggtaaatttttatccgagttcgactaaaccagtattgtctcagaataatgtatacgatatctagttcgtttccgtgttgcccgaaacagtcacgaaaactatccgaacgagaattagtcagaactcgtcgactacggttttcggtgcaaacaattcggctcacactcgtcaaccgtgaaatcgagtacgaggatccaaaaattgtgcatcgattcactgataaattactctagctgtggaactaggtgttcagatgttagacgtatgtttatctgattttaaacaagatcaaatcttgtttggttcgattcatgtgtatctcgtctcgatctaaatccttaagtgtaaataacagatacgaattcatctgactccagattagtcatcatatcaaatccttctccaatattttatcgaacttattttggtttgaccttttaaatatatctcaaatttaaatatcagaaccacaaatatctgagatttttcagttaaagaaattaaaaatctgaaaaaggaaaaatcttctcacgttccaatccatccaccgcagctcaagtcgttctcatctcctaccgcggcctccccttcagatttttccagccgctttctctattcctgattttcctaccgc

SEQ ID NO: 155912 - DNA, 356 bp, Zea Mays
aacccatctatggccagcgcaacacgtacattatgagcctcttcggctttctcacggtgaatagcatcaaagtgtttccatgcttcaccatcagatgcgtgcaccatcttgtcaggattgtatcgttttccatttttgtgccatgtcatctgtttcgcggattcctctgtcatgtactaacgctggatcctcagtatgaacggaaggtgccgtaggattgtcaaggggatgtcgagctgcctcttctgtccatcaccagagtctacctccatgaacctagacgatttacacttgggacagtattttgcctccgcgtattatttcctaaatagcacgcatcccttcggacaagcatg

SEQ ID NO: 155913 - DNA, 608 bp, Zea Mays
cgaaaagtgtatagggaaaagcggatcggagcatagtaccgaatacacccgagtgttttagtcatccgggaaagcttaaaaaacactcggtaaactttttgccgctgggcgaagagcctaattctagtagtggttaaaggctagctttggcgagaggtttcatgtactagtttataagactatttcaaaataatgtagataagttccattcttataaaactgattgtatctcttcaaacttttatcttctatctcttcatctctttctgctataaaactctcacgaaacttccattgacgctgacatcatggacatggacatcggtcatgtagcagggaccctggtccctgataagcagctagcggcggaaagcacaggtgacagaaaactcaactaaaatcgtagtatataatgcgcaaaaagtgaacaccgccatgatgaagcacaatcgctttccgctgcacaagttttcagtcagatatacgtccaccgaaacggagcagaacaaaaggattgaaagaattctgaggccaagaacatcatcagccgatcgagagagaaccgtctaggttcatgcataaatctggggcgaattctgcatgtcgct

SEQ ID NO: 155914 - DNA, 720 bp, Zea Mays
gaagacccgacgtggacatccatggaagtatgagaaggggagcccgctcggacaccctcgggggctgggtcgcagcccgcattgcccattggagccagatcaccactagcagcaccctcgggggctgggttgtagctcgtgctgctcactcgagccggatcattaccggcaacaccctcgggggctaggtaactgctggcgccatccttggggaccgggttctctgcagccacctctaaggctgaaagattctcagtcacctccatgggaatggagcaacctagactagcttcttgactctgaagaccgcactccaaggttgacgaggcacaagacgatgctcgggataattctaaccccacatccagaatgtcagtgcaaacgtccatcataccaccatctgttggctcggatagcagatcttcaggaaccatatcctcgagggcctgatcaaaatttgctagggacaactcttgcagaccaacgagagcagacaaagctggagaaggaatatcactactctccccactgactaggtagcgccgactgtttttccgaattaaggggatttcctcctcttcttcctcatcctcgtcaataatacgaacaacacacccagtggggtcagcatcagcagggtcacacccattgggattagcattagcagggtcacacccattgggatcagcatcatcaaggtcacacccattggggtcagcc

SEQ ID NO: 155915 - DNA, 737 bp, Zea Mays
gactggagagagcctatcatcaggtacataaaaaatgaagaacaaccggatgacaaggcagcagcggaacgcatcgcaaggcagtcagtccactacaccctcatagggggcatactgtacagaagaggtgcggcaggagtcctcatgaagtgcattcactcggctattgggaagcaactgttagatgaaattcatgtcgggcagtgcggagtacatgcagcgtccacaactctggccgggaaggctttcagatctggtttctattggccaacagtgaagagtgatgctgctgagttagtctagagatgtgaagcttgccaattcttatcaaagcaacaacatttacctgcacagcagctgcagacccttcctgtaacatggccatttgcatgctgggggctggacatgatcggacctttcaagaaagctcagggaggctatactcacgtactcgttgccattgacaaattcacaaaaatggatagagtacaagcccattgtctctttgacctcggccaaggcagtggaattcatacaagacataatattcatgtttgggataccaaatagcatcattaccgacctgggatcctacttcaccagctctgaattcttcgatttctacgagcagcggagcatccagattaaatatgcatcagtggtgcacccaagagccaatggccaagtagaaagagccaacagaatgatactggaagcactcagaaagaaggtattcg

SEQ ID NO: 155916 - DNA, 569 bp, Zea Mays
gtggaagtggaagacaccggataaagccgaatcaagaatccccaagctaggatacgccggatagcgaatatggcggaagtaaataacttggaaaaaaaggaacattggaaaaaaacttgacgaggaagctgagacgacaaagaaactgatagaaacgaagcaggtgtagaaatgggcacatggaaacctcataacatatccaccaaaacagatcggaccagtaaagagagctcgaggggaaaatatgtgtctcactaaacaatcagagcggaggagtaagacggcagtatacaaagcgtttaggctgaagcgaagtagacgagcaaggcgacgaaagacaaagcgactaagaaagaatgatacagagatgaggaaagcgaaggaagacgaagcgactagaagaggaccgagggcggagggagcgagaagcatccaaaggcaaagtgtcagatctcagatggaagtcatggcactctccagaggagatcctcgtctttttttctttgtttactcgccactgatgcagcgacatatatgatttgtaatcgaacgggggacaactttctgat

SEQ ID NO: 155917 - DNA, 689 bp, Zea Mays
ctgtgccgtctggaaccggcggacccgctcctccagctccttctccttctgctccgccttgagctcatggtcagccagcagcttctcccacctttcaaacatctcctccctgaaggcgaggtccttctcctgccaggcgagatccgtcgcccgcttatccagggaggcatcttttttccttgaggttctcctcggtcagggcaatgctactggccctgtcatctagctcccgctgcagcctttgcaggctctccacagccacggtctgttgggcccgctgctcctccaagattttgttgaaggtgtccagcttggcctggagctccgtgacgacctcctccctctggtccaggtgctcctccttcttggccagcctcttctccttctaggccacctccagctcccgggcgtacaccctttggaggtccttcttgtagtccttgcagtcccgtgccagttcggatcgctcaaaggcgaaccactgggatgccgccttggtgcgctcctccagctgggtacgccaatcgctaaggcgctggtgctcggactctagcacctcccactcccgccggaacgccgccttggtctcttgaagagcctgatgcgcacgagacaacacccaggggaggggaactggcgccgcttctggctcggcgccagatcggagccactgcccaagaactaccttt

SEQ ID NO: 155918 - DNA, 684 bp, Zea Mays
ctaccacgaagttaaggtggttgcggatcagctaaggcaattcgtaccggcaggggtgatggcggtggcgttgtcctcgatatcgggcggtacgacggtggtggaaaaggcatggcaagcaatcaacgacgtctccgtccacgatttggtctcggaaagctcttattctaagcggcgtgactaggcgatcttcgcagcactagcgtagatggtcaaacggtgtcgaccgagagtatcaacagcggtggcgcgagctctctctcaccctcggtggtttcggctgtggtggcggcgactgttttagctcgcgagcgagggaagatggggaagaggggagaaccacagaggtgctcgagcttttatccctgagtcatcggtcgaggaggaacggaaatcggccgggattctcgccgcggcggtgatttcgcgcggtggtttcggtggagaagaacgcgccgacaaggggggcccacatgccgtcgagtatgcgtcgcgaggagacaacgaagtggggcacctggcggtgcggtctcgccagtcagcgtcggtggctgttacgcgcgcgcgagccacgtgcggttgggtcgcacggaagagaggtgaggtgggccgaggcagggaattgggcccagcgcctgttttctctttttctttcttctttttctttttattttccattttctt

SEQ ID NO: 155919 - DNA, 691 bp, Zea Mays
gcgcgtcctgggagctcccacctccaggggacagggagcgcgctggcgagccttggtgatcagacatcggctgctcccgatctgcagtctcctggtgctggcgttccagcatgtagtggtccgagatggtgaagggatgctcgcagtccacgtccgaggatgctccccagtcccagcgctcgtcctcggcgaagatggcgtcacgggagacatgtactcgattggcgatggggtcgtagaagcggtacgctttggagtcgtcctggtagccgatgaagacgaccttgattccacgatcatcaagcttgctgagatgtgggcacactttcttgacgtaggccacacacccgaacaccttcaggaagtgcacgggtggcttctttgcatgccaggcttcaaacggcgttatgccatcaagagcactggtgggcgccctgttcagcaggaagacagcagtgtgtactgcttctccccagaagtgaccaggcatgttgcgggcacgcaggatgctctgcgctgtccccacgaccatctggtttcgccgttccacaacgccattctgctgtggcgtgcctggcgccgagaagtgtcgctggatgccttcccctgcataatgttcaccaaactgcacagaagtgaattcacctccattatcagttcgaagcaccttcagcttcttcccggtttcccg

SEQ ID NO: 155920 - DNA, 2723 bp, Zea Mays
gtcctaggagttcggccgctttcctccgctttccgtttcgccgccaccgtcttccgccgccctacctcgccgtcgccgacgacatgcccgaaaccgtactccgctctatctctctcagactctcccgccccctcgcatcacttcttactgacctggtgttctactccctcgcaggcggcggaggccaacctccgtaggcaactggagcaaaccctcgccgctgaaccctccagcccgctccaccactacaaccttgtaggtttcgttgtccactgcattgagcccgtggtcgcgcccgcgcttctccgttgcgcctaatcacctgctggttggtcctgccgtcctgctcgtgcagggcgtcttcctatgggaccgcgccgaggcagagcaggagggtgatggggaagaggcgcggaagctccgcgcggaagcgtcggagcattttctcgcggcggccaagctgaatcccaacgatggcgtccccttccgcttccttggccaccactatgcgcgcggcggtgacaatcaacgagcggtcaagtgctatcaccgtgccgtgaccctcaaccctgacgactctgaggctggtgtatgtgtgggaatatgtatattcatatgcccaatgtattcgtcggtttgcttgtgctggattctaatgtgttttcccctttatttctgggatatggcgcaggacacactctgtggcttgctagatgttgaagggaaggagagcttggagcttgctgtctgcaaggaggcagctggcaagtcaccgcgtgcgttctgggcttttcggagacttggctatttacaggtaacttgtatagcaatttcttgaatggactatttgttgaagcaagaatgccaatagtatgtgtcattaacagaggtcctgattggatatgttatgttaatgaatcttacggcttcattttgtatcgggtcagaatccacaggtccaaacctgtccgagcctaaacccaatgctattggttaagggaaacattggtttgcagcaattagctagatttaacatggttatgcagaatgatgaaaatactttaaatttaacctaatctaaccccttcaatatttaattttttatagcaatctcatccatttgtcatcgatgtttcttgtactttatacagaggcagtgttcacttccattaattttggcattgatgtcatgaccccacaaaacatttatgttaagttgttaatgttagtgacttttaatgattcaattctgtggctatccttttaaattagctgacagatgaaattagaatgtgcaggataacatgactcagttggtcattcactattagtatagcattattaagttaaattctggattgtactggtcttggaaatatttgagagctttatgcgtggttctagcctgagcaacatctcttatgataacttctacttgagaagttgatcgcttattttctttaaaaattggtaagggttttctgttggaaggagatactgctgctaatattttaggtgtgcaattttcttttgtttgtgataaggcattacaaaatttgtatataatgtgtattgacatgagttggtgaaaggttaggttcatcagaggaaatggtcagagggtatacaaagccttcagcatggaatacgaggttacccaacatgtgcagatttatgggaggtgggtgctcccccccctccagtttgctcttgccaaggtttcttagtgtaacttatatgtgatgtgtcttcaagttatcaattattgaatttagacattccatatttatggctacaggcacttggtctggcataccaccgtttgggcatgttcaccgcagcagtaaaggtttgctgttttcagttgtgagcatccttaataactgttgcagtgcgctgtattgagccttctcaatgtgcttaattcagtttttgccggcagtcatatggacgagctattgaacttgatagttccagggtctttgcattgatagaaagtggaaacatccagttaatgcttggttactatagaaaggtaggaagttttctgcttgcttctttaactatctatcgttctgctggtatacatgatttaatcagtcaatgctaatctaacggtgaatccattcaaaaatctatgtagcactgatctctttcattgttaaaactatttaatttctctcgaaatacacaacgccagggagtggagcagtttcgttctgctttggaaatggctccatgtaatcattcagcatactttggccttgcttctgcattgcttgcatgggcaaggaattgtgtaactactggggcctttggttgggctgctagcctgttgaaggtactttgatctgatagtagctttttaaatatcattgaataaaccatagctgtatagctttaccatatagtttgttttctcataggaagcttcagaagcttccagaatttgtacttctttgactggaaacctttcatgcgtctggaaattgcatggagatgttcaggtatttgatatttcatcatttaagtctccttgtcatctacttataagtgaagagttgcaatattatattctactatataccttgcctgtttggtgtcagctcacacttgcgagatgctttccatgggtggatgggaaaatcaaaagggtcatggatgcacagatgttcaaaaattctgttcaagagtggagaaatacatgtttgttagcagcaatt

SEQ ID NO: 155921 - DNA, 278 bp, Zea Mays
ctcttttgtagacaatcgggacttggtgcagctgatggggcatcaaaactgaaccatagcggtggggctcttttgtagacaatcgggacttggtgcagctgaaccagatggcagcattgggtcaagacttccccagctattggtgtagcatatttcttggttttttcacttatctttgtagagaccttctaattactaatagggttgtacatgcccttaatgataaatggcattgacggagttgtctaattactaatagggttgtacatgcccttaat

SEQ ID NO: 155922 - DNA, 511 bp, Zea Mays
atggatgaagattgtgataaataaatggatgacagtaagacctatcgtgacaacgaaagttctgataccagatgatatgtaccaagttatattcggtactggggtggcccgatcttcacgacagtaggttgataaataggatggttgggtagaaaagtaactgaataacaaggtaaaattgctgaagaacaataggtaactgactttatacctgatcaaggtcggaggtgaccaagtgatggggagagagacactgaaaccgtgtagactttgactcgatctccgaacgaccgcagaaccacaaccggagctaatccacacaatgcgaggcaaccgtactggaactcacaaggcacgaactagtggatcccagagggatctcttcacaagtctaggagaacaaggaagaacaggggtagagtaaaaactcggcagctcggctgtggtaatcacttggattatcaaattatcaaaggttatcaaaacgttatcctacatcatagacataggg

SEQ ID NO: 155923 - DNA, 537 bp, Zea Mays
ggttgagttccatgggtaggattatgattggtggtcgaaaccaattgacctaaaggcgacatgtgctatcacagaaagacaagcccatgtacggtgagagtttctaacttatggccatgtgcttgcgattgtactgaagctatggttcaatattgtaggttgggtataattattcattgattgactctagggagatgaggtgacaaggacgacaatctataccatcatccttataggtgtctcattctcacgactcagcctaggacatggagatttctaggatgcacgaagttataaggcaataggcggagtagcagaggcagcaacctgaggaccaaagggagaaggatgagtactatgcgaacctctaggctcagcagcaggctttcctctcggcaagttgaagtaatatgatttacaagtacaaacttgtttcattttgtgcttcctcaaaagttacttgcatctaatttgtagcaattggcacaaccaataggtgtctagatgccaacctttgggatgtcagctatggcaccg

SEQ ID NO: 155924 - DNA, 682 bp, Zea Mays
ggctgaagtatacattcaggtttggggataagttcgatgaaccaaacgatgactggctgaagtgtatcgaagctacaagtgatgaactgcttggagcatattccaaggcagaagataatgcactgtccgcacccttcggaggtcggggaaagaagagactgaatagagtttttgacgccattggcatcgtttaccccgactaccgctatccgctgcggggacaggggaaaaagaggaaagctgctactttggacaccccagttgggcttgtgccgaagggaaaaaagctgaaggttctgactcaccggccgcgttacatcgaaccagccgtgattcctgaatttggcgaaggggcctcttcggcttccgaaacaaaagaaactgttccgcctgcgcagaacactggagagccggccataatgctgaagttactttcagttaagctagttgaggcgatggctgataaggctgaggggtcaaaaattggagaaattacaaaaatgctagagattttgagcccttcaacagaggcaacagtgccgaaggcacaaaagagttctgccacaactcctaagaggagaaggatggtgaatgtgctagatgttgtgttagaaacaacaaaaaccttgagttctactccttcaagaaaaattgcagaagcttcgaaagcgctacccgaagc

SEQ ID NO: 155925 - DNA, 523 bp, Zea Mays
ctcgggtcgtcgctgccagatccttggcgctcggccgcggcgaagtggtctggagagagaaaagagagaagggagagaaccggtgatgaagaagacgcccgacatcacttgatcatgcgttggacggtaaggattaaagggataaggatgaagaaaccgggaccgtaggatggtgattggagggggtagatttatctcgcgtacccgccgttcatcacgaatcgcacggctttgattagaagcaggaaataccccttcatcccaaccgttatccaccgtagaccggcaatctgacgactaaagcgaaatagtggggatcgtgcgctgtgagtcgtcgatctcagatccgacgatgactcgggaatcaggatttatacccatcgccggtctaatctgggcgctcggggttggatcggacggtccaaacatcactgtaccccttcggccctgcacatttccttaagagcccctcgggtttcagtgaatcaacccgccgtccagtgagcgctgttcactgtgtctg

SEQ ID NO: 155926 - DNA, 596 bp, Zea Mays
tacactaaagatcatcacctagaacttcacatagaaccaaatatcagagcatcgaagataaaaatgtgggttttctcaagaacaccaaactggttagatctttgagatcgtgaaaagatagacaaaatcactccatagaagtgctccacatgttttattgctcaagttgttccaaccaaaacttttctaaaaacatagattcaacagatctcacaaaaatccaaagaacaagagaccaggagatcaaagaacggtaaaaaacacaacaaacaagacacaacctttagccaccatgaacctaggaggttagggcctccattcccatgagattcaactcgttacaaggtctctcattactcaagttgttccaaccaaaacttttctaaaaacatagattcaacagatctcacaaaaatccaaagaacaagagactaggagatcaaagaacgatacaaaacacgacaaacaagacacaatctttagccaccatgaacctaggaggttagggcctccattcccacgagattcaactcgttacaaggtctctcattactcaagttgttgcaaccaaaacctttctaaaaacatagattcaa

SEQ ID NO: 155927 - DNA, 352 bp, Zea Mays
ccgaatgatagcgctcgagcctcatgatgctcgcgttatccgccataaagaatacgagatagccaggcgaccccgggaacgcttggtttaccgccgcctggtgactccttcctaagaaagccaccactagctgacccttccttggcctataaaaggaagaggttggtccttagaccaagagggacctagaaggatggaccccaagtgagaagacgcccaaacgaaacgacgaacaggaggacgcaccgacgaggatccagaggccagagccctgccgccaagcgaagactagctaggactccactttgtaaccacctccaccacgaataagagacatgggagcgtcccctcc

SEQ ID NO: 155928 - DNA, 843 bp, Zea Mays
cacacatggtggatggggtgaaccgagaatgacaacctatctgtcgacggacatggtggatggccgcactgacctggaattgctgcgccaaacaattcgtttttttagaaagttcatatggtaaactattgaagggggtaaattaaggttggtgcttattttgttaacttgtctctggtttagcaagtaaattatacatcagagtactgaagattttctaattactaaaaactactggcgaggaagataaaaatagagccctctatttattttgttcatcgatcacttggcataatcatgcattgacttcccaaatgatttttaaggagggttttggagacgttctgagtgtatgcatatatagagatagattcggtggaatttagcttttaaactgctacgtggtgcttgcaaaaaaaacaaaagaaaacaaaaatggcatgtcctggagctcaggtacatgaacttttacattcttctttgaaaaaacaaacacaacgtgaataagtgtctgatgtgaaaccagacgtactctaatacatgcaggattgtacgtaggacgtggtagaagtttggtcaataatatgctactagaacgagcagcagcaacccagattaaaggaaatacatatacgtgggtggtgcttgttcgtcactttagtaaaacagggtattttcgacggttaaagccatcagacataagttattttcgacggacggtcgtaggcttatgttcgacggtacccgtccctctgtcataaagggtcaaaaatactcttatttccgacggtggccattggacataagctatgtctgacgacacctttcggccatcggcgttta

SEQ ID NO: 155929 - DNA, 661 bp, Zea Mays
ttcaccttcgcttagtcccttgaagcccttttgttgctatcttcaccctatcaagttgttcttgagtcacatcatattgagcatccattgagagaatcatttcttcaatattgttgtcggtaccctggattaggggtaccccttaccacggtataaaggcatgatgcctgcgcagctacccttaaccgcgcagagaacaaccccaggggtatctcgtgagcagttaaggtggcgttcccggaggcaacgtcgtcggacccagaaggcacgggacccctgtacgcacaacccggacccccgaagtaaagcagcccggagcccttcggatagggttcgaaccccaccaagtaagctccggaccacccgtaacaaagaacccgggaggggaagtgtcgtgacctaggcatgggttcggtattgacgcgtgtctaggctctatccagagcacctccactccccactcggccaagggtctaatactgccacatggcttattgtccgtgacgtaggccggcgggtggtgcatgatgtgagggctctgggccgcgcgatctccgcatttattgcggagaggacgcgccgcctatccgcccttctaacgggcgatgtgcccccacaacatttattgtgtcctgtccattccactggcagacggcgccag

SEQ ID NO: 155930 - DNA, 380 bp, Zea Mays
aaacggcgactagagggggtgaatgggagcccaataaaatttctcgatgcaagcagaaccaaatatcaccctaaacaagcaacggaaataactaactataaaataaggaagtagaacacaaatgatatgtataggtgtttaattaaataattaacacaaataatctcggctgaccatgcatataaactaattaataagctagaccaattaaccaaccagagtcattaaatataactagtgacagagacaaataagtaaaataagtaaacaagtaagcagtcacgaggctaatgattgaacactattttctgaaagtgacacctgatgaaaattaaaatgaattacttgctcttggtgtatcgtggatcacaatagttggc

SEQ ID NO: 155931 - DNA, 669 bp, Zea Mays
ccactaccacccatatagcatccctgccccgaggagaacgaggtaagccaaccacaaaatccatggtgatatgctcccacttccactccagaatttccaatggtttcaataaacctgcaggcctcttatgctcggccttcacgcgctgacatacttcataggcgaccacatacttagaaacgtcaaccttcatcctcttccaccagaagttttgcttcaaatctctgtacattttggttttgcctgggtgaacggtgtacgacattttatgagcttctctcaagatgtccatcttcacctctgatttctgaggcacacaaagacggcccctgaaatgaaccaaatcattctcatcaatggtgaactcacggggtttactatcgccgaccctcttttgagcttcctgcaacaaacgatcctgctgctgagccacgcacactctctccagaagggaggattgaatgagcatccgagtcccctctctagcggtgccgacatagcacaaagcgacccccatacggtccagatctgcgatcaaaggcaaggccacttttggaaccccgaacctgctaagggcatcagccaccacatttgcctttcccaggtgataatgaatggatagatcataatcctttatcaactcaagccaccgacactgcctcaaattca

SEQ ID NO: 155932 - DNA, 674 bp, Zea Mays
cctttcgttcgcctccctgccttggccgacgcccctgtctctgtctcttcctctaccagccccacgccggttctcattccgaggccggcggccactgcactttcttccccggcgtcggccgctgctgccgcttctcctctcccctgccctggcgggcgttcgaaggcctagcgttggagtgacgagggtggccattcttcggtggtttctctggttcgcggcgcgtccaggcgttcctacagggaggtgttgctggctgctgatgttctagcctctggtggcaccaccgatgtggttgatggcgatggttggataagagtggaaggtcgccggactcgacgtgccactgctggaactttgaagcccctgccaagacctatcccagtcgacttgcgcgggaaatgcttcaattgcttctcctcttcccatcgtgctgctgcgtgccagagtttagttcgctgcttctcctgccgacggcctggtcatcgggcgctctcgtgcccttcccggcggtcgcccctgtccccctctcgacctgctcgggtgtggcgcccagtcagtaggggggccgcttctctgtctggacgtgcctaggtgtggcgtccggtctccagggagtcctcttcggtgtcggctcctcttggtgcaatggaggcagtccttcctggtgggct

SEQ ID NO: 155933 - DNA, 734 bp, Zea Mays
ttcagaaacatgttgagcgcttgctcaatgcaaaaatacgtatcttccaatccgactggggaggcgagtatcaacgtctctctcgtcatcttgcctccaccggcattcagcatagagtcacttgtcctcatacttcccaacaaaatggtattgctgaacgtaaatatcgccatatagtcgaaactggtcttgctcttcttgcccactcctctctaccggtcaaattttgggatgaggctttcattactgcttgttatttaatcaatcgtatgcccacacgtacacttcataattccactcccttagaacttatattccatgaaaaacctgaatattctcttcttcgtgtttttggttgtgcctgctggcctaacctccgtccatataacaatcacaagctatccttccgctccaagcaatgcgtttttctcggctatagttctatgcacaagggctacaaatgtttagatcgttctaatggacgcatctatatttctcgtgatgttgtttttgatgaacatctgtttcctttcgcatcttctaatccttcttgtgagccggatgcttatgttgatcatatgagaaattatagacctgaattattggcttctaatctgtctgtcgagtgttctcctgtgtctgtttcagatgcatcgtcttcggattcttcaaatcacgcatcggcgccctcatctcgattggatataattccagctgcagtatgcactccaata

SEQ ID NO: 155934 - DNA, 545 bp, Zea Mays
ctgcacccgctccaacagcaggccttcctgccgacgcagtaccaacagcagcaggcgcagtaccaacaacagcagcagccggcgcagtaccagcccatggtgggttctccgctctgggaccagaattctctggcctccacgttcagcaccgtcaccctcactctgtcggtgaacaacgactggtaccttgatacaggtgcctcttcccacatgacccccatgatggtaccctctctcattcctcaacccctcggtatccctctcccacctccattgttgttggtaatggttcgctcctgcctatcaccgccaccggctcgacgcaccttagctctcttgttctaaataatgttcttatttcgcctcagcttatcaagaatcttatttctatttgccaattcactattgataacaattgttctgtggagtttgacccgtatggttgttctgtgaaggatcttctctcgcggaacgtgatcatcaggtgcaatagctccggtccgctctacccgctgcagctgcccgtcgttcactcccttgatgcc

SEQ ID NO: 155935 - DNA, 501 bp, Zea Mays
atgtcatgcacctggcgcgccggtttctgtgtgcggagaaggcgaaccaacgcgtgaagagcgcgccaccgcctgcggtagtgcgcctcttcgcactcgccgaagccgacaacccaatctctggcatgagggcctgggcccacgagtcatcctccttgggcgccggttcctgcgtacagagaagtcgaaccgccgctcgcaccaataccgcgcctcctcggggctgccgcagaagacagagaaggtgaaatttcaaaatcaatgcagtggtactgaggcaccccgcgcgtggcccagtaaaaccatcaagtgcggaggtcaccggccagttagccgcgggaacaggcgtggcggttgacgtgactgaaggcagactgacagtaattatgtcagcaagcgcacggaaatggcgcgccaatcgccgatcaagctttggcccgacctgcaggctcgtaccctcccctgaggcgggcccgggggccactgtcggtaccctggaac

SEQ ID NO: 155936 - DNA, 509 bp, Zea Mays
ctggtgagccgcgacgacgctggctacgcacggcggcgaccgcgccggcgagcgccctagccgagcacaatcccccaaattagggcgcgctaaacattgtctagaatagtatgggtactagggaagattgcataccgagtttaatgcggagcagagcgctaatcgcgaaagcttggggcgtgcggcgatcctggtgctccgtcgtcaaattcccgggcggctggtgccttccgtgcacgagaagacacacaattgcaatccccgcacgacgaccaactcgccgaggtcacactcgaacccagaccgccggtgatacccaatttcgggtgcggcggccgcgctctgtcctggacacggcgttggcggtggtgaattgggtcacggcggtcgcgcaagagagtttttgagggaaggaaggagtagggggtgctcctatttatccccgtggaccccgctcgggataggagaggaccacccacgatttcgacgaaggcggcgacccgtgcgtg

SEQ ID NO: 155937 - DNA, 622 bp, Zea Mays
agtccagataaaaagggcacccttctttagcagagcatggaggggttggcaaataataccgaagtggtgaacgaatttcctataatacccggccagacctagaaaactgtggagatcctttacacaggaaggagttggccaatcctcaatagcacaaattttagtgggatctgtggcgacaccggcagcgctgacaatgtgacccaagtatgaaacctgacgttgagcaaaatggcatttagacattttcaccttccattggtcttggtccaagagagtgaagacttgttccaaatggcaaaggtgatcctcctatgaagaactatagaccaatatgtcatcgaagaaaaccaggacacacttccacaataatggagaaagggtgtgattcatggcacgttgaaatgccccgggagcacccgtgaggccaaaggctatgacgctgaactcataatgccccaaatgagtctagaatgcggttttatgttcttcaccatccttgagtaatatctgatgaaaatcgactcttaagtccaaaatagaaaaccatgaagcgccaaataattcatccaaaagctcatcaattaccggcacaagatattttcccttgactgtcaaagca

SEQ ID NO: 155938 - DNA, 572 bp, Zea Mays
gctaaatcaagaaattaagttaacaaaaatgaagggaaaacatggtgttcctttggcttagctagattgttaacagatttggcttggcctttctggtgggttcctttccttgtgactagtcaagaataaaccaatatcaatatgaatttatttcctgcattgcactattcccaaataaagctagtccaattttgtttcgaaaagaaaagaggtttgctttagaatcaacaactatcgttttatgtcgtacaactgatggggcatggccatgtgcatgaaaaggctggcataaagtgactggtcgttggatttttcacaaatgttatgagaccaataatgctgataaggaccattagcactaaaaagcaatttgagagaagcctaaaaactaagaaatctagcaatcagccaataagaaaaactataaaaaaagatacattatactagccaagagcttgatttcataacatgatgtttcaacttatggccatatgcactttaattatctttatttagaagaatcctgtatctactatgacatatttgctgcattactggaagtatctgcatgt

SEQ ID NO: 155939 - DNA, 321 bp, Zea Mays
ccacgccgttagccacggatttacttgtgccagtgctttcttccacctccggccgtcaggcgtcttactcaaaattcgcggccaccgcccgctagtactataaattgagtgcaccatcagcttcgttatgtattcgagcatctagcgcacccttctgcacctcaaatcctccaccagaaagcttcaatttgggatttcccccaaaacactcaggaactccgcacagctagacctcatcgtggtcagcccgattcaggtccaatctcaccctcggtttccttgtttcaacatccttgcttgctcttgatgctcaccgacccg

SEQ ID NO: 155940 - DNA, 629 bp, Zea Mays
ggagctagtactgagcgtggccaaggtgtcgttgtcgttgtcgtagaagctggtggagctggaggcgagcgattcagggtcgtcggagtcgtcagtgttgaacacagaggtagtggcggcgagctgtggacccgcgccgacggaggaggaatgcacctcaacatcggtcgtgctccagttcatcatcctcgttaggagcaacaacgacgcgtccagcacgggcgaggacgacgatgacatcacgttgtcgagcaagaaggcaatgcataccgtagcagtcagaagacaaaaatcaaaggtggagctaacgatgggctgacaaacggggggatgcggtgggagaaggaagggagatagaggtggggccgtaggagggtggcatgatctgttgcggcggcatgggtggggtagcggcgggaggtgagagacaccacgaagcattggaggagagatgcggtggcggagtcggggtgggacttggaagaagatagaagaggctagaagcgtcgcgttgctgggagccatccaaacgtcgagccagttgtcgttcgatgaaaatcgaattgtgtttaatgaaactgacgacgtggacgaatctggtgggagctttgcgcccacggttaatatat

SEQ ID NO: 155941 - DNA, 812 bp, Zea Mays
gtcaaaactccaaataggtaactgactcgatgcctctcttgtaatacactgcgcctcctttgcatataaaatgatggttggggatcctcctagggaaatatcacaccaaaagacatttgatatcagagaatacaaccaccacccaaaacaggacgtagggtattatctcatatcgagagcccaaatttgcataaatctgcatgtctccatgcctttaccttcaagtttcgaccatgtgacctaccccatataattactatagaaaaacttcaacaagaagataacaaagaaataagttttcaaggtggtgttagagtaactctaaggggagttggacctaaactagggcaaaccctagtaagagtattcatagaggcatcaagatgggaatcatactaagaaaagaacagggtgtcaaaccatgcgatgacactgttcatgcttagaaggagtgttgaaccatctattggagtattgaggttggtagaaaggttctaaaaggaaaataggggcgttggactggttggatgaagcgtgtcagactatacattacataagtgtgccccaatggttgctaacggctagctctaagatagtagttgttgttagccattggaccctgacaaaagggtcgaaaggatactcgtcgatgatcagtagtgtatagaaggtcctagccgaggtataatggctatactcccctccaatcgaccaaaacaagtatgttggagtgctataagaatgtagaagtcttgagatacttcaccaaatgttgtaaccaccatatatgcttaagagaagattagatgatt

SEQ ID NO: 155942 - DNA, 369 bp, Zea Mays
tttcaacacagagtagctaggcagcataatccgtaggtgtatatgcatgcttcggtaacaacaataataccgcatctatatagctaattggtcacggttcctaattactagcctcccatttcttatcattcgtaattaagtagtggtggttaaggacagctatacatggaagtatggaactgcagagggatgtgagttgtgagagatggctaggaactggccctacattattagataagcacagagacatattctatgccatgcttatgttgggtttgccatcataatcagcaccaccttactaatccttactagtgatcaaatcaagctcacaaatctattatacaacagcaaccttgcatatcatcc

SEQ ID NO: 155943 - DNA, 544 bp, Zea Mays
tgtttttccatgaatgaatttgttatgaaggaatgagatgctccagaatcaaataaaactgatgcaggtatggagttaataagaaatataccatacaccacgtcggcatcctcaggaactgattccgctgtcacatggttgactcttcctctactctggttctgcggagtcttgttctgtgcagatccatgagcaggtgtgttctggtcattcctctggttgttgttcttctagggtgtctatgggttcgcctggagcagttgttggcatagtggccaagttcgccacacttgaaacaaccattgggttgaactggggtagttgcattgttgttcttggccggtgtgttcacggcgcttccctgacgattctgctgttgcccactagacctttggtcagtctgggtgttgcttctctactggttctggtattgattgttcctctgactttgttgtccagagcgttgtgcttgatagttgttgttcccactctggtttccggagcgaaactgggaaccttgggagttgttttgccgggtatttct

SEQ ID NO: 155944 - DNA, 601 bp, Zea Mays
cagacgcgtgtccgaggcggcgtcgcctctcccatggcggagccatcgcctgacttccctaaatttgaactccgagcaaactactcgagccctaaacgagctacgcgcagaggaggagaatgcggacacgtgaggggggtacctttcgggcagaaacggcaggtacatagccggtcgcggtaggaggcggaccacggggaaggagtaagtccggtgagcaattcatagtgccccaagggcccttccggccaatcgatgtcatgtcgatactccacgtggccaggcaaccctctattgcctcccatcgatggcgggacattagtaggacgcagggagcaccgcagcggatccatggcggtcactcggatagggtgcccggtcttcgttgttgaaggcggtgaggcgatggtcaaaggggaggtcacgacccggactttatagcgcggtgtccatgtaggttccgaagtcagcgctgaattggggggaattggttggaggagctcgaggtgcgcgcccgtctgttgcgaatggcgcagcggagaaggagctgaccttgcggccccactaaacggtgagcgagtgcggcagcaggtaactgacc

SEQ ID NO: 155945 - DNA, 461 bp, Zea Mays
gaatatgttactgaaggtgttgtgaaggtgcctgaaaagtttgggttcaatcggagcaattttgagtggtttgggcatttcaccgagcatgtggcgtgcagtggattagggtttcggtgaaatgatcaattaaggctgtgaaaccctcactaaggagatagtaacctgcaagggatacaatggagcacaagggcacacaactatgcatatgattcacaagatttacacaagaatttgaatcgagcacaagaggtggaatgaatgccataacaaccctggacacacacacagagagagagagagagagaggagatggaggcagagctgctcaccagaggggagaagaagcaagcaccgggtgatcgccggagcacaatggtcgacggtgagggaagatcgccggcgaggggaggaaatcgcttgagagagctagaggccagagagcagaggagagaaaaggc

SEQ ID NO: 155946 - DNA, 536 bp, Zea Mays
gtcgatgggttgattcagcggttcctagggggttctttaataaaaagccaacaccgaagggatatcctcgagtgccatctgttggatgctaatctactggttgggattagatcttggctcaccgaaccagtaaggagtcgtggtcgttggttcccagatcatcggcccactagtcatctactggggccacaatttattgcgccaaacgatacctttactatgattgtgaccatacgcgatcggttcaacggtctctatccaccctgtgaaacggtttgtcatcttctaatcttggcccttcatcacggagccaacgacacgcgcaccgcaggctcccttccctcacaccgatcgacatcgcacgacggcacgcaatagccaacagcagtgccaaagctggtgagcagtgctccccggcccaggtgcacctatccctacgctggtaggtgtagaagattgaggagatccatacgaacacaacaggggatgacttactggcggttacgtgatgccggcaccagcccacggggaaacac

SEQ ID NO: 155947 - DNA, 570 bp, Zea Mays
aattcttggcattcttaatctggcattcagtctttcgcacgatgctcccaaatggaaaaagctccaacaaacaccatacacagggaagtctaaatagtcggctagaactgctatttagctattaaaaaatccatcaatccagggtttacaaaggtgagggtaatcgtcatagtcgaacccaccagatgccgcaaaaaatagtgccagcgatgtccaggtaagcaagaatagtacctaagactaccaggaaaaacatgcgaaaccaccaagaatgaagcgctaacccatgattcccacagcggagatgggattgtcgcttcaccccgcagtggtgtcatcatcctgttgcttgcggcgtggcccaaacaaaatccggtatgggatggtgaccgtagcctgcagcagatatcaagagcattggcgtcgaagaagctgaagaagcaaattgcgcgaaagaaatcaaaggtaaagcgaagaggatttctcacctattcctcgcttgctacagcaagcgcgtgtcgcagcacccgatggcgtctgcacaaaagggagaagtccagcgatggagaa

SEQ ID NO: 155948 - DNA, 945 bp, Zea Mays
gctgccggtcataacacctatctagattcctacaaggattcatgacaggacaacatagttaaatcatttaccttctctctcccttgtggaatgaatgtggggaagaacacaagggtgacaaaaaggataaacaagaggaagcatgatgtatgttaacttcttccatcatagcaaattgtctcttacaatgtataccttcaggtcaacttctatgcacacgaaggtcataccttcatgtcaactgccatgtgtacgaaggtcatactgaaggcgagaaacatgtgggtctccgagcgtctgggtccctctgtacatggacattgtggacttatttataggggcgtgacgacgcataccttcgtataaaattacatcattaccctcagttcgtatacacatgatctacagaaacgagcaagggcactctcataagagacatgtcatacacaccaactctatcaccttcatctccatatcatcgcgaacacccttcgatacttcattttagacaatgacgaagctattgcttcttgccttggtttatggagatcttctagacaaaggtcaattcgttaaaccttcatcatagacttgatgaaggtctattcgttataccttcatcatagacttaatgaaggtctagaattcatcagattgaggaccttcggcagaggcacaccctccaacaacctcgtctgccccacgccaaagcacgggtctaagactccataccagtcacggtcgttctcgtctcaccccttgtaggttgagttttttaaaggggactttctacttggagtctattgaagcatcaagtacatgatgcaccaatgttggcagatttactagggcagaaaattgatctaattggaagatgtttaagtagtcactggcaatggtgtgaactataaggcagctgataagcttattatggaaagaattata

SEQ ID NO: 155949 - DNA, 460 bp, Zea Mays
tggagaggtctgatgacctgcgggcagaactcaaccctaggcgtgtgggcgaggatgcccgagtctctctggagagggcgcgtgagcgccgacagaacatcgagggtcgcaacctcgaccgcgacttcgctgcagttgcaccgcaaactgcaacgggcgcctggatccaggcgggtgtcccattggccggcgtgggctgcgccgcactggcggatcatctctgtgcggcgacttggccatccaagttccggccacacctgctagagaagtacgaaggtatgtcaaatccgtcagaattcttgcagttatacgtcaccgctattgcggcagcaggtggagacactgctgtaatggcaacatacttccatgtagccttgtctaggccgacccggacctggctcatgaacctcaccccaggatcgatctactcctaggaagagctctatgcgcggttcactgc

SEQ ID NO: 155950 - DNA, 465 bp, Zea Mays
cattggtagagtttgcttataacaacagctaccaggctagcatcaagatggcaccatttgaggctttatatggcaggcagtgtatctcccctctgtgctgggagactttgggagagagatccctggttggtcctgattgggttcagcagacttctgagaaggttcgggaaattcgtcagaatattttggccgctcatagccgtcagaagagttatgctgatgtgaggaggcgggacttggaatttgcagtgggtgaccaagtcctcctcagggtatcacctactaaaggagttgttcggttcggtgtctccagaaaactcggtccgagatatattggaccgttcactatcttggctcgagtgggcagcctggcttatcgcttgcaattgccggattccatggcaggggtacacccggtgtttcatatctctatgttgaggaagttcttgtgggatccggaccatc

SEQ ID NO: 155951 - DNA, 988 bp, Zea Mays
cacacatacactgaggcgcagcagggaactgcaattctgttccgtggccaccggcggaaatacaggaggcttcttgtcgtctaactgttgttcgtttcttcccctgacggatctttcttctttcctccgatccggccctgcatactgcattgctccagcaccaccagtcaccagtacgtctgctgccatcgtgctgagacgtatagtagctcgtagtacgcccacattgacgacaacgacgcatgcaactgaccctgccccccctctcgtgttctcgtcatatgcatgcatgcatgccactcgatcgatggatggagagcttcgttctcatctgacgatcatggacaagccatatagcccatatgcatggtcgttctagggcaaatactatagatgactagagagagagagagagaacacgaaagagccagtaggtgctagctagttgaatgtgcttgaatgcgtttatatggccgagtaactgcatttgaatgcctcatgagcagggaggatggaagatatatatagatatataaccatatctccgtctaaaaagtatacgattctagaatatacaataatactaagttaaaatattttaagtttaactaatttcatagaaaaaattaatatcgatatttatgatatcaaatagttattgttgttgtgttatttgtcatgtgatatatttcaataatatatctatctatttagtgtcacaaaaatcattctttctatatatttatagtcaaagactcaaagtttagatgcatgcttttgaacaaaaaatatgtctaaaatcatattcttttttaaggtgaagttagtaagcattatatattatacactacacacacaacgtatggacggttcgtcatcgtcatcactctataggaccaagggccccctgtctgcaccctggccactatatatctagctagcctccctcgtatattaatgtgttacttaactgtgccgtgacttctcc

SEQ ID NO: 155952 - DNA, 698 bp, Zea Mays
caagatgccaagaaaaagaaaaaaaacttcttatttatttacatagtcgaactacccaatgacatcgcgaaaatcgattcactatgggtatcttgccctcaagatcataggcctcaagggcgtcatcacgattatagggattgagtagagtcaatgacagtagtggagaaaatgtttgcatgaccatggaagaggcgacaacaaggcttccatgcgaggaccccctaacctcgtggctcggagatctgcacctcgggcccctcaatcagttccaaagccctataaccttttcaaagcccccctaggaggcttttaggtggaccttgcacctcaaggtagacaaggcttgatgtagttcccaccaaagttgtgaagatcgaagatagtgtcttccagacggcacacattgacgagaatctaggggttgaataataactcgcactcatcgccatcctctgagagcatgttagtgtatttgcttgggaaccatcaggcatgcttggggtcctagagagacaattgagaatcgcttggccattcgccctgacacctgattgatacgacaaaagcatcgaaagcacataaagacaaaaaaacttgtatagagattgagaaacttctccacaccagcttcatccacagggtctaaaaccttgtgtggttggcctggccaacaccctcgtcatcctaaaggctag

SEQ ID NO: 155953 - DNA, 737 bp, Zea Mays
ggagtatgtcaccgattgggaatccagtgatcactatgactttgtgatcgtcgaaatagtgacacaactttcgtgcagtgcggaggacatcatacaacaacttctgaacttgagggtaactgatcttggacagtctgaggacctcgctgatgaagtatactagatattgagttggttgtacatgcccttcatcctttcgctcgactactaatgcggtgctaaccacgtcagtcgtacacgaaatatacggtaatagttcctcgcccggtagatctatagtagcttagttgggtggcttgacgactggtagagtcattagcaactccttgatggcttcaaatgcttcatatgcctatgaggtccactggaatatgtccaccatttttagtaacttgtagaatggcatgccctttcactgagttgtgagatgaagcggctcagagctaccaagcagcctgttagcttatgaaccttcttctatgattctagaggttccatccacaagatagtatcaatcttctaagggtttgcctcaatccctcggtcactaacgatgaagccgagcagcttccctgctggtactctgaacacacacttgtccgggttaagtttccaggggtagcacctcaagctgttgaaaacttgtaggtcatcgttgaagttctctagatccttcattttgatcataacattttcgacgtaggcctccacacgcttgccccaatggttgtccaaac

SEQ ID NO: 155954 - DNA, 407 bp, Zea Mays
aaagctcaggaatcgagatgggatccaatctagctgtgaccgaggtcacaactggattgtaatcagcatcaaggccattgcagatatgcgccaccagttcttcatcatctagggccttgccgacagcagccatttcatctgcaaaacctttcatcttggcaacataatctgtgatcaacatggtacctttcttcgtagtggcgagggcaagcctcacattcattgtcttggcgcgagtctgcgcagagtacattttctccacggccgaccatgcttgtgccgccgtctgggcagcgacgatctgcgcctgaacttccttcccaacgtttgagagaatgagcccgaggatctgttgatcccgagcataccatgtctcaaacgtagggttcggattggtgacggccgtg

SEQ ID NO: 155955 - DNA, 598 bp, Zea Mays
acacgaaggggtatcgaaggatctcaaccgcacgatcacgcactcgcggttgagattagaccttgaaccagctctcaaccacgcccctccgatctacatcaacggtcaagattttatttggccgagatcagcacgcatccgtccgatctcgcgtcaacggttgggatacaatacgtaaaggggtatttctacctctaatcgtggtcgttcgctacacgatcgatgaccgagggccgtccttcttccttgctctgttctcctctacccaacggcgcatcccgctgccagaggactactccggtgacggccatcgagctcgatactacaccataatgcaattacgtggtactacacgcacacactgcaaaggcgattaggtcggaagctcatttaccaggaattaggtgacggttgtggctgcccacgctacgcgtgaccacccggctggaaccgaatgacgacgacgaattgtcgccgagctgttgatcccccgaacctccggttgctaccacgacgtgagcaaatccgcggcgaacacccagagcacgacaccgacgcccaagccttgcccaaacccaggatggcagagaggccctcc

SEQ ID NO: 155956 - DNA, 941 bp, Zea Mays
acattgatcgtgggccgcaccctcacatctcagcccacttaccaattatcccctgcgcaacccatcttctccttcgctgtcgcgcatgctctcgccgacagggcgggcccgcacgccagtcaccactctcgcacactaatgcggctcagctcgcctggtggccgcgcgtatcactgcctctgccatatgggaccgcctagtcatttgcttctcccagccaccaccacgaccgaatcgcaacagaagaatccgagtcctcgccgcggtcttcgccggccgcgcgctggcataaccacctccccgaaagtcgtgggcatcatctgggtgtcgattggtccatccctcgatacatataagccctagctgctgccctgggtctcttcaattcaccggaacagagagaaattgggggaaatactagcacggtgcttgggtcgtcgtcgatgtccgtcctgcgccttattccagtttgtggggctggctaggaaactccatggtggcactggggatcgatctacgtcaagcgcctgcggggagacgatcctgtgccagcgtaatttgttgttgccatcccttgacgccgtggattcactgtgcactgcggttcgccacttcgtcacctccatctgtggtgaggccctatccatcctcttcgggttattgccctctgcgtttaacttaagaaccgtaggttatcgcgggtcggggcgctgcaattcgtcgctgtggttggtgctcgactgcatacccgctgtgccccgtggccagctatgtcgcaactccttctcggtgagtcgtcacctcctggttgttccttatcctctgccctacgtgtagctcgcttccagtgggtggattagatgcctgggcgtcgaatcggctgctcgccggtgggattccgccgtcggaatatcctagcgccgccgtgctcagccagctgg

SEQ ID NO: 155957 - DNA, 529 bp, Zea Mays
cggtagcttatgtcatgggccataagcagcgggtctctgcctgagcgggaagcggaggcgaggcccgcacacgtgtcagcgccggacccctgcacacaccagggtcctcctcgctccgggaccctgttggagttcggacttacccggaggctccggactcgtatataggggtctggtgttctttcgtgggggtccggccttaccggggtgtggtgtctttccctgccacgtggcgtccattggcctgcccatccggcggggtcaggcgcagtcctccgcgcggttaggggacattgcatgggtgcgatgccttcatgctgcaggagagggtacccctgatttagggtaccgacagtggctcccggtcccgcctcaggggaggatgcgagcttgcacgcaggaccagagtctgattggtggttagaccgctacttccgagcgcctgctactgcaattactgccggcccgcctatgaccacgccaactgccgtgcctattcccacggctgactgacccatgaccgtcgtac

SEQ ID NO: 155958 - DNA, 780 bp, Zea Mays
ccagatgccaagaaagatgcagtcaaccaagtccagagatgtgaagcctatcaattcttggccaagcaacatcatctgctagcacaacaattgtagactattccagtcacttggccctttgcatgatgggggctagacatggtcgagacattcaagaaagctcagggaggatatacacatgtgttggtagctattgacaagttcacaaaatggatagagtacaagacaatagccactctgacctcgaccaaggtggtagagttcatcttggagattatcttcgggttggtatacccaacaacatcatcacaggtctgggttcaaacttcaccagtgccgaattcttcgacttttgtgaataaaagtgcatccagctcaagtatgcttcggtagcgcatcctagggccaatgggcagatagaaagagcaaatggaaggatactagaagcacgaaaaaagagggtctttgataaaaacaagaagtttgcagggaaatggatcagggaactaccctatgtggtttggagcttacgaactcaacctagccaagcttggcatggaaatacccccttcttcatggtgtatgggtcgaaagtagttttgctagcagaccttacttttggggcacccaggctaaccttcaaaagtagaagcagaagcagaagcaacccggctcaaagaaattgatgtactagaagaggaatggctaaacgtcgttattcagtcagccagataccagcagaccctgaggcactaccacaacaagtgatacgtcaccgag

SEQ ID NO: 155959 - DNA, 418 bp, Zea Mays
gaagaacctgcaaggatcgagcttgatcacatgcatgcatgaccgagtggtaaggtcagaaaccaagcagaaggttgcaaaaatcttttataagatttaagcaagttttcaatgtgttcataaaagagggaaatgtcaaaatccaagaccatgcttaatttataagataacttgaagcaaaaatgaccacaaaaagggtaagcatgaaccaattagtactgccctcctcctagtcaagttctaacgtctttcctcatcaaacatggttacatattcaatctccatggcacgtaaaaggaacatatgagattgtccgtatcagcaggcacaacttgcagatcatctgtaatggcatgtctcgtccttcctcttaaaaatatcatcatctttggcttccggccttgtttgtctccattgg

SEQ ID NO: 155960 - DNA, 447 bp, Zea Mays
gcaaaatgctcatgatgtttttgtctatctatttaaacaatgtttccctactgttttcatgtcccaattaatagttgatcattaagataggattaaggttattggaaccctatttgagataattagaagatggtagactttaataaaagttggagcacctaagtttatggacttaaacacctaagtttagagacttaaaatcatataatgatttaaccccaccactgacttaaacctgattagtggatagtgagtcactttgtgtagtccactaccctagacctaaggaaccccagtgtgccaatccttttctattatgaacttgtgatccctctgctgcatatgtttggtatgttgctttttgtttgttattttcccaagtacatagtgtgaatgattactttacgtagacaacgagcagtctgtgtttcccgaggaggttgcaga

SEQ ID NO: 155961 - DNA, 534 bp, Zea Mays
ccggcccctggtcgcggaccgtccgcgcctatgcagcgagcaccgccgccggttctcaagcagtgattggcgccccaaaaagacaccaacatcgtgtcgtaccaacaaatttatgcatggctactacatgttgcaccgggatatgcttatcgatcgtggcttatttgtaagtcctgagcagagacgacgaaagatcgccaaaacgataagtctctctcacaattcttctcatgcatgcacatcgagtgcaggtagataactatacacatcagccagcatagggttaattagttccttctttttgcgactgtcacagtacagatagacatgcacgtatccactcttgaacgtctccgaaagaatacatccaattgtaagtctgaaaccaaaatcaccaaaaatgcttattcatggtgcgaattggccaagttaagcgtctagcaagttcacctactctatcgccaccctctgctattgtttctgtacctgtggtgaatatattgattacacagttgattttttgatattgtaaac

SEQ ID NO: 155962 - DNA, 459 bp, Zea Mays
ggataacttgcccttaactttgaatcttctcattccatgaattggtgacaccttgaggtacacgtggtcaccctcctcaaattccagtggtcttctccggttatcagcatagctcttctgtcaccggcagaggtgtcgcgtggaggtcagaccgcggtggggagcttcacgacacgaactcccggctctggtgaacaattcccgctgtgctatggcctcggaggcgccaatcctgcctcctcttggatccacacacccggccaaaagtgccagagcacccgctagaggacgtatggtggaggaaattccccccggcgtgcacccagcaacttccccctctcttcaaatggcgcgcgcggagtggagcatttgggcaatggcacgggacttggcattcctgagcgcgcccgaggcttccccccttctatttacaggcgacggctgcagtggctgagctgg

SEQ ID NO: 155963 - DNA, 811 bp, Zea Mays
tggtgaggggtcttcatggtgcatgtctgcgatttcttgctcaaatgctctttctttctcctcttcatccatgatcagttgtctcactctggcctacatgttggtttgttgcctcttgactgcgaggatctccctttgcttttgaaggtggttgtttttatgcatagggctcgcagtttgagctggtcatctgctgagattcctaggtcttcaccatcttgcaggttatcttcgaccccttgggttgggaggtgtgctacgggaacaaatctcggtggtgtgtcatcatgagagaggcctttggagctgcatgtgtggacgctgccttctggggtaggcgggtcttcagtatgagggtgcttgttgttgactacccctgtctcattatttttagttattgtgggtagggtgtcttctgcaagggttgctttgcctttcttgtcgacgagtgtcacctttgtggtctcgtccagggaggagctagccctagtggtcactttcttaggtgccattgcgggtgttgatttttggagcacgaacggtgggcgccagatgttggaccttctgaaacatggataagtgggcccaaacactcgataactgacagggctgaagtgcacaacaaaacgataggtagggaaatgtagcgtcttgttatgtgtgttccatcaatgcatataacatgggtatttataggtaactaggcgggtacgtggtcctaagtaccattatgcccccggttacctgctacactcctagaatattccccacaatggggtcattagagcatatccaacaatgtctcaaattg

SEQ ID NO: 155964 - DNA, 819 bp, Zea Mays
tactacataacacactactagcttattcaatcagaatcacaatctataagtaactcatgatcagagtcatccatcgcgcaatcctcaatgacaacctcgttccacttgttgcattgtcctgcatcacaccttttcgcctttctcttataataactagtttatgcttcatctgcaccttgggagaatagctggtcctcagcctcaacctcatcacacttatgcttgtaataagcggcctctacttcttcgatggcctgagacataaacttgtcctcctcctcttgtgcatgtaatcctgtcttagctagtgcgatgagctcagtcaaccttgatgtgtcgtcctcctcttccccatgtaatcctgcctcagcgagcgcgataagctcactcaaccttgatgtgtcctcctcctccatcagctccaccatagccattttttcctgaacgtatcttgcacgagcctcatctgcgagatagttcatggcacatgcaatctctgcaaatataatgggacaaataagtttgcaaagacaacatgccctttttctcactcacttcgactcacacgaccagcaagattccctaacatctgtttctcagctctagccgcctcccattctcttgcatcatgtgctctcttctcatttgccaccttcaatctcctccgctcagcacacatcgggttgtcaaaccacattgatttcgcgaacctacgcatctgctgtctgcgatctttaatgtatgaattgatgagctgagatccacaacgcatcttctgtcccattagtttcttggactttattgtatgcaccacctctt

SEQ ID NO: 155965 - DNA, 461 bp, Zea Mays
gtagcaaaatttgtctaagtctatgacatctttgtaatgatgtagcacgccacgaacttctcaagcaatgtacaaccaaaattctcgagttctttcgcaagtacatatatttcatgaacttgttcaactatagaatgaccatcaatcatttagtagtcatggtattgctccatgacacacaacttattactgacgttaaacaccccttatttggcttctattccatcccatgttttgacatcatcacgtatgagtctactatagaatctcctagcatgctaattattgccctttgaacacatgcaatattagcatcctggaacatacaatcctcttcggtagtgtgtggtccaggtgatttaggttcgataacaaaatagcaatgcatgattgtcaatcgtaatatgcatctttgacaccaccttttatagtgtatacccttaaaaacctttggttttaac

SEQ ID NO: 155966 - DNA, 327 bp, Zea Mays
gtcgcgatcgtgatggtgagtagacggagttgtagtcgaggatgagggcgagggttgtgcagtgaggcatgcccggccaatggcggacggatagggggggcaaagtggaccatgcaccctcaaattttaaaatcccttatacctaatgttaagtatagaaaaaatggatgggccaaaacagtcccgtatgtctgggtttactcatcggatcgtctcaaacgctcagttctcctgactctcatcctcagtttcgatctagtcctcacatctatctatccaactctattcttttcgttatcacccgacgccgccaccttcctagctcca

SEQ ID NO: 155967 - DNA, 582 bp, Zea Mays
aacgagttattttgatgcgatggattgctgttagctatatgtgtttaggagatgttggctaggatgcatgtatttgagcgttgcaatttcaatatatttttatgtgaatataagagttaactggcagtacaatttgtgtgatgatagtctcctgatgctttcaactatgtagtttggttggtgttggggctcaatattagtaaactacatatactatagaagttggacaatgttcttttgctgctccagtaaatacaactacaaacccatgttgtgtaagataacactattattgccagttactctgagtgctgattatttaacctggcgcatgtttattggttaggcagaaaacagttggcacttggcaggatgtaccttaatggatagttaggccacacaattgatttctggagaacataagacattttaaccattatatttactaatcccactccttgtttcctgagcaagaggaactcattaattatttgatttatttcattgtgattgtcctgctacatccatatgcttgtacattgctttatgttgctatgtcaaaaattcaaaattacgtttctc

SEQ ID NO: 155968 - DNA, 616 bp, Zea Mays
caataattaggcatgctttatgaattgatcaatagtaatttcaagcataaatttatgaaagcaggaagtggcgttagcaagcaataatactatgaaatttgaacaacctgctttacatttgtgatatcttgttaaggggcattagcaaacaataatactatgaagtttgaatggcctgctttacatttgcgataccttgttcaggttgaagctgaagtattggttgtcaagggtgatgatgtggcagaaactatttcaggtgttgtcttagcatgccaaattcacaagctttttgttggtgtctcttctcatagcaactttataaggtactcaaaacttgtccagtactaattaattatgaactgcatacacgaaaagttgctaatttggtgaaatggcttaggaagttcaagggcactaggatgttctctcgaatatgcaagtgtgttccaagcttttgtatggtgtatgctatttcaaaaggtgggttgtccatggtttattctcttggatcagaaagtgacaacagttctaagatactccaggtcaacgagagttctaacagtgaactttattcagataagtcatcagtatcaggtaaagtctatggaattta

SEQ ID NO: 155969 - DNA, 347 bp, Zea Mays
tgtggtctgaatgatgtgctcggtgggtgcaagatttatcatggttggggcagaatgtccctacatacagtcttcggtggctcgcgctagcggcacctttgttgcgcaatgctcgtagtaggggttacaagcggacgagagaggaaggagctcccaagtctcttatgcgtggctagacctaaagactacggggctggtgccctctactaagccttggatgtcgctatggctcgctccttggctccggcctccgggtcttctagtctcgtcgttcgtgtgtttgtatgtccgtcctcctattcttgcatggctctctgtcgtctcgtatccctcttctcatggctgac

SEQ ID NO: 155970 - DNA, 781 bp, Zea Mays
ggagaacggtgggcgccgctggtggcgctcggtggattggtggcgacaccgcgttaatcaaggtattggcgcttccactactttcgtattgtttgtcttcgcgtctggttccgatgaatcgatgggtgggtcgctgggagctccggcgtgcacacgggacactcagggcaatggagccgccgcggcgcaccgtgtgccgagtcttgcactcgacgtcggccaaaattagttgtagaatgaggctcggggagtcttcaattgcacgtgggacgagtgaatcgggttatggcgttcgtatgggccgggtttgtgagctccggcgtgtgcgccgccgtgcggtgtcctgcacctcgtgtgccagcgtcgaaggaaggtgaaggtcctctaaccgtcgattgaggagaggacggcgccgattagaatgggataccctttcggggtgtggaatcccgaccgttgggatgtaatccaagggccagtagcggatcgtggatcttaaaaccgtagtcgtagatcctcaatccgagggcggtcattgtgtactggttgatgatacctagatctaatcgtggcccttgattcgcgatcgggcggccagaaaccgtgcataccccttcgcgggtacattttataaaagagaccctggggtttcacctattcaacccgccgtcctgatacgcgtaaaggaattataaaacaggcccagaagtttgcgcagagcaccctaggcttagttaaaatagtgtccacagtccagaatccttgggaaactcagatttta

SEQ ID NO: 155971 - DNA, 696 bp, Zea Mays
cgcgaatataggtctgggcaagtaatacccagcgggtttttatccgttgccatctctaagtcgaagtacccttcgcatttgcattcctaactccgtgtaatggttggcacgttaacgttttaaacaaaaactccgactcgaacgggcccaggcccatcgagcggtccacgtaaaaggaagcctgcgctgcagcctgcagcaagcacacatgcaatcactgttctatagaggaaataaacagcaacagctgcagcccactgtactactagcacatgtctctcttggtgctttgcatacgacagttttccctagatacaacaatattcagaggcgcagttttgacaattagcctcctctgctcacaagataaatctgtcaaactacaagcctcgaagcaaatgaaaccaacactatccaagaaagcaaccgtgaccagtccaaagaaaagcaggaaacaggccagatagtggtactgcaatgcaaagaacggaaaagcaggaaacacatgcacgattcacgcccagttcctgccgcaggaccatctgctactgtggacaacacaggacctgaccccgcatggggaggaaaagataaactgtggacaacacaggacaggaccataactccataagcttcagattgtggaatcagattgagatccaaaatagatgaatgcacaaaaaagattccgaaaag

SEQ ID NO: 155972 - DNA, 294 bp, Zea Mays
gtcaaacggttcacgcggtcacgccatgccgagaagctcggcggcagctgcgccaaccgtgtgcgagtgaaggtcgaggaaatagctgacagcaagcccccacccattagtgagaatgagaggcaggtgtggtaccggctgacaggtaggtcccacgtgacagagactatatgcgcgcagaacggtggagtccaccagtcagtgaaagagcaaggcgtgcgacgcggtggtgtgactgacttgttgggcccacttgtcggcgcccgcagggtggaggagtggactggcgccgct

SEQ ID NO: 155973 - DNA, 346 bp, Zea Mays
ctagtcttcattgaggaccttctcggcagcctcgtttaacagcttgttgacagcttcgtcaacaacttcattggcaattctaatagtctcgagcgcttccttcaggaatgggtcgacttctgggtcgtatggctttggagggggagatagttcagttgcaccgtagtatatgtttgttagttctgaagctaaaacagattacgaagctaaaccacaacaaatgcatacctataagtctagcccgctcgacagcttcttcaacccttcttgcctcttctgaagcatcatgagtttccttttcttttcttctgatggctcatcggcgacttctcgtccgcccttcagc

SEQ ID NO: 155974 - DNA, 578 bp, Zea Mays
gaaagtttcaaattctccaagctcaacagcaagacaagcatcagagggttcaatcttttgggtttcctcccaaggggtcaaacctcagcaagccagcaggatctgctccaccacgtttcaactagcctggtcagagttccttccacacctagtccgttgcaagcagccaacctctagccaatgcttgttggcactgtggtcaccccggtcacttcaagaataattgtccatacctaaaggcaaccacacctgcctactccaactcggtgaatggccccaagaacgttacagcacccacctccaaggcaacctccaccaacagtaagttaagcaagtcacagttccacgatagggctcgagtaaaccacgtcgacgcccaggaagttcagcaagcccctggagtagtactcggtgagtttctagtcattacccctgctgtagtactttttgattctagagcatctcattccttcatcgctactagttttgtggaaaggcatggcatccccactacaccattagaagtccctctgatcacccggaccccagggccagacattctgtttcacctcaggtgc

SEQ ID NO: 155975 - DNA, 697 bp, Zea Mays
tgattttccagtcggacatgcgcgcacaggaccccgtcggcggctgctaccacctcatcctcagcctcgagcgccagctccagattgagatggccgagcactccgccatggtccaaagactggcgctcttccgccaggctgctaccacgatgccaccggatcaaggcggcggcacggttggcctcgactacaccgcgtcatccaagcagccgctcttccacaacgctcagcaagaggtggtttacgcactctacaagaacaaccacggtggaggccacggccccaacaaggatgatcacggcgggcaacaacaccaggtctttgactattacataaacctcgacaacatgcaacagttccattttaatgatagctgtgccgccgtcgacaaagtggatctgactccggcgggggctgacgaaatgagacatcatcagcacttcgacgagaactgccagattgaccacaaggattatttcgagattaaagcggccgcactcgtcgacgacgcgtttgacatgcgacaggaggtggtggacgtgtgcgccgaggttgacatggacaccaagacggtggatgtgaatgccggcatcggcggcgtcgatatcaaggcgatgggcatgaacgccaacgtcgatgtcaatgtctccacaccacaaatggcagctgagtcatcgcactgcagactagggctagg

SEQ ID NO: 155976 - DNA, 571 bp, Zea Mays
gagccttttttccaatttttcaatcatgggcacccaaagactcttatttatcttcttattatcaattggcaccccaagatatttcatagaaatacaaccaataggacaagtgaagatatcaacatacaaatagtcaatttccttagcatttccgaaacacaaaatttcacttttgttaaagttaattttcaaccccaacatgctttcaaacaaacacaatatgaatttaagatttctggcaccttctaaacaatcttgaataagaaaaatggtaccatcagcatattgtaagcaacatcaaccattgtgaatgatatgaggaatcagacccactatcagaccctcaacttgagctttatgaatcatgcacactaatccatcagcaaccaaattgaacaagagaggagataaaggatcccccttgcctaacccctttatgagtagtgaagtaaggccccaaagtatcattagttttaatggcaactttgccaccacgcccaattctcattacccaatcacaccaagtactcccaaaaccttttttccatcatggtatagaagaaatgccaat

SEQ ID NO: 155977 - DNA, 322 bp, Zea Mays
cagcattctactggtagccgagcctgggcgaaatccaagattggccaacaatccaacatgatccatcggacaaacacaatcgaacgacgacgtagtatactatctaccactaggtggggagcagaatcctggcgttcagtctatcgtaatgtgctttcgcagtgggtgattcagtctaatattgtggcaccccgagcaagcattatgcccacgcgctgacgctgatgaggatgcgaaacccgaacgccgacgatcgccgtgatcctgtcggccagcaaggcgagagctcagagtgagggcgcaaacgccgccgcatatgaag

SEQ ID NO: 155978 - DNA, 514 bp, Zea Mays
tgaagcgagagagtattaatgttacgtactttgtggttgtgggtagaaaagcgacaatgacgtatcagacaccctgactctaccgttgtctctgtgccgtcgttgaatgtaggactcatcaaacagccagctgatggtgatgtatcgtttcgtatatttatagcagcactgtagatcctagctgggacgacgtggatgatgccggccgagtgtgcgtgcgtgagagcacacatatatacgatttgacttggcgtggtgtacctgtgtatactactccacctctccattctagaacgtcgtggtatgtataatgtatggcgtctcttggtcgtcgtcgtcgtcgtcatatcatgcacgtatgtgtaggtgggcggtgaccgccgccggccagcgaggtgagcattcaaagggtcgacggcgacacggtgcagtgcagcataccgacggccacacgcgctcaacctacagctatctagcggctggtccaactctactcgaccctaccagctggcag

SEQ ID NO: 155979 - DNA, 999 bp, Zea Mays
cgcacgactgcacaatatttgcccattgtgtcggtcgagcagtcccaatctttgtttgtttgacttatgactaccagtgaatcgccttacaccattagcttcttgatgccgagtgataccgcgatgcccaacccgtggaccagtccttcgtactctgctgcattattggatgctggaaacaaaagctggagtgcgtacttgagttgttcacctctgggagcaacaaagagaatccctgccccagctccttggagcttcagcgagctatcaaagtacattctccatacttcagcaacctctgggctttccggggcctagtgctcagtccattctgatatgaagtcaaccaatgcctgagtctttatcgccatgcgaggtcggaactctatgtcatgagccccgagctcacatgcccacttggctacccttccaatagcttctttgttgtgaagaatatctcctatcggaaatcctgtgactactatgagtttatggtcgtcaaagtagtgctggagcttgcgagcagttagaagtaccgcgtacaacagcttttggactctaggataccttatctttgagggtccttggactttgttgatgaagtaaactggatgttgtaccgggtatgcatgtccctcctctgcctgcttgactactaacgcagtgcttaccacgtgagtcgtgcaagagatatataggagcaaatcttctgccggctgaccgagcgtagctcgacatggtggcttgagtactggcggagtggtcaagaacttcttcagtgcctctagagcctcctgtgcttctgtggtccactaaaacttgtccaccttcttgagtaatttatagaatggcattcctttctcgcctagccttgatatgaacctgctcagcgctgccatgcatccagtgagcctttgcacctttttatgcgactgcgacgcttccattctcatgatggcctcgatcttcttcggatttgcttaaattcctcgttgactg

SEQ ID NO: 155980 - DNA, 410 bp, Zea Mays
gtgaaatctgtctgtctgtcaagtctgtttgaaatagctcatctgatctaatctaccaggatgccttgtcatgtaggttctgatggcggatttcttcatggctaaccagctaaccagccaggtaaattatgctcagccgtactctaggcatgcatggagagctagccattgtacttattatgttgcggctcaaaatgtcttgttttgcagatcccactgctaagacacctcgagttcacggggtgctacttcatggctgaaactttcagaactcacgcgtatggaagctgtaccagcagctcccaattcaagaacctgacatacgtgctctctttcctgccatactactggtgagcaatgcaggtagactgacattgaacgaatctagcagatttatctactcatcagac

SEQ ID NO: 155981 - DNA, 432 bp, Zea Mays
gcaaggtcatcatccgagcaccagacatcgtgccaaaaggaggtgatgttcccatcatggacgtcataggtggtgatagcacaatatagggggagcaaggattgtggagtagtccagtgggcgcttgggaggttgccggaaagatttgccaggcaaatacgagggcggacccaagcaccccaagaggagtaggatgaggtgtgtaggcggtgaagcaacttaaggtggaggcagttgttgaacagctcaaggtcacggacaccaaggcccccatattttttggcctcgagaaccatgtcccaagaaacatggcagcaagatccaccagtgttgtctttgcccgaccaaaggaagtcgtggcgacatcgatcaagttctctaattgcatctttcggaagatggacgacactcatgatgtagttgaaagggaaa

SEQ ID NO: 155982 - DNA, 626 bp, Zea Mays
gtgtttcttgttctcataccatggaaatgtggtgtagaccttgatctgtggtcttcttggcattcctccatctaatggagtactcccccagtctccgatgcatacaagaagcctagcggtcctcaagaggcaggttggtgttcagatgcatagatagatgtggtctgttatacaattaaatttgctcacatctcccctctctagctctctttcattttagatagttgcttcgcaagaagatggtccaaactgccaaggagggcatgatgaataatgctaccagttccgaagtttatgtcaaaatgcaagatgttttcataaaaatggaccacggaggcgacgtgagtactatatccaccaaacatttacactatcacatgccatgttcttctcactacattactaaagctctgttagttgtcgtggtggcttattaattatttcagatgacagatgctagagttagttgaaggattttcataaaactataacgatgacttatttctattgtttgtaaaaggtaactgcatagtgtccctaaattacaacattgttccattttgttttgctttctctttcaaaggttttctacttttgttgcaagtgttgtaatgttactgtctgtg

SEQ ID NO: 155983 - DNA, 894 bp, Zea Mays
gtaaaagggcagggactctagcgcaaataacttccagacacagacaaccctgccataggactgcgggttttatttccaataaagctagggtcccatgtataaaaaggccagctaaggggtatcgccaagatcagactgcccaatctgaaacggacgcgccagattagatccctaactctataaaacggtaaccagcgcgagccattagatccacgatcgacgggcgtgatctaatgtaccccaactgaatccaatgcgccagatcccaatcggacggctcagatctatccatgaaacggtacagagcgaatctaatcctggccgctgcacagaaaatcaacggccagcgtgacttcgccccaaatccaactcaaccctgcaaactccggccacggcgcacggcggtggctcaccggagcccatgaattccggccgaacctagccccaatctcaaattaactcgaccctcgtgagattcacgatagcccgaacctcattctacaacttattttggccaacaccgagtacgggactcggtacacggtgcgtcgcgacagcgccattgccccgtgtgccccgccggagctcccagcgacccacccatcgattcaacggaacgagacgcgaatacaaagaatacgaaagtagtggaggcgccaataccttgattaacgcggtgtcgactcctatccaccaagcgcggcagagaccaccatccagtgacgaattccggtcgccccggcggtcaataccagtgtcaatcgggtgcgcttgcctgcaattgaaccccggaatcccattgggcacaatgccacggctgcggtcgagggcgaaccgagctccaccagcggcgcccaccgttctcccgcggcaatggtgttaggtcagtggtca

SEQ ID NO: 155984 - DNA, 819 bp, Zea Mays
tggcaattaattttctaacttgctcatgattataatctctaggggatgtgatagtagggagaccagaacctgattcacctgcatttgaaggagcaaagttgagaagagattgatctagtttcttttccaaatgctttgaatatgccccacaactcttcatatgcctcgataatgttgatgtcgttgacccttgcatgtaggcataccttttcttacaatacttgcactttgcctttaatgtcttctttccatcttcggatgcatctccaacagtcactttatcaaaaacttcccacactttggatttagagttgttatcctttactttcaccccccttacgccttttcttggcttttcttttgtcatcattatttgattccacaacatcaatctctctccaacctaggacagtcatttcatcctcagacatgtcatcgttcttgtcaaatgaattgctttctgaatctatctcattactttgattcacccccttcccttgcacactagattccataacctagcaatttatgatcaacaatacataatgtgttaactgcaactgcaagtctgcaagataaaactgaacaaactgcaaaacaaaactgaacaaactgctgtcgagcggtggatgaggaattgacgatgctcaccggtggtctatgaatgaggaaccggtcgtgcaggcgagcggtggatgagcagccaagcggtcagtgtcggcatcctcgttgacggacaaggaccggatcaccggagatggcggattggggcactgggtgactcgcagcggccaccggccaggcagagggagacgggtg

SEQ ID NO: 155985 - DNA, 701 bp, Zea Mays
ccacacccgagcacacaaatttataacgcaagcagtgctacacatagttctggatgcggtgagcaaggtggaggagaccttaccagtgattacgccgcagggactcccacccaccacgcagggcggatcaacagcggtgttcacacatcgttgaagtattccagtcggcctggaggttattcctacccgagaagatcatgagcacaatcccaaaaacgtcacgaagctccccgaacaaccgccagagaccgagcggtggcacgcagttgactacgacccctagcggctgatctgtcccttccccgccatggcgcacaatagtggtcaatgaagacgggatgtaagagatcatggcccaggttttatagccaagcggcggagtccaatacagaagcccggagttcgcggagtacgaccggcgggggcggtcgagttgttgcgctgcccagatttcggcgagctgttgcaaggcttcggttggggaagaaaccccgacaagccgggccctcgcgtcagtgaacacagatgggcgaggctgaccagtgtctggtaagtgggtcccatgtcaacgtgaagccgaggctggcagtggaacaagccgcgacaacgggaagcgcaagcgcgagcggaatcaagcccaaggctgaccggtgggttccacccgctagtgtcaaacgcgcggattgggctggttgaaggag

SEQ ID NO: 155986 - DNA, 853 bp, Zea Mays
tagttatccgattaagttgattaacctgattaacataaattttcacagtttaaaaacatttaactctcgtaagttagtagagttattaaaaaagacaatacaaacacaaagtagttacctgaagcgagaaatggtggcacaacggcgctggggaaacaggtcggtgcggtgggcgtcgcggtgagccatgggagacacggccctatctaggagcggtagttggtggcgcagtttggcgctgccgaggccggcgaggatgacgacgctgatgtcggagctcgatcgccgaagacaacactgcatggacgtggcgccattgcggaggcggccaagaactacggtgtgtggatggggtgccggtgtgaaggcgggtgaggacgacgtcgtgtggacggggcaccggcgcggaggcaccgtggcaaccggaggcagggctgcgccgcgttcgagctaaggctgggccggccggtgtggctggcgaacaatggggcaaaggtggcctaggacggcgtgacgtgttttcctgacagctatagcagatttgcgggcgaggacaaggcgaggcagtcacaagcaaagaaaaaacggcggcgttactcataaagactagcttccgagatgtttggcaggtggccgtcggaagttacgcgtgtttgaccgagcttttgaccaagccaccgggagttatgggctgggccatcggaagtgtataacttccgagaggtttaatctgggccatcggaagttaggatttacgttcgagaggcttcaagggccgtcgaaagttagttacttcttacggtttttatctataaccgcaggaagttatttggtcataggagatttaagtttt

SEQ ID NO: 155987 - DNA, 620 bp, Zea Mays
gattcgcatggttagggttgttaatattgaggattcgagttctatattgtgatgaaatggttttgttctgcttctggctaagctaaggttagggtttcgggttctgatttctgaccttcttattggttgtgtcaggttcagttcaactggttcctatgtactgtagtgttcaggatatgttaacttaggacgacattttctgcccctttaactttaagtaatggatcagtaactgtttaaattgtagttttgttgtcaacatctttcaactcaacggtattggtcaaagagaagaattcagacgtcattctgttgacagcctgtagcctattaccatgcatattttgtgcttccaaaaatattttttggaaaacagaaaaaggccaattttctctatacacttataagctacaaaaattgcagattagtagtttactaaaaaggtacaatcagccaagcacaggaagcatgttgtgtttcatgaatttgtttggatttataacacctctttccgcttcctgagaacaattataattgaccattttcttgtttgtttgaatcttatttgtggcttgtctctgcatgaaatggtcccagtagacagctcaagtcatctgcag

SEQ ID NO: 155988 - DNA, 520 bp, Zea Mays
cccttacctacagtaggagtagtaaacaactaaacatcacgctccacctcattcaacacaaaagattcatgacgagcaggcggacgtagcagtcacgcatgtggtgcggcgtgtctctgtcgtagacacgggtagggttttggatccgtgggacatggtcggcaagatattaggggcctgattggttgtcttcccagagtagcatgtcccgtatctaggaaccaggatccagcaggccatgctatgtgcatgcaaaaagggtatgtttggatgcatggctgtcaccggcctggttgcaggagatgttgtttggtttaaagatgtagtacacctagacaacagcggccagttcctttttgcatgccgctggccaggctcaggagaaacgaaggaaaaggtcgcacgccgctggccaggccgaggggtgcctcgtgcatcaggagggccaggcccaatagactctccaggtaaccaatcagccataggttacatcccatgagcctggatgaggaatatacag

SEQ ID NO: 155989 - DNA, 1098 bp, Zea Mays
cgacaatgtctaatttccaacattgaaagtggccaggtatttgcaataagctttgtgagttgcgaaggggcgcctgttcgaggcgagaatttcgggcatgctttgcacgaccgggttacacggttggtcgtgcacacaattgctggctagtagaaaccctggcgtatgactttagcagcaagggccctcagtcctgaatgtgatccacatatacccctgtggacttcacggggaagctctatgccttcggcttcagttatgcatttcaacataggttgacttattcctttcttgtagagatggccgttgactatagcgaactctctgcttctgtgttttaaccttttggcttcactatgattggatgggtggtagtgtccctgaaggtatacggtgattggagcctgccgatcttcggccattataatatcgactatcggttgtccatcggtgtcttgcgttatttgcagacccttggggtttcttacggctggtgtgccgactatgtgatagaatacatcggaaggcaagggttcacccttcgctgctgctttagctaatgtgtctgcttcttcattcttgttgcgctcaatatgttgtagtgtgaagcctttgaattgtttttcgaggcttcgaatagcagcaagatactgaattaatacaagctctttggcagagtaatctttttcaatctggccggtcatgaccttggaatcagtttttataatgcaggtggtcacgacaagggctcgtagtttgtgaagtcctaggatgactgcttcatattcggcaatgttgtttgtgcacttatttgactcgagtgcaaagctgagacgtgcggcgtatctttatttgattccggcaggtgatgtaatgattgacgcagtgtcgatgcctgcgtgacaccatgctccatcatagtggatggtccagactgtttctgtgtgacactgttgtggttctgaaggccctgtccagtctacgatgaaatcagctaggacctgtgatttgattgttgtcctgggctcgaaggtgatgttgtaccctaagagttccactgcccattttgctattctagcggatgcctccggatttctg

SEQ ID NO: 155990 - DNA, 605 bp, Zea Mays
ccagtttgagtataaacaatctatgtagccctctcaagggcattgtagacaaatcacgtgaaatctacggtttcacaacagtttcaaccaaaggattttcagttttgcatagcgggcaactcaaagtagatttttcacaatagacagcttacaacaactttttcacaaccgaaccaaacgcacccttatatgttgcagatgatagctgctaagaagctcagcccactattaaaacattgcgtatagtattgcatgacttgaaaaaagggatgattacaagttatcaacccatgtgaaaagtgaaatcattgtttcgagtaggtgctcattccagaagatgtaaggttgactccagctgagtacctatcagggcacctaaacccattatatatatctaaataacattgtagcatctccatcaggtaacctataatcgatactcattctagatacgatgtggtagaatacctaatatagatgaccatcttttcaaacgtgtatttggataccggatacccgattggacatggtaacacttaggtctcttctttcggctaaatgcgtaaaccaaacgtgtatttggatttccagttccgcatatcctt

SEQ ID NO: 155991 - DNA, 2900 bp, Zea Mays
agggtcttcccttgtcggtctgtatagcttactataatgcccataaggtgcctatagtggagttttttaaaactcatccctggttcaaacctaatgcatatatagtttccatacactcctatcctctctatatataatacatactctcaagtcctttcttattgactccactcatgtcaagtttgatcaaccttgtccatccctatgttgttgctacaccttacaacctctctagtgtctcttgtggtcggcgtggaatatgataaatcatcccaatcaatatcggacaagcattttgtcgtggtttcgaaaaccaaggacacaatagaatttgggttcggtgggggacgctaatgtggactcactccgaatggtgaatcgagggattctaacaggaggtttatgttggtttaggcttacgccctagtctagtgtagtgttgatcgtagtattcactaaggaacgttttacattaggtgcttatgttggaatgaggtagtggagaactctggttgaatgctcctctgccttttggccgtttgaccctccccttttatagttcaagggggttcttaaaaaaggacttgacatcctaaggagcgtgcgacctattgtctatggtggtcttactgatgtagttctcctaacatcgtcctctagttagtgcgtggtcgtacgctcggtatggcggattgcttcatctacccagtatgcgggtcactgtggcaactccggtgttgagttttcctgtagtgatgcttggcaggatccatgggtcaaagttatagcgcatcaagggtcgtacgcgagaacaccctgtcttgttgtcaaggactctcctcatcccaccagtgtgtcgtggcgttatccaaaacaatatttgtgtggcaacgtgtcatatcgtgaccagtgtgggggaacattacctgctttgtctccacgtcagtcgggtataggcgtgctccggacccatgcgtgtggtgtcggggcccacagatgtactagctctcgttcgtgggccttgtgcttctttgtctcgtagggttgcttggtggacctggtcgttccattcgcctcgcaaagttgctcggcgggacctggtcagtttagatggaccgtcaagagtcatgggcttactttggataccccattcttgggtgcccgtcagtagcccccgagcctttgtgcaacttcttggagttgctcgaaggctttcttcttaggaactagagtttcgggtgcgcgcgagcacatctgttagatgtagcccctgaacccccgagtaatccatgaggattacttgggggtttatctagtttgattgtagttttgggacgggcccttttgcgatggttggcgtagtgccttgtttgcgccaagtgtatgcccagtttgtgctggagctgggggtagtccttggaccggactcctaataaacttcaaatgttgcactttgaacaatgcttcgtgatttcataatgttgaactttttgtgttttgatcgaagactgtgtcctcatctcttttcttacagccctgctagaaagtcctcatgatcgatcgtctcaattcatcgtatccacaaccgctggggcgtagatgtatctcgatacgaatctggacaccggggcactttaaggaaagaacatggtcatgggatagagggtgagcctgagagtgtaacgtggtgcccattccctgccccaaccaaaacttggtgacttggtcttggtcgacaggttttgcttgtgcatgaaaagaaaggagcaaaaaaagtagcaagggtagaatttccttagttgttcaatgttctaggtgttgaataggaggttgctgctattgtccttgagccggtaggttcccgtgcataggacttgggcgacaatgaacgacccctctcatggcggggagagtttgtgcttgtccttggtggtcatggcccttcttagcaccagatcgccgacgattaacgatctaccctggacctgtcggtcatggtagcatcgtaagtcctattggtacttggaagagcacacaacaaccatgttctgtgcttcgtcgaggaggtcactggagatttgggcgtccgtcgttccttgcctgttgctgaaggcttggacccttggggatccatactccaactctatggggagcatcgcctctacgccaaatgccagcaagaaagacgtgcagtctgttgccctagagggtgaagtacgtaggctccaaaggaaggttggtagctctatcgcccaatatctggtgagcttcttcaacttgtcaaagatccatggattaagccttgaagtattaggatgttagcgcactcaacatggtcattggttcgtgggtgtaccacgatggcccatttgacgcagatatcgaagtcatcacagaaccagaggaagggttcacctgtgaactgagtctcgttatcggttatgatggagttggggacaccgaaactatagacgatgtcgtggaagaatgtggcggcctccgatgacttgagcttagcgatcggttttgcgtatatccacttggtgaggcccccacgacgagcaaatgggtgaagcccctaagcgccttcttaaggggcccaaccaggtccagtccccagaccacgaagggctaggtgatgggtatggtttgtaggtcttgtgctggcatttgtgtctgttgcgtgtagtattggcagccatcgcaagaccaaacgacttgctcggcatccgccatggcggacgactagttgaaaccctgcctgaaggccttcccaatgagggacttggtgccgtgtggtgcccgcacgtcccgtcgtgtacgtcggcaagaagttgtcatccttcttcaattgggatgcatttctgcttgattcctaagacactttttgtagagtgccc

SEQ ID NO: 155992 - DNA, 524 bp, Zea Mays
ggcagacgttgaggaggaagaacacggtgaaagaggcgtgggaagctgtgaagacgatgcgtgtgggcgcagatcgcgtcaaggaggttaatgcccaaagactcctgaaagattttgagaacattcagttcaaggagggggagtctgtcgacgatttcggcatgagaattaccaatctggttggaaatctcaagattttgggcgaaacgatcgacgatttccgggtagtgaagaagtttctgcgcgtggcgccatcacggttctcgcagattgtggtgtccatcgagatgttcgtcgacctcaagaccctgacagttgaagagctggtcggtcggttgagggcggtggaagagcgttttgatgacaagatcgatcagatcgtggacaaggcagagcggctgctgctggccgaggatgtttggctggagaagcataagcatcgttttcaccccggcaacaagtctggagggagtggtggtggcggtgtctcctccaagggcaaggcagtagcgcgctctgacggc

SEQ ID NO: 155993 - DNA, 505 bp, Zea Mays
agggcaagatgcttggcccccgcaaacttccaaataataatttcttcttcagctcttctaatagccccctccaggctaggtgttacctcggcgccacagcctatggcgccgagcatcgggtccaaacgtgcaaataaaatttctgggggtccaaacgtaaatttgtgtcacaaaaggggctaaaaaacaaaaaattcgggttcatagtacattagatgtggatatgtaacaagatgaacatcaatgttagggcaataagcttcaacggttggtccacatgttataaccggtatcttttgtgtgcgtcgaaaaatgggccacgtaggtgttgcgcccaaattagacccggtgtgaaccgtacctccagtactatagcacgtgcagtagccctgtagcgcatgagtcggagtagttaaaatagagatttcttagaaccagagattgcgttggtttagaaaataggattggtttgttagaaaaggtgggtccaaatctataaggattt

SEQ ID NO: 155994 - DNA, 1004 bp, Zea Mays
cacctacttaagccgcatgagcagaattatcccaccatgatttggaattggcagccatagtgcatgctttgaagatatggaggcactacctaattgggaacaaatgtcacatattcaccgatcacaagagtctgaggtatattttcactcagccagatctcaaccttcatcagcgaagatggttggaactgatcaaagattacgaccttgagattcattatcacctcgggaaggccaacatggtagcagacgccctcagccgaaaaccttttggaataaagggaaccaactttttagaagattggaagaaggaatcagctcaactgaatgcatgtttgggaaacaacggcagtctcgaagtcaaaccaatgctagaagacctcatatgcaaagctcaacgcctagactcagagacagcaagactggtggaaaaagctcgcaaggaacaacttccggacctcaggacagatgaacaaggagccctttggttcaagaatcatctatgtgtaccaaaaggggaggcatgagaagtcctgctcgaggaagctcacaactcagcctactccatccacccaggaactaccaagatgtacctagacctcaaaaccagatactggtggagagggatgaagaaagagatagcgcagtatgtggcccggtgtgacacctgccaaagaacgaaggccgagcaccaaaagcctacaggcctattgcaacccctcccagtgcctgaatggaagtgggaagaaatatgcatggattttgtaaccggactacctcggacgcaaaaagggaatgctctatctgggtaataatagatcgtcttaccaaggtagcccattttatcccagtaaaaactacctttggaggagccacccttgcccgaatttatctcaaggaaatagtcagactccatggcattccaagaaagatagtgtcagacagaggaacccagttcacctccaaattctggacaagccttcagaaagctatgggcaccaagc

SEQ ID NO: 155995 - DNA, 665 bp, Zea Mays
gaaagtatcaatgtttttgacatgatttggcaagaaattattcatgctgcctgcttccctcttaagggatgtcttcatgcccccttcatcatgaaaatgattgaagtggtgactcaattttgctatgggaaaggcacaagacatctatcttacacccccttctggattgatccaaacaatccagcagggcgtttgaggaaagcgccctccagctctcgtggacctgctgctgccggacccttgcgtccatctcctggtcgcggatctcccacaccacgtggtcgtggtcgtggtcgaggtcgtggtcgcgggatgggtgctcgtctggcccatggtattgcagcattcttttccatgtgcagaaatatatcttcagatgtgcatgagctggctcggcggcagtgggagactgacgacaatcttcgtcgtcaagcttcctctatgggtatgccatttgccccttgttcgcctgatgtgcctcttcatcctcctcctccggaaatcaatgagtggcaccagcaggcatatggggtgcctttcatgtctccagaagatgaagaagtttttgatgatcgtgagcagtttgtcccgcctccccaccagggggatccgggtcaatcctcttcttatcctccgccccaggatccttcaggaagctatcctcc

SEQ ID NO: 155996 - DNA, 1579 bp, Zea Mays
attatatgtttataagtaaagaaccataagaataagaaacacccaatcaatggatacacccatcttctaaaacgagatgcatgggaagataactaacctatggaatttcaagaactcattccatataaatgagagttggctgctgacaatttgaaatagttcaaacaattcttcctcagatagagtatacagcaagatatcatcagtgcttccaaccacaaccccagaactctgaaacaagtttgagatgcatcaaccaatacagatattcaaaaagatagaaaacgtttttcagaaaaaaaagtgaagtatacctcaagaaaatcacgtaagatgccagtcatctggggactacactttgtgggcgtaccctgcccataactgtaactgggcgaagctgactttgatggttgaactgtctcatatttaccaagggttaagtcagtgcgatccaaatcctcaagagtgctaccaacagcattactgatcttcttcacttcttcaagaagtatttccctagatattagtgatgctttcacaataccatatgactttgagccaaaactttgttccagcggctgcatgttatgcaccaacttttattcttaaaactaagaaggcaatttattcgtttctattactaagttcctactagatattggcatgccataaacatatatggtctgcagctgatgattgattaaaaatcttcaattaatatttgtgacatattgattacaagcatacatgcggtttatgttatagcaatatcacaaaagctttgtagtgggaaaggcatctaaagaaatctaaagaatcacaaacctgtgtaccttcagtgatgatttagtcacagcagctttcaggtagacaatgtgtattgtcagatccactagcgccgagtgtaatgcgtcaaaatggacagggcaatacgagtgtaagcctaggagtgctctatgtgggatcctaaattcatggacagggatcaaatctgtatcatcacttgaatcttgaacgtcagtcctatgatgcaaaagaaagcagcttatcagagttgatgaatgcgaactgtataattttgggtgcacatgtggtttaacacaataacacacacaccatgcattccccagtgttgggatatatatgagctcgaacttcaatataacagaagaagttgctggaccctagaacggagagagagtacagatcaggctaaaggaaacaaggttcactaacagaaacaaaatttatagtactcaacctcgtcttcgctgttgggtatgtagaaggacaccataactgatagataaatatcttgcctagaatatttaacaagaaacggctgtgtgtagaagctattgtcaacatcgtctattttccaaaagccaaatgagctcttcacaccaatatcaatagctgcataatccacctagcatgtcattatctattagccaaaggtttgagttcaaaagtcatataaatataggaaaatgtcaaaaaaagaaatctgacacttcattctgctccggagttttctagatttatactactaaggattaacaaaaacataaggataaac

SEQ ID NO: 155997 - DNA, 716 bp, Zea Mays
ctttgtctcaacgagtttgatagagggatgttatgaaccctagttcatttgaggataaccattgctaggaagattattaaatggcaatttggagggagactagagcatttagggaattagattgttagttcttattttcttcttccttgatacatcacctccctttatgtagagaggaatgttgaccatctaagaaaggcctcatatccaatcctatctctagttgatccagatctaaacatatatctagctaatcaaatccatctaatggttcatatgggccctggcccttaattgatgccccataacaaagctcattgagattcttcacttgatgtcccataatagatatcactaagattcttcacttgttgaaaccttgtgttattacacaaatcaacaatgaacatattaaggagaaacctagtcttttctgttttcccttcccttcctctcccaaggccaaccacctagccctatgtcgatgttagtccatggttcgacatccacctccacgggcatggcctctccaggcaaggtttctcctcccatagaggcatcactttgcctcaacatcttgtctcctcgtgctagtcatttcctttcctaggggtactccaaggtttaaagttggatcgacgctagctctaggttttcttctaggggatatggtatgcgttgattgggtgcattgtcgtatcgtgatgccttggtat

SEQ ID NO: 155998 - DNA, 654 bp, Zea Mays
aaggattggtttgtaattcaacttttagtctataagtggttcaaaaatctagattgtttttttagtcaatagttggtgattaggagagcattggtatatatgggtatagccactttattatgccggataaaagatatctttaaagcatttataggtttgggtaaaaagcagtggggtaagaaaagactccatccaagattgtggatcttgattcatctggcgatccaacttggtctttgaagacttgagttgatgcttatccttctttgacgtggtttgtcttctttggcctttattcttggagttgtcatcgtagttaaggacatatggtcaaggacatatagttcgaatagctggggtacacgaggtagatttgtacagagttttactttgcttttggaacaaatggattaggcaacctatgatgtaggttaggttgttgtttagggacgagttagtccaaggtattaatttagggtaagatatgtttatataattagggcctcatttatgtcgccaacattatctaacttatttaagtaactcaatttggattagatcatgttagattaggtgggatctagatcagattagaataagataaaatctttccaagataagatgaatctattaagataagagagtatcttttaa

SEQ ID NO: 155999 - DNA, 500 bp, Zea Mays
gagtcattgccttttttagtaataggaagtccagtaataaaatccatactaatcttctcccatttacatttaggtatagataatgactgcaataggcgagctggctttatgtggatagccttgaggctttcactggctgaacaacagattgtattctgaatcattcagaaccaaaagtcaaatacagattggacattcaacgttgtttgtagtcaccactcaccatattacatttgtttggccggccggtgaggtattataaggtacccattctcgtagcaccaataacgtgaacaataaatagtactgtaatcccaacaaggactgggatttttatctccctctgcgttacattgcattacatgaggaaaaaagaacaaaattagccaatatgatagaaggatcaatagtatcaaccatatttttactaacagagtaaatctgtataaaatgaggatggcaggggcggatggccggcaccatgcggcgggcgcggcggg

SEQ ID NO: 156000 - DNA, 871 bp, Zea Mays
caaatccatagctgaaattcaaatttgaatttgaaatccaaaaggagaaaggaaaatctaaacttgaaaaaaaaaatgaataaaaaaagaaagaggaatggcgcaatggcctaaaccctcgaatccagccctccttccttttccttgcgcggcccactatcaccctcgctcggcccagccaaccggcctccgcgggcgggcctgtcgtcattcccacttccgtgtggaccccgcttgcctgtttctccgccaggtgtgatagatcttggggcgctgctcgggccgggtgcacatcgctgggcgctggccgtggacatccgccgccttcgattcggaaggccgatagggagcctgggcgcagtaggagcttctggtacatgcgggcagggcaaagaggcgggactcggcgattctctgtaccgcacagaggcgatttcggtcggggcatcactgcgcgccattgaaccgcacacttcactagcgacatcgttggtcgtgttcacttcaccggtggtgagactccttttcacgctccgttttattcgtttctttggttgtgcgcggggcgacgatctgtgcactgtcggggagaggggctggccgctgcgagaggtgcgcagcctgggaggcttgaggttgaagaaggatggcgagtcgttgatcttttaagcaacgattgcgattagatagagcgatatcccttcgatggattggaactgggccataagtgcagatcggacggccttgtgcgctcgcgggttcataatggacgagattcgatcctggctctcggatctgatctaaacggtctgaatcttcccataccccttcgcccgagaacacttgcaaaagaacccctctgttttagagt

SEQ ID NO: 156001 - DNA, 1552 bp, Zea Mays
cgctggccacaacacaggtgaagcatcggctcggcaagcgcgatcccgaggccgccatacagtagaaccttaatcaaacgcgcggagagtatcactggtttacctgaatcttggtgcccacacaaaatagctcgagaaaacgtggttcgtccggtcgatgatggggtagttcttgatagtgcttcgcaacgttgcgaacgcgttaagcctgcaaacttctgaggtggtccggccatggcgatgtggtgagacggtggcacagtcaccagacaaggagaagataacgcgcgacggacttaggcaaaacgaatggcgaaaccaggaccattgctgattgtgagggcatgagcgagagagacccacagcgagcctagcctagtgagcacaaggtggcgaaaggcttcattaagccgagcaatatggcaccggagaaaacaaaggccactagctgcatgcccatatcgcgacggggaacgctctcgagggtgccagctctaagcaaaacaaggcacgtggccgcaatgcaacggcgcatggataactgaatttcagcaaagcggtaaattttggataaccatcgcattcaccaatcaggactggaagcactgaactcactcggccttacgtaccatccattcaaacctcaacttgcctaatgcacgtggggcacagcaggcgtggaaatccttctgctcccaaggactaacccaagcttcggtcaccagaaactgagctcaattttcagccatcgatgccacgtccacctctgcgtgtccctccaaccttatgggccatgcacagctcggcactcaactataggaagtaaacaagcagcagtaggcgacatgcaaatggagcatgccgaccccttcgtctctgtccaaactgaagcaacgtttggttacacagaatgcgtggccacgacttggagcaaagctttctcccaattatcagtggtcataggtcgaccttggttcacaaagtttgttcacaaaaccaagctcaacaagttttctgcaatagccctaggccaaagactcacattcaaaagttatgcggcttcaaaggagcaaaaatactgaaattcacttttcagttaacatgtctttgagcaaaacctgacagtccatctttaaacgagatttactccaacaccagtgcagcaacctacaactggcttgtaccaagattgctcactgatactcagtcttcaacttagttttaatggttactagcaaaagctcaactgacctcaagttatcgagcaccaaatttagggcagcaccagcgaactcaacaattcagcctagctgaatttggttcagcacaccaatgtcggacagagcgacttggagtagcattttctcccctttctaaacaagatcaaggagatgaaccttaatggaaattattcaacacactgccctctaacactttgatatggatagtgcaggccataacgtaataagtttatcacaacagagatttgaagtttgcaaaaaaacgttgaaactgcacttcaatttctgaatcaaggtccagaaatcacaag

SEQ ID NO: 156002 - DNA, 424 bp, Zea Mays
cccaaagacatcatcatcatcatcatcatcatgggctgctgcgccctgagtctcaaactgatggaaggtggtgtcctcggcctgaggatcaatcactggagcagatgctggcacaggatcctctggagctggactgtacgacccaaagatgaggcgacaggcctcaagagtaccctggaactgcgggggccgaatcagctgagcaaagatgtggcacagatagtgagcataaggcagctgtcgacgagcacgtagaccatccagtacggtgtcctcgatctcacaaatgagaaaatccacgacatcaaactctgagtgagaaactagggcaccgaggagccaaagttgaatatgagtggcagcctccctgtaacccatccatggcagaagcgtccgtctcatgagctgatatagaaacctggcc

SEQ ID NO: 156003 - DNA, 1194 bp, Zea Mays
ggaaagcgtgcccgcgcgctggcatctttgcagaaagaccctcgggtttttagctaactggagaacgagcttctttactattcctatgtgtcgctgctagattacacctaagccctctggtttctaactcttcgcaggatgaagtccacgacgcagaccggccggaggaggccaagaccagtgcttagcatcggcctaaaccaaattcattacctagagaacgtttcccctaagttaatttgaagaatggcactctactttgccctgcccacggtgaccgagaacgttacagagggatgaaggtgttcacggcgagtggtggtgatctagttcaattggacggttcaaggagttcgcgggatgcctacggatgctagaacaagcaaccgaaggacgcgagctaaccggaatcgagttggccgctgcgagctgttctttacggcgacggagaccgaatttggggagaattggaaattcgcgcgtgctggtggatgatcgagggtgggagcgggtgctatagcttcgggatgacttagcgcagtagcccgagccatcaatttataggaagcttcgtcggtggcgcttaatttggtcgggccgtgcgggtggccggagataaggaagaacgcgggtgcggtgaatccgtgttcaccgtcgtggcgagctcatcggcgatgattgcacagccgtagcgagtcacggtgtcgcggtggaaagcaaagccacgcagcgcaaggccgggaggcggtggctcaccggcgagctaatccgctctagccgcaaagcagacgggggcagccacggtgagtcaccggagttatccccagggggtggcttttacctggcgaccttagcgggtcatcggcgacgcgaatcctacaacggtggcgtgaatcacggcgagcggcaatcaacggcgacgggccaccggcgacgagcaagggataggatcttctttagtttaacatttactgtaccatggcgtcccatttcagttaacctgacagagcaacttggagcatgatttactctcaatttccaatgacaactccttccaaactctgcagcaaaattgtagagctataaaccagcaataattcgactatagggcttgaactcatttgagcactagatcaaggttgaattcatactcaaagttggctctgttacactgaacatctgaatttcagagtg

SEQ ID NO: 156004 - DNA, 573 bp, Zea Mays
cataatttcagcagggctatgatgggccgatttagaagattgattgatgatcttgctctcaaagaggtacctctccatgtccgacgatttacttggtctaaccaacaagtggatccaatccttgtctagctggacagagtattatttttggtggactgggagcagttcttccccaatgttctgctccaaagcactgcctcccacgactctggtcattgccccttaattttgggccttcatgacaacaaatcggggaaaagacgcttccattttgaggcattttggccaaagttagaggggttttatgaggctgttcagactgcttgggaatcggttgagaatgtgggcgtgtccataccaaactctttttctaaaattgcagaagacgactaggagtctacaagcttggagtgataaacaagtgggccacataagatcgcagctgatcttggctaaagaagttttgcacagattggagatgacaaaatgttaacgcctgctgaaatttggttgaagaacagactcaagaagcactccttgttactgtcctctttgaaacgcactatggctcgg

SEQ ID NO: 156005 - DNA, 440 bp, Zea Mays
gcgaattggacaatagatgggttgtcccttacaacccttacatccttcgcctcttcaactgtcacatcaatgttgaggcatgcaggagcatcaaggctattaaatacctgttcaagtacatatacaaaggtcatgatcatgcttctattgttatgagagatgcgagcaaggcagatgatgatgcagatgagatcaagtagtacagagatgcaaggtgggtgactcctccagaagcgttagggaggatatacgactttgagcttagtcagaactctccacatgtgatgcaactgcaactccatcttccaaacctgcatatggtggcatttcacgaatgacaaatggtcgagcgagtcgtcaaccgtccaggtgctgataggtcaatgctcacggcatattttgaagcgaataggctacatgagggggctcgtggcatcctt

SEQ ID NO: 156006 - DNA, 647 bp, Zea Mays
cccagtaaagcagaatgtgcctcagccaggagcaggcaaccgtgttcagatgtgctacaaccatgggagactaaccatttggaggctgaagcagtccaggaaacactaggcatgacagtaggtacgtttccagtcgaatcccatcttgcagaagtcttatttgatactgcagcaacacattcatttattactccatcatgggtagaagcgcataatcttccaataactaccatgtcaacaccaattcaaattgactccgctggtggaaaagtctgagccgatagtgtatgcttgaatgtaagtgtgtaaataagggggatagagtttcccgctaacctcatagtgatgggtactcagggaatagatgttatcctagggataaactggcaagataagtaccaagcagttatcagctgcgataagacgacagttaagttggtgtccccactgggagaagaagtggtgactgagctagtctcacccaagccaaagaaaggaggttgtcaccagatggttattgatagcaaagagatcaatccacttgaggctatcaaggttgtgtcagattttccggatgtgttccctaaagatctaccaggtatgccacctgagcggaaagttgagtttgccatagagcttattcctag

SEQ ID NO: 156007 - DNA, 1257 bp, Zea Mays
ctctcactcggggcctagggccctcactgccaaggtgatccgtcaagggttctactggcccgctataatctgcgctgcgaatcgagtgacgaggtcgtgcgaagcttgccagaagttctctccccattcaagcaacccttcgcaatacacaaagctgattgcccacacatggccacttcaacgctgggggctggatattgtcgggccactacccacgacccaagggaacctcaacttcaccttcgtcgccgtcgagtattttaccaagtggatcaaggcaatggtagtatccacagtaacgtcgaagactgcccagaagttcttctggcaaaacattgtttgtcgattcggagtcccgtccgagctcacagtcgacaatggcaaacagtttgacagccaggatttcagggacttctgcttctccatcggcaccaagatttccttcgcctcagtatatcacccgcggtgtaacggcgtcgtcgagcgcgaaaacggcaagattttcatgccatcaagaagaggcttctcggcgacaggaagggtaaatgggctgaccagctgcctgaattagtctaggcactcaacacaaacgaattccgggcaactggattcactccttttcgactactatatggatcagaggccatgacctcgcaggaaataaagcacgggtcacctcgaacaagcgcatctgccgtccccgacgtcgacgagcccacgtccagagacctcatcgacggagatcgcgtcttcgccctgcaggccctcaacaaataccaagctcaaacgaaggcctagcgcgaccactcagtcgtcccaagagaatttaacgaaggagacctcgtactcgtccgaaccaccctgagagagtcacggggcaagctggagccaaagtgggaaggtcccttcatcgtcaagtcgaaggcgtcccccagcgcatacaggctaacaacgccatccggcgaagacctagaccattcctggaatattgacaatctacacaaattttttgtctaagtcctcagggcctactcgcccttgtaattcaccaaacaacattatttaggcccgcacccttttcctcccgggggtgaggtttttaacgaggcggagccatgtaatatatctgcaaaaatcccccgcaaaaactaagatgcaacatgttgaaaaagaccgcatcaacggtcttcggcattcgatcgctctaaagtcaccgcgagaggcagcgcagactaccctcgcgtgcgacactccgcg

SEQ ID NO: 156008 - DNA, 707 bp, Zea Mays
ttcataatcaactccagggcgctgagtgaaaccttgagcgactagccttgctttgtaccttgatatttcattattttcatttctctttcggacaaatacccacttataacctacagggtgtatgtggcatggtgtgcggcttacgggcccaaacacctctcttttgtctagagaaattaattccgcggtaattgcctttttccatttatcccaatccggtcttttcttgcactctgcgatagatgtcggttctgggtcatgatcaatgattgaggcaactttctttgcgaaatatatgtctatgttggttgttgctctgttcatgcattctccagttaatacatagtttatggctatttcatcatgggatgctgattgcatttcttcttgtgtttcactactacttcttgttgcgggagcaagttcctttagtttttcatcgcctttgtgtgtgcacatgtttgggttggcgatttcttctacggaaaggttcaagtccgaaatgcttatcttcatatgttccttcccggtgctaggtctcatctggctccccttcttgctttggggcatttttgtgatcggctgtggcaagtcgtcttgccctcttttcttcggacgtctccgagtacttggggtttgagaagccagagttcatgtccttttgttatgaggcctcttaacaggatcggctataccttcaattttat

SEQ ID NO: 156009 - DNA, 818 bp, Zea Mays
gatttccgggccaaactgtaatagttttcaacaagcgagggatggcgggttattttcaagcttcctcgaggactctttagcaaaaagacccggccgaaggggtatccaacgatcctggccgttggatcagagatccatgacccagatcaaaagttatcgtggctgattcttaacggtctagatctagatcgagggtctggattcaatctcgaaggggtatgcccacgatccgatccgagctgtacactctacatcctacggctcgcgcgaatttcccccaaccctctcttcttccccaatcagcagggcggcgacgaagcagagctccgccctgggagctcgctggatttcctccgcccagcgcactggcgtcaaaatccaaacgcgaacggtgctaaacattgggggaagaaaggcgaagtgatggatagtatccttaccggcgatcggagcgatggtagcatctctgcatctacccacggcgacacaccagcgcccgcggaggcgccgcacggtggaggccatggcggaccttggatctggcaccgagtcggccatcaagcagccggatccaatcccgacagagtcaacgacaagcagtaaacgaaggggaggcgagtggagattcccccaccatggtgtagactagagctaagcacagaggcggcacaggttctagcttcctagcgcactggacaagggatgaagagaaggggcgccaagcacagagcgatgaacggggaaggcgtcgcggcccccgcatttataccctggagcgcagctaggatcccggcagaaatcccgtgattcacggatgc

SEQ ID NO: 156010 - DNA, 410 bp, Zea Mays
ctctaagtagcctgcaaaacggaccatgggttggatagagatgtcaatttcgcattttcgctatagtaaaacatcaaactttgagttggtattaataaagcagttgcggcactgtttcagcttcccctctccgctgttcgctctgcaggctgcagcgagcaccaacctcccccagtcccaggtcccaggccactagaccagaggccacgaactgcttgcgatttttaactgcaaaacaccgcaacgccaccgatcccggggcccacaccacgcagcaaagcgcaaactgtggtccactccagctccacgttgctgacggcactcaaaacagctacgcttgacctgacccctccctgccatggtcccattcgatcgatccccatcgccgtcgcggcatcacccgtccgttg

SEQ ID NO: 156011 - DNA, 293 bp, Zea Mays
ctgctgctaagcctactgcatcgctgctaatgtctgaccaattgcctgaactgcctcggtctgcatcaagaacatctgctcaatggtcatcgggggtggcggtggcaaatgctgctacggggctgcctcctcttggggtgcctactgctctggctgagcacgcctcacacctctgcgcctattctctgacatctgtagaaaccacacacatatcagatctgactctgcagtctttcagcataagaaaagatatacggaaatcttcacagcactgaacaattgatcatcttcac

SEQ ID NO: 156012 - DNA, 655 bp, Zea Mays
cgtggggcctggaggagctggcttaattggacggggatgtgatcgtaggtacttatacgcagagggaagagagagtttcgggtggttacaacgacccatgaatccggctggggaagaacggcgtcgcgcccgagaatcccggcaggtccgctccatccgcgttgaaatcgcaaggtagttgacggttctgcgcgggcgggtccacctaacagcgtaacaggtcgcgcgagtcacagagaacggctgggcgagatctccgcgcgttgggcacacaggctgacaaagcgggtccactactcagtgagtcgtgcgtgccctttcctggcacccagcgactgatcaacggggcctgcttggcagcgagaccaagtttcttgccaagtgcgcgtgagaacgggatgacaagggtggcccacctgtcggcaccaccaccaggcggctggacgggccgcatggtgtgttttggttactgggccgaaatgaagcctgaggcccagttggcttattttccctttttcttttatctttttttatatatattcatttgaatctctagtttgaatttgaatccctttttgtggacttaacctttgagtcaaatattcaaaatccaatatgtataagaataatgtatatatttttatacttattttta

SEQ ID NO: 156013 - DNA, 694 bp, Zea Mays
tgttgaataagggataccttcaagaacagtataggttaaaaataatgcattgtagccccacattcacaaaattaaagaacatataacatctcaccatccatgggcctttccgcctgtgcttgcatacacatccacctcgtcaatgtgtccatgctaccaattgtagtcttcaccataagtcttgaccattactataacgtactagtattaaatgttcttacatatagcctaccggtttatttatcggtcgattgtcttccctcatagagacttgaggaggagccacgtaatggttccttctatttcaccgctacacttgcccactgttgatcctttagtcaatcctaatctagaggtagatccaccacacatcaggtcctggtcctgaggtagatcctccagtcggtcatgacttacctctagctagttcggagcttggtccttagcctccgctgatcggcccctagctagtttatcaagccagttgccaatgttgtaatggtaaaaagaaaaaaaatggcaagtggagaatctgtatagatttcacaagcatcaataaagccagccctaagcacaacttcccactgatagacaagatagtcgatttcgctgtgggctgtgaagtcatgtcctttttaattgcttctctaattaccatcaaatttacaagagagatcaggacaaggtcaagaca

SEQ ID NO: 156014 - DNA, 308 bp, Zea Mays
ccccgccatgcgtgctcatgctgtgtcgtgcccacctaatgcacgacgacatttcatgcacgacatggtgatgaccactcatggccacaccgtgaacgcaacacggttctagcttcaatgtcgtcgggtctcatatgcagctagctaaaaatagttaagcaaacatgcactacctaattacatgaatcaaaatgcaaattgtgcatgggattaactaataaattaccccttaatcatgttgtacatcgatcactcctagctgttgccttagctcgatgaacctgaccttgccaagtgcctttgtcatg

SEQ ID NO: 156015 - DNA, 577 bp, Zea Mays
gcaacaaaagcagaattagggtttctgctagaaactgacagttgagaagaatatatgtaccaagagtcatgatgacgtcaacataagtgaaaccgctattggaccgagagaagcgacgttcagtcgagcaaactaagatggacaaaaaataatattcgacacaaaagcattcggggcaatcagtcgtcggaattaagtttcaacacatagggaaccaaacaaaatcaggagtttaatactgtaattagatctcaaaacatgacaaagaactcgacaatcagaggagacaagccatcaactttattatataagcaggggcatcattacataagaaggatcggttcattatgaactaatccttacaaaagacccctaccactactaccacccctacactacataatactactatttaagcagtggtgtcttgccaccggtgtcgtggccatcgccgccctcgccgccgatgttgttgctgcccttgctgctgccgacgtcatcgcctttgcctctatcgccatcaccacctttgccattgccattgtcgccattgccgaccttgtcatccttgccgccc

SEQ ID NO: 156016 - DNA, 846 bp, Zea Mays
ggagtaaaatgctgtgtgatggttttgaaacttgtttacgggatatagaggtcatccctatatgagtaatcgtaagcatgtgaaatcgccttaagtcgttgctgacttaaatcgattgcttttgttaatagggcatagtggtcaccctgagttaagtaagcgcgagcatgttgcaccgtcttaagtcgttgccgtcttaagccgattgctccgttagtagggtataatggtcaccctgagttaattaagcgcgagcatgttgcaccgtcttaagtcgttgccgacttaagccgattgctctgttggcagggcatagtggtcaccccgagttaagtaagcgcgagcatgttgcaccgtcttaagtcgttgccgacttaagccgattgctctgttggcagggcatagtggtcaccctgagttaagtaagcgcgagcatgttgcaccgtcttaaatcgttgccgacttaagccgattgctctgttggcagggcatagtggtcaacccgagttaagtaagaatgccggtcaatcatgaacaaactgaatattcttgaagccttttttattgatgacatatttcccattttacagagtacattatcgtcccgatagcttttgaaatatagctaggggtaaaacttcctgaggtgttctatattccaggagttcccaatttttgtgccgtccatttgagtgagacgatatgatcccggccgagtgacttctgctactatgaatggtccttcccataagggtgacaacttgtgccgtccctcccccgttagaattcggcagaggacgagatctcccactgaaaaggatcgtcgtcgtacggccttgtcgtgat

SEQ ID NO: 156017 - DNA, 509 bp, Zea Mays
gggtaatggcggcccaacggttccgtacctggcggcgggatacgcggcatgcgcggcggtgggcattgcggaggtgagggagagagctttgaccagaggtcccaaacgcagcggcgaaagcgcgacgtgcatagccagtatattctagatcatcgggaggttcccgagccatccggggttcagtttcaacggcctccgcgggatccgcgggtggaatttccatggcggagatctagcgcgagctcggtttggtacgcgagtgcggatgaaggacatgacatgcagggcccacctgtaagtggccgcgcgtggagtggacagagacggctggcgcggtgaatgggccgcaggggaggatggggaagtgggccggccgaggaggatttggcccaacgtgtaggttttctattttcttttatatttccccttttctttttatcttcctttcctcttgatttcataatttgaattccaaaatttgttatgagtttttcccatttattttaaat

SEQ ID NO: 156018 - DNA, 435 bp, Zea Mays
gcgagtgctatcttaggtactcccgaactccttctctaaagtgtccccaaattccttgaggaggtcatcacggctagatagggacatttcctcggtgtcagacgagttctctatcctggtaggaggtagggctggaggggcttcttccttctgcttagtccggcatccttggcttctggttttctttcgaattttcttcgcgggggcgagcttctttagcttcttgtcgtaatccatcttcagggttcggtaggcttcacgggtgttggtttcctcgccttccgctatctcgagactctcttggagggacgccttttcccttgtaagttccttgacttgttgctccaggctttccacccgggagtttaggtgagtgcagtgggaggcaaggtcatcatattggttatcgagagtgtggaggtatccagccatgta

SEQ ID NO: 156019 - DNA, 524 bp, Zea Mays
ggaaacccggcgagcacgttgtgtgtcggtagttcggttccaacaattggtaccgaaactcaggtcgacaaatctcggctcaatgtgtgagggggagattgtggaaatagtaccacattgtgagttgcgtgtgggcaagcatggcttatatggatgtcactaccactggagcactcgaggacgctgtctcatcaacgagggcactcaccaccacacaacaacaaaatcgagaggttgtaatcaatcgtactatcgagcgagttactgtgcccagaccaacaacctatccatgggaaggccatcaacacggtgaggttgatgatcataatgatcgtatggcactcgacttgatttgcagcgctacgttgctagacatgttctctatactggcagtcaagctgatggcaaaggcagtgtaggaggcgttgaagacgatgcaggtgggaaatgaccacatccgcaagacagtcgtgcagaggctgcgacgcgagtacgagataggtgggtgatgaccgcattcgcaa

SEQ ID NO: 156020 - DNA, 474 bp, Zea Mays
cctaattaagccacttaagtagaaaggaagaaaagggataaaaaggaccatgaaaaacatgaaatcaaggcttaggccaattaataaaattggaatacactaactaagctacaataaagattataaaagtttggccaaaatagtttgttaaaaacctcaagcaagccattcaagtggaggtttaatagggaaatctgaaattcagatttctgaatttttggcctctaaaccaaaaccgagcgcgttcaccttaatctctatctcaaaaccctaagctcccattgacaaaaatgtgccaaactaacccctctacctcatacctgaagatggcattgggacgcgtgccctggacatgtcaaacctgggatcttctctcggtgttcagcagtgagacaaacccaacttcacccctccatatctcttgatccagtcagcgaaacccataagcctccacacacaagcgacaaaggaata

SEQ ID NO: 156021 - DNA, 288 bp, Zea Mays
cttgaaagctactgctctgggattaaaggtgaaacctggtgcatcaacaacttttttattgaagcaaacaggacaaacaaggaaacaaagatctagaaaaaatgctactgcacatagatttgtgtggattgtttcggcaaaatacttcaaaatatgttgtcgctaagtacagttgtgaccacaacttcctcaattatatgttgccttattagcaagagactcagtgctgggtcagcgtcttgttgccgttatgcagataaacaaattcaggagagaagaaaaacatga

SEQ ID NO: 156022 - DNA, 633 bp, Zea Mays
ttgacattgtgctgcgtgacattatcctcaacgaacgcaactccatggagtgagtacttggcttgcacctcgatttaagatgacaccattttcatcttgttattttgacaatgcacaggtacgttgcagttggccggtccttcttctcaccccgaggacccagggatattggcatgggtgtggagggatggacgggtttctatcagagcatcaggccgacacaaaatggcttgtctgtgatcataggtagttttacgtgtgggatgcttatatggtagaaactgtgcaatttgatttcgtattccagttcaaatttctgtgtgttttaagatgtccgatggccacatattttccattgcagacatttcttcaacagctttcattcgacccctgccactgattgattatgtgatgttgattctgggcaaagatcgcaggacctttacaagtattactcccatggatcttgtcctggtaggtattctttcccccatttctaaggcacaaagagcattgtgcataattgaacttgtgatggatgtggccctttctgaatttgcagctcaataaagccctcaagggactgaggattgaagtcacccaccgaggagccgcacgcccgaagtaccggat

SEQ ID NO: 156023 - DNA, 598 bp, Zea Mays
tgaatcgataagtaacgtggtacatcagatcatagatcaacggttaggattttatgatacccgatcaacgatcgacgctcggatttgatctcgacggtcactatgccacgatcccgaagaggtacacctatctaatcgtggccgcccacgcggaaattcatggctccgatttacacaccccatcttcttatccagatcgcccaatccggataccacggcacagaatatcccacccccatctgattatggccgttcatcacaagatcgatggtggcagcaccttcttctttctttactccaacgcacgatgccgcagggccttccccatagtgggatctatcgcatgagcccagaggtcaactcggcccttgaatcctacccaccggatggttccacacgatgcaagcggaggtagcgaggggagccgtggtgttcttaccagttcctgcaccgcagtccgcatggagtccgtttgccgccgcgtacacaggagacgacagcgggttacaggaggtagagaacattgctgcggagcatcccagcttttctccattcctcgtcgcgctaatcacgaatacgatccgcacccttggcgaat

SEQ ID NO: 156024 - DNA, 1221 bp, Zea Mays
ctctcttcctcctcactccacctatctgttgcctgcgtcgctggcttcgcccatcttcctcctcactctctccatttctagcacgctcttctttgtccttacatcctccgtattcttcatctacagctagttccgtcgtccaacatattcatcaggttaggaaaaggtttgtattcttttttccccaacgtttcatgcttttactagatccattttccttcgcaagattcgtcaattgcaaggtttgtattccttttcccccaatgtttcatgcttctaccagatccatttttcctctccaagattagtcgattgcttcatgccattcgcaccttagaatttgggatacattggtcgttttatattgcagccacattttcgtcttcattgtcccctgtctacggcatggacagttactcactgcgcttccagattttgaccctttcccccctttttaaaatacagttattagtgatctttgctacttattccttggtgtcggtaaaccaaggtatgctttctcaacagaaaaggacataggaaggaaattgtcctttatgttgttcgctttactaccctctcctcttccaaatctagaatctgctgttttttttcactcctcttctccccccttcccgtcatatgtctcactggaacttttacagatttgtgtttagagtttatggtacagaaaaagaaaaaggaagggaaccaaagaaaaaaacattcttactgttactttcaaatccatttaatacccagttcttttaattcaaatcttgaatctattcgtcttttttaaacccatgtttctttttcgtacatggctcacatgatctttcgcataattcgtagttgggcaatcctttgtttctcgtctatattttcttaaaaaaaatctcagaaattcttttctatcctcttttgtttcagcttacccacattgattttattttcataactttcctcgaatttgtctcccttgagtttcctgatttccaatcccactcagtttaatccaacatagtttggattccagttcttcccccgaaatcccactttcattcgtgtttcatatgtaatatgtaaaggttttcttagatttgttcctctagccactgcacaatacagtcaacatgcatgttgtttgctgatacacaaaggtaagattttttttacgccatcaagttattcatgctttgccactttgaatttgtattg

SEQ ID NO: 156025 - DNA, 652 bp, Zea Mays
cctgagttgaagaaaaaagtccacgcaaaatcatctgatcgaaaaagcctgctacagcagcctctacctaggtatagtacgtaggtactactccttttcggcttttccgttccattcaagtttccagatctacggaaagctgaatgttgtgtcacagatttcacattgaatgtcacctgcacacagatttcacatgatccgtccatttcaatgaatgtcgactgcacgtaccgctcgcaataactgactgcgccgcggacggtaaggacacgtgaaacaaccggggcgtggagaatgattgatttctttcctcccaacaaatctcatggcatgaatctgccacctgacctggcccacctgagtcagcaattcactcgccgttgccgaatttcagagcagccatattcggtatagtagttaggggtacctagattactaccataaaaacacgcttaaatcctgaaaacatcatcaaggtacgttccccaaggtcgaaggatcaagagtcacgcctgaggtacccctcagggtctccacaaactctgcctcgcccgagcctgttctcggacggggtgagttctcgagagaatctacgtcccagccgaggtcccctcacctcataacagcggtcttcgtctcgcccgagcctgcc

SEQ ID NO: 156026 - DNA, 900 bp, Zea Mays
atcggatcgatagtgacccaacgacaacgtcgtgggtggggttatgaactctctcctcgctcggctgaccgtccatttctgcacagagtggagattattctgcctcgcgcgtgcaggaagaaggtggcgtcctggacctcgatcgatcggtatattcaactcgtgaccgccgatcggcaaacgtgatccagataaccgcgcgactgggcgcgcacctcagatccgtcccgatcttttcatcaaccccaacctttattactatgagacaggattcttatgtggcctatcgcattaccgcgatatactatactaatcacgggtgaatcaacgggataagcatacgaatgaaatcaagacaggtcgccaagaaagacaaagaacgcgtacagtccgaatactcgacgcacctgctcaccgtgccggaagcataataatggccgcttttccgcatggcgcatctcactctcaccggaaagcagcaaccagtttccagccgtgcaccgccctaacaataataaatccaccgtcgccgcagctgagacgaagacaataaatagaatgctaaactctcctgccaacacgtcgcgcgcgcgccctatatatataataaagttatccctcaagcgatccgatcctaacctatccgtttcacacaacacatcctgtttttgtccaaaatacgggcgcggcagactcgctcccccaactgacacacttgcatgctacgacctggcatgtggctatctataatgcatgttactctctctagattcttacactatatcattatattaaattatctacatttctatactaatctattaaaagtttaacttagacgtgcacatcctccatgcccccgtcccagcccatccctcccacgcatgtccacgcccgtcc

SEQ ID NO: 156027 - DNA, 465 bp, Zea Mays
caccaggacccttctcgctcggtgtgacagccccgggcctctctacacacttcgcctgcctgcttccactacaccgacctctgccccgcctgttcttgcagccgtcgcctcttttgtgacttggcatcgtcgtcttggtcaccccggtcgtgatgtgatgtctaagctctccagcagcacctccgtttccggttgtaggggatcttttgagcacctctgtcatgcttgtcagttaggtcgccatgttaggctcccattccccatctccccttctagagcagcaggcatttttgatctgatacactgtgatgtatggacatcccctgtaatcagcatttctggctataagtattatttacttattcttgatgacttctcgcattatctgtggacttttcctctacgtcagaagttcgacacttttcccaccctgtctcacttcttcgcttgggtctccactcaatt

SEQ ID NO: 156028 - DNA, 771 bp, Zea Mays
ctggcgatctaaggggtcctagtccaattggcggggtcggggagcatcagggacacaccagaacactgaaacgaaagagcagagggtacgagcggacctaagacgagctagccacggtgaggtctctttcaaggtggcgcaaagcagatttgggggaaatttggaattggcgagctctggtgaacaattggcatggcttggtgcttgactaccctacggacccgtcggtgtgcttaatttatagtgtgcttgagcggtggcctccaattttggatttgtgcactagcggtcggagaggaagaggggtactggcacacacgattggtggccgcaaccgtggcaacctcaccggcgatctctagataggtcagtacgagtcacggcggcgtggttaaagtgctgaggcacgtggcacaagaccgtgaggtgtctaactccggcgagggttgattcaaggcgatcggggtagagcggacacagtggccggacaaacagtgccttaagctcatccgggggagaagatcttttcaccgtggaacgttatccgggcgccggtgtgcacgaatcacctcactagcgtgaatccacgcgcggggtcacagcggccggttcactgaaccaatagatttttctggtcactgtaccatcagaatcttcttcagtcagtttgacagaccatgtttggggcgaatttccttccgattttgtattgtaactagatcaatgctctgcagcaaagttgtagcctaatagaccagctctaactttgct

SEQ ID NO: 156029 - DNA, 903 bp, Zea Mays
tccctactttctcccactgctcggcccatccaacaactctcgcgtgcagctcagtggacctggcgcggcgctgacggaagggtcccactggccggccactccacacggatgatcagccatggtctactcgtgcgccgtgacactgactgaccgggcccacatactgggtcatcgtcttccccgaacaaacctgggcggacttcacgcgtcaactccgaacctctcgcgtgcaccctggattccgcctggaatctccttgtggttatccccttcaaccggtcctaaatccacggtcgcaaatccagccccattgacttcgtcgcctagctcgcgcgcgccctgaacgacctccgcggatgacgcgccgtcgtaacctctggccgatttctacccagtggtataaacatctcccaaaccgtacctcgcctccttcatccgccaccgttcaagcaaacttgtgcgcatcgttgggggcaaacaaagggtgatgtgagagagagagaataggagcgaccgagaaaagtgagagctgtcgcgccactgccggtgaatcggtacctcaccgtcgctgggggctcggccgtggcactgtgaggttcaacggcaggcatagatgcttgcggtggcatcgctgggcagggaaagaccttgcggccaccgggaattgctcatcggcgtggggatttcaccgccggacgaaactctccgtggccaggcccctgtgcttcatccccccggtaagaaacctatctccggtgatcgttttgtctcccgcatcgcgtagcttggattaatttggtgctgggtactcggggatgctcgattgacaacctcaccggcgtgtgcccgccgcggggttggcctgccgccgtatctgtgcggtggaggaaggagatgggccgg

SEQ ID NO: 156030 - DNA, 395 bp, Zea Mays
gctagatgaggttcacgctggacagtgcggggtacatgcagcatccaggactttggttgggaaggtctttaggtctggtttctactggtcgacggaaaaagtgatgcagccgagttagtacagagatgtgaagcttgccaatttttatcaaagcatcagcatttgccagcacagcaactacagaccatacccgtaacatggccatttgcatgctggggactggacatgattggacagttcaagaaagctcagggaggctacactcacatgttggtcgccattgacaaattcactaaatggatagaatacaaacccattacttctctaacttcagccaaggcagtggaattcatacaagatataatattcaggtttgggataccgaatagcatcat

SEQ ID NO: 156031 - DNA, 486 bp, Zea Mays
ctttaatcgaaagcaaatctgaagagcagtgacagcgggttaaagacctaaagtcacggtcgtcagagctttaggagtggccagtacgattagactatgaaatcctgcctgattgcattgggggtttgggcccggcgcgagttcttttcagccgagccgacagttgtatctttacgcgatctgcagggatcagatttaatcgaaagcttgcttgcttcccagctttccagtcctcgcatgaacagcttgacagcttgtgttgccaatcagcgcaggagaaagggctgacctgacctgacctgatctaacctaacacggctactactgtgttcagggcaggacggcgagagtgcttaggaacagtttgcccgaaagatcctctcttgaactgagtagtagtagtttggcttaagctcccgcgttccagatgaagtgatcaagatgttgatgtcccttgtgcctttagaactggatcaagtgaccaac

SEQ ID NO: 156032 - DNA, 754 bp, Zea Mays
cgctcgggcccctggataaatctgtgcttttctctcacaactaagtccttatatcatattcctatgagtcattgactttacgcgtagcaccctgagtttttaaggcatcgaatccgcagtccttctctcagccgaaacagtgcccgaagcagagaacatgacatcgacactcaacgtaggcggtagtgttctaggggaagagtcaagaagaagcaggaggttacgggaaacacgacggtaactttgggtggccggaggtggtcatagtcggccggtccatgtctccaggcggtggagctcgacagctacgtgtgctccacctagtctgtggtggtagagctcgattcgatcggtcagcaagctccatgggaggtcggtgatgcggtctaccgaaggaattgaatggaggcaggctgtggaggcgggtccgtgtgcaccagcagaacctttgactccggtgaggtcaattccactattccattgaggtagagtttgggctcgagctcgaggaggctttacggaccattggggaagctaatggtggagctggattgggtggaacgtcaccggagtgggctgaccatggtggccggtgctcagaggcaagggtggtgtgtgcggagctcatcggatctggacgctggcttgggaaggtgtggcaaagggctaagagagcaacggagggcatgaccaaggtcttggctgcttaaatagacgcggacacggtggtggccgaccgatgtttcgggtgctt

SEQ ID NO: 156033 - DNA, 481 bp, Zea Mays
ctcacggcttagtgatgctcactttatatttattcatccagctgacttctagaagttccaaagaagtcattacaaaacacatagtttaaggaccagaagcctgagattgctcaccatcttaattagttgttgccttcgcttcctggttgatgattccctgctatcaaggtatagtaaccatcatgtgcgactataaactgcacccaacagaactgattctccaagtgcctcaagaaacaagtggatcatcaattaacccatcatccttatttctgcaggtgtgtcaacacttatcccaaaatatcagatgcgctgtgcactaagcattactataaagtggacaatactttgctaatgaacatattccctttcctggttctcttctccctctccgatttacctttttcaaacatgtgctcgtacaggttaggcaaaatgaaaaagaactcattgctttgttttgaaacgaaactaaaagcaa

SEQ ID NO: 156034 - DNA, 714 bp, Zea Mays
tgctctcagaagttaactttttaaggataacggtgggtgtcatctgttggataactagtttgtagctcgatggcccctttcccttgcgtcgactaggtcgggggaggtggccctctcctcaaagggcctgaaagcccttgcgggggatgtgtgcataacaaagaaccgacatgtatcaacaaccaactcagaaggccagattagtaaaggtcggcatggggcaagtcccgatcatcatcgaggaaaaactaaaccgcccaacaatcctcatagatcactcgggggctacgtcacactgatgcgctaaagcgcatccagaccacggtctagcgggcaccgtctccgagcagcaccatacgagttcgtcctcagatgccacattttacttcgggaaccactacctacgccaagaacaaagtaatcccccaagcaatcctcacagattactcaggggctcgaggactacatcatactaatgcacttccacgcacctagggttttttgatccccatcaaggaagcccccgaccgactccaaagagtcacacgaaggctcaaagcctacttacggatacctaggaacagggtacccatgtgaggcccataaacctcttcctagcccgtccactgagaaagcctgagaggtggggtgaacgatcaagtcttcgccgagcaagcccgtgagcggggcgaacgaccaagtccctgccaagca

SEQ ID NO: 156035 - DNA, 836 bp, Zea Mays
taaatgtccacatgacacagacagatctaggcgcggacggcgggttgaatatagggatctacggggtttcttttgcataatggcatggccgaaggggtatcggggtttactggccgcctgatccaaaatggacggtgaggattagatcccggccgcagtaaacaggtacacgagcgcgtccactcgatcaacgatcgacggtcgcgatttaatgaagcaggacgcgatctgtgccgacggatcaaagatctacggtcgcgcgagtcactcaaacaaaggggtatgatcttctaatcgcagccatagaccgaaggatgaacggcccgcgtggttatggccgcgccacccaactccggtcaccgtggtttgcctccccgcagcggcgccatcgccgcactacgcctgagcttgttcccgagcgcaatccaccatagctacccggtaaaaaccaaatcggagggtccacaaaacggagggggaagttcataccgcggatggttgtctggacggtgctggccgcggtgttaggcggaatcgcgacggcgctttgactccggcgaggaattgccttcaattcaccgctgcccgcgccagcttgttgaccggacaatttcccccggtggcgcacaccaccacggcctggattcggtcaccagacaacgccccagtcgagatcccaaccacggcggcgcgcggccgcttccctctctctctttcggtttcgctctgctggtacgagtagctgcggccaagggggtctcgggtccagggtttagaagcgcaatgcctgcgctaggcacgcgaccacatatatgtggtgggagtacccgacgtgg

SEQ ID NO: 156036 - DNA, 593 bp, Zea Mays
ggaaagggctccggcaaacgacaacgtatgatagcagggcgctcgagaaacttcagcgcaacggcttcacgggctcaagaacgacgacgatgaaagcagaggcaaacagaaaatggtgttgtgcactagagaggagaacgggaggctgcgacctttatatgtgagggagaggtgggattaaagcaggaatcaacgctcctcgatgccaattgttgtgccatattgattcacagagaaacggaagtcgtaactactccaaagatggagattttaagcaagagccggacacaagaatcagaatggttgcgagaggaggggagagggcggacgactgttgatggcgtgttccactacagggaaggcgagtagacggggagggaggcgaggtggtgtccagaccgtatgaggagacgagcaggcgcgacctgctgcggatgatggcggtgctgccatgtccgttcgtttccagaagctgtgtgagattggagaggagagagcaatagaggtgggtcccacatggcattgaaatatagagaggcgagaggtatgaatggaggcatgtacgggacccgactgggcctgtcctggttggc

SEQ ID NO: 156037 - DNA, 491 bp, Zea Mays
gtagttttctcatctccttgctgccctcctacaattgttgtacaaataatgaatatccaaacatttactatagtaatatctatggcactcaatatatacatagtcaacacaaaatattccttacatgtttttcagatcttgagcagttaccggtacgttctctagcccatcatgcatgtctgatataaaatcaactatgcaatgctggggcactcggctatcatgcattgcatcaacaaaattaatgaattcaacatccctacttttgttgcaacgtagatgttgtttctctgcttcgtcagttatgaactcatggttatgctccaaattcaccagttcaatctttgcagctaccaccctttttttcatcatcatatattttttaaatttcattccagtcttaaattgcgtacggcccgaattcctattcctcatcctaggtgtatcatttggttttggtgcacttttaccttcacgtgaacaatttatcc

SEQ ID NO: 156038 - DNA, 449 bp, Zea Mays
tctgagttgatggtagcctgacctcagatctatcttcgagaacacactggctcctctcaactgattgaataaatctcaattctgggcagggggtacttgttattgatagtaacctcattcaaggatctatagtcaatgcacatcctctttgttccatcctttttctccacaaacaatactggggctgcccaaggtgaggtactcggtctgatgtagcctttctataacaactcatcaatctgcttcttgagttccaccaactctagtccagacactcgatatgctctcttggaaataggggcggtgcctggaataagctctatggcaaattcaaccttcctttcaggtggcatacctggtaactcctcgggaaacacatctgggaaatctgatactacattgatagcctctgatggtttaatcttctcaatatgagcggtgacttggtg

SEQ ID NO: 156039 - DNA, 420 bp, Zea Mays
ttcatgtctcctatccgccacccatgttttggtccccaagaccggtaaggctatttttggcctctagtgagctataacacacattttcatggcaaaacaaccattttttatgtctatgttccgccacccatattttggtcttcgtagcacgatacatacagtttttggcctcccgtgggctatagcaaacattcccatggccaaacaatgaatttctgccacccatattttggtcttcgtagcacgatacatacagtttttggcctcccgtgggctatagcaaacatttccatggccaaataatgaatttcatgtctccagtctaccacctatgttttagtctgcggagatcggcaaggcatttttggctaccacatgtttttatgacagaatagtcattttcatgtctacggttcacct

SEQ ID NO: 156040 - DNA, 893 bp, Zea Mays
tgactcctttagcccactaaatttgacatggcaatccaaatgactcttgacagtctaaatcgatcttgcatatcagactacacctagtaatgaatcggtgtgccaacattgacaaaaagaacatcacatttataagaagctgtgatttgcagagttggactaaactttaacaatatgtttatgaaatcatattggatacaaaggtttatgaaaaatgagtttgtgtttccaatatgtatatatcttcaggaaccaaaacgaatataacgtgtaacgaagaacctgaatggaactttaatttaaatgatacatatgggcattcatacctgttgaatccaacgtaaacctgaccaaatgtgccgctacctaacgccttcccctttttccactgtgattgagattgggcagaagcaatgggagatgaaggaatgagacaactagcaatatgagctggaggacgaggcaagggttgagacagactgctcgcgaaaaagggttgggaccgactgttcagatcatccatccttttaaccactgaccttgaactaactccaacgtctcttggacttgcaaaactggaagcaaaatcatgccctcttgggcctggggaaagactccttgttcttgcacgtgtatttttatgaaacattctaccacgcaaagtagtcccactggttgcagcttcgtagctttgtaaatgaacttttctggcattggtgacaggcacctcaaaaaacttttggtgctcacgcggaggcggagcactacatgaaagaaggtgcttttcttctgccgtgcgcttatgtgcatcgggtggcacagttcttgctccaggatagacaaatggatccgcacacctaaaggttgcattgttgcaccaaggaatagaaaat

SEQ ID NO: 156041 - DNA, 509 bp, Zea Mays
tggtggaagtcaccccgcggactcggaaattctgttgctcaagccccgaccgtcttatgcctatatgtagcgccgtagtcctcggtcaatcctgtttccactatcgcgactccattgtacggttgtggccgagctgagagagcacgtgtggggggtgcgcatcgtgccgccatagcgtaaacggtgtcggatggtgcctctgccccgaaccgggtctcgggtgattcgctagtgtgtgacgaagcagtgggcgggagtaatcgcgttggagactgctgcggtgctgggaatttctcgccaaagcgaagctccatcccgaacccgcagctcgccgtcacctggaacctccgtgccctaaccgtcggtgagtacccgacctcagtattcgcgtagacctcctctttgttttgcgctaggacaatgggtgtgtggtgctcagattagccgggacggtgatcgtcagcgggtctctgccgcatgtgttgcgtggcgccgctgcctggccgcgg

SEQ ID NO: 156042 - DNA, 603 bp, Zea Mays
tcaatatttttgtttgacagttcataatttttagaacccaacaaaattggtttgactaatttaggatgagtatttcttaagttatgcatttaattgatttactactgatttaaagaattgaaattcaaatggaaaaggaaaatctactttgctctagggtctctggtattttcttcccgtgttccttacaaacaggtcctagggtaaccctaaatctaacctgcggtccttcccctaaaggaacagtacccacggcggagaaaagggcagcgaggcttaccggcggcgagatagctctggcaaggtggtcgatgacgtagggaggttgcggcggtcacgtcggtgtgcgaatcatcgtcggggatggccggagttggtcgggcctcgtgcgctagcggggaagctcatcggcggcgaggattctggcctaaccacggtgacatagcacaatccagtgagtcggggaccttcacgagaggtcagggaggtcatgggtgcaaggaatcgaagaatggttcacctggtagcccggcctaaccacggcgacatagcacaatccaagaacaaatgtgaatgagctaataaattacattcattatcttt

SEQ ID NO: 156043 - DNA, 994 bp, Zea Mays
gtcgttgttgacccgcatggtcagctcttcctcgtggaacagatcacgtaacagccggtccgttttccacgccgcgccatgtgcgccaccagctgattccgagtcctagcctctgactaaattgccgttcccaccgaagcggggtttaagaaccgaagtatcgtggcctttcctctgcatcccatccaagcgccgccccatagctcacttttccttgccccgccgtgccagcatcgttaagggcggatattgccgccgccatagaatctcgggccgtgactagccaaagctttaggcgggagttcaattggattcgcttggtcgcggtgaaggttgccagcgacgtttctggggcgaatcggggcccagcaccttggatttctcgccgttgagttgcagtccaccgcgtaccgcactgctctggagccagggcacgactcgacataaacctaggtataaacgcttatcccatgctcgcgttgtccttctgctctcgttgcgcgcttcggcagggtggttgggggattgttatcgggttgggtttgctcaccggcgtggtctccgccgtgaacggaggtgagcgccgccgtgcccaatgtcagattaggggaaggaatgtgcaccgttagatctcaatggacagcccagattagatgtctgcgtaccctttcacgctgttgtatgcaggtcgtggatctgtgatcgtgcggttaggctgctggggctagtcataatagatctggaccgtcggatccgtatccgacgactgtgattatgttctggttcgcgcggagataagatttaatcgtggccgttcgctcaatccgatggcccaaatcgtgcgataccccttcggctagcgcaattgcaaaagagaccctaacctctctggaaatcaacccgccgtcccccgccggatacgcctgagtctgggaaatatttcgagttagcccctgcgttactttgtttttgatgcccagcccagagaacaatg

SEQ ID NO: 156044 - DNA, 850 bp, Zea Mays
gagcacaggggataggtgatcctggcggacatgcgacatcgcacaacacacactattgctccagtgaaccctcgcctaacgcaaggtaatccccctactaatggagagagaactcactatgggttcgtacctcaaggcagaagacacgacgtcgatggcgaatgatccaattggctaagccaacgagctcgagtccagcaatgatggcgtatatatgaggtggttctctcggtttctctctccctccgcgagaagcttttgcttggatgtccatggataggctgttgaggctaatctctagggatgtgtctggttttatagagatgagcacgagattgaggtggtagatttagccgaatcaacgaagctcatggtgcttggttccgttttgtactctgttgatcggtaaatacggctggtgcctggtgctacggaacgaaacctaggggtccggctgtcagtgaacgtgggatgggttggtgtcatcagcccggcagaaatgaataaacaaaaagcgggtgtacgttctgacaggggtggcccacgcgacagagacatagctcggcgcgctggatgctcgccgagcgaggtccacgcgccattctcgcagaaaaaacatggtggagaagagggccaacatggtgaaggtacgacctgggccagtgtgggtggattgggcccaaattagagttttcaattcctcttatgttttcattttctcaatttcaaatcaggttcaaatttaaatcttgagttacatttaaatggagttcaaacttcaagcctataaaattctcaaaccaaaatccaacatgcatgcaaaatcatagttttattaatttatttattt

SEQ ID NO: 156045 - DNA, 351 bp, Zea Mays
gtgcccttgaggctcagtttctcggcaaccgctggactcggattctgtaccttgagaccgctttccgccagcttgctcagggcgatctctctgtggacgagtactgtcgtcagatgaagacgatggctgacactctccgcaccctcggggccccatcaccgatgagagcctcgtgctcaacctcctttgcggcttgagccctcgcttcgatcgcgtgacgcccatccttacctgcatgaagccgtttcccacttttacggaggccaagaacaatctgcttctcgaggaacttcgcctctccaccactgcgatcactgctcccgccatggcgctctatagcgcacctcaggc

SEQ ID NO: 156046 - DNA, 864 bp, Zea Mays
tggtgtagacaaagatgtgaggggacgggatgagcacgaatgcacgattccaatgaacacgtagggggagcacttggtattgagtccaagtgcagtgggcagtggctgatgaatactggttggcattggagtctattttctatactacttattaaggctgcaatagtagcctgcctctgacatgttctgcctctgacatgttctgccatcagctgtgttctgccatcgaaccgtggtacacaccttctaacatgtgggccccaccgaccgtacgcccggtcgtacgcaccatgcagtttcgtgcaacaaaatgtacagtaccttacacaggttcataagccacgttacatctctcttagtgagcaacatatggtacacaacaacgcttataagccatgttccatctctctcaatggccggtgtggcactaatcaaacaaatgccataccagcgcgcctgtgtcagcggttcatgtggcccagtgattcacgtgtggaccagaggcccatcgtgtggcccagcggcgcccagcgtgcggcctaacgtgtgggcccagcacccctcctcttcaacgcatctgacctaaccaccgtcggcagactccagcatcccaccgatcgcatagcctcctccaccgcgctccaacttcggcggcctccccctccctctcctcttcaacgtgagacacaacggtctcatgttcccccaccgacggcctccaccttctcccccaccccaccgtcggactccacctccctaatggcggcctccaccaacccactggcatcctccaactcctcccccactggctgccttcacctctccctcctcttcaacgcacggcacaaccatccccacccccac

SEQ ID NO: 156047 - DNA, 514 bp, Zea Mays
atttttagccgttttctgttcgttttcatccctaggtacacgtgtaggggagggcaaaagatggataaaaactatttttagtaccttttagtaactagagaactaaagtttagtcaccctctgtgggggacaaatatccccgaatccactagaaggcgaaaagacccttgcatgggccacagacccgtcgcctcacaaggtcgcttcgtcgtgggccgggaaaagactgcaaatgagatgggctgacccaggagggcaatgggatcatgcccggatcatccgtcagatcgcgcacaatttcaaggaaccgtccgttctctcccacgtccggcgtccttgaatatcgggatagttcgggatagggtcgatgagttttccttaagataagctaagtcggttcgctattagttaggagatatattggaagaacgtgatcatcatgtacgtagggagtatcccacggtcgtgtatataaggcccaggggaacccatcattttcatctctctggttagc

SEQ ID NO: 156048 - DNA, 457 bp, Zea Mays
cggagcgggtccagctggtctattgaagcttggtcccttgggtggaagctcgaaggatcgagctctctggtgtcggtcttgctgctgagctcggagaacttggaatttcctcttgaggtgacctttttcttcttcttttgccctttccacttatatggctttgttggagaggtgcgagaagctgaggaaatcttggctggcgaggatggtcttgagttctggtcttagccctttcagaaaacgggccatcttcttggtttctgtgctgacatcgtcaggcgcgtaacgagccaactctgggaatttgtgcacgtactcactcacagatcttccaccttgagttagttcccggaattcatcttccttgagctgaatgatcccctggggtacatggtgctcacggaaagcagtttcaaattctgcccaggtagcgtcccttacggccgcgctaaaggta

SEQ ID NO: 156049 - DNA, 302 bp, Zea Mays
gtttgcgctgccacccgttcaattggatgcatttaccatggagccgattgaatggtgggtaagttatggttctgagactccagatttagctgaggttgcaaaaaaagttttatctcaacccatcagcagttcatctgccgagagaatttggagcacattcagccatatccataacaccaagcgcgataggatgaacactaccactgcagataaattagtcttcatcctctccaatttgcgacttttgtcaagatcaacagatggctacaaacatggcgcacatgctaaatgggacattgatc

SEQ ID NO: 156050 - DNA, 693 bp, Zea Mays
aagacaatgaggcaaagctcattacttatatatattactatcatcgtctttacagaaggactagttcattatgaattgaccactagcagaagataaccatcacccttactatactactacaataccccacactactaccatacaatactaacaaagctggtggtgcctcaccaccagcacgatcgctctcgtcgccgctaccgccgccctgaccgtcgcccatgccgctgcctccaccctgaccgtcgtccgcgccactatcgccaccgttgtcatcaccactcacgttatcgtcgcctttgccgctgtcaccattgctgcccccactgttatggctgtcctcgtctttctcctcctcctcctcaatagagtcttcctattcgctctcgtctgactcatccgagccggcaaggcctgagtgctccaccgcccggatgaaggactacttcgatggggtaagccctagggagtcatcgaagtcggtcgtcagtgagggaggaggaggaggctaggagttcccaccgcatgacccggagtactccttggagtacttagagggcgcttatgcttggctcccttgcccttgcaatccttacatcctttggcacctctacctccggccataggagctctctaggaaaagaagagcttgcaagaagtggaagcaaaagtgagtgaagaagcaagtagcga

SEQ ID NO: 156051 - DNA, 741 bp, Zea Mays
tcggcatcaagctcatctgatgtttttcttccttggaggtataagaggaaaaggattgtcgtcactagaactatcatccccgctcccttcaccggagcttctcattgtctgccactcaagtttggtcgcgtcttcatcaactctgttagacgcaccggtgcagaacacatccatcctagtaggtacctagtgcacagctggttccatcaataagggggtcgaccgaggatatactgttagtttgatatactggttccatcaataagggaacttggagaaaaggtgattcaaaagaaatcgagtccaaaccctagctgtacccggccaccgtcgccggcggcctccccttctgccggcgacggtgaaggcgatggcggcgcctcaaggcccgcctccgtgtccctcctttcctctcctcttgcccccatcttgtccttggcgtcatatcacttcggggttctaatagcactgtcgatccggtctccgcgggtgtagttccccgctggcggactgtgggcgcggtcggcactgccgtcgcgagcacctcacgaatctgtcatcgtagatgtgctcatctatggggtgttgtggttgtcatagagtttgtggtcgttcatagttgtaaaagttcttattaagtttatgaccacatcgctaaaaaggtgtttctgatcactgtcaccccaggacctatccaaatcgctttccaatgcagttagacagagaaggcatggctgtgat

SEQ ID NO: 156052 - DNA, 780 bp, Zea Mays
attaaatatgaattttccaagtttctaggattatttttatattaaaaacctatttctatatttgtttgtctatttttattcttctctggactcggcgtcaaatttcagaaaggtcaggggcatcagcacaagaaacccgagacacagtgagcagttagactggatcccgggttgtttctaaaataacatggggtcttttgcatttttatagggccgaaggggtattacgtaaccagggacacccgatcaagtctggacggacgagattagatcctcatcaaatcgaacgggtacgctacgcagatcctcgactctagatctgatggccaccgttttaaatagcacagatcgcacgaagcccgttcgatcatgatccaacgaatcatatccatcttgcgaaggggtacgccagatcctaatctcaaccgttggctcaatgatcaacgacacacacgcgacttcaccaactccggcggtaccccgcggcggtgcccggtgcccccctggcagaacctcgccagcgaatggcgccacgacgcgcaagcgtcctattctaacaacggatccccctagacataataaggacgacgtaggaaatcagaggaggtgacataccgacaattgcagcgcggatgcccctggccacggcgcatggcggacacgccccggtttccacgacttcggcgagcaattaaaggatggccggacatcttccgccctcccaaggtggttgcacacaagtggcaccaccaggctaagctccctggaagtaccataggg

SEQ ID NO: 156053 - DNA, 544 bp, Zea Mays
acatgagtgtcacggtggccaagaccgatggcacacgaccataaaaattacagtcacatatgcgagctggaagaagacatcgagggagaaactgaaagaaaaattaaattgtaatatgacatgtgggtcttatatatttggagagattgttggtgatctgctagagaatattccccaatagtctgaaaaatagtattggtgatcatcaatattgtcctatcgcggatgaagtattggtgagctgttgaagatgctcttcccccttacggtggtgattgtctaatttgttagtacatgtggtcaaagctagctatagagaatatttttggataaaagcaatttcattgcaataccatgatggtacggttgatagattcgccaaaatgaaaaatgatattagttatcttctcatcctttcattgtttgggcctcattgatgcatgttatggattgttgtagttgaggagtcgatccagtcatcaagcattggttgtagtcgaccatgaggcacatgtgaagcacaagtcaatatttaagtagtctt

SEQ ID NO: 156054 - DNA, 767 bp, Zea Mays
gtggaattcaaaattagggcgctacgatggatgatcggaggcgaagagtggttcactgggttcgtaacaagtagatggaacaagccgaggcatcaatttatagaggacggccacgaggagggcgaatttggacggggaagcgcgcggggtgagaagggggaagagtcaccggagtttgctaacgtggcgttcactgggttacagtctatagcggtcactgctgagtcttcacggcttgcgacgagtggtgagatgacttaaggcgtgtcacaaccgagctagacggcggcacaacagcgacggtctcggaaccacgtcgccagtgcaagtgggtatggcgacagggcaaaacagtgccccaagttcatcccctgcgcgagatttttcaccctacatagttatctgcactccaccaggcacgaatcgtaacggcggcgaggatcacgacgtgggatcactggcggcagtgcgctgaacctagcgatcttcgtcaggttactgtaccatcgcgaactcccttcagggcgcctgacagagcaaatttgagagcgttttactccaaaaatcgttcagcgcctggtcaagcttggtataacaaagttgtttactaatgtttgagcttcaactttgccacagtgaccctgaccttatctccattgaattaaccatgaactgcttccaaagttaaccaaatgtcactgaacttaggtttttagagctaaggctctctgacgggccagtttcaagtctctttttctcccattttc

SEQ ID NO: 156055 - DNA, 574 bp, Zea Mays
cctgcaagcccaaggaaactctgaatctgtgtaactgtcgccagcgtgggcctagattggatggcctcaatcttgctactgtccacctcaatgccctgcggagtaacaacatagccaagaaatgacacacgtgttgtgcataagttgcattttttcaaattaccaaataagcgagcaccgcgcaaagcatcgcaaactacacgcaaatgttccaaatgctcttccatagacttcctgtaaattagaatatcatcaaaataaacaaccacaaatagtcctctgaaaggcctcaaaacttcattcatcaagcgcataaatgtgataagggcattaatcaatccaaacggcataactaaccattcatataagccaaattttgttttaaatgttgttttccattcatcctcaagtttcattctaatctggtggtacccactacgcaaaatcaaccttggagaaaataacagcaccactaagctcatcaagcatatcatcaaggcgaggtataggatagcgataacgaattgtgatgttgttaattgctcgacaatcgacgcaatgcgccaggtaccat

SEQ ID NO: 156056 - DNA, 519 bp, Zea Mays
tctctctatatcaaaataaaatttgttttgcttctttagtggattcatcatcatctagttgaatataaacataaaaaatcaagagctaaaacaaatactattttgaaacggatggagtattcgataagcaattgagacattagtttaacaatctaaatgagactagttgatagcgcatcgctctttgcgtatttgtgtctagaatagataggtttaacaggaaaaagtgttagcgtctagtggctagggggcctggtgcggccgcacccttggcacccccacaggtacggccctggtcagcatactgccatggtcaccacataggttggcaagtggggaggcaagtggaggtcaatacaaggcgatgaagctgttagcaagcaatcataagtggaaagggatgaacaagacaacagaaacagacgcgacagaagagaaggcacaagcgcaaccgaggagatcagagtgcgccagcccctgcccaaatataaatgtggttgggccacgttgggccatgta

SEQ ID NO: 156057 - DNA, 804 bp, Zea Mays
caggtataacgggagcccagggcttcggatattaaaggaagcccaggtcggttcccggtctggccgatggaacaggcgcgcctgtgttttaacgtggggctgagaggcggcatgcaggttagacggcgccgtgacgcggttgtttgaatggtaaggaaattgcgcggaattaaagggaatatataccacatgcaaacgtgattactgggatacgtgggcgcgtaaattatggatcttacatggtaagtaatgtgcagaaggtaaaaaaacatgaagcataagatgttgaaagatatggcataaaaccgaagcggcagaatagatgcataaacattatataccgattggcgtaaaacgttgtgtcattgtgcgtaaattttatattatgaattttagtttgacaaagacgtcgccataatatcgggacggtttcggaaataatggggagaccctttaaacgtggatgcaattactttaatagtatccgagatttactttcattcggaaaaaagaccactaagcctgcataactaatcggagttggagatggccggctctggagggtcgccggcgatggaaggagatggcgttcgtcttgatccagagacagagggaggagttggtggtaactcattggtgacaccaccgcctgctctaatgggtcctgagatcgccgagatgagcataggggaagaaggagaacaaagggtccgacctcctatgtccaatattagctccagggagatggatacgccacagatactgcgttcacatgtaagtccaatcgatgcattttgattattg

SEQ ID NO: 156058 - DNA, 644 bp, Zea Mays
cagggacttaccagagtggcctagccacggacgggctgttctacgcgatgtggcggaccagttttgggggaaaatggtgttgcggcgtctctggacgaaattaggagatgggattggggctacgcggccgtaaagaaccactgattccccgtgcacaaccaatttggagagtgggagaagagacacgacgaattttgggttgcgatgggtttgcaggtgaagaggaagtcacctcgccgtggaccaccgtgctatttatagccacgacgacccaatagtcgacctgcggccacggacagtaacacacgcgcatgcttaccacgtcggtagaagacacagtgagggagatcgcggcatgggtgacaccgcggcaaagtcactgggtcacggtggccgccggtgaggtctccggctggactcagggaacggtgccacgtatgcgctgtttaactccgactctatccatttccgatcgcgcacgaacccggacggcggcggcacggattttggcgcaaagaggtcgccgacggtgagcaagccacgctggcgttctaatcctatccggctactgtaccatggcgaagttcagtttagatgcctgacagagccttttgaggcttagttttctctcaattttgtgtggc

SEQ ID NO: 156059 - DNA, 513 bp, Zea Mays
aagctcggattcggttgcgctgtccacgcgagaacggcggaatccagttgagacgggtctaagcaaggagatggctatgacagccgggccccacccggaagtgaaacaagaaggaacggaggggaaaggcgcatgcggatattgatgcgcgggccccgcagttcggcgaccaagcgcgcgcggcacaggctggtgcgtgactgaccacacgagccccgcatgtcatacccaagcacgcgccagtagaggctgagagatcggccccacacgtaagtggcgggtgcggctgaggacaagtgggctgcacgggatttctgggcccagactgaggggagaagagtgggctgagggaaggagttttggcccaaacgcagaacaatcttgctttttcttttatcttttctattctcttttcaaatcccattcaaattcaaactcatgtttcaaactcccaattttcatgtgtcaaaaataatcttaatatgaacataatctctattgtttacaatatta

SEQ ID NO: 156060 - DNA, 605 bp, Zea Mays
gacaaatatgtgtaattcacaaacctgatccattgccaatgtggacttgttcattatcgtggtagcgttcacggacggcaagacgatccagatcactagtgatgtgttcggtggtgctggtgtcagcgtaccagtcggtatcaaccttcgaggatgcggtggcgacgtgtgcggaaggaggttcctcggagtaggagtcatccatgcggtactagtagcgtatggtcgtgtaaccttccttatcgcaaatatggcagatggggcgagaagtagagctaggcaggcgacggtcgttgggacgtgatggagcacccccaccaggccgcccacctcaatggccacgggagcggccgctgctatggcccttggattggccacctcggctagcgtagttggcagatgaccccatctgtagttgaagatctacatgatgttgtagttgatgcgccttaaaagtgacgaggtgggcgtaggcgtcatagagggagatagagtccttggtcgttgacgtcgtagagggagatggagcggaggctaggacaacgataggtcgaacctaggcacaaccaagaattagcacatatgcattttatagaagtccgatc

SEQ ID NO: 156061 - DNA, 496 bp, Zea Mays
tgacggcgtgcgagtcatagacgacgatggtgatgtcaatggtggagcctcccgatcggtggtggcgatgacgagccgacattgatggacgtgtagacgaagaggcgtgacaccgacacaggcaggcgttccggttacgccataggccacgcctgttgcaccgtcgaagaaggtgaggaagccggtgttgttgaagccaatgtcgaggatgcgtgagtcgactggcggtgggcgacgcaaacccgatctctgatctggaaaaaggaaaagatacacaacaaaaacgacagatcaccttgacacggagggctcaaccaacaatggaggactgaccatctccgcgacacgaggaggcagggcaagggctgctggcggcctagcctagctccatggtgcgggaacggtcgacagtgaggagcccagcaccgctgcatgacgaggagtcgtggcacagctccgaggcgaggtgactcccgacgtcgcaacctcgaagtgg

SEQ ID NO: 156062 - DNA, 776 bp, Zea Mays
tatagtgctaggcccttctcctagtagtcctagcagctagctgtagcctgtaggtgtagcttctcctccatcaatgatgttggggttgctgtgcatgtagccgccgatgacacgcatgatgttgcagttgcatgtagttctccggcatggtcctattggacgtgaaagcaggtgtaggcgtgtagctgacctcgccgtgtaggcgcgcatctcaccgcgtgctccagggagacgtcgttgagctacctgagctcccttggcgaccatgggccgtggtgggctggtggctggaaggtcttgttgcaggtcacggtgaaatagggccgaaggggcgcatctgtcgggccggggcacccaggcagcgacacggtgagcccatatctcaccacgcactactatttctatttcgctggccataatgccctggatctctttctggtggaacatctgtatgaaactgtgagacagtgctctctttctcgtgatcaatcagctccagaagcacaaccccgaagctgtacacatcactcttgtcgctcagacggtggctgacaaagctctcagcccagagttccctggatgagcacaatgaaatcgttcctgtccatggacttgacgccgctccgaaatccgacaccttcgcgttgtgttcctcatccagtggcgatcttcagtctaagatccagtgggaccggtgatccgcttccgtcgactgcgccatgaaggaactcgaagagggtgccgttggaaacgtactcgtacaccagcatcggcac

SEQ ID NO: 156063 - DNA, 769 bp, Zea Mays
gtttttatcatgtagacgagctggtcgcttcaaaatacaccatcgatgtcgtaggacaccaaatgctcgttcaatatcctttctttcgccttcttgatgattagcaaattcctgatctttgtcattgataggcatggatatttacttaacaaaaatagcccattccggataaattccatcagcgagacagtaaccttggtcatatttattcccattaaccgtatatttcacccgagcaacttgccctttgagttctcagatgaaaattgatgattgttgtaggacattgatatcattattagaaccagcaacaccaaagaatgcatgccaaatccaaagatcatgtgaggtcactgcttcgagaatcagagttggtactttttgaccacctcgagtgaattgacctttccatccaacaggacatctttcccattgctagtgcatatagtcaatactccccaacatgccaggaaatcctctactctgtccaacttttagcaaacgttcaatgtcttccaccggagtccgtcgcaaatagctttcactaaaaacagcaataataccttccacaatttttttcaaagcttctaatgcagttgtgtcaccaatcttcaaatattcatccaggtgatcagctgcactgccattggtcaattggcgtattgctgctgtacatttttgtaatggtgtcaggccttgacgactagtacaatatgtccttgtagtgaaatagtcagaccacttgcctagctcctcaataatgtgcaga

SEQ ID NO: 156064 - DNA, 1142 bp, Zea Mays
ggacactaggtgctgcttcaactcctggaaagcttgttccgcctcttcggtccaagagaagggtccggacttccgcagcagcttgaagaaggggagcgctctctcagccagcctcgaaatgaagcgactaagggcggctaacgaccccgtaagattctagacgtccttgactcaggccgggggcttcattgcctcgatcgctttgatcttctctaggtttgcttcgatgcctcggtatgaaaccaggaatcccagcaacttcccagcagagacaccaaaaatgcatttgtccgggttcaacttcgtgcgggttgcccgcagcttgtcgaataccagggttaagtcttccactagggtcgtccctttcttagtcttgaccatgatgtcatcgacgtagacttccaccttgtccctaactaggtccccgaaagtcttactcatcgcccgcacaaatgtaggaaaggcatttttcagaccgtatggcataacaacgtagcagtaaagcccgcccaccgttacaaaagtggtatgtttcctatcttccctagacatctggatttgatggaaaccagagtaggcgtctaagaatgacaataggtcgcacccggaggtagaatccacgatttggtctattcgtggcagtggatacgggtccttgggacaggccttattcaggctggtgtagtcgatgcacatccgaagcttcccattcgccttagggacaacgactaggttggccagccatattgggtgatgaacctcctcgatgaagcccacgtctagcagtttccggacctccttccggatgaagtcctgccgttctacagactgtctgcgaggcttctgtctcaccggcttggcgtcggggttgatcttcagatggtgctcgatcaacttcctgggggtcctaggcatctgcgacggctcccatgtgaacacatcgatatttgcctagaggaaggcgatgagcgcgagttcctatttctcgtccaggtcacccgcaatgcgagtggtctaggtggaatccgcagtgagccggatggctttgacaaggacaccatccgctccggatggttgtacttttggcgccttgggaagcgccttggtaccggaggttgaggggttcctccttccgtcgtccg

SEQ ID NO: 156065 - DNA, 743 bp, Zea Mays
aaatcaaacaggaaagtttagttactaggagagagctgtttaaaacatcatcaaccaatgggactcttgatcttcttcgggagtgtgtggtcaccatggaggtctggtttagattgctgtcctatcggccttcagggtttgcttgaattaagtgcaccatcagtggcagagtggtggatacaggcttgtgctctgctgccaagtgacctgtgcaaggacttcgactcactcatcctactggtgtcctggaccatgtggaaagagaggaacaatagggtgtttggttcacagacagttgccagcacccatctgtgacgaggtagtgcaccagaggggttcactgacttggcaacacttctgagattgatgagcgccttgggtctaagggacgtcgtgtaaagtttgcaaaatgtagtctggcaaacgcacaggatggtgtcttgccacgtgcaagcaaagtattaggcatacgctactcttgttattccgatatagttggccactttgtaatggtcgccttttttcctcttaatgaaacacgtgcaaacggacacgttcttgaaaaaaaatgggactcttggcatatgttagagcatttcccagagcaaacccttcgactaagtggtggaattgacaggggaaccctactggcctattgcggtacaatattgggtatagaaagggtgatacagagggaaaaactagacattatcctggtatatcatacttacctagcaaccctt

SEQ ID NO: 156066 - DNA, 657 bp, Zea Mays
tgacatcgaggacgagtgggacgagggaacaaatgttctggacggcgacaacctgcgtgtggaggttgagagtggagccctcctgctgaagcagtgcgtcggtaagggagagtccgccgacattagaggcagtgtcgccggtggcgccatggggagggagatccttgacctgaagtggtgcaactttcacaggctgcgcgttcctaagcagcacgaaggcgcgtggaagccacctcaatcttcttttggaccgcaacggcttcacggtcggcctcaagcacacgctaaggcggcattgcgggctgcttgatctgcgcgcacgtgttcctcgatgaggcgatggccattagcagcaccgccaatagtagagaagacgttggcggcgacatcgtcgacaatatatggaggacatgacgctgggccagcaggcgcacacaggcagcgcacacgcgcgcttgaagtagtgttggtggggaagggcgtgctgggagcagagcaggtggagagcactaacatgagcacatgcagtggaagagaggactaggctcgtggtaccatgcaagaaattgaatctatgtgcaataatagattgatgaatgagagacacagacattacaatatataggggtgaggagatcttgggcaaaaggaaaccca

SEQ ID NO: 156067 - DNA, 642 bp, Zea Mays
tttgttctcttgtgacccgtgtccgccgaagatgacgttgacttctccatcgacgcgcgggaatgctctgcctcctcccccttcctgccactgaggttgtcgaggttctctgggtcctccttgtggtgggggaggcggtagaggttggaagggtcggccattcccgacggagtgcttgaagtctctgcagtttcggagggtgtgacgcatatctttgtggtacgggcactgggcgtcgaggatatcgtccaatgtttgtttgcctccgcggggtgcccctcgagcacgagagatgggtggtccagcggcatggacttcttcacgaggcctcttctcccagcgcttgtcggtctgctggttcacgtcacgccatggtgcagatggagcaggcttcgttcctccaatgagctcctggtccctttagtcggcggtgatgtagaggtccgcctccctgaacagctgctcagaagtggtcgacgccttttgtagtatggctcggacgaatgccaagtcattagatccccggtagaagtcctcgatcactgctgcttcagcgacctcaagaatacgatttctcatggtctgaaaccttttgaggtacgaccgaagagtctcatcccctcggcgcctgatggatttgag

SEQ ID NO: 156068 - DNA, 674 bp, Zea Mays
ttacacgacacgacctcgacggcgttcacgcacggctgagctccgacgagctcgtagaccggccgattggggcaacggctagggttcccgagcagcagatatgaaatcgaggctatcttgatcatttgccctaacttaattgcgcttatgatcaactacggagctctggccacggtggccgtgagtatcgcggctagagcattgtgttcccggcgatccacgaggttctaacttaattaaacgggtcagtgatcatccatagcaagtaagaacgttgaaacaagcacacagaggacaagtgtggacctgatttgggctggccacgaagagctggagttcacggtgttcttcagctgatttggggggaatcccaaattcgagttctctggtgggggtttcggggtgcaggtgggtgcagtggctgcttgagtacatggcgaagctgagggcgtggtcaatttatagagtccatgcgcggtgatcgcaaatttgggcgctgacgcgcggcggtcggaggtgaagaagaaccagacgcgcgtgagtgcgtgtccacggtcgtggcgagctcaccggtgatgatgggactgctatagggagtcacggtggcacggtggaaagactcagacacgcggcggacacagagatggcacgacggcggcgagcaaccttatcca

SEQ ID NO: 156069 - DNA, 538 bp, Zea Mays
gcgccgttatgcgcaaaacggagagatcacggtggcggttagtatcgaggtagtcttaccttggattatgcgcacgggtgccctgaccacggcgcacggcggaatgccccggactccacgacgtcggcgagcaaatccagggcccaagtttgacctcccaagctcaattcgtcgccctcgcgatccgcgcacgctgccgaacgcacccgagtcaaccccggtcgctaattggtggcgtaggctcgagtcactggcgacgacggcgaacctcccaacggacgaacgcgacggtggtttgtgatggggtttatccgatgtgggcgcgagtgggcgagagaaggggaggaccgggtcacgtgagccacattttatagtccctagcgtcgagcaacggccgggcgaattagcagggagtcgcccgatttccccggcggcgatccgccatgggcagcgaggtgggcgattctggccaacagggcccacaaggcagcgatggcgagctacggatgggtgactcgtgaccccgggtccacgcgcc

SEQ ID NO: 156070 - DNA, 627 bp, Zea Mays
tgaaacctaagtcatctattcgtgagtctattacatcaaacagtgttgagtacaaggctcaatacctagctcgtttgacatggtcacttcagtgcataagatatttgttgcgtcagggattggcatttcgtggtcacgtagagggaaagaattcaaataaaaaagggaattttcgagaacttttgcaatggcttgcagggaactttgaagaagttaataaggtggttttaggaaacgctcctaacaattgtcagttgatagatcacaagattcaaaaacaactcatttgttgttgtgccaatgagactaccaaaataataatggatgaacttggtgatgagtgttttgctattcttgctgatgaatctagtgatgcatatcagcaggaacaattggatctttgcttacgatatgtcaataaaataggagagccagttgagagatttcttggtcttgtaaaagttgcaaatactacatcattgaaactaaaagaagcaattcagtcattgcttcttgaatggcaattgcccttatctaagatacatggacaagggtatgatggagctagtaacatgaagggtcatgttaatggtttaaagaaattaatgatggaagaatcaccttctg

SEQ ID NO: 156071 - DNA, 485 bp, Zea Mays
caagaacatctgctcgatggtcatcgggggtggcggtggcaaatgctgctgcggggctgcttcctcttggggtgcctgttgttcaggctgagcacgcctcgcacctctgcgcctgttctcagacatctgtagaaatcacacacatatatcaaatctgactctgcagtctttcagcataagaaaagatgtatagaaaatcttcatagtactgaacaattgaccatctccactgacaggttctcagataaggaggaaagtggatataaatggattacccaactaaataactgacttttattaataactacaccaagttgcaggggacacccacaccttggtgacaatcattacaaagatccaacttcattacatgtccatcataacaagcattcaacatacgataagcaaactgactctaactaaaactgactagactaagacactgaattaagcattattacatactccaactctatcgatctagg

SEQ ID NO: 156072 - DNA, 684 bp, Zea Mays
ctggtgcctgtcttgccgctgagctcggaggacttggaatttcctcttgaggtgacctttttcttcttccctcgccctttccacttgtatggctttgtttgagaggtgcgagaagctgaggaaatcctggctggcgaggatagtcttgagttctggtcttagccctttcaaaaagcgggccatcttcttggcttcggtgctgacgtcgtgaggcgcgtagcgagccaattctgtgaatttgtgcacatactcactgacagatcttccaccttgagttagttcccgaaattcatcttccttgagctgaacgatcccttggggcacatgatgttctcggaaagcagtttcaaattctgcccaggtagcatctctaacggcagcgctgaaggtatcccaccaggatagggccatcccggaaagttgatgagtagccagatgaacacgttggttctcagggcatccgatggcttctaacttcctttttatcgtgcgtggccagtcatcaacatcgagcggattgctggatccagcgaatgtgggaggcttgaggcttagaaaatctcccatcctatcctgtggtcttccaccattcgggcgctgattctccagacttctagtgaggacttcaatgagtcgggtttggttggccagaacatgggctaaatctaatggcagctccgcagg

SEQ ID NO: 156073 - DNA, 792 bp, Zea Mays
ctggtttcgcaggtgtggcagccgcccttcgtcctcacgtcgtgccacactgactcttcgcctcttcgtcccgtcgccacgatatgccgctccagtctatgcgcaacggttcttctcctcccccacatcaaagttcattctgcagtgatttctcataatcttggcaagcgttaccaccattaatagccttcaatctccttcaaactggctgtatttctcccttccctctccagctataaaagtcgaggtgcgctcacctccttctcctcgcccctgctcttttctccctgccgcaatctttctctccctctcgctcctccatgcacgcgcgtgctccaccgttccctgctgctcaaccccgtcccaccgtgccgtcctctgtgttcggcatgccgctactcgtctgatttctccttacttgcccgtccgcgctccaaggttccgcagccgaggctcgacgccgtttctccgatctccttgcttgttgtgccacgtgcgtgcctgctctgctctactcagcttagtgctgccgtcaacgccgttctgcgctgccgctcaccattgtccaatgctccctgcgcagcctctaatcgcaccatcgctcgtgtcactgctctgttgctatcatacagtgcgccagcccctcctgtaactgcttcgccatcgttcttcgtctcatcagaacccgccatgcctcatcatcaaagcttcgctgcgagtgcctcaccgacgtcgccttcagaacccctctgaagttcgccagcatgatgtcgcgggagctctctagacgcc

SEQ ID NO: 156074 - DNA, 527 bp, Zea Mays
ggccattgatgaaggggatttctatgttaagtttaccttgtgaaataaacaagacgacttcaagtggtcgttggctacagtttatggttcggcgcaagctgataggaaggagatgttcttggcagaattagtccgtcttggtagtcaagaaagcttgccgctggtcataggtggagattttaatattctaaggtgtccaagtgaaaaaataaagataattttgatcaacggtggccttttcttttcaatgcggttatagatggtcttagtttaaaagagctggagatgtttggccgacgattcacctaggcaaacaatttggccaatccgacttatgagaaactcgatagagtgctggttaccacagattgggataaaaatacccattatctatggtcctatcattaaatcaagatatctcggatcatacacctttattactaaatacgggagagtcctgctcgagcaattcccaacatgcttttaagtttgaactaggctggttgcttcgggatgggttctacgat

SEQ ID NO: 156075 - DNA, 2418 bp, Zea Mays
ctgcggttgaggtggttatcctcaccggagaagacggacgacggttgcgagctacgtagccatggtccggccagtcaggggtttgacgcccttgacagactgcttcaagccatagagtgacttcttaagtttgcacactttcccagcagtctgctcatttgcaaacccaagtggaatttccacatagacctcttcctacaccatgaagaaatacattcttcacatccagctaatgaagcggccaaccagaattggccacacatgagattaaagtcctcatgatgaccatttttgccacaggtgcaaaggtctcatcatagtcaatcccatatgtctgactatatcccttcgccaccagtcttgctttgtacctgtcaacctttccttcaggactctactttactgtaaagacccacttgcactccaccgccttctttccttctggaaggtgaacaagttcccttgtcttgttcttttgaagggaaagcagatgttctttcatggcatccttccactttgggtcctgtttagcacacctacaatccttcgaaatagacaatgtttgtagagatgtaacaaatgttatatgcaggagagacactagagtgtgagacatacttagcaatgtcatgttcataaccataacgagaaggaggttttctagcattgactctaggatctcttctttgtgcaagaggtaattctacatgtttagaaggggaacaacattaccaactggtgttggagaggagtctgaagagaggtatggtactggagcttcaacttgttcaggttgtggctgttcaggtagtggttgctccccctgcttcttagctagtcttcgatagtacactataggtcattgctccctctacttctcattcacctcggcccccaatagaacacgggattgtaccaacaatcacagcttcatcatcctctgtctcgtcttgactattaataattggatcattatgatccccatcaccacttctttcatgagtactcaataactctgtagttatcacttacctcatttctggtggaaccatacctccaacaatcacccctcctgaagtctcactaatcaaatcactatcttggccacaatcatcctagccaccaatggttgcaagtcgttgttcgactaatcgtgattagtcgggttggtcgcctgttaatagccgattaacaggacgactcgattagggaacatggttgtccagatcgtctgactagtcaacgttaacggcgattaatcatctacttttccagattctagtcgttggtgcttgaacttttgtgttgggctacagaccaatgttttttgcccatctacaggaacattaagttctgcctctcctctcctctgtcaaaaccctaaggctatctaaagccctaaatcctgccttcgtccctctgctggtggctgctctagaggtccatatcactgacgtctctagaggtttatttcttaagcaatctgttattttgtatatcatggttgtttgttctaatttatatgatatatataagtataactactagtataaaaggtccaggacgactagggaccgactaggggtcgactaattgctcttaggggcagacctacatataagggagtgagggcctaggcccccgctcatttctttattgcaagtattagtgtctagattttcaccattaagtcccctgctgagcataactaagatgctctcgctctaatattttagtgtccatccttataggtgtgccctcattcttgttttgttctgggttcacccctgatcgctctggacgtcgcctaatcgcgactagtcgcctggtcggtcccagggttcaaccaagcgaccaggcgacttgaaatcattgctggccactatcattcttcctctctctcctaggtcacttccattaaccgtagagaagtcctctagaaaattatctaggtcaacctttcttgtgtagtatggttcttcctcacgaaatgccacatccatactcacaaagagtctcctaccaatatgatcccaatgcttgtatcctttctgagtagaggcataacccacaaaaatgcacttgatagcttgagtatccaacttgctcaccataggtcaatgatcttttacaaagcaaacacagccaaagaccttgggtggaactctaaagttatggtttcccaacaggagctcaacaggtgattttgtatcaagtatccttgagggcattcggttgatgaggtatgtggttgtcattactgcctcactctacaagtacttaggtacattcatctaaaacatgagagaacttgctacctccaacaaatggcggtttttccgctcagctacaccattctgaggtggagttctaggacgagttgtttgatgaatgattccttaatctgaaatatatgat

SEQ ID NO: 156076 - DNA, 544 bp, Zea Mays
tgaagctatggcaactgcctttggagctcgaggcaaaaagagattgaatagggtatttgatgttatcgggtttgtgtacccagattattgtatcccttgcgaaagcaagggaagaagaggaaagctactacctcgacaacttctagtgcatcgaggtcaaaaaaagttaaagttttaacacaccgacctaggcgtattgagatggccgacgtgccgaagctaattgaaggggttgctcctatcatagaaccaagttgctatatgccagtcgaagctaggacaaaaccggctgaagagccgaaactggagaagacgacagagcagttaaaagcactgagtccaccatgcacaacagaactgccgaagccatcaagcatccccgcagcaactccaaggaaaacaagaatggccagtgtgctagatgttgttatggagtctgtaaaaacatcaactcctgcttctgccaaagcgcctagcatggaggctaaagtttcaaagaaatctgacgaggccagaatgacgcggactatttctgaagctggac

SEQ ID NO: 156077 - DNA, 437 bp, Zea Mays
gccataggtccgacattgtcggtcgtttagatctggtagtgccatgcacacgggcggtagtgctgggtaagcaaaaatgcccagaatgatctcaaatctaacacaatttgcgtggggtgtaaaaagttctctggtgaagtatgaacccgaacaagtaagagatcaagtcgcagatcagaaatcctgtgaaggatagggttttgatggggttttctcaaagcgaactcaaacgagaatcaactcggatcacgaccatgaactgctccgtgagggcatatgcagtgatccaaagagtctatctccacccaaatcaaacaccaacagtatccatatcacaagaactcaaagtttctccacaaatccacaagagaaagggaagggagaaccaaaaatataaacttcagaatttcagtgagtattcaaaactgagatcgaga

SEQ ID NO: 156078 - DNA, 809 bp, Zea Mays
ctatcatgaatactagcaaaacaaacaggattaagtaaacgcactgctactggcataagggaaacatgaagcagctactatgataaatgattagctaccagttttacaaaacaggcagcaactaaggatctaaatgtagcagaagtttcatatgtagggccaaacatagaaaaacaaaagccatataaggagttgatgaactgcttgtacttgaattcttgaacatttgtttgatgtgtatgcaaaaagatgccagcatggaaggcttcagtgtatgtgggataaaactgtgatgaaacattaatgatagcttatttcggttttagaataattatatatcgctatattacttatataacatagtcaaaatagtagtataatgtgagctatcactttgtatactagtaagaacaagataggcaatgagggaaatgagtaaattaggaaaggaaatgagaggtaacgacactaatttcactaaaaacatatatgcatcactactatcaagctgaagtaacaaacattaaacatagaacatagatctatggctttagatccaccatgttgctctagctgggaccacttcgatctgcggtttcagatccaccacatgagaacgcccctcgcgatgtcctcatcattgttgtcgtcttcggtgaacaaccgacgcgcacgctcttgaggttactcaccacgaagcacgctgacggagcctctcgatgcaccagctctcgacttgggtcgcacgctgacggagcccctcgatgcaccagctcttgacttgggtcgcacgctggcggcagcggccc

SEQ ID NO: 156079 - DNA, 352 bp, Zea Mays
ctgcctcagatttcaacattctttctattcttgggtccgggttcagtaattttgtttttaatcctgcccatgggtccagaggaggtattttagtcgcttggcgtgatggttcgtttgtctcagctgcctcagttatcaagaacaattctgtttcagttcagttgcaaagtgcagatggtcctctttggtggttctctggggtgtatggacctcatcaagacagtttgaaatctgcttttctccaagaattaagagatattagaaatacatgtgtgggtccgtggatagttgctggtgattttaatcaaatttacaagtcagaagacaagaataattctaatattaacaggtc

SEQ ID NO: 156080 - DNA, 684 bp, Zea Mays
catcgctcgacacccgttgcctgtcctggacgtttggtggggttcacgaagcgcgctcggagaagtaattgggtgaacgaggcttcggcctgctgaggattcttcgccgtagttgtatcctgccgcggatccgccatgtcgtgtggcctgcctcgccgctgcttcaatcgccggtaagaaacccctagccttgatcgcctagtcattctcatcgtgtagcgcccgttattgcagcgagtgggggcggaatcacgcggatcctatgctctagtcatggcgccgccgcactgacgctgtgctccgccgaatagaggacctagggaggaagaaaggggtgagtccgttggattttgatccagcggctaatattagatcggactcataccctctgcgtttttttatatcagccgtagttccagcgatggacggttccgtgtgatcgcgtcgttcatcaaatcagagccatctatcgtagatcccacggttctgtatgcttgatgaatattagggcttcccgatctaatctggatcgttgggctctgatccaacgacccagatattgcaataccccttcgcccgagacttttgctaaagagaccccgagtacaatagaatttaacccgcagtcctagtgaatggggatctgagtcttaggaaggtttctgttttggtccctgcgctttc

SEQ ID NO: 156081 - DNA, 1222 bp, Zea Mays
gcaaactgtggtcgcaatccatggctgggtagcagcgagccaatgcgatggtgtacgacaccattgattttgaaaacataaggtgttgtaccgttatttatcgatctatcaatgacggcacccagtgaggtaaacgcgaaaagggaattgtatgagcgaatttgcctaaggaaccttctggcacgattatcaccatcgaatcgcaataggtcacataagggaggcggtggacatttgtaaggctccagaacaatcttacctcctccacaacaaagattgtacacaagcctgcgctgcgcaacagcagacacgcttttgacccgttcctgaaactagaaaacggcgccacaatgtgggcactcgtctgatgggccaccatagtatgagctatctttgtaggtctctacatgcaaagatgggtccaggctgcatggattactttaggaatacgtacataaaataatctaggcaggtggaacataagcacctttaagcaactcgacatatgattgttcaagaggcggcaaggctgcatccgtgctaactataagcagcaagtcggccataaattcataggatttttaacgcccatcacatatgaaacctaaagatgtttttcgaaaaggcaggccatagggaataaccgttgctggaaccttgctcagcagacacaagtgtacgacgcatcttctttatgcgatgttgtctgttagcggtggcaagcgttgcaggaaagtcgagtaaagacttgttgcctgcaacctacatgcacacacgtcttagtatgtgcatagagatgtagcagataaatgcagcagcaaaagcccgagagccactaacctggccgcttccgccgtacccgttgagagtggaatggaatcacataacgcgacacatgtgccggcgccgaagcggatggctgatcaagtgggttcatgtgttcgatagtagctgttcaaagacataacgaatgtttggttggctacgcgaaagggaaagagacagattggctgaaattaaggccatattcaacccaaagaacgcataatatcagtatagacttcgcaaaatcgctgaatacaattgtttcctacatgtataatataattacacatgtaatagaggcaatgtttcctatttttcatatatgtttctccataaaaagtccagtctaaaggaatcagtttgccacataggcacagctaaggaagtgccacctgag

SEQ ID NO: 156082 - DNA, 1384 bp, Zea Mays
atgtctgaaacagccgaaaaatgcgtccatgcttcgatttgcaggaggaaccaccgcgagagatttccgaagtttctgaccccaatgtcatcagcccaggtactgagttcatggagaaggtatcagaagccctcgagtactacatccgtgccagatttaacagtgacccctggtggagagacatcatggtttgctcctgtgctttactaaatgcaatttatgttcttctctctctctctcttcttaaagggaagttcatgttcatttcagcttcaaccattagacatacatgctgaatctaactgcagggtctataaagtattgacaaacattgacttgctgaatctaccaggtggatgttgctgacaagtttaacatatctgttctgaaggtaatactctctgatgcgagtgttcctggagaaggagagcacaagatcatgtctttcatccgtgcgcaatgcagcatggaaggctatgatcccaacactcgacactgcttgtttgggcatgtagggaacatatatatatatatattaatcggttttcttgatgatctcatcatttctaataatgttgtgtatcactgatccagttttcatcatgcctagctatctgtactggggattaactgtgaagaatcattgcaggatgcggatctgataatgcttgctttggcatctcacgaagtctacttctctattctgcgtgaggtctgttaatccctcgtcaatgttaatgtcatgcttaaacatattgcatcacatgcttgataatggtatgcaccgctcctctgtctatactactaacttggccaggatttgtgtaaagttttacctgtcagagtaactccagcactttataatggtatgcaccgctcctctgtttaacttcaacaggatgtgctctaccaaaatcaggaagaaacggaagggaatccgaagaaatcatttctggtcctgctcacctcccaactccagataatgccactcatttcctcattttgatacactaacagtgccatcttaatttccagtttttgaacatgtgggttctgagagagtacttggagattgaattcaagatactggacccagtctgcgagactgatattgagaggctaatagatgacttcatctttatttgtttccttatgggaaacgatttcatcccacatattccgtcacttaagacgcaagaggtaacctttagactattgtaatagcgtagtagaaagttaactttgttatcactacatatgcctttttgctttgttcattactctgaaaataaaagcatagatgtttctctcatctattccatctaacagggtgcggttgatcttctcatcgaagtgtacaaaacaaccttcaacaaaatgggag

SEQ ID NO: 156083 - DNA, 1264 bp, Zea Mays
gtgggaagaagcgatggccagtgcttgtgttccttctcgggtctttctccttgctttccctttcctccaatagatcttaccgcacccatctcctcctagagatcacctactatatccttcactttcttcccttcccctagcatagatattctattcacagatcttgtggtgccaccacaatagtgattaatgtttgggaaaaatgggctggatatggagaaagagatgagcgaggatgagggtgccttacccacgataagtgtcgcgacagatcttatgataccattgaggtagcaagaggttgctccatgaccgacacccctagtggtcagcgaagctaccatggtcgatggaccccttcgtcttctctcccctggtagaatagccgatctattaatcctcctcagccttgcccattggccttcgctaataaccaaatcaagaacaaaggtgcacattagggtttgactagagtaagattagagaagtattgggtgatggaggaggatagagtagtccacaccgacgaagtggaacatgggtggttgggtagcatcattgattagaccttgcagcttggcgtccaagacctcgatgcccgcgaggaaagcaactcgcgaagtcgcgtgagaggagcgctacatgatgtgtcatgctagatgggagcgataatgagatcacgtggcctgaaccctaaaccataaatgcctaaaccctataattcaacatgggccggtcgaaccaaacatgcaacaacgataacatgtgacactataaatggatcacgggacaaaaacgtccaaccaaacagcttcttagctgaaatttactgagactaaaggcacacaaaactttgtaactcaaacatcaacgattaataaagcgaaaataagctatcctacacaaacacggcttgaaacagtatcttacattacacatggtggtgtgcccagagctggttatggctaaccacaaccgaagtagcagcagtgacgatctctttcctacaaaaagatggtatttgtccacccaggaccatcgcctgcattttcgctgcagtggtataaagcgattcggctgacgtatctgctgcatctcctcagctgagacaccctgaacgcgacgagcgacgaccgcgcacgtgtgtaatgtaatgtaatgaaacgaaacccagcagcgagtccggagtccggactgctgttcgtctgctgcgcttgccatttttgcacccaatcatttaccccccgcggccgcgctgcaccag

SEQ ID NO: 156084 - DNA, 390 bp, Zea Mays
ttccggtagttaactcaaggcggaaggacagtcagtgagtatgtgcacaagttcacagagctggcccgctacgcgcccgaggatgtcagcaccgaggccagaaaaatggcccgttttctgaaagggttaagacccgagcttaagaccatcctcgccagccaagacttccacagcttctctcacctctccaacaaagctatccaagtggaaagggcaaaagaggaagaaaaagggcacatcaagagaaaattccaagtcctccgagcgcaacagcaagaacgtcaccagagagctcgaccctttgggcttccacccaggggtccaagcttcaataaacaatctggacccactccatcacgctactgtcagcagagtcagagctcccttcag

SEQ ID NO: 156085 - DNA, 590 bp, Zea Mays
gtggcctcggcactgacttggtttaccctggcaatgttgaatcccttgccaggagtctattgcttgtttgtggctggcatgctggaactccccatcggacaagcatttgcatagtgcccaacctgactgcacttgaagcatttagggcatatcctctgtcctgtaggtcttatcggggtgctagttgtaacaccccaggtgttacttagggtttcactcaagactacactagtgaacctatcatcacatgtggtttagtttgagcaaaagacaccaaacttggggtcaagatcctaagtaggtgtaacccatcttagaagtcatgccttggccttatcatgcacctaaagaggagagaatggctcaaaccctaattcaaatccctttaggcaaatggagccctagaggggagtatagcaaaaaggctatgtaaaccacattatcatgacttgggctaattataaaagttgtagtacacttaataccctacaaaaaatagtaagtgagtgacccaaaaagatttcagaaaaaccccaaaaaggtcaccaaagagaagggcatagaagaaaaatcagatttttctcactttc

SEQ ID NO: 156086 - DNA, 1047 bp, Zea Mays
cggaaacgagggcgacgaggtcccaatcagttgaaagaagatgtagttatgtacgtaacaaaactcaatacagaggggtttcctgaagaaccacttgacgtggttacaaagttttgaaattactgcgggtctactgttagagatatagtgccaatcacacttcagaaatggaaggatttagatgaagacacccgcaataagctatgggctaagctgtctgagtcatttaaggtcccaaaaggcatagaggatgcagtaaggaagtcgatgctctctgctatggccagttgttttgtgggtggaagaccgagatgaatagggattttgttaagaagaatagggttcctccgcccaagaaaatgggtaaaatcactcaagctcagtgggaggaatttgttcgtcagaagaccgaactgaaggccaaagaactgggcgaaactaattcttagagagcgaagatgaacaaacaccccccatcgcctagggtcagccggatatcaccctaaagttgtgtagtggaacagggtaatagaggaagctatagctaacggcactttggacccaatattaaaagatatcgatgagctagctattcgttggatcttaggttgggcaggtttgactgaggacgacaaacttttgcatccagaattggtaggcgaagtttcgacaaaaattcaagaatatgcagaaaagagaaagaagggcgaatttaagcctcggagggagaatgacatactaaccgcagcactagacaatcctgaacacactggacgggctcggggaatctcttctaagatttcctagagagaggcctttccagagtatgcatcatcatttaggaaacacgagaagtcgaaaaggacccttgaagagactattgatgaaagggtacaaaaggctattaatgacgtgatgatgaaaattaagaaaacaggatgcatatcatgtgaactcaagccaggccacatgagtccacctctagtccctagcagcgtaggatctgtgcaagacttcggatcgggcaccaagtaccctgtagatgat

SEQ ID NO: 156087 - DNA, 532 bp, Zea Mays
ggcatgcgatggcgcggtacaaatggggttttcccgggccagatgccatttctaaaaagtgcccagccatcactcggccgttatttccaaaaacgccgacgtggcccaatataactcagctgttatttctaaaacgctgatgttaccagtcttcactcggtcgttatttctaaaacaccgacgtggcccgttatcactcggctgttatttctaaaacgccgacgtcaccagtaatcactcggccgttattcctaaaacaacgacgtagctcaaaaggactcggctgttacctctaaaacgtcggcgtcgcaaaaaagaaccactcggttactacctctgaaaatactaacagtaaatcagctgttttttctctacgaatatgcaggcaaatctaaaatgcgactcgacgattccaagtcgttactcaagcattacttccaagaacaacgactacattaagcataagcatgatcgaccggccgactggaaaaggagcgatgggaaagcaaagaaacgcacacggaatgggatg

SEQ ID NO: 156088 - DNA, 310 bp, Zea Mays
cgggagagggagagggatggaagggacggcgagcgccgacgagctcgccatgatggcgggaatggagctaacgtcgattgggacggctcgggcaggcgaggaggggtgaggggacggctcgggcacagtggcggggtggtcgctgagaccgatgcaagccttaatggcgaggcgatggggcgtgaggcgctcggcggcgaacgcgccggtgaggcatgggcgagacgacggtgctgacaggcgggcccgagctgccagggagagagagcggcgcgagagggagggagtcgagtcgctgactggtggggcc

SEQ ID NO: 156089 - DNA, 351 bp, Zea Mays
gtgtaacaccccaggtgttacccaaagccctggccaaaggagcgcacttgtgtcctactcaccatatgagataggttggaaaataaaggcactaaaagcttagaagcatggttaagccaagtattgatcatcaaaagaaaggaaccctagccttcatacaattctcattcatgaacaaggttcaaaaaccctaattctcctcttaagccattaaaccctaagcatgggattaaaggggaaagagtgggcaaatggccaaatcacaaaagggaacctttaccaaagatgaagtatattagtaaatctacaaaatgtattaaggaaggtattacaaaaaggcccaacaaaaac

SEQ ID NO: 156090 - DNA, 893 bp, Zea Mays
atccaatagctgcttcccagtagtcgacgaaatgcatttcatgaggactccttcgcaccccttctgtacaatgcgccccctatgagggtgtagtgggccgactgtcttgcgatgcgttctgctgtagccttatcatccggtccctcctctttctttatgtacctgatgataggctctctccagtcattagggtccgattctggttggctcaaggtgttgcattcttctgtctgatctgagggaatacttgggcatgatacttcctggacgaagattttgggtgggacctaggcccgactggatctcagcttcgacaacgcgtctgctgctgcgttgcggtctctttccaagtgatggaattccaacccttcaaacttgtcttctaattttcggacggctgtacaatacttgtccatggaatcagtcgagcaatcacagtctttatttatctggcttatgaccactagtgaatctccatataccatcaacctcttaataccaagtgatacggtgatgtttaatccgtggatcagtgcctcatattctgctgcattatttgatgctgggaataatagctgaagtgcatacttgagttgttcacctccaggggaaatgaagaggatccctatgcctgcttcctacagttttaacaagccatagaaatacattcgccatacttcagtagcctctgggttgtctggaacctgatgctcagtccattctgatacgaagtcaactagtgcttgagtctttactgtcgtgcgaggccaaaactctatgtcatgagctcctagctcgcaggcccacttggttattcttccgatggcttctttgttgtgaagaatatctcctattggaaatctggtgactactatgactttgtggtcgtcaaa

SEQ ID NO: 156091 - DNA, 415 bp, Zea Mays
ccccttaaaagaatctcgtcctcgagatttaggaaggactagagaaaagatgtgaaaaatctatgcgaagctcttcttctctctcccaagtagcttcatcttctccatggtggctcccttgtactttgcacatctttataaccttatttcttgtaactcgagtcaaagtgtcaagaatcttgatcggatactccgtgtaagtcaaatcaccctaaacactgagctcttccattggtaactgttcctcagggacagggagacacttcttaggttgagacacatggaatacattatgcacatcagacagattatcaggtatctcgagttaataggctatctctccaactcgcctaaaaaatctgaagggtccaataaagcgaggggacaatttgtccttgactttaaacctcctcat

SEQ ID NO: 156092 - DNA, 1440 bp, Zea Mays
cgacaacaacagcaggaggaagaagaaggagccgtccgggtccgcccaccaccgcctcgccgccgtcatggacgccgtcaacgagcgcaagctcccacccgagctcagtgggcgcggcaacgcagtaaggtcggtgtctcagccccaggtccctcctccataccgttcccaggaaaaaaaaccgtagcttggttgtgctgtgccggggcaattgaatctagattcaacatgatgtaggctgaaagaatagttgttcatacggtttgctagttcagtgcaatttgtttcacaaaatgctacacggaagaatatccaccatgccggcgcattcagtcattcacaatttcgcaggctaaccttcacaaaaagtcaagtctttactgatagacaaagacatgatagggtctctgaagcactactctaggagtgaaaaagtacagtgttttccgttgtgctaccattcctcatcagcgctactaaggcctcacatcttgtttttccccaactcaaatgtccatttctagatttaccctatcagcttcttcttgcatgtcaatacctacaaggctacaacctctttttaatcacgcatgtgcattttgtacaattaccaaatattgtttgttttaaggtatctccggggtgatgatttatggtggacccagccggaaaaatataggatggacaattgcaatttaaatgaaccacttttacctctagattttatcttcttcatgccaagataagagggacaccacgaccttgggccgtcattgttgctccatccatggccgccgacacaaggcgaccttggttcgtctctccaaatgtttcaatacgtggcactacaacctctttttaatcatgttgtatctgcattttgtacaattatcataccaaatgttgtttattttaaggtacctctggggtaatgatcaatggtggacccaaccgaaaaagtatagtctgaagtctgaagtctagaactagaaccctagaactctgaagtctgaacttaagtactgattactgaacacagaatcacagaatcacagaagactgagagacacgtaccttctgaagaggtgttcgtctctggtccctggtgttggtcacttgttttcaattgttgtgaattaaaaacaaggcaacacaatgttaaacgttatatgaccttcgtcttatcaagcattatcttttctcaaagataaagactcttggacgaaggtcacgatgagtataagattactcataaacaatccttcttctaaggttgttaataagtaagagtttagaacaaaaagcattcatgtttaagggataagcaaataacgtaggataaatgcttcatcgggtttagggtgatagagacaatgtgtaatgagattcttggtaattataccaagaaagaagaccaactaatgaccactgctttcggca

SEQ ID NO: 156093 - DNA, 678 bp, Zea Mays
gctgtgttgcagatatttttcgtggcatctagctttcgtgttgcggttgtcgttttagctttcctgttctgtgagcgcaattgtttttgagcttcagctttctgcagtgatcatcaccaaaatggccgaggataagaaaagcgtggatcccacactcgctagcttctatgaagccatagaaaggaccaacgtagaaaaaatcactaatgaaatgttagctgggctatctggtgattcaagcgacaacgagagctttgatgttgagagtgagaacgaagatgccgaagatcggccatggaggccaagacatgttgtttttgggaagccaactattagataagggcagattgaagcgatgaaaggcaagtattttcatgatgagtccatagtgagggctgagggagaaaacatcgttccccttactgaagatgatgaagtggtggtcttgaggagcttcatgaaagttgggcttcgctttctgctccacaagatgctggtcaaagttttaaagacattcgagatataccttcatcagcttaccctcgaagctcttgtcagggtgggggtttttatatgggccatgaggagacagggactggagccgaatgctagatgcttctgcaacactcatgagctatcttactagatgaaggcgaccggaaaagaacaatatcataa

SEQ ID NO: 156094 - DNA, 812 bp, Zea Mays
gacgggtactacttccagcctgtccttggttagtagccttcctcttttctccaagctcaaccctcttgtgttccagagtgatagctttgtctaacaatctctagaatgacaggaatatgtgcgacatcagtttgtattgtagtggtctgatcaaaccttccaaaaatagctcctctttttctcatcgtcatcaacttcaccaggagcatatcgagatagttggatgaatttgtctcggtattcacttactgacatgcctccctgttttagggataggaactccttcttaatcttcataaggccagcaagaatatggtaattcctgaagtgagtggagaattctgcctaggtaatggtgttggcagcagcgtgagcagcgcagtatgcatcccaccaatccacagcgagtccggtgaggcgacccaatgcatatagcaccttctctctgtcagtacattgggctatgttgggcatcttatccacgaacttcaaccagtcatcagcttgcaatgagtcagatgagttagaaaatgtaggtggcttgtgactcataaactcccggtatttatccctaggcggagctggaggtggtagttgctgtcgttactgccgttcttggtgcatttcttggcattcttgcttcatctcctgtcggtcctgacggatccgtgcttgcatttctatcattatgttggccatttgctgtagtagtcgtatttgaccagcaaccacgtcatcacaaggcgggggatttgaaggacgattcatttctggttccagattagctacaacccttatttggcgaattcgtg

SEQ ID NO: 156095 - DNA, 498 bp, Zea Mays
atttgctgggatgacttagtataattgactgctacattgtgtagattgatgtgactagatatatacattgaccccacatcgtaaactcaaaggtagacattgaaggctggtctacgtctcggatccaaagaaatccaatgaaaactggaccttttgacctaatctggattttggcttttattggattaaaatgacggtgtacatccaaatctaaatagaccttatccaagtgtatccaaagcaattagagtccagttagacttcggattatccgaacctacctccacctttaggtgtatccatgttcaaatgggtttgaactagaaatcatatagtgtttaacttccatacatcaagtagacccaattttgctttgtttcgagttttggccatctagttgaaggatcatttgctggttgacagtttagcttgattgcaacaattctagatgcatatgttattgtacatttcaacttaaagtttataaatacagtagca

SEQ ID NO: 156096 - DNA, 353 bp, Zea Mays
gtaacgatgaaaaaaaaagaatatggaagtgcgagtagttagcctgcaggttgctagaagaattcttgtggtgcgagtgagagcatagttttgcatgcatgacactttttatctcacaaatcatggtcagtaatcaaagcagtatggcgcacaactcagacccatgacaaacaatgttgcaagaccttgcctcaaggacaaccaatgtactggacagaaaaggcaacattgaaacatttcattaagcaacttcagtccaattctgtttatgcatgtatttttattaaacttttagcattacatacataataggttcatgatcaagcatttagaaaatgctatacaacattatt

SEQ ID NO: 156097 - DNA, 452 bp, Zea Mays
cgactctaggcccagatgattcacggtccggacggtccgccgttgtagcacggacggtccacgcgtgaagagaatcagttagtgtcccgctctaggcccggatgatccgcggtccggacggtccgctgttgcggtgcggacggtccacacatgaagagaatcagttagagttcctaatttcttgtgagatttgttagcaaactccgcgggatttgtttggtaaccaacttgtaatggatccagacctctaccttgtataaacgaaggggcacgaccgattgacgcccccacaaccgatccaatcaaatctatttatcaaatctaccttatttacattgttcttttcattcattaggagtaggagtaatctacctttagtttagccctagtattagtcttcctcgacctcttacttcacctctaggtgactctatgctacctagggatgttcc

SEQ ID NO: 156098 - DNA, 946 bp, Zea Mays
tcaatgtcaatctcagcagtggccaggaattgtttcacaaccatctcactgaagtctgtcctctggcccataaagtgatagataccacatgcctcaaattttggaatcaatccctccatgactgattgacctagcataaacgtccaatcgataacttgatgtttgtgaaagtttgtatccattagtcttccctagaagacattaaactgaagctgagtatgaaaagattgaatgttggtgtctaagggcagatcatactaattaactgtcctcctggagcagtactcagccatagagaatctcctctttggataagtccatcctgtaatgtcaattggatagtcgggatgagcgtgtggaacatcttctgtgtccatagaaatgctacccccacctgaagattgggcctctgagtctgtagttcgattataatctgcatcatctgcatgagggcgcttcgacttgaaatgactggcaagcttcttcctaagaccacccagaccactgcaatatatatgagaaataaccactggtgaatagttgacaacgccacaatatagagaaagaaagtgtaactttctgttaggggccggactgtccacgctagggggccggactgtccgcgccagggagccggactgtacgcgccatcctggcggaccgtccgcaaccgtccaggggcgatttttagaaccctagccgccccattcattcaatcaacgattcgacagaaaataaccatccaaatcagttcaaatttttgcacaatattcgcaatgagtaacgctagcaatttcaccaatcaaatttgtaaatccactgcccaattctagatcagagagaaaatccgaggaatccccaaatttgaataaaaatgacaaagtccttgagattttgaaataccaagatgaagatatggttgatgaactccgagcaatctcccaga

SEQ ID NO: 156099 - DNA, 771 bp, Zea Mays
tctgtcgtcgctgcaaaggacgtggccgcctcatttgggcagcagctaaaacatgtgagtgtgaacggtgcttttggaacttgtttttcttccatagctccacttttgatagtctttatgctaggcggttgccttcgccgagtgcattgcatctggggcgctgacatcggagttttctgccgaaaggctgtgacttgagggaggattaagcgcctctgaacgcaacatacagaggctatccgagacaagtcggtggcagaaaacaggagtcgtaatctgcttgaaaagctgacggcggcggaggctgagaaggaggacctcatccatcggcttgtggtggaaagggaagacgcggaaaaggctcgcaccgaggccagtcttgctctcaagcgcgccaccgacgcggagtcggggcagagaagtctgcgtggctacatggacaggacagaggccgccacccgcgctcgggtcgatcgagcgcacacgttgctcatagacgcgtaccgtcagcttggtgcgtgaaccgtcccatttgacaaatccggcgaagaggtgggcctccgcttcctcaggtggctttaggagaagttggagttgctcccgtccatcatgatcgatctcatgtccttcgcctcactcattacctgcgagggggctgcgaatgccttgtcccgtgagggatgtaggcatttcgaagtatttgatcgggtaaccgaggacttcgaccatagaatcttccaggtcggagatgaggtgctaaagcagtccgct

SEQ ID NO: 156100 - DNA, 926 bp, Zea Mays
ctgatggttacttggttagtcaacctaccagtaagtttgagcttactcggaatcccgatctacaatctgggttttcactgccacttcctgtttccagttttcacctaataagctaatcagaattgaaactagttcaagttagcattgctcttcaactgacatttctattcacatgcttttgcggtcgatcgttaagctttacgcaagttacaaaactcaatagcgcccatatggccatatgtggcccaaaacaagacatacatagctgctcaatgctgaatatactttgtgaggatgtgttcttaatcaaactgctcaactattaaataaaatctgagtccaattaagatggtttccaattgtttcctgcagtctccagaatttcatcgacaagtagcacaagcaataatatacataatatatcccggcagagaggtgacagcagccaaacaaagtcctggcaagagcagttctcgtttcaggaaatttgccaggctacttcaaactttagtgaacaaaacaaaattggtttaggtaattttggcacggtgtataaggcgaaactcagggatggatccatcatagctgtaaagagggctactaaggtttgtaggtgaatattccttcaacagaagaaatgttgtacatatttactccaccgagttacttgcagcaatcaaatcaagaaaaagttttgatgcaacatctggatttggcagatgcatggtgggcatctatctgaagagttcagaagtgagatccagagcctgtcaaaggtcgagcatttgaacttggtaaagtttcttgggtatgtggaatacgaggatgaacgcttaattctggttgagtacgtcaataatggaacactccgtcaacacttggatggtacgtcaaacatgtgcaatggacaagcttaaacacatact

SEQ ID NO: 156101 - DNA, 469 bp, Zea Mays
aatgagaactagtgggtgaaaagcgcttcgatatacatatatgccggatatgatgattgtggtgaatgcgttgattaattgtgtatggtagttctagcgcatgaaataacttgtataaagattagtaagtctacttgttagtcctcatttaattaatttaactctaatgaatggtaaagtgttagaataattcaagtctctaaaacgtggcaattcttgaattatataggagctgaaaattattagttgctgttttggactgcacgcagtgatttccccgtgctgtatgtttgatgaactaaattatgttttctgtagatatgtgatatagaaaagttgtagataactttattgtcttactggtgttaaaatttgacagccataagtctgatcgtttgggagttatacttgtcgcaaattcagtaactgaatatgcccactttctgtacagattccagaaattgaattg

SEQ ID NO: 156102 - DNA, 375 bp, Zea Mays
ttccgattacaggatataatgctgccccgatagcttttgaaatctagctaggggtaaaacttcctgagatgctctatattccatgaattccctatttcggtgccatccatttgagtaagtcgatatgatcctggccgagtgacctctgctaccatgaatggcccttcccatagtggcgacaatttgtgccgtccttcccccgttagaattcggcgaaggaccaagtctcccactgcgaaggatcgatgtcgtatggccttatcatgatagcgcctcagggtttgctggtacctagctgactaaattactgtattcaatcgttcttcttccaatatattaatatcctccagtctagtagcttctgcctcagctatg

SEQ ID NO: 156103 - DNA, 342 bp, Zea Mays
gctcaatgcatagaaatgattaggaatgcatcgatgttttatcgaagtatcagacagtccgcactccctagtagtcctcatctaaccacccacataagggtgtcactcccctttggtcagttcaaggaccaagtgttttgtacgagctggttcttcacctctagcatgatgaacctctcataaccgtgtacactgttgagttgggtcacccacaagctattgccaccaaactgtataggtggtgccgatcacctagagtaacaaacactaactctcattttacgtgaccaagtataatgataatggtgaatgcacacaagctactctcaatgcgctaatgat

SEQ ID NO: 156104 - DNA, 774 bp, Zea Mays
gggagatgtaccatgtagggcaccggccacatgctcttagagaagctcctatgccttgcctctgtcctctccaccgccaagcctataattgtcgccgcctctatttatctctatatttcctcgcctgtgatggatctcacgctttatgcgtgcatgtgcatctacacgtgcacaccctacacaacgaatgtggtgaatagtctgtttggtttgtttgatcgattgactagatttgatttggtggccggagaggcgtgaagagtgtcgagtttgctaaatttgggtctatccaatttttgagtgactagcatatatttcgcgctaacgctacgattccgtgaaggggagagatcgacaacgatgacgacgtgaggggaggcattgacaacggcgacgacgacgacgacacgggggagggggagggatgattcaaaaaatattgtccattggatttacgtgggtaaaggaaatagagttatctagcgatctaaaccgttagttttgatggtgtattaaatttgggtgtaatttgtttgttggatttatttgagattatgagtgtggccgtgatttgggtgggcggtttttgcaaaatttaaagggtgaattatatggtggtatagattaatgtgattagtacacggtcgcaatggggtttatctgtggcagcgtgaatttgttggaatggcatgagatgtgaaattgggattatttaagtacgcgttaatttgggcgatcacttgtagtggaactttgatttgacttggtcttgag

SEQ ID NO: 156105 - DNA, 908 bp, Zea Mays
ctttccgcccaccttgtgaagcccctcgatgaattgcatcgaaatgttggcccatatttgggacggcacgtcgagggattgtagaaggcctgctgggtgcagagtctcggtcttgttctcctagcgtgtgttgtaggcacgtacccactcttgtaccaaggcgcgatcactggggatgtagaaatcggcacgaagatggtggagtgttttttgaacaccttcatggcccgttgagtgtgccaaggctagcacctagtagcgcaggtccccatggtcgggcacgaagatgcgggaaccatggagcaggaggccatcctctaggcgccatggcgcttcaagggtgccctcatgcaggcgctgaagaagatgttgcgcatcacctatgttgctgatggcacgctggatgtcatccactagggtgaaagaagggccagagagggcatggaccgatgatgcccctccaaactcagtgctgaagatggacacgcctcgtcacagcgagacagtgtgttcgctactgtattgaggcggcctgggcaatactccatgttgtagtcgaagccggacagcttgctgagtcactaatgttgtggcacggtggacaagcattgatctagtagtaatttgagattgtagtggtctgtgcgtacctaaaaataccatccccaaatatatggtccctagggtcgtactacttgaaccaacctgatcaactcgcgctcatacgcgacgagtttcatgtggcgtggtgcaaagggtcggctgaagaaggcgagaggccctgtgccctagtgaagtacgacgctgaaccccacacccgacacatcacagtcgactgtgaagcatttgtcgaaatccggtattttgagcataggtctggaggtgagggaattcttgagtgcttggac

SEQ ID NO: 156106 - DNA, 615 bp, Zea Mays
gtcgtcccgatagcttttgaaatacagctaggggtaaaacttcctgaggtgttctatgttccatgagttcccaatttccgtgtcgtccatttgagtgagatgatatgatcccggccgagtgacctctgctactatgaatggtccttcccatagaggtgacaacttgtgccatccctcccccgttagaattaggcggaggacgaggtctcccactgcgaaggatcgacatcgcatggtcatatcatgataacgcctcaaagtttgctggtaccgtgctgattgaattaccgtgttcagccgttcttcttcgagtacatcaacatcctccagcctggtagcctcggcttctgctatgctttcaaagaccaaccttggcgccccaaacttgaggtcagcaggtagtactgcctctgacccgtagaccatgaagaagggagtatttccatgcagagctcgactaggttgagttcttaggctccaaacgacgtagggcaactcccttatccactttcctgtgaacttttcatttttatcgaagacttttttcctgagtgcctccaatatcatcccgttagctcgttcaacctgcccgttggctcttgggtgtgccaccga

SEQ ID NO: 156107 - DNA, 359 bp, Zea Mays
gaaatttcggagtggaagtgggagcatatcaccatggattttgtggtgggcttacctcgttctcctcgaggcagggatgctatatgggtggtagtggattgcttgactaagtctgcgcactttattcccatgaataccacaaattcagcttcagagttggttcccttgtatatgaaagaagtaatcaggcttcacggggtgcctaagtccattgttttagatcgagactccaaatttgtatccaaattctgggagagtcttcactgtgcattgggtaccaagctctctcttagtgtcgcttttcaccctcagactgatggtcagtcagagcgaactatccaaaccttggaagatatgtt

SEQ ID NO: 156108 - DNA, 507 bp, Zea Mays
cggggccttagagaagtcatggcattagtgaaggcatgtggtgccacccctaggacaaatgagcacaccaacctcctgcctatttttactttgatagtccactacggcaattcaactaggatgtgtttgattttgagtttgttttcatttatagattcgaaaggatacaattcattaatttttctaataaattccacatcctttgatctgattttcggatcgaggacatccctggcaaaaatttgtcgaagtagacgacatgtagacaccataccttgacaaaaacgcatgtccatgaatgattttggcatggcccgcagtgatgcaagcctcataagactcctccccgagattagtagcagaatcagcaacgtaatcggcctttgcaaagccatcgaccatccactgattccgctccatgtttggtggatgctcgtcgccgacgaagcgccccaacgaagactcctcagcggtggcacggtgtgacccgggctctccagcggcgtc

SEQ ID NO: 156109 - DNA, 454 bp, Zea Mays
tcgtgatgtcgcttggtgtgggtggcttgatgggatgcgaaacagcctgtttgctatatcgtgcacgagtggcatgattgggtggttaaccgccctgcccgttaccagcgcctctcccaccacgtgctcctctaacgcaccatcctaggtggttcatgccctacaaaacgcatagtcttccacgcggctccctaggcggaggtatcccagagcgatggatccttgcgagcggtttgcggggggcaccttccaagccttgcttgggtttcccattcttgcgcataaaacagagtgggagggtgcttgggtttggttacgcttaccacattctcgtgcccaagcatatgtttcctccctttctttaaagccttcctacgctctcctattcgtcttccttccttccgttgttcggcttctttccttgcaatctccttctattgaactcatggatacc

SEQ ID NO: 156110 - DNA, 566 bp, Zea Mays
gccgccggtgaatcactccggccgagctcgggagatggcgccacgtatgagtcaccctttccccggcgttatccatcctataccgtgcatgaatctagacggcaatcaacgacggcgagctgagctggcgttctgatccatccgaacacagtaccatggcacatcttcgtcagtcgcctgaaccgacccccttccatcgactagctctcatgattcttgtgaataaccgggcaaaattccttaataaggtttgttcttgattcaacagtcttcaatccttacacaggacatttgggtcaaaaccaaggggattcgaagatatggcgcatcaaacttgacctcacctcactggaaccttgttttaaccttaggttcagtttcagttttctggaactgttctgacatagcaacttggaataggtttttctctaatttttttgtcacaactcaaaaggatatctgcatcaaagttgttcctctttaataactctacaactttgttatagcaaccctaggtagattctcactggatcttagtcgaaatggctctcaaacttggatccaag

SEQ ID NO: 156111 - DNA, 983 bp, Zea Mays
atccaatgggtttttgtggcagcatcatatggcaatattgtagatggtatgttgctttacaactttgatgcagagtttgagttgagttgtcattcaaaaattaagagaaaaccaagctccaaagtgctctgtcaggctgtctgaataccactcgccatggtacagtgaatttggggatcagaccaccagcgcagggtcctcgccgccaatgaccttgtgccgggatcgtcgccgccgttgagattcgcactcatgggtaactggatagcgctcggagtcacgtaaatatcctcgccgtggataactccggctataaacaagtccggccaccgtacaagcgtcaccgcggcggaattcgataagaacgccggtgaccgccgcttcccggccgtacgccgcgtggctcaacccttccactgcgtcgccataaacccccactgctgtctaatcaacgccggtgagcctgccacggcgatggacacgaattcaccgcgccaggttcttctccatctccgactgccagcgttgctcgaccaaattggccaccaccgcttaagtatcctataaattgaagcctcagcctgttccgctaggtaatcgtgcgtccagagaacccgctcgtagctccgatcattccccacagctccccaatttccaatttcccccaaatcgactctccgccgacgtaaaccacccatcaccgcggccagccctttccaggttagttcatctctctctcccttgtttaagcaccctggttactctgtgatgcttgccgagccttcaatttaaactaggagaccaccagtcaccgggaacacgacgatctagccgccatgctctcggtcaccgtggccagagctccttagttggtcttggatgcaattaggttgggggaaatgattaaggtagccccaatttcatgtctgttgctcggagaacctagccgttgccccaatcggccggtctgctagctcgccgga

SEQ ID NO: 156112 - DNA, 514 bp, Zea Mays
gggaggtcggctagggttgggggggagatagtgggctcccatccaacggatcaagatctatggcccaaacccgctctcacatccgctcccgacctcagcgtaaaagtcaagaaaagttctactgcttcactgagattatgcctcctaaaactccaagccccaatagcacagaacacggaagagaaaaaaaagaaaaataaactttaatttttttgtaaaattgggtatcacactctaccccccttaaaaagaattcgacctcgaatttcgacgcttctatcggaacgacaaaagaaagattagcgaagaccaaaaactcacccataacaaaaagttcggggtacttctgcggcatcagctcctcaagttcccaagtagcctcgcgctcagactgattagtccacaagaccttaacatacttaattgatctccttctcatgacacgctccgaggactccaagatacgcaccggacaacactcaagagtcagatcctgctgcacagcaatcggttc

SEQ ID NO: 156113 - DNA, 995 bp, Zea Mays
aaagaagtgacttcttcagtctttgcctcctcagtcttcgaagcaacaactttccagtctttcgaagtcatagcaaccaaggaagtctcttcaatagcaagtgtgctcgcagcttcgggcatagtctgcaaaggaaacaaacaacagagtcagcacaatggtgctaagttaaaataacatagttcagacatttgttataccagtaaagtctccctcgaagcctgagaaggtgtcaccccacgttttatctttgacaccttgttcagtttggttgttaccttcttcttcctcttcttcgactcctgagtcacttcagagtagttggggtaaaagacagtgatagcgtcaaatacgtgatttaatcgacgttttttcgtgcttcaaaaggccgatgcaaagcttcggcttctagcttactataattgccaagtatttcattgcatttttcctcaatacaatctagccactcgtccaggctccacaactgaagcatctttctcagacatattcgacatttcccatttagcccttagtggccatattctaaacgctatgtgctcttgaacaatatccctcgtcctgatatgtgcacagacatcattgaaagcaactatagcagcttgagcttcgaagtcaacataacaactaggtttattacaactgaagcatgtgtggataggagtttggataattccctttatatcagaccgctccttcatatcattcttcatataaaaccattcttttgcccacctgtccggccatttgcttcgatatgcaagagctggagacataacacctcttcgataagcaaagttatagcaaccaaagttattgtgaaggcccgtagttgccttcatctgaaagtgtaactcatgaatctggcaaaatacctcgcaaaaagcttcggcactgggttcgacgccctggcttcaaacaaccaaataaaaattcctaaacacactatggcatttggtgtaagttgatgaagatat

SEQ ID NO: 156114 - DNA, 540 bp, Zea Mays
taacagtggatgggctttattgttatgttgtaatgccctacggtctgaagaacgccttgccaacatttgtacgggcgatgagtaagaccttcggggacctgattagggacaggatagagatatacgtcgatgacatcatggtcaagactaagagagggtcgactctagtggaagacttgaccctggtctttgacaagctgcgggcaacgcgcacgaagctgaactcggacaagtgcgtctttggtgtctctgctgagaagttgttgggattcctggtttcgcactggggcattgaaacaaacccggagaagatcaaggcaattgaggcaatgaggcctccggcccggatcaaggacgtccagaagcttatggggtccctagccgcccttagccgcttaatctcacagttggctgagagggcgctacccatcttcaagctcttacagaagtctggcccattctcttggaccgaggaggcagagcgagccttccaagagttgaagcagcaccttgtgtccctaccaatactggtagctccgg

SEQ ID NO: 156115 - DNA, 535 bp, Zea Mays
cttgaagctgagcaccagtgcctcagtgactggcgcacccaactagaggagcgcaccaagacgacgtcccaatagttcacctccgagcggtcccaactcgagcgagatcgcaaggagtataagaaagacctccagagggtgtgtgccagggagttggaggcgacccggagggagaagaaagtggccaggagggaggaagccgtgacccagagggaggccctcacgacggagtaccagaccaagctgagtgctttggacaagactctagaagcctagcgggcccagcaggtaaaggccgtggaaaggctgcagaaatggcagcaagagctcgagggcaaggccagcgacgtcgcccttgccgatgaaaaccttaaggagaaggagctgtccttggacaagcgggagacggatctcgccaggcgagagacagatctcaccttcagggaagaaatactcacccggcgaggcgagttgctggccgagcacgagctcgaagcagaggaaaaggagaggaagctggaggagcagatccgcc

SEQ ID NO: 156116 - DNA, 486 bp, Zea Mays
tcgtctggaagtagtaggcaccgatgtggtccctagtcttctcggacttgaccagcacgaagaagtagcggaagagggaagtacagggggccacacctacgaacatctcgcaaaggtggacgaagatggctgcctggaggatggagtggggcgtgaggtgttgaagctgaagcccgaactcctccagcagcagcaagaagaagggcgagatcggcagcgccaacccacaggagatgtaggaggtgaacagcacaaactccccgacggcgagattgccaagggggacggcgctggcacggattcttccggcaagccctagtgtgctccacccaagcaggtcgcgcactaggttgagcgcctcctcagactgaaaacggtctggatgaccaagcgaagccatggcgtgtgcaacggcgcgggcgtggaacaaaggagcacgaaggcaaaggggcgaaggcgattgggagagaatgtgaaaaggtaatt

SEQ ID NO: 156117 - DNA, 753 bp, Zea Mays
atgagcggacctgagacgagctgaccacggtgaggactctttcacggtggcggaaacacagtttgggggaaatgagcaattcgtggtctctggtgaacaattggaggcaattgctagtgctttggatgcataattatcctacggagctcacggcgtgctcaatttatagcaggctcgagcggtggccagtgaatttgaggagagacgcacggcggccagagaagaagtaggttactagcgcggtgattcgtggcctattaccgtggcaagctctccggcgaccaccggacggctacataagtcacgacggtgaggttatcgtgccaaggcacgtggtgcaaggccacgaagagactatcttcggcgaacctatccaaggcgaccgcgacacgctcgggtacgacggccgaagtaacatagcggctggagttcatccttgggcgatatttcttatccccgatgctatccaactgatctgagcgtgaatcaccgcggcgatagaacgaatcctcgtgcgactcatcggcggcgagggcactgagctagcgatctgatcagtgcactgtaccatcacgtaactcattcagtcggtctgacagaagatctttagaggcattgttcttgaatttttgcatgacaacatgttaatcggtttgtagcaaacttgtagcccaatatacaaactacaattctgcagcagagatcatgctcagttgtttactccatggagcatgaatcaagcctaaagttctt

SEQ ID NO: 156118 - DNA, 817 bp, Zea Mays
tgtttctatttctttccaagagcagtggctggtcttctgatgccgaagcgagaccaaacagggcgttggataatcccttttatatcttccctttcaactaagttattcttcacataaaaccattcttccatctaggctcctgtccacctcttccgaaacattggaactggatagctcacgtcagagcgaggcacgaagccataacaaccaaagttattgtgatactgttccttcccagtagccttcgtttcgtaagacagctcatgcatattgcagaagcattttgcacatggatctagtccttggcttctcacagcccaaataaagacccccatcctgatgatggcttcgggggtaatctaatgaagaaaaacttcaaaggtctttcagcacttcaaccagaaatttacttaacgggaatcgaagccctaccttcatgaagctcctgtaaacaaccacttcatctacttcgggtgcaggggcggcgctatcccctccaactctcacaatggaaatatctcggaaatatctccctttcatagcatcaatttgactctgcttaagggatgattttccgaagatggtgtgactcggcctccagggccaattttctacatcttcgtcttcactttccacatcaaagccttcgctatcgtcagaatcttcaaacaaaccagctagcatttcatttgtaatcttctctgtgtttgtcttctccatagcctcgtaaaaaccagctacagcaggatcagcaacctttttctcttcagccatttggtgagcacttgtgcaaatgcaaaagctcacgaatcaagcg

SEQ ID NO: 156119 - DNA, 756 bp, Zea Mays
ctagggtagaaaaataattatttgccttggattgttatggaagaacataccaattgtgactgccatctcaatctagctaacatctaagtgacctaaaaggagagcataaggaactgatctacaatgactagcctagtggttttataggaaatggcaaagaggaaaatgtgtttaagttattacaattgtatggtttaaaacaagcacctaagcacatgagaaattttatgaagttctgactttggctaaatttgttgtaaatgaagctgataaatgtgtctattgctagtttgagaggagggatggcatgacctgttttttatatttggatgatatattaatcttttgtaatgatgttaatattatcgaggaagtaaaatactctttgtgtggtaactttgaaataaatgattttggagaggctaatgttgttcttaacataaagatgttgggagaaggaggaaatagggggtaactcttgtgaatcctattaggttgaaaagacatttagttgttttggatatagtaactacacatctggtcaaattacttatgacacaagcgtgttgttaaggaaaatgatataatcgcatagaatcaaatgagatactatcaaatcatggtcttctcgtgtatttggctaatccaacgaggcctaatatctcattgctatgattaaacttagtcgatttgtatacaatgtaggggatgatcatggcaagccctagagagggtattgcgctacctaaaagggac

SEQ ID NO: 156120 - DNA, 441 bp, Zea Mays
gttcggatgcaactggtcatacagcacgtgcacttcttcgtgcatagtgttattatatgcttgcatattttccggggctgcacttagctcttccacctcgagcagtcacctcgcaatcccagtctatagatcgtgaatttacatcccagtctatagccctatctcgctccacaatctcctgctgcaaacggtcaacctctgctgacagctcagcaatacagtgtctatcacgcgcacgctccctgcttccatggcacagttccaccattagccgttcaactttaaactccagatcccctatgggatcattacttccactattgttcccttcatgctgaggagccaactggtgccgaggtacgccccgaggtccggtcgccttccgctgagtagtcttggtgcgtgccatgtctctataaggggggaagattacttagtatt

SEQ ID NO: 156121 - DNA, 634 bp, Zea Mays
gcttacgcagactcagaactcccctgctaggactgcgggtttatttttcagaaagcagagggctccattgcaaaactgatctcggactcctataccaggacacatggctccccgcgactcgctgaaatcatgccacaccctggtgcacaaggtgaggcacacgggatccgatccacacaagatccccaccaccgcccgcacgtgcatataagtgggatcacccccggaccgtcagatcgacaatcaatggcccagatctaaagtgtcgaagggatattagttgatataatcacaaccgtccattagaagatccacggcggcgatttttccagcccaggatctaatcaccgccacactattaaaaatctatggttctcaacctttcttagctctatccaccctaggttgttcgttataagatcaacggcaatagcatcttcttcttccccgagctcgcgctacggtagtctaccagtcgggtccagcgcacagcgatcaggtgggttctagcctaccgactggagcacgaccaggacccacgcagtacaggaacgacgacgaacaccaaggccagaaccttaccggcgtcagtagcgtaggccgagccgcccacagagatgctgatccgcgacgg

SEQ ID NO: 156122 - DNA, 592 bp, Zea Mays
tagaagtcaagccaatgctcgaagacctcatatgcaaggctcaacgcctggacgtggagacagtaagacttatggaaagagctcgcaaggagcaacttccagaccttagggcagatgaacaaggagttctttggttcaagaaccgtctgtgtgtgccaataggagaagcacgggaagtcctgctcaatgaagcccacaactcagcttactccatccacccaggaaccacaaaaatgtacctagacctcaaagccagatactggtggagagggatgaagaaggagatagcacagtatgtggcccagtgtgacacctgccagcgaacaaaggccgaacaccaaaagcctgcaggcctactgcaacccctcccagtgcctgaatggaagtgggaggaaataggcatggattttgtaaccggactgccccagacgcaaaaagggaatgactctatctgggtaataatcgaccgtctcaccaaggtggcccagttcattccagtaaaaaccacttttggaggagccgcccttgcccggatatatcttaaagagatagtcaggctccatggtattcctcggaagatagtgtcagatag

SEQ ID NO: 156123 - DNA, 667 bp, Zea Mays
ttggaggatggtaccttggaggcgggtgctggggcattcttggggccattcaccgagttggagtaagtaggcatggatgccttcaactgaggaaattttttcttgtagtgactggggtctccgcagtgccaacaggcattggctggaggttggttgcttgcaacggaggggggctgaaaggagctttgaccctgctgactaaaacatgatggagtgggtccagctgtcttgttgaagcttggtcccttgggtggaaacccaaaggatcgaattctttggtgcctatcctgctgttgagctcggaggacttgtaatttcctcttgaggtgacccttttcttcttcccttgccctttccacttgtatggccttgtttgagaggtgcgagaagctgaggaaatcttggctggcaaggatagtcttgagttctggtcttagccccttcaagaaacgggccatcttcttggcttctatgctgacatcgtcaggcgcgtagcgagccaattcggtgaatttgtgcatgtactcactgacagatcttccaccttgggttagttcccgaaattcatcttccttgagctgaacgatcccttggggcacatgatgttcttggaaagcagcttcaaattctgcccaggtagcatccctgacggcaacgctgaaggtat

SEQ ID NO: 156124 - DNA, 420 bp, Zea Mays
aataggaaggcatgctcgtccagtttctgcaagataactgagacgtatttgcatggcagcctgaggatatgccgggagtcctgagagagctgtctgagcacaaactaaaggtctatccctaggcaaggtcgatccgacaaaaattgcgtcgtttcacgcctgacaagagagaggctattcgcgctgagttagctcacttagtcgtagcagggttcattagataagtactgcatcctgagtggctagcaaatcatgttcttgtactcaaaaagaataaagtggattggtgcatgtgcgtcgactatacagatctcaacaaacattgtctgaaggacccctttggacttcctagaatagatcaggtggtagattcgaccgctggatgttctatgctgtccttcctggactgctattctggat

SEQ ID NO: 156125 - DNA, 275 bp, Zea Mays
gtgatagctttgggagcaatagaaaaggacaagatcatggtagtcagggcctacaacaagaaggtcaaagcaaagtcatttcaagtaggggacctggtgtggaagaccatcctgcctctaaggaacaaagaccggaagtttgggaaatggtcgccaagctgggagggtccttataaagtaaaacaagtaatgtctggtaacgcctatttactacaaacattacaaggcaaggatttacccaaggctttgaatgggtgtttcctcaaacagtacca

SEQ ID NO: 156126 - DNA, 714 bp, Zea Mays
gggaaagaagtagtaactgaattgttcatgcctgaattagaaggagcctgtcaccatttgtctgtagatggcaaggaggccaacctaattgaggatattagaattgtgttggaattccccgacgtgttcccttaggagttaccaggcatgtcacccgagcgtaaagttgagtttgccatagagcttatccttggcaccacacctatttctaagagaggctatcgactgtctagaccggaattggtggaactcaagaagcagattgatgagctattagagaaaggctacatcaaaccaagtatctcgccttaggccgccccagtgttattcgtggagaagaaagatgggacaaagaggatgtgcattgattacagatctttgaatgaagtcactatcaagaataagtaccctctgccaagaattgaagatctattcgatcagttgaggggagccagtgtgttctcgaagatagatctgaggtcaggctaccatcagctcagaatctgaccttcagatataccgaagacaacatttgtcaccaagtatggactacatgagttcactgtcatgtcattcggtctaacgaatgcaccagctttcttcatgtacctgatgaatagtgtgctcatggactacattgacaagtttgtagtggtgttcattgatgatatcctcatatattcccaggatgagcaagagtatgaagagcacttg

SEQ ID NO: 156127 - DNA, 525 bp, Zea Mays
tcaatagtcggggtacaagtccataaaacatgcgcaataggcacaattgtggctcgatgatcacaacagacaaacaatgcctatagggcgtgcagaaaatacgtgactcgatgatggcggtccgactcaacgagagtggtccgattaagcgagagtgcgacatagcaatcaaatgacgcagccaagttcgtatgacacaaatactgcgtcgtgttgccagggcggagccagtgctcagtcaatgccataactcgatcgattaataacgtagtctgatcgacgtgtctgagtacccactatacaatttaatcgctcgacgtgagtccaaaagctcaacacatcataaatatttagagcgattcacgtatacaccatatagtctttacatgcattttaataattttctgctaaatatctactacgagaaataaagcaaaaatataatactagaattaaagcataagcagatcaggtgtatgaaaggcattttctcatattcaagcatacatttttctactaattatt

SEQ ID NO: 156128 - DNA, 1224 bp, Zea Mays
ccgggtattccgcgctatcctagaccacccccatcacggactccagtcccagctataaaatgctcggccccgcgaccctcccatcgaccataggcgagaagcacacaaaaccagcgccgagctgcatcgacaagcagaggcagagagaggaaaagcgtgatgcgtccgccgcggggagaaaaagtccgatttaccattgtcgggccctcaggtgcggggtaggaagcgtcgccagggcatgtggaccttgcggcatgcacgattgagcttggagttgcaccatggggcgaattattgctcgccgacgtttatgctccaccgcgattccatgccctgtcgcgggtggatggctctgcggtataatggaggctaagtttccttcctctgccttcatcttcatcccctggtcgttttgcgcctttcaaattggagttgggattacctgggccacggattggtggtcgcccgcgaagaccccgccgcggtggtcggcggccgaccaggtcgataatgcatggtgtagcggctgagctccgagattggcgggggaatcagtgaagcttgagatccgtcgtgggcatctgctagccaaaccaccgtgggcgcgttgtttgcaggcgattggatgcaccagggttattgatttcgtcgtcggggcctcttcacccccccgtggaaccaccgtgcgccatcgaggctcggcgatgggagctgggaggtgtggttgtggccgtgggatccccagccgacggctgggattggatctgggaaaagatggcctggttgccgttgatttggtgatgggcggccaagattagcagttggtactgattgtgtctgtggtgtgcgtgaccgtccgatatggatcgtggggatgagattggatcgtgattaaattcgatctgggccttcaagactgaagcagacggctaggattatatcgtgcataccccttcacgcgatttaatctgggccgttgaatcggatcggatggccgaagcctatccataccccttcgcgctggcgctttacaaatgagaccctgaaattttaggatataaacccgaagttcaccctgactgtagtttgagtcttaggaatgttgcgcagaaccccctgggcttctctgtttttacgtgcgcaaccagggagcagagaagtttaatatttaaatatagaagttgattttttgtacacaaataattctagaacttgtgaaattca

SEQ ID NO: 156129 - DNA, 398 bp, Zea Mays
aatatgaagctatatagaatctcacaacctcaccactcttaccaaccaaagctcttatgaggtccctgcggtttgcaagaaaaatgtgtggtggtaacaagaaagtgatggttaagcgaatacaataccagagtaccgattatgatggattatatgtggagcttggtgggggaatagtaaacaaggaatgcaatctgaatcctagttgttgtaaagttaaataacaatccaactagaagttcactgcctagtgctgaccacaagattcgagtgatgtaagtagatcaaacacacgcacaaagaaatttcagatttgatgcaaatcaaggagtatgattggaatgcaagtgttgcgatcagacccaaccaaaattttgcaacaaatgacaatagcaaac

SEQ ID NO: 156130 - DNA, 653 bp, Zea Mays
tccggagcggggagtagaatccagaagcactagcgtcggggtcggacgttcaccttctatggtagttgagttgaggccctcttttggtgggttccagatgttggtgtctgatctgaactgatgtggtgcctgccatcgtttctgaccgacccccacggcactcgcgtcgatgaacgcttttctccttcccaggctcccagcccagcccggtctggtctggtcttctgctgtggcctgctctgtccgagctgattgtcagcaaccggctgggtcgtgggtactgagtactgacccccgaatgtttgtcagtcgtcagtcagctcaaaaggcacgttgttattcaaccatcagaaggaatgacagcaagcatgtttcgcccccacaaccgccacaggccccattcttcagaggcgagttgctcagacccagaaaaaaaaagaggaggaggaaagaaacctggaccatctgacatcgtctcgctttgctcaatgttcgtcattcatcattcgtttgccttgccgctcatgaacaactttgccgttcaaaagcgaccacctttctgtctcctcccgattatttggcaccctagtaaaatggtgacgatggacatccgtactccacagcaatagtagtagcacctagcagcccgtctc

SEQ ID NO: 156131 - DNA, 635 bp, Zea Mays
tctgatcagtaattcggtttgcaatgtacactatccaacttacttagattaccatgaaagtatctgaagatgcctgattctctctgatctatatattccattttgtaacatcagtgtatatggaatatatctatagccagaacagttaggtttgcctaaaaaaagtcacatggtgtaacactggagtcatccacatgtacagtgacataaaggtcaccacctcttttttcccatttaccatgaaattaaacagcaatcgatgcttcgaattggaaattctttcaatctcttactgtgaatgaagacagagaatacacacaacagctatctctacctggtggctggtgaaggcaatctccacagcttgtctattgtattcagagagtctcgcggatcatcatcatcagcatgtaataaatgtaattacgtgcatgggaaattctagtcattcttgttatgaaacaagcgagaacaatcaagaaatcgtcagcgagccaacatcttcactaagcacagcagacaagagaaattaaccgcataccttgtgatgctggcacatggaaattaacagccatacgagagacgggccggaatttgatggatgcaactgccgatgaagcaggcgcgcgcggtag

SEQ ID NO: 156132 - DNA, 828 bp, Zea Mays
ctcgatgcttgcatgtgctaggagtagagcctccgcctccgcctgtgcgacgttggcctggccacgtcgtggctgtcgacagtccttggccaagtggccaagcttgccacagttgtgacagccgtcgtctcgtggctgcttcttgttgccgacggcgccgccttgggcacctccacgggcaccaccctcagtatgtcctcgcgccccggcctgggcgcctccacgcgccttgcgcggcttgccgcgtttgcggcctcgtgtcgaggactcctccttcttatcaccctggcaggcctcccactgctcccgagtgagatgtagcttcccgccgatggtgataggcccagagagggcctgtgcttcgtcgccgtcgacgaccttgagacgaccaatcgcttcttcgatcgtcatcgtggagaggtctattagagacttgattgagcgagcgatctgcttgtacttctcggggatgcaacgaaagagcttctcgacggctctctcctcatcgtaggtgtcgtcgccgaactgcaccatcttctgcaacagggtgttgaggcgaagagcaaagtcatcaacatcctcacctggcttgaaggccaagttctcccactccttgcgaagtgtctgcagcgtggtctttcgggcacggtcgctaccgatgcgggtcgcagcgatggcgtcccaggcttccttggcagtccgcttctgggaaagcgaaaactgcagcaatgagggcatctagcgcccgtcgatcctcgtagtagtcgacatcgccgtaccgaactgcttcccacatgtggcgaacctgaagccgtaccctcatcaccg

SEQ ID NO: 156133 - DNA, 508 bp, Zea Mays
gaagaatgatagaacacactaattcagtcaactaggtaccagcagaccttgaggcgctaccatgacaaagttgtgcggcaccgatcctttgtgatgggtgacttggtccttcaccgaattctaacgggggaagggcggcacaagctatcaccactatgggaaggatcattcatcgtatcagaggtcactcagccgggatcataccggcttactcagatggatggcacagaagtggggaactcgtggaacatagaacacctaagaaaattctatccttagcaaaggcctcaaaattcttgaaggaacattgtactccgtaatctgaggacttcatcatcaataaagttttcattttctaaaggcattcagactcttgacttacagctgacttcaattgggattggcttgaaatcagcaagctcacttgacttagggtgaccactataccctgctaacggagcaatcggcttaagtcggcgacgacttaagtcggtgcgacatgctcacg

SEQ ID NO: 156134 - DNA, 805 bp, Zea Mays
caggaaggacccgagctcggcgccctgtgctcaagcggaagaagaccgctgccgccgccgttgaactacgcaattctcatcgtcgggccctcctggttcggccgaggataatctcctgggtacaccgcgtgcgtacgtgcctggattgggcgccgtggtactaccggggcaccaaaattgctcatcggagcatctgctccgccgcgggtctacctagtgccgtggaccactccctggtcgccgtctctgactacggtgagtacctagtccgtttcgccgttgttctaattgtgcgtggggaccttcgattgacgtcgagggagccttgctcggccggactgcgtggctccggcgggtcaccaccatggacatcgggcggcgccgctgtctagctgggaagggataggggagaattgtgtgggccgttgatcggctattggacggtcagatttgatcctgagtgtagcgccctcacgtgtaatatacgccctccgatcgggatctggtggttagggttagggcgctcttcatcacgatccggaccgttggatggggatcgggcgcattcgatgccaccttgggtattttaaatccgatccgtagatctcggatcgggcggccaccaacgcttaccggttcgcttaaagttcagaatctaatccgggcccttaatccttcatcgggcggccccagttggcccgtaccctttcggccgtgcgatgttgcaaataggcccctcagcttttcctaaactaacccgccgtcccccgcggttgtgctttgagtcttgcggattcttgcgcca

SEQ ID NO: 156135 - DNA, 623 bp, Zea Mays
ttcaaatttggaaataatgcagaaaataaaataaaataaaataaaataaaagggagacatggcgcatgggccagctatcctcaatccggcccagttctcctttgattccgcgcggcccaactgcgcatttcctccgctcagccctggtgcgcgcatcactgtgcggtgaaccactgacccgtgggcccccgcgagcagcctcaacgcttcacaccgcgcgctgctgacttcgctgacgcgtgggtcccacattgtcagcccccacctccgccgagttcggaatcacgccgccgatcgcgtccatcgtaactaggaacccaacgacctctccgtgattcgctcgacgctaacggacatcacttcaccttatatagctcagtcaacccctcgtgcctttcccttcttcccatcggcaccgtaaggagccgccatagccatctatcgccgccgtttctgattgacaccggggtgctgcgggattgtactctgccgcgtgtgctaaagctccccagaaccttcttgggtgagggcgcagctgtcctcgggtgcggtggtgaccggggatcccgggatttcgtcgccgtcgaatccacgcctccgccagaccaattttcgcgactgcc

SEQ ID NO: 156136 - DNA, 613 bp, Zea Mays
ggaagaactccgacagaaacaagatggagaaggtccgactcggaaacaacagacatgtgattacctgtgaaaggcaattgactgttgggatcgatgggaggaataatcgcagcggcggaattctagctctttcgcttgggcgccatctcaatctcgtcggcgaactgagcggaagcgagatcaaagggaaacagaggaggtctagaagcggaaagtaaggctagggctcagaaagaagaggcatgcgacgacatggacaaatggggttttcccgggccaagcaccgattctaaaagtgcccagtcatcactcagctgttacttctaaaatgccgacgtggctcgatataactcagctgttatttctaaaacgctgacgtcaccggtcttcactcggctgttacttctaaaacgccgacgtggctcgatataactcagctgttatttctaaaacgctgacgtcactagtcttcactcggctgttatttctaaacacgtcgacatggctcagtataactcgaccgttacttctaaaacgccgacgtcacccgtaatcactcggctgttatatctaaaacgccgaggtggctcaaaaggactcggttactctaaac

SEQ ID NO: 156137 - DNA, 279 bp, Zea Mays
atatttaagagcaactgtaagagcatagctaaatcaattagtaccaataaaaatagaaaaacgacggtaaaaatgtgatccaacgaactctccttactcgcttctctatcacgtcgagggcgctagacatctttgtcgagctcgcttggctcgcaatctccttcctcgcgtacatgtgctccacttctcacgtctatttctcttcccccgcccgcgtgcctgtgcccgttttgagcctgtgtcgctccctaccatgtcgttctctgcctgggcgtcaca

SEQ ID NO: 156138 - DNA, 1394 bp, Zea Mays
ggcgcattattaacagaaactccaggggctactgcgtaaattatccaatgactcagactccagtaaccaggactgcaggttaatacctaaatacttcaggggcctatgtgcaaatctgtgcccgcgaaggggttcgcacgcatttaatcaggaccgcccgccgatcgatcaatggcccggggtcgatacagcgcgatctaatcttagccgcacatcaggttttcaacagctatcgcgtgtcttccttctcccaccgcggagggagcggcggcgtagacgccctggcgccatggccgacgcacagacgaggcgccccagcgaacgcggtggcggccatggccggaaatggccagatcgacatcccggcctcaagctttagtccaaaacgcgccacgtgatgtgtagaagaaggcgagagcaggtgaccagttcttaccggcgatggcggtgtgtcgcacgcggaccacggagagggattgattccgcccctgcttcaatctccgacagggaattcctcgactaaccgcccccgattaaatcacggaggattctccttgccagcagcacccccaggtggtcttcgcagcccctacgccgacgtcctgacagcgacgcccacgagtttcaatcatcgcggcgaaacctccccatacgctcaccacgatctccccaatattcgactctggatatggaatggtgggctggtgacgcggcgcgcgggtataggtataggcagggaaggtcgcgcgaaggtcggaatgcccggtacacacacggtcagcggaaatcgcgcaggagcgacggtgatttcggccggacgctgcgcacgcaaggatgaagatccgcagtaaccgggggctctactggtcagctgtgctgggatataagcctgcacgctggagaagtcccgccaaggtggcccactggtcaacggcttgcggcaagcacagctgagggcgtcaacacgagtgcgggtgaggctgagcgccagggatactatggctgggcgacacggttggagtcttggagacgtagccaggaacgaggcaggtatgcggtgccctggtgtgcatggaagctagctaacgacgggtcccgtgtagtgaccatggaagcatgaggccatgtgctttagcctgatgtcatgtgcgactaggattcataaaatagaaagaaaaaaatgtgggctcaatggaattccataggaaaagggagtgtgggatgattttgtttttcctattttatttactcctttctttttttctattttgttttccttttctcttttcctttctattcttttttcaacttaaactcaatttcaattataagtttaagattgcaagattaaatgcacaagcaataaaactccaatatgatgtctggcttatttt

SEQ ID NO: 156139 - DNA, 719 bp, Zea Mays
atcattggcagggtaggacccgcagcataccgtctggaattaccggaatccatgtccgacatccacaatgtgtttcacgtatcccaactccgcaaatgcctgcaagcaccagaaagtcacctcgaagaagaggcagtacagattcagaaagaccttcaataccgtgagaagccagtgaagattcttgattcaacagtcagaaagacccgcacctcagaggtgaagctctgtaaagttcagtggagcagagaaggagaagaggaagctacctgggagagtgaggactccatgaggagggaatacccttatcttttctcaaatccaacctaaatctcgagggcgagattcctttaagtggggtaggtttgtagcatcccaaaaatcccaaccaaggtttgaaaccctaacctcctaaaccccccctctttaatttattttatcctttaactctacccctagatcaccccatcatgtgcatacacttgaaatgacaagagcacctcacctagactatatttatcactcaagatcatttagaaaatttttgattcaaaggaaaaagaaacaaaaatagaaaaaggaaaagaattagaaaaataaaagaaaaaaagaaactctctcccctccctcggctgggccgaatccggcacaaccagccccgcgcgcccgcgcttcccttcccctctccctggcccaggcggcccaactccgcgcgccgc

SEQ ID NO: 156140 - DNA, 309 bp, Zea Mays
acaccaagaaattgtccgcgcacagaccaactacaaggcgcagccggaccaacgtatgaaatgtgatagaccaagcgcacaatgacatggacatagccggacgcgtgaaggcatacagcctcattatacaaaccgtatttacacatgtacagcgaaggcatcacactttacattggttcgaccttcggaatgattcccatctccctatagttgaatagcattatcctaagctcctcaccctcaaaaagacttcacaactccccctcacctacactcgccccaaccggcgaggacagcaatccccgcttg

SEQ ID NO: 156141 - DNA, 364 bp, Zea Mays
tttttggcgactccgctggggacgaggttgaagatctacaaaatcaggcttatatggccgattctaaagatctcaacagggcttctccaaacagcagcacaaggctgactaatttatcggccgctgagcataaaagattaaaagatgacatgaagaaaatagacgaagaggtccaacgacaaaaagatcaggtactcaaggtggcggataaatggttcctctcgcacttcagggtggattgccaccagaagaccgtccaagaaagggaaatagacgccaattacatgtcatccgtgctgcaacagcccccacaataggtgatgccaggtcagtcgatgatattccatctattgaaatttctttt

SEQ ID NO: 156142 - DNA, 474 bp, Zea Mays
tttaaaacaacattttctacccatcacgatcatttggagttcaaagtgatggtgtttggtatttctagggttcccgttacttttcgaagtgctatgaactccactctctggcacctctattacggcagtgtgttattgttttttatgttcaacagtgtgctatctgaagatgaccaaagcatgctagagaagaaggtagaggaggtgcagtcttggatcttcagcttcaagagtgttgatggagggggaagcgacatagtagtgatttgaagtattagaaaaactttgttagagatttctcaacgctttctggagtgtttcagagtgttctactcttagctggtggttcaactttgctgggaggaaaaattctggaggtttttctttttctttttggaggagttcatggctcctgtgtgctgtctatattacttctagctgatcggttcactgattgcatcttggctatgctag

SEQ ID NO: 156143 - DNA, 1195 bp, Zea Mays
aacgacgataaagacatcgacgacgacactacttctaaggtactaccttccactgatgatctcgccgctgagatagaagagttgaatgctactttggctagtcaggataagttgcttaggtaggttgctcgtgagaggagagagtttagatccaagtacgagagcatgcttagggaacttgagtctgctagagcttcagttgaggtgtccgatgagactgaatgtgatgagtgcgctctacacatgtcaaacatcaccactttgcagaccaagtactccaccttcctagatgagcgcgacgagttgagatctaggtctatcctgttgggtgcgtgtaccgtttgtcctggcttacagtatgagctagcagagagagacgctaggatagctttgcttgaaaaggctagctcagtgagtgcccctgcacctgcgtagtgtgcactttgtgagggtttgcaatctgcccttgagtactacatacacgacaagacaagaatcgaggaagaaaacacataccttcgatctatcttgagttgggtgtcatgcagtgagccccagttgggcatgatggtcagtcagttcaagaggggaactggcggaccggggttaggctttgctactaaggatgggagtgtcgctcgcttcgggaagattggtgagtgcagtggtttgacaccttcagataaaccttcacccactcccaagcttatcaaaaccacctctgttaagcctgtaacccctatgagagatggtgtgattgatgaatctatgagagctcctcctctgaaacaagtgtggcttccaaaactgaaccatcttaggaacacacttgacacatttcccagcatctctagcgatccccttcctagagcccctcagccatccaaaaagaaagccccctcccacaaacaaaatccacccaagagagaggtgaggtaccattgtgaatattgtgagagggatgggcatctagcttccttttgctttaggaggaagagagatgagcggcgggtttctgagtcgagcaggaaggacatgaattgcccctctcatggtgttcatgctcagcctgttcagagacatcctgggaggcctagaggtgttttgcctcttaccgctaggcctcaggcagtgagaccatgtggtggtcgtgcccgacgggatgctggtcgtgtgccatatggccaaggaccat

SEQ ID NO: 156144 - DNA, 511 bp, Zea Mays
gtgctgcaggccaaaaatcctgaggtgctgaaccatgcttgctgggagaaaacacaagagacaagcagatgattcagtgtctcctcttgatgacacaacggacatttatgtggatgaggcaagcctttttttgcaagtcggcctgcagtccaacatctgccatgcgccacaagccacatgaaaatttgcattttcctagagcccagctcttccatatcctctcccaccgtctgaactgtgttgatccaataaatagttcctcatatgtcgattggcggagtatactttagaattgaagagctgccaaacatgattgtattcttgttcaggatatagggaccaatcttcaagaatgtcctgaacctttaaaattctgccagaactgttactgtaacagctcctcttatgttatgtacccattgcctgcctgatagagcatcaaacacaatattttttggcctttgcagagatcaaccagaataagtgaggtgctatttgctgcatattttgg

SEQ ID NO: 156145 - DNA, 347 bp, Zea Mays
accaacccaagtctccttctgcacatgttacataaaaaaaatgttgtttggtgtctagttgcgcaacccctatcaaggccatgtttctttccataagcccttgcccctaaaacgtcataacatttctgttgatcatcctagctgatcctgtttgcctacctctccttttgcctggatctggtaaccctttttcttgtgaatcatgttggctttatcatccgaatctcgggatcccctataattctgccctattatctggttatctcctataacccgttctcaagcatcgaatgttgatccacctgatctctcgtttctagtcttttgatgctcttcctccaggcatc

SEQ ID NO: 156146 - DNA, 282 bp, Zea Mays
ccgggatgggcgggcacggccgtggatcgcgacgaggagcagatggttgagggagtggatcacgtcgatggagaagggagtgaatcacgccgaggaggagaagggagtggatcgcgccgaggagtggatcgcggaccttccatccgcggcctcaggcagaaccgtgcgccagcaaaaactgtggacgcctacaccaagaccttatagagtagtaatagatatagaagcagaacagacgacacacatgtcaggctaaagcgtcggttgaaggccttctacacc

SEQ ID NO: 156147 - DNA, 671 bp, Zea Mays
tatgaaatcacaaaggaaagtgcagtgatcgacatgacaagggaggaattctacctaacaataataagataaggagccatttttatggtgaataaagcaagcaggtctgaagggcagaccagaacaaatagctcctattatacatacaatacaagataattatacatattaaaaattctaaagagatccattttttaggatacctttggacagtttgcgccgacaaacgtctgcaagcaattgatggcagcaatagcaacctccttgctaccgtttaagatgctattttttataaaactgagtaaaagcacccaacctgaacacatttcaatacaatgagaagctacttggaatttgataaccaatcatcaacataagataggcaaacaagaaaggtttaccagaagaaaattttctcagttgttggaggtaagagaaaaaagaacgcaaaagccgtgcaataccaccaagtacaagaacaatggtttcatcccattgcttttgtgctgtatttcgactggaaaaacaaagaattcaaatagattagaagaaaggacaggaaattagccagaagaacaaacactttgccactcttggacttctgatctctcttcctcgcagggggtaatttgccgacttaagattttaaaggaatacaagcttaaaaaaat

SEQ ID NO: 156148 - DNA, 550 bp, Zea Mays
tttgtttattttgaatttggttatttgggttggctggatgaccgtttgggacaagcagacttgcttttgtttcttttgtatttggctatttgtgagttgtgactgtctctgtgagctatgactatgagcgactatgaggttgtgataactttgaagtttaaacaattattatgatttcaaaaattcaagtacatgcatcaagcttcttgagttgtttaatttcttttagtctattcgattgcaagtgcatgtgtcatgtgtgcaagtgcttgagtgcgtactaaattacttgattgcatgcatgcaacaagatacttgagtagttgagtgagtattttagtttctcaaacatttacgatgtgtgtacttgttatccgaataaactatttgttaccaacagtattcgtgtctgacttgtccgtattcgaaaggtgaatatccacatccgtaaccgagataatccgtatccgtatctgtatccgaaactatccgtatctgtattcgaatccgactataattatgaaaacgaatacgatatcatcaatatccg

SEQ ID NO: 156149 - DNA, 519 bp, Zea Mays
gccggcgttcatcgccgcggcgggtgagcggcgccgccgtgtccagggttgggttggggaagaattccccagcaccgttagatctggctggtgcggctctgattagatagaagatgccctttcgcgttgtgtcgatctggtccgttcagttggatcggacgggtggaaaccaatctagtgtaataaaatcctccccgtcacttttgaatccaacggttctcattgcgtaccgcttcgagatcacgccgatctaatccagaccctagacctgtgatcggacggccagaaaacatccgtaccccttcgcgggtacgttttataaaagagcccccgcagaatcataaaaccaacccgccgtcctcactcactatttattgagtctagggaatcttctgcactagcccctgacctatccaggaattgtggcccagtccagagcacgtttaaaacgtataaatgaattagtaaaagtatttttaatacaaaaataattcctagaaattagttaattcatagaaa

SEQ ID NO: 156150 - DNA, 374 bp, Zea Mays
gaccctggaatgtcaactacaagtgatgtcattaagtgcaaagaatgcggtgtgttggcaagtcaaaacagcactataaatgaaacaactgatgaacaaaccttcaagacacaaaaggatgaacaaccaaaccaacagacaagtgaccttggaacatgttgttgttgtgagtactatggaatttcttgtcaccagatcagtacaaacgaaagtgaaactacaaaacagaagaaccagattttattttctggcatagacagacaaatgtctccccaagaacaactaatagcagattctctcatacctaatgcactgtcagttgatgaattgcaaagtattcccaaaaggaaacatcacaaggatgcccagccccg

SEQ ID NO: 156151 - DNA, 461 bp, Zea Mays
ctctcaccatatgtatcttgtttgatcttaaggatggttcgtcgtcggaatccatccatcattgaatctgactcagatgacagttccctagagattcatgaggagacaccctcacggtctagatccaagcgtgggcgaggatctggcaatgtcatgatgggtggtgaggcctctaggtctcaaggaactcgtggacgaacgactcgaaacccttctagtcgttctcatcccgcgacaaatcctcaggcctgggagtctactagtgatgatgaaggaggcaaagatgatgttgttgacatccctcccgctaatgcccccatcattcaaggattggtccttcacaaagctcaggctcggcgttcccccaatgaagaagttactgacttcagtgccagcagagggtctgctcttcttcaagacatgcgttttcagaaccctgccctccgtgttagagacgtccg

SEQ ID NO: 156152 - DNA, 409 bp, Zea Mays
ccaatatattagaaggagtagaactaacaggaaattacaagaaaccaagatgacttacaagactagaagcgaactcctgaacaaatttactaagcggacctactagccagccgggccatggaaacaaccaactaactctttgaccactagcgcgacctgctccgctgatctaagctgactgtgaaagattctattgttcctctctaaccaaatgctccaccaaaaataaatgataaggccatcaaaggatcttctcgaaggcttgttgcagctacttctcaaatttctccaccagtcgtacaacgaatcaaagccatagatccccttaaaggacgaaagattcgcccaagacaagattctgtcccacacctccctgctgaaggggcagtccttgcagagatgaaccatc

SEQ ID NO: 156153 - DNA, 390 bp, Zea Mays
agaaaacgcccattcaaagctttgggtaaatccttgccttgtaatgtttgtagtaaataggcgttaccagacattacatgttttactttataaggaccctcctagcttggcgaccattttccaaacttccgatctttattccttagaggcaggatggtcttccacactaggtcccctacttgaaatgactttgctttgaccttcttgttgtaggccttggctaccatgatcttgtccttttctattgctccgaaagctatcaccctcttgtcggtcacctcatcaatattatcaatcattgaattataataatcagtgagagttagatcattttgtctggcgaacctgacagcattcaaacttatttccacaggcaacactgcttcctgc

SEQ ID NO: 156154 - DNA, 426 bp, Zea Mays
gccacctctaaggctgaaggattttcaaccacttccatgggaacggagcaatctagatcagcctcctgactcttaaaaccgcgctccaaggtcgatgaggcacgagacgctgcttgggataactctaccccgacagcaggcacgtcaccacaaattccatcattccaccatctgccgactccgacaataggtcttcagggaccatatcttcgagagtctgatcaaaatttgccagagacaattcttgcagaccaacgagagcagacaaagctggagaaggaacaccactactctccccactggctatatagcgccgactgttcttccaaattaaggggatttcctcctcctcttcctcatcctcatcaataatacggacaatacacccattgggatcagctctgactggattaacccattgggatc

SEQ ID NO: 156155 - DNA, 533 bp, Zea Mays
cagccatttttattatgtacaaatgcagtagaagatgaggaacttcatagtatgtttatgaactcgcaactacttagaccgcatattagtgtgaagcgagtctcattttgtttctagaagtgaagttgaattccattagttgtcagcattcacctgttctataggagctgccgtccagactccaggacttgtgaaagaatataaggggtaagatcgtcaatgcacatggccatacaatggcagaagagcaatgaggacacaagattgaatttaaaatggggaactggcaacaaatcgaactactggccgtgtttttttatataaaaaactggctgttgagtgttgacggcaaacgggagaagcccaatgtttcgattggcagaacggcaaaattctggcctgctggctgatttcgacgcaccaaagccaacgttccttgcagtcttcctttcatgtagaaattctactctacctttttgaactaatctccttgtcctattttctttcttgaactctaaaaccatacattttag

SEQ ID NO: 156156 - DNA, 587 bp, Zea Mays
caattcataaagaatttgccctaggtcaacacatcaagattatagagctattaaaggggtataactttgtttaagtcatcaaaaacaagtgttatgcaaaagttggagttaaatggactcaaagttgggttgtcagtcagctcaggatctgaaatcttactggcagttgcttagggtgaactttggagctctgttgaagaaaatccggtaactatttgagtctgaccaccatagcaagattgtagctggtatgaaggactgcaagtttgttactgagagattagcaagttctcatgcagaaattggagttatgggtcctgcaagttggtcggacagaggctctgaattggagttctcatggtatagtgaactgaagaagatcttcaaatacatcgcccctcgccgcctgtgactgtcgcgccgtgattcgtgtcgtcactacgattcgttccctctagtatggagataatcacggccgcgtaaagatcttggcgccagataaactcagacccgatcgacggggagttcgccgcacccacttggattgcggtcggccgaattggtcctcaccggcgctggccgcttac

SEQ ID NO: 156157 - DNA, 544 bp, Zea Mays
gcaggacgcctggctccgacgcgagaacccgcttctcactcagaacctattcccggactttgctcgagcactgaatacggcgagcgaggttggggggtcttggctcagattgccaatggcctaccgcgcacccccgatgcggagggctatcgacaggtgctcacccaagcgatgaaccaccttctcccccctcgctcacccgtcgaacgacctatgccatgccatcaacagatgacgagacgcacagagcaacatcaatgcttcgcacgatcgccgacatggggaagagatgaggcagtgagaagagtacgaccaggatcacggtgtaccggcacgcagccgtgctactagaaccgagtcagcagcggcctccaccaatagtctagccccgggtcgatcgaggcaacacgatgttcactcgcttccctaggaccatcgacgtgatcatcgccgggaggacagggggacgtgtggagtatctgcccttacccctgactctgggcgacctaatggccgccgaacttcaaggtctccaacgtcgaca

SEQ ID NO: 156158 - DNA, 823 bp, Zea Mays
tccgcagtgaagctgagtcttgtattcgaaggagagatgccctggcgtctgatgtgacgacaaaatgtgcaatagattcgtgcctgctgacttcccatagagagccgaggccgagaccagggggtgtccgtacgcccgagctcccgagggagaggccggccatgtcatagtggttgtaaatagcgccggggtatgggccaaaggctgcttacggggcgcgtcatcgtcctggcgcgtgatgacgtcgagattccctgcagcacaaatcgagatcagagcccttgcttggttgatgcagaagtcttcccgaggtgctagccaagctgtctctcgacgtgcgctatagtcgggcggagtggctgcctgcggattcgcggcgtagtcggtggccgaggctgaactcgggcgaggcggagaacttgcccgagggctaagcttggggtcggacgaggcggagaggtagcgcccgaagactcgtccgctcggcttgtcgtattaggtgtcccatcggagggcgtcaggcggcgtgcgcgcactgtttggcacaggcataatcataccgctgtgttagatgtgatcgctgtcttgtccaccactgtgcttcactaccacgacgcgggttggcacacgcattaaatgcgcatgtccccttcctgttttcgagtgcccttgtcctatctacttgaggtcggctcgggcgagacggactgggctgaggtggcctcgggcgaggcggagtgagtggtgtcgacctcgggtgaggtggagccctgctcgaggtgggagaccctcgggggacgtctcagttttttataggtggctc

SEQ ID NO: 156159 - DNA, 553 bp, Zea Mays
gaggaattgtcgatgtttattgaacgacaaatattttttgcccttcttcaagaaaatgaacctaagaacttccttacaaagtgggcatggaacttatcatgaacacaccaggcagagaatagcccatacgtagggaagtcatgtagagagtagtggtaccaaacatgcattttgaagtttttctttgtatgtctataccccttcctcccaagcacggacaattcaacaatcatagtcttcattacacacccattttattctctgggtgtccaggaattatcaatgacaagaatatgtaatgtcattgaaagcatatgccggaggggaggttgagggggataacaaacacggaccaacatgtgtatgggggtagccatactcatatgaagtcttgttcaagaaagctcgaagaaagatgtggtttgacacatggcaagcagtgttgatcgcttcaacccaaaaacgcctaggagtcctatgcactatgctcatcaagcattgtcctggccatctcaacaatgccattttattgaggaacatatggagagggaaa

SEQ ID NO: 156160 - DNA, 830 bp, Zea Mays
gcgcgcgctcccgcgctcgagcgcccgcccacgctgacaggtggtcctgtttcgcccgcgcgctctctcccctctctcccactgcgcggtgggccctttccgtcagtgttgaccgttcgttcatggatttccatctcgctgccccgtggatcccacccgtcagccccctcagtcgtccctaacctctcgcccacgccccccgccatggacgcgcccacgaccgcgcgttctccggccacgttctcacgctcgcgcccctttagaagcccgcacaccgctcgcccactttcccccattcatttgcgcctccagccgagctctctcgccccctccctcgccctgcacacataaccagggcgtccgccgccgctcaccgaagttcaccgcccgttctgcgaccggcgttgaacccttgtcgcaccctttttctcggtaagctctaccgcaccaccagtagatcgagacacccctctgttcgcccctaacccctctagtttgtccagttcgcattcaccggagccttccccatgcagtcgaaatccgccgtggtcgacctgaggctccaccgcatccccgtcgttccccaagcactccgaagctcgcactcgaggtgagcaacctacccatacctttattgcatcaactaccgcccagtgcccgcgaaattctttgccggagttgacccgcaccaccgtaggctacctcgccgtgttctgtgccctctgctacccccatgtcggttttgcgcccatggctgggttcgctagatcgccctaagcgcgctcgagctattccccaaacccctagagccctgccgtggccatccccct

SEQ ID NO: 156161 - DNA, 1068 bp, Zea Mays
gccataaccgtctgatcctaaatccaggtaccagattagatcttaggagaagtgaactggtacgcagtcttggcccttggatccgagatccatggttcgaggcatatccacgtcctgattacaccagatcaacccaccccgagatctacgacgtggattcaatgaacgaaagcgtattccagcttctaatctcaatcgttcactctcgatccgaaggcacacacatgcccatctagcactggatggacagggacgatggtgccctaatcagaaccgtcagttaggagatatatggcccctacccttcttccctaccccgacaatgcccacgcggcaccgccaggactcgggcggagcgtcaccgcaagcacgagcgaaccggcgccctaccacaccctgcccccatccatcaggcttatttgtgaagaggacgatgaggcgaacatgatggtcgagcaattaccagtgaggggcacgtggtgtagcgagtctgtggtaggggattcggtttccgcggtggagggaactccgatcaagaattcccatggttcgagggtgacatgcaccaaatagattcctcctacatgatccataccattaggtgatcccgctagcgccttgccggggcgaaggaaccgtgtagatacatgttggcggtggtgatcgatccatcattgtgctcttgcggaaatggtgtggccccgcttttgggacgacttcggcctcgttgaagtggtgatcaagcaaaagcaagctcggcttcaatactcctgagggagggatagcgtctcggcgatgcggatattggggatttatatccccagggccgagggcttccgtcaaagcagctactgaaagggaaatagggttaaccttttcctacaattaattttggtggttgaatgaccaacgcaaacacatggactaactagtttgccaagtattcatgtattataggtgcataaaggttcaacacaaaccaataaatattcaagttagggatccaattcaaaggagcaaaaggaaccaagtgtgctgtggtctggcgcaccggacagtgtccggtgc

SEQ ID NO: 156162 - DNA, 2440 bp, Zea Mays
catcgatagctttgtcaaaagtctctcattcctaatcacaaaaactttcatgtcgttaacctgattgatagctgaatactgttgactgtgggggagatggagaaagcttacaggggaagtaaaaggtaggtagcccgaggctgtgtgacgtttcctttagaaacctccattgctggctccccatcctcttcctgcttcatggtttcacctgctgccttctccttcctcgattgccgcagctgctatgggaataccatctttctacaaatgggtcgtcagcaagtacccaagcatcatctcccctgtgaaggacgaaccagaggagtgccctgatggcatcatctacgacaacctctacctcgacatgaattgcatcatccattgctgcttccacccacaggaccagctaacgcatgcagacatagatgtatccacacacctcaatccatgcgaatctggacggtataaatgtatgtgttgactgactgacacaccgttgcaggtgcgccctccgacgacggccaatgaggtgttcgagtccatgttcgagtacatggaccgcttgttccgcatcgtcaggccaacaagtctgctgtacttggcagtaggttcgtgcatagattgttacacatcaaactgaactgaattccgtgtttggtttgaggaacaaattctcacctctcactttttttatttggtttgtgaaatggaatgaaatgagttgatccatcatcatttcatttcttatatactaataattagtaactaataatatgaggaatgagtttattctattaccgcggtgtacattaacaaccagcaacaagtgttaaggatgatgtttgttaccttcagttatttgagcaacttagttacacatgcatgcacttccctatctgttccatctgcagacggcgttgctccttttgccaaaatgaaccgaatacgaaggggacgtttccactccgccatggaaagacttgctgtaatgacaaatatcagattctctcgtcaatgaaataattgcatatgatttttttctacattgacagtgtgatgtctgaaacagccgaaaaatgcgtccatgcttcgatttgcaggaggaaccaccgcgagagatttccgaagtttctgaccccaatgtcatcagcccaggtactgagttcatggagaaggtatcagaagccctcgagtactacatccgtgccagatttaacagtgacccctggtggagagacatcatggtttgctcctgtgctttactaaatgcaatttatgttcttctctctctctctcttcttaaagggaagttcatgttcatttcagcttcaaccattagacatacatgctgaatctaactgcagggtctataaagtattgacaaacattgacttgctgaatctaccaggtggatgttgctgacaagtttaacatatctgttctgaaggtaatactctctgatgcgagtgttcctggagaaggagagcacaagatcatgtctttcatccgtgcgcaatgcagcatggaaggctatgatcccaacactcgacactgcttgtttgggcatgtagggaacatatatatatatatattaatcggttttcttgatgatctcatcatttctaataatgttgtgtatcactgatccagttttcatcatgcctagctatctgtactggggattaactgtgaagaatcattgcaggatgcggatctgataatgcttgctttggcatctcacgaagtctacttctctattctgcgtgaggtctgttaatccctcgtcaatgttaatgtcatgcttaaacatattgcatcacatgcttgataatggtatgcaccgctcctctgtctatactactaacttggccaggatttgtgtaaagttttacctgtcagagtaactccagcactttataatggtatgcaccgctcctctgtttaacttcaacaggatgtgctctaccaaaatcaggaagaaacggaagggaatccgaagaaatcatttctggtcctgctcacctcccaactccagataatgccactcatttcctcattttgatacactaacagtgccatcttaatttccagtttttgaacatgtgggttctgagagagtacttggagattgaattcaagatactggacccagtctgcgagactgatattgagaggctaatagatgacttcatctttatttgtttccttatgggaaacgatttcatcccacatattccgtcacttaagacgcaagaggtaacctttagactattgtaatagcgtagtagaaagttaactttgttatcactacatatgcctttttgctttgttcattactctgaaaataaaagcatagatgtttctctcatctattccatctaacagggtgcggttgatcttctcatcgaagtgtacaaaacaaccttcaacaaaatgggag

SEQ ID NO: 156163 - DNA, 849 bp, Zea Mays
gcacacaaaatttcacttgaaacagagttgtattgtggcctagagaaaatcacaaaggatctctgaaattcctgaaaacacttaaacaatttttttaattatcttctcgatttttttgaattttttgactgaaccaattgggtcacctcagaatggagtcaggaatctgctgtaaaaatatttgagctcaaacggagcaccgagcgaaaagttatgcccgttttatggaaggtacctcaagttttggttttctagagcacaaattggtacgaaccgtagcggcggctatagagcacaggggcacaaacctccctagtataagcaataggtaagcgccagatgatgaaacaaggaggggctgcaatgcaatgcggcttgcaatctaatctagggctagcgtggcgagaattcacacaaggcggctagcgagggcaaatcaagttgtggtgtctcgacttgtaatctgggtaaggtggatgggatagtggcggaaacaaataacagcgatggagcggttgaactacgatgacgacacgacctaaaccagcaacaagactcgacacggatacaaactcaacaaagcaatctgaaacgaatttgcaaggctaaacaagggttctaggacagcggaatatattttttttgtatggcaattatctggagttataggatgaaaaatctaaactaaactagggtaagcctgacggtaatacctgagtctttgaataccacttgataggaacggaggtgcccgatcttccgtcaggtgaagataactatcgatttggtggagatgtcacacaaacgatccggcttccaatcaacacgactagaaccccacaatcgcag

SEQ ID NO: 156164 - DNA, 432 bp, Zea Mays
gtcgcacgttatcggcgttcatcattaaaaccattaaaagatgacaacatgttatttatttacgcaacacaactatgacattacaggtacgcgcattttatttgtttggatacgacttttcattagttctcctattgatcgcgcacaagcctcatcgacaacacaaatccaatagaggacataagcgtcaatgtctaaggaactcctatatcgcgtcactagataaagaaacatataaaacaagacacacatgtcatctctagcttagccatggcaagtctacattacttaagagcaaaccaaacatttttagcgagaagggtgaactaaacaatcaaaagcgcatatgcagattttcgggacagcaacacagcagctacttgttttaatcataaattttcaaatattaacccaaaaataacaaactaggac

SEQ ID NO: 156165 - DNA, 627 bp, Zea Mays
agaatatccaagagtgtggctcagtgcttagccttggctatgacttactgtttgatgaaattcttgctgcgtggtgctgaattccatttggaacgaatttctctgaatgatcagcgacagggatgcaagtatattcattctggaaaatcccgtgttgagattggtgccaaactgaatggtatatgttttttagttcattgaatgttgtatggcaaggctgggttggaatttgaagactcgatactggtagaggtgttccccccttctgaagcgtcccagcaatttggaaatggggcttgcagtagagttggcaaatggctaaatgctgagcgaaagatttagtcttggcatgcatagggggatatgttgtcatattgagttgtttggttggaggattcggtaacgcaaacctgaaggaatagttagagctgtacgtcgacgttatacggcaacacaatttttttttctgtttgccttaccatgctataatatcctacgaaccaaatagcagtgggtttaatatgctgctctcttttgaggaattttggtccaggcctcagcttgcggcgttctgcttttatttagtctgcatgtttagttcttcgtacgaagctttttggttataga

SEQ ID NO: 156166 - DNA, 737 bp, Zea Mays
gtcgtgagctcccagctcacacacccacttggctatccttccgatagcttctttgttgtgaagaatgtcccctattggaaatcctgtaactactatgactttgtggtcatcaaagtagtgacgaagcttgcgagcggttagaagtaccgtgtatagcaatttctggacttagggatacttcatttttgagggcccgagaacttcgctgatgaagtagaccagatgctacaccgggtatgtatgtccttcctccacccgctcgactaccaaagtggtgctcaccacgtgagtcgtgcaggagatgtataacaacatatcttctgctggctgattcggcgtggctcggtgtggtggcttgagtactggtggcgtagtcaggaactttttcagtgcctctagagcttcctgtgcctctatggtccactgaaacttgtccacctttttgagcaatttgtagaatggcatgcctttctcccgtagctttgatatgaacctgctcggggctgccatgcatccagtaagcctctgtacctttttctgtgatcgctgtgcttccattctcatgatggcctccattttttctgggttggcttcaattccttggtggctgacaatgaatccaagtaacttccctaccggtactccgaaaacacacttttctggattgagcttccaccggtatcgcctcaagctgttgaagaccagctgcaaatcttcaatgaagttttctgttttga

SEQ ID NO: 156167 - DNA, 875 bp, Zea Mays
ctgggagactatgggagagagatctctggttggtcctaattgggttcagcagacatctgagaaggttcgggaaattcgtcaaaatattttggccgctcagagccgttagaagagttatgctgatgtgaggaggcgggacttggaatttgcagtgggtgatcaagtccttcttagggtatcacctactaaaggggttgttcggtttggtgtctccagaaagcttagctcgagatacattggaccgttcactatcttggcccgggtgggcagcttggcttatcgcttgcaattgtcggattccatggtagaggtacacccggtatttcatgtctctatgttgaggaagtttttgcgggatccggaccatcaaattgagatggaaccgattgctgtgcagcaggatttaactctggagtgtcgtccggtgcgtatcttggagtcctcagagcgtgtcatgagaaggagatcaattaagtatgttaaggtcttgtggactaatcagtctgagcgtgaggctacttgggaacttgaggagctgatgcggcagaagtatcccaaacttttcgttatgggtgagttttgatgattcattaatctttcttttatcgttccgatagaagcgttggaattcgaggtcgaattctttttaaagggggtagagtgtgatacccaattttcaaaaaagagaagttgaagtttattctttctttatttttctctttcgggtcccgtgctactggggtttggagttttaggaggcatacatcagtaacagtagaatttttgtttgacttgtacgcaggggtcgggagcaggcgtgggaatggttttgggccgttaatctcgatccggcggtgggaagcccacttcattcc

SEQ ID NO: 156168 - DNA, 394 bp, Zea Mays
caaggctacgacaacgaataagcctccgtaacaagcgcaacaggcgcaattgtggctcgatagtcggggtacaggataagtccacgcaacgtgcgcaacagacgcaattgtggctcgctgatcatggcggtcgaaccgtgcctgcagggcatgcaaaaaattcgcgactcggtgatggcggtccgactcaacgggagtggtccgactaagtgagagtacaacatagcaatcacatgacgcagccaagttcgtacgacacaaataatgtgtcgtgttgccagggcgcaaccaatgctcgccaatgccataactcaaccaattaacaacaaagtctgatcgacatgtttgagtacccactacagtttaatcgctcgatatgagtccaaaagctcaa

SEQ ID NO: 156169 - DNA, 605 bp, Zea Mays
gttttatggtagtttaaggttaaacgcgttttagaggcgtgatctagatacccctaattataatactcgatggccttttggaaagaacgattagatgactactggtactggattcaacgtgaactagtccatagcttgatagtaagtttgtttcaaggagcatctactgtaagcgtggtcaacacaacttgttcaaattattgttttctattgttatggtctaccgctcagcatagcttgcaccatttatgttttatatagtctacctataatatattttccattatggttgtcgcctcaagaggcatgcatttccaatgagataaccaagctaggtatgtgttgatggaggctaccggctaaggctacgttcgaataatctagtattcgctacaatacacatgggttgtgggaggttaaagtgtaaattagtttaatttacactccaatctaccttaactcatgtgtattgtggtgaatactataaaacacacaaacaagccctaatggagactagaatcaatattttcttcttcccaaaatagtatttattttagatcttgatttttatgtctatattttaatggatggtaatgaatctatac

SEQ ID NO: 156170 - DNA, 1014 bp, Zea Mays
gcatgccatctttaacaaccaaattaaggatgtgattggcacatctcacatgaaaaaacagcccatcacaaatcaaaggactatgtttttttagttctatgattagatctttaacaacaacttcatttgcagaagcattatccaaagtcaaagaaaacatctttttctcaacataccattttagaagacaagaactcacggtataagacaacttctcaccagtatggcgcccttcaacatggaagaaattaataattctcttttgaattttccaatcctcatcaacccaatgaagagtgatacacatgtaggccttgttttggttggatgtccacatatccatggttgcactaaaacgacattgaatggttttcaagtattcatataacttattctttttatccaaataatattccattatctcctttctaaccttgacacgagacttcattgggtaatttggacgcaaggattttacccaatcttgaaataattcatgttccaccatattgaaaggatactcatgaacaatcattgcttcatagaacttctccacactagcttcttgatcatacttgtatggttgaacaatggcaattcctgcctcatttttttgggttgtgagatgctgctgccctttctttatgctgtggtaattagcaagatgagtccaaaaacctgaagtaccaaattttccctcggccctgtgtttgcttgtcttggtattacaccctttgaccttgcactttgcccagatctgcttttccatcttaccattgacctccactgtcactgtatacttttcaaagtgatcccaaacttctgatgtggtcttctttggcctcttgataggacgctcgccatccttgccatcattttcagcatcaaaattggttggagcatcagtaccactgccaacagcactagcaccaacacttggcaaaagaattccatcagatgcaggtgtcaacgaagatgcagattgaccaacaatatgacttgcaccttcacttg

SEQ ID NO: 156171 - DNA, 1264 bp, Zea Mays
gtccgaaggaggcgccgcagggatctcagtcgtgggggaagaatcggaaccttagctggcgtttgaagactggatctggtaaatctgaggtcaaagatgatattcccgtctccactcccggtgatgccggtctgccaggtattctcaaaacccccccgccccccattctaaaatctgagaatgatttggtgcgtagggttttttgccagaaatgtggtttagatggtcatcatgctagggagtgctttaagtctttgtggtgcgaaatctgtcgcaaagaaacccacaatactgctcggtgtgttcttcccaaacagaataagccaagtatgccgattgttgggatggcggccgatgggttagggttttattcctctcatttcgccaaacccttatccaacaaacctaaacgcagttttatcggcttggttaaaattgttgagggtttgatcaccgccgatgatctggagaaggatttcggttttcacttcccttggggccgtgcttggaaagctactaagtgccattctggttttctcatgcaattcccctctcaagagagattggatgaaatgattaatttccgtgaattgaaaatgaaattgtctggagccaaaatctctgtctcttcctggagttctcaggctaagcctaaatctaaactgcattcggtgtggattgtggctgagaatgtgccagaagagctacaaaattatcaggccatttgtgaattgggatccactattggagtagtggaagaagtggatattaactctttaaactctaaagagattgtgaggtttaaagttcatgtgaagagtgttgctatgatccctcctatcattgaagttggtgtcaaaccctttttgtatgacatttacttcaaaattgacaacattactgatgaaggttggaatgatgattctgttaatctgggcaagagggcttcggttgatagacaagggtttggtgagatttctcttggcaaatatgctaaaaaggccaagagtggtgatgaggactctggcaaggatatcaagggaaaatctcccttaaagataccatcaagtcaagtcaatgttgctggttccctgtctgaacaatccgaaagcatgaaaatgggaaaaggttctgaagatcctaaaggctaccttgatagtcagggaaatgaggatgaagaattcaatgatagtgaggatgatttgttggattcgcaggagttggatgaattcatcaaggatgatgattttattccttcccccgc

SEQ ID NO: 156172 - DNA, 766 bp, Zea Mays
gcagccggaataataggcacgcaacaaagtcttttccaaaagtctccatgcaaaagtcacctacgggtgcagccagaataatacatacacaaaatcaaagtcttttccaaaaggctccgtacaaaagtcacctacgggagcggcctgatcaacgaaagtgcgcggcttcatcacacaaaattatggttacataaacacaacgagggcatcacatattacattggctcaaccttagggatgatacccatctccctgtagttgaacaacattatcctcagttcctcaccctcaaacagatttcgcagctccccctcacccacactcaccccaatcggtgaggacaacaattctcgcttaccagtcccatccacgcgaagacaacccctctccacctcgcttcgacaacgcctaccacttcgcgacaattcactcactctcagcttcgccacagccctccgccgcctatacccagtactcgcgcccgggagttcctcggaaccctccgcgcgcggcgaaggctccgctgcagccacatccagcgccgcaaaaataatccaagtcctcatccgaagactcctccgtccacgcaatcgaactcccagaatcatcagactcagaacatttagacacagagtcaaacgaatcgtcatcagcagccacggtcgaagccgccacaaaaatatcattgtcagtagcggttgcgtgcgcaggcccagacccaagaacctgcgcagcaaccgaggttcagtatcacacagacaaaatt

SEQ ID NO: 156173 - DNA, 412 bp, Zea Mays
ggaaaaggcactgtagttctgtagtttgcagactagagtacctgaaaacgttctcaagggggatgatgatgatgtcttagaagaacttggcgcaagcttagctggtgttatatacgagcacccagaaagttagtagctggttccatggtcttaggacgaactcgagatgcattttagagaactgttagcacttaacagcagaaggggagggagtgaaaagtaattttgcaacagattaactacaagagctaatgacattagggagtgcagttgttagaaaggatgtcttcaagtcaatgttgcaattaagagatgaataaacattacatgatttcaggccaatcgtagtgatacaatttcattgtgatagaatattgtggaactgggaacaaattcctgtgtccaattgtaa

SEQ ID NO: 156174 - DNA, 414 bp, Zea Mays
gtcggcatctccttgtgagtaatctattattgttgacttgtcctgttccgctgagccatttttccctgctgcttttacgcctgagccatctcttaggcgtagtctccgcctttgttagcctattgattagtattctccttcaacttttgtgactactgctcttcctgagtcggtctcatatcgtgatgccattcttcatcaagaatggcagcatgcgatggctgaggagatcgctgctctagatcccaccggcacatgtgaactcataccttgtccacctcgtattcatcctgtcacgtgtaagtggatttataaggtcaagactggctctgatggttctcttgagcgctataaggctcgattggttgctcatggtttccagcagaaacatggccacaattatgatgagacatt

SEQ ID NO: 156175 - DNA, 352 bp, Zea Mays
atccaacagatcatgcctatgcaaatttatgcaatgggggatagatggtggacaaatttgcataacaatatctcttctgtatgcgtttttccctcttgcgaatacatggcctgtcgttggagacaggctaaggtattgatagaacaaatcagaactgcctctagctagggtctcaggctatctgatggctcgtcccttctccggtcttttctcaaacagctgagctgagcctacatgcatgtgtatgctcatctagatgaaccaaacagcgagagctgagaagacttggaccaatgcaataccgacagcatatgtgacttaatctcgatgtgtttcacaaggacatgaagcg

SEQ ID NO: 156176 - DNA, 584 bp, Zea Mays
aatcaatctcccccctggtgtgtgctttcaaaggcagaatatattcgtgtcgttgataattctcggacacccggggaataaaatgggcatgtacatggagcctttgatcgatgaattggtacgtgcctaggaggaaggggtatggacgtatgaccgagctacaaagacaaacttcagaatgcatgtttggtaccagtactccatgcatgacttaccggtgtatgggctattctgcgcctgatgtgttcacggtaagttcccatgcccagtttgcaaggaagctctcaggttcatttggttgaaaaagggtggcaaatattcatccttcgataaacatcgacaatttctccctcctaaccatccattccgcctagacatcaagaactttacgaaaggtgtcatagtgacagaccgcccacctgcaacgatgactggtgctgaaattcgttaacagatagatgggctcgtggccaatatagaaggtggttttgtgggatatggtgagcagcatatgtggacacataagtctggcttgactcggctcccctattatgacgacctgctccttccacacaacattaacg

SEQ ID NO: 156177 - DNA, 580 bp, Zea Mays
atcagttcttgctttccaaatttacatagctgagaggttagaaaacaccttccctatgcatgatcagtcacataaccaaaaaaaatgttaaagatacactaaataagcactacggtttaccaatattcgctgcagtctaacatcatcgtacaaatgacaatgtcgaattcatgtttacactataattaaacagaaacctggattagaaccaaggtgataaggcagcaaatataataatataaatctaaatcctaaaggggaagggttaatcaacacatcacagaaccaaccgaataaatgacaaacaaacaatgcttccagtgaacatcattaaaaaaatcagatgcctcaagtagcgaaaacacaaccagcaaatccaaatacagcgagaggataacaccaatgatgcatggagtacacagataacaggtgcttggtggaggtcagagaagaattcctacctaacttctccgcatacacagataacaggtgcttggtggaggtccgagaagaattcctacttagcatctccgcatcctatttgagtagttaatcaagtaaggcaaatgcgaacacccat

SEQ ID NO: 156178 - DNA, 497 bp, Zea Mays
accaataatgacagttcattcatatgacagggtttatatgtttatggaccttttttgcatgaaatctttggaggtgcagagcatatttttcttcatcctttacatgtaaaaaaacctgaacaaagcgcgatgtcctttccgctcccgccccttccgctcccgtcccctgaccttccacctccggccgacgcctcagcccctccaacccacagcctcacgccggtcatcctcccaaggccggcggccacccaacctgctacctcggcgtcagcctcctctcctctcttcgcccagtctgtggctgctcttcctggtggccgttcaaaggcacaacgatggtgtgaacaggatcttccttcggctgcttcccggagtgatttatgtcgctcttataaggaggcgctggtggatggaaggtccactgcctgcggcgctgatgttggtgacggtggctgggtgaaggttgtgggacgtcggtctcgccgtcgaagtccctg

SEQ ID NO: 156179 - DNA, 581 bp, Zea Mays
ctggaaaagaatgttgaagagctttgtgactccagggaaaggtgttatgaaaaatccttggagtgcgcgaggaagttaaaagatatcttcgtgactccagggaaaggtgttatgaaaaatccttggagtgcgcgaagaagttaaaagatagctttacgaaggtgggggcgtattctttagaacagagatttattcgcggtgatcccgagggtgttatccaatggataggtgaagaagacgaagctttcgatgagatccttagcgatcgcgaagatttttgtgctttttccgttgcccgagggattgcggcaatcttacaaaaggctgggtgtgaacatgtcaaggccgcggcccagccagaatccattctctttgctgagaatattaaggacccctcagttgaagcttctaccctgggcgataaattctactccgatgtctggatgaagggcggacgagagatggccgacgaagccattaaaaataatgagaaataatctcatgacgcccgtgaggaagctaaacaagctgaagaagctaccgagagcgcgatcattataggtactttttgtttaaaacat

SEQ ID NO: 156180 - DNA, 535 bp, Zea Mays
gttttaattagaggtaggtattgaaacaagagtattaaagaatccagggatacgagcatgctaagaccaagtgcatagaacttgtcgaaagatagcgacttaacaacagaataagaaatgatctcagaagacaagaagatcatggacacataaactgaactgtttaaattaggcaatagaggtacaagggtaagtactttagattaagggataagggtattaaaaatgcaaggataagagcatgtcaataacaaaatggaataaagatggtcaaatggtagcaatttaataatggacgaggcaagagtcccaaaatactaatggctatggtcagggggcatctacaaaggtgtcgcaagcacaagagtgagataagttctaatagactaagagaagtatagaccatgctagaataaaatactttttgacaacggggcatataggagcacaacatagaattagtcgagatgactaaaattttgaagcagaatcaaggatgaggtgaagtaacagtcaaggagtccttaaaacggcc

SEQ ID NO: 156181 - DNA, 871 bp, Zea Mays
tcaaacactcatgtggaagctcttgaggatgatgtccttaatgctcatgaagatgagaggatgtttcctgagtttgttgaaaatggtcatgcacgtgggtatgacatgcttgcacaattcgaggataccgatgatgaagagagggaggagaaccttaccatgggtgtgcccgatgatgtagaagatgaggatagactaattgttgattgggatagagaaaatccaagtctagaagaaggcaatacttttccaaccatgagagattgcaggaatgcactcacaacctattgcatcaaaggggaatacgactttatcattgacaagagttcacccaagagatacactgtgcattgttggtttgagcgatgtaagtggaggatgcatgcctccactatgaggaatagcactattgttcaagttaaggtcaacccttttctgcacacatgcccaagtgcggaaagaaaagtgacgcagagggcagccaagagcaggtggtgctgtgatgcagtgttacagtgggtgatagaaaatccttctattggtccagccgcacttattaagaagattcatgagaagcataacattcaagtgccttacatgagggtcttctatgggaaacaaatggctcttgataaaatctatggtccatggaaggaaagttttcaactattgtactcatttaaatccgaagtggagaaggcttgtcctggaagtgttgtgcagattgacaagcacaaagtagtgtacaatatgaaaggtaaaactatggagaaggaatgctttcggagagtatttgtttcattcaaggcttgttggaagggttttttggttggttgtaggccatacttggcggtggatgcaactgttttga

SEQ ID NO: 156182 - DNA, 774 bp, Zea Mays
gcctctcggacgcaagctccgcgattgacagactagtgtcggtctaggcactctgtggggtcgcgcaaggggactgatagtttagtctaacaggtgccccaagacatgagcagccagaagcttatgtttgcgcaaggatgtgatcttgacaacttagcttagaggatacctcgtataaacgatccaaagtcgagcctctctctggccagggccaagggaggtctcctggccatggggcgctagataagagcttgttcattttgctcttaatccatatagtttgggtgaaattgagtttatttatttaaatcctaaataagccaaaaccttccatatttttttcaatctcatctaatccacatgaaataggaataaaaggcctagagtggttgttccgctatagatcccgaaggtttcatgtgccgagatccttgaatgtgtctttaagtcactcttaacagcagtcgagagcatgttctttatcggtagggtgcacgttaagaaagcacaagtaatcataactgacaaaatcatcgtagaaaaaagtgcatgagatgggacatgggtcttttcgggtcatcgcttgagaggtgggcttccacagaaaaaagtgcatgggatggtaacgcatcagctgccctgagcctgagagcaagataataatataaggttgagtgttccagatatcttggtgtgtcgcgtggtgtagtgggtgccggaccccactcgtcagcgtacatgtctgtctgtttctgcaggagcactcaaccattt

SEQ ID NO: 156183 - DNA, 538 bp, Zea Mays
tggttttctaagcccaggatcagcaactatatcgaatacctgctcagaaggtggaatttcttgctcttgttcatgtgaagttggatttactactgcctcaacaatagcctcctcggttgcaatttcttgggcttgattgttactggttccggtttccactattggttgagaattgaggtttgatcttggctgcacattaggcacgacgggtgtgagagctggagaaaaaataattgcaatgttctatgcctcttcttcattttgattgttactgtcttacactctgaggtgaacccgagatcacaatcacacacacggaactaaaaatttgactcgccggctgttcattgcagacaaacagcggaaagcacggttagcacaaggcacgagtagtccgggtctggagcgagcgaattaatcaagaaagcgaagtcgagcgaggagctacatacctacagtatgcaggctgcagggactaggctggggcgcggcggagaggcgcccaaatcccaatcgctaggcgtgcgcggcgggctgg

SEQ ID NO: 156184 - DNA, 312 bp, Zea Mays
tccataattattagattatgcatgcatcatgtttaaaactatactaataaatcttcccctcttatggagatatggcgcgcactaagactacccagcgcaaatcgactggacctcagggtgtgcctcgacatcagttggcctcccgccatgaaggaagtagtagtggaagtaatgacccgattggagacttggaagccagggtggagcaactccggtcagaactacgccaccgaaatagggcacgtgagctggatagccactgtattgcgaagctgtcagccgaagtgagtcgcctgcagtacgaaatttcag

SEQ ID NO: 156185 - DNA, 1099 bp, Zea Mays
gtgctcttttgtgttgcaattgtgacctgtaggtatagttccatcctgtatagttctggtaccaatatgactaactacagtgatgatctggttcgttattttgcactatgagatgtataggaataaggctcacctgcgtggatcaaactggctgatgtcaaatctggttcgttattttgcactatgagctgtataggaataaggctcacctgcgtggatcaaactggttgatgtcaaatctggttactgtgggtggtatggtctcttttctgttcagtgagtgggaagggtattcctgctgctgcctgctttattctgcattaaaaaaacacgaaaactatgtcaatcttctcagttacgtttctgtgaaacttccctcctgcaaccgtccaactaatttgaaaagatcaactctcttcctttgaaagtctgcaggtctctatcctttgacaacaagttctgctcgagtgtaacgattgagggttccttcgttccacgagggccgaggaagattgaagtagctggtattcggttgttgtttcttcccaagtactatccttttgtgataacctagcaaattgatgcagtttcgtgtaactcatgtagaaaggtcaaagcaacagtttttgtttttactgaattgatttattttgcctttgtatgaactctggacttgtaggtttcttcgccctatctgtacttgatgatgacacctgccgtttccgtctgcctcaacaaaacacgcggtacggcaacttttactcgcgagctctgagctaaattgatgcagaaaatatgatttagtctcaatctgtccctgtttttgttacgcgtgcgtgactctggtgcctgatccgttactgtcattagataatgcataaaaatctcatagaatccctgattggagcacgtcgtttttaagtggaggtgatgtctgacctgcgggtttaattgggtatggaggactagtggactttctaagaatggacaccaatcctccacgtcccgcgatagcgttttttatttatgcctcgataacctcgtatggtgtgtgtgcggcacatcatcacgtttccgctttccgttttttccacccacg

SEQ ID NO: 156186 - DNA, 767 bp, Zea Mays
cgcccatatagtgccccgctcggttgccttggtctccgtgacatagaacctgcgtagccataatcgaacatcgccgcaccattgttccaccgccgtcgcagtcgattctagcgtgcgtcgtcggcgtgaacccgtgaagccatataggcaagaggagggacgtccgggagggtatatccctcggaatcggggtgcgctgcgcgccggaagtccgggaatctctcaccggagcgggagcacagccgttcgtccgcaccacagcgcctatcgatcagtgtgagttgtccgcgcctgtaagaattgctcccttctattcatcatcaatttagttacgcttagaacctcgggttcgggaatttggtgcgatattgcctgggattgcgttcctccggcgatggtccgccgcgtgtggggggcggcgccgccgcgtttggctgagggatagtgagtagcgccacgggccgtcagatgatctcttgacggtcttgatcaaaccagagccataccggttgggtggaatactcgcagcccctggatcgtgatcctgcggctcgggatggaatcgctcgtgattaagtgcccatcgcagaccagattgcgtaccggttcgatgtcgtcccaatgtgatctgggccctccacatctaatcgggcggccgaaatcaaaacatacccctttggcttagacattttgctaaagagaccccgactaaaacggaaattaacccgccgtcctgcgcagggagtcctgagtctgagtacttctac

SEQ ID NO: 156187 - DNA, 581 bp, Zea Mays
aacagcactgtgcactttgggccgaccaacttcacttctcggcccagtctacattccctctgcgaggcccaaccactgcccacgcgatcacgctcttgcataatgacgatcgagccccagtggccagtcggtcttccccgcgctcgttccttttccgctctctggcgcgtggacctggcgagtcagtcctcgccctcgtcaacggaggtgccgagcatggcggggcgtgcgaagctgtggacttcggcgtattccgttgtggcgctctggccacgaccgcgcccatataggaagccatgacccacgggctcgcctattcctcctctctttcttgccctcgcgaccatcaccatctgcaccgcaattcgcagtcgccgtcgttacgaagatcgccgccgtgatcaaatcgagtggtcgccggcgtcgggcccccggtgatgggatcgggagcaactcctagggttttggaagggtaccgtgacgtccataggcggaggcggccactgggagtgacgagattgcttgtcggacgtcgcgtgattccagagaaccgccctcgccgcggattagtctacctcgcc

SEQ ID NO: 156188 - DNA, 1142 bp, Zea Mays
aagcacacaacatatcttccaaggtttggatcgttcgctccgactgaccatcagtctgaggatgaaaagcgacactaagagaaagcttggtgcccaatgcactgtaaagactctcccagaatttggatacaaatttggagtctcgatcagaaataatggacttaggtacctcgtgaagcctgattacttccttcatatacaaggggaccaattctgaagctgaattggtggtcttcatgggaataaagtgcaaagacttagtcaagcgatccactaccacccaaatagcatccctgccccgaggagaacgaggtaagcccaccacaaaatccatggtgatatgctcccacttccactctggaatctccaatggcttcagcaaacctgcaggctcttatgctcggccttcacgcgctgacatacttcacaggcggccacgtacttagaaacgtcaaccttcatccgcttgcaccagaagttttgctttagatctcggtacattttggtttcgccagggtaaacggtgtaaggcgttttatgagcttctctcaatatatccatcttcacctctgatttctaaggcacacaaaggcgacccctgaaacgaaccaaatcattctcatcaatggagaactcacggggtttaccatcgccaaccctctttcgagcttcctgcaataaacgatcctgctgctgagccgcacgcactctctccatgagggaagattgaataagcatatgagtctcgtcactagtggtgccgacatagcacaaagcgatccccaaatggtccagatcagcaatcaactgcaaggccacttttggaaccccggacctactaagggcatcagccaccacatttgccttcctcgggtgataatgaacagacaaatcataatctttaattaattcgagccaccgacgctgcctcaaattcagctctttctgagtgataatatacttgagacatttatgatcggtgtaaatgtcacaagcctcaccataaagataatgcctccacgactttagagcaaaaaccactgcggccaattcgagatcatgagttggataattcccctcatgcttcctcaactgccttgagccataagcaatcactctgccttcctgcatcaacacacagc

SEQ ID NO: 156189 - DNA, 320 bp, Zea Mays
ctggtatggtttgcagttgttgtgcaggcatatgctgttgctttgacaagtattggcaagcttcacacctctgaactagctcggctgcatcattctttgctgttggccaatagaatcctgacctgaagaccttcccgactagtgttctggatgctgcatgtattccacattgccctgcatggacttcctccagaagttgtttcccggtggacggaagaacgcacttcatgagaactcatgatgctccccttctgtataatatctccccaatgagtgtgtagtgacccgactgcctggcaatacgctctgccaagttcttg

SEQ ID NO: 156190 - DNA, 420 bp, Zea Mays
cttctccgtggtgactccattgcactttgcacatctttattaccttatttcttgtaacttgagtcagtgtatcaagaatcttgatggggtactcagcataagtcagatctccttgaacactaaggtcttccattggtaactgttcttcaggcactctgagacatttcttcagctgagatacatgaaagacatcatgtacatccacaagatgatccggtaactccaattggtatgcaacctctcccactcgctttaagattaagaagggtccaataaagcgaggggacaactttcctttgactttgaatcttctcataccccggagtggtgacaccttcaaatagacataatcaccctctttaaactctagctgtcttcttcgggtatcagcataactcttctgccttgactgtgcagttc

SEQ ID NO: 156191 - DNA, 698 bp, Zea Mays
gtgtagtctaagtagtaatgtaatgtaatgatcgaggggtgggaggccgactcataatgagtcgatctcaattttgtaatgatctcccccttggtgaatgaagacctgctttcgtgccaatctgctactacgtactccgcttttgtgtctgacggttcactagcattttagaggtaatgcccgagtgatgatgttttgctgcaaccaaaacttctcccaagctaatggcctgcccctttgcgcccgacttagtatgccaacccatactcccgctgacaccctcttgagctttgaaccctagttcttattctttttttctttgtcgctctctagctttctgagttcccgaatccgtttgtgtcatttgagaaattgcaatggcgcccaggaaaagaaaacagagtgctactatcccagacatccctccgatcgatcccaactgccaactccctttcgctggtaaccatgtttctgtcgtttatgaggctgaccttctgcatcttgttgagattggtgttctaccactgaaggaactatgttcctggtggatctggcgtggagttattgtcccgatggaggatactcatgaggcggttatcttcgtgccttttctcatctggggattggccctactagtttctcccttctttcacggtcttctcgatttttactctccaaacctcactcatctgaatccc

SEQ ID NO: 156192 - DNA, 433 bp, Zea Mays
atgaggtctgacccaaccaatagagtcttgatggattgcataatctattaacccccacctgaccaaccagattttgacctacatcatgtagtctatctcacccataaactattctaaccacattgccccaactccgataatatacactaacctcgaatcaatgagctcaagaccagagaagaaaagatcaacctcgtcgaaaaaggagagaagtcaaactcaaccttcggatgcattaccacctagcaccgagttcttcctcaccataaactttcttaccctggctattcttacccaaacctatccatctcttatatcctacataataagtggctggatacctatgctctacaaatcacccactattgactataaaaaaatatgtgaccctggatttttgaaccaattatagactaaaagccgaattacaaac

SEQ ID NO: 156193 - DNA, 1020 bp, Zea Mays
cttccccgagcttcagtacgcccacgcgcgctacaccgcggcggcggccgtcgtcggaccatcacccacgcgcgatacggtggccaaaacccaatcggcgacaggtacgcgtagtacggaatgcggcgaacccgattcggagctacatacccgaggaagagcgacgatgatcagtgcccacggagcagggcggctacgcggcggaaggtgaaggccgatgaggaattcacgtctgcgtggggcctcgcgcccccggatttctccccgagcacaacccacgagtccgcctgagtgcccagaatcgattcactagtgcaaagcgacggcgcagatgagaggtccgcacggcggatcccgtggctggagatggatcacggtgctggcgctaggtatgtccaataaaagggggagagggtcgcagcagaggaagtaggatcgaccgaggaccacgacccttcctataggcatgaggcggtcggagtttgaacaacggaattcccgagtccgcgggtgacctccgccattggtggcgaggtagtcggagcggacgaccaacggcctggtcccactagcagcggtcaatagagtttgcgcggatggtgtaacgggtcccagcaggccgcccaggttgtcgcaggtccagaaattttgccgccacaatcaccgagtatggcggcatccgattcggtcttcggttgaaggagaggaggaaagggatgactactgggcccgccaggcagtgagcgcaaggcgacggaggcggaatgtagcgggtctgaccctggggccccaccggccggtgacaaccgaggcagtgcacgtgacagggaggctgcgaggctgacggagcgggcccggatgtcagcgcgcgcggtgagggggtttgggccgcgcagcacgcttctgctggtgggccaaatagatggtgagaggcccatttagctgagtttgtttttattctttttattttctattccttttcctttctctctattttcaaacccaaatttgaattcaaac

SEQ ID NO: 156194 - DNA, 460 bp, Zea Mays
gtggaatgatggatatttgtgctgatgtgcctgatgccgggctggaattatctcgagcagcatctcgtgcctcgtcgaccttatagcgcagtcttaagggtcaggaggctggtctggattgttctgctcccatggaagtggatgaaggtccttcagccttagaggtggctgttatagagagctcaaccctcaaggatggcgctagcgcttacccagcccccgagggtgtcgccggggatgatccggctcggatgggtagcgcgagctatgacccagcccccgagggtgtccgagttggttctccctctcacacttccatggatgttcacgtagggtcttctcctccgcattctggttgcatggcagcagctcaagcttcgggtcaggaagtcgccttagagaccggcgcttctgatgatagagttttgatttctgctatttacactgacctggtcaccac

SEQ ID NO: 156195 - DNA, 610 bp, Zea Mays
ccgagatcaacggcccacgtcaaccatcgccagatccgatcggagccacaattccaagatccaacggttcactgttgtttcccctccatcatcagactctaggccaagacggcggtggccgacccgccataggggcgccatggatgagatccctgaccacacccaggggagctaactccgaccaaaacactgttatgaggagcggggaacacgacgaaaccttggaagggactcatacctcgctggtggatggtggtggctagagcttttcccctagcggtctcgtctctctctctctccgtctttgaccgcacgcaaaggtggcacaagtgatatgatggttgaggaggggggcagtcgggccctgtatttatgcttgtggatggccgaggggtggctccgggttctatacgcgggtttgttaggcttaccaacaagttcctagatccatggagagttgttgcataacctgcacgcgggatcttcattcgtacacgaggatggtgacgatcctgaccattgggccccacctagcagcggttcccgtgcggacatgtgaggggaaagaagctggggaatgggccccacacgtcattcacataaggaaaag

SEQ ID NO: 156196 - DNA, 432 bp, Zea Mays
cttgatcgtaacctcattcaaggctctgtaatctatgcacatcctcttggtcccatccttcttctctacgaacaacactggagcggcccaaggcgaggtacttggcctgatgtaacccttctccaacagttcatctatctgcttcttgagttccaccagttctggtccagatactctgtaggctcttttagagatgggggttgtaccagggataagctctatatcaaactcgaccttcctctcaggtggcatgcccggtagctcctcggggaacacgtctggaaactcttatactactctaatggtctcaagcgggttggcctcctcgttatcaacagtcatctggtggcaatctcttatttctgactcaggcattcttagctcagccactacctcctctctagatggggatatcaacctcacggtcctctt

SEQ ID NO: 156197 - DNA, 667 bp, Zea Mays
ggaacaaatacgtttaaggtctttgttgtgtttttgaatgataatgtctcttttaaatgtaccaaaagataagtctccgcaaactattcagtaaatgcatgtaaaaaggaatatactccgtagaagaccaaaataagaaaggtgcgcaagaactgttccctttttctagggaaatattgcaatcataaaacagaaacacagctttgctaacacgtgagcagcaaaaggcaactgcaggtccacaatacctgcccttagatttagggtttgtaatatcctaagaaaatgagaaaagtgtgtgggtttgcggctgtagatgtagagcgcattgcaacatgagtttggagagcaatgaggaaaataaatgtgtaatttgcagtaagccacgaacggcggaaagcgaacaaaaacattaaaagcatttctttacctaaaaaggtgacaatggccgaatgtagacgctgacgacagaggaagccgcgagctcgcagtccctcgaaactggccggaggtggacgtcgacgaccgaggaagccatgggcttgctgtcgccctcgaaacggatgcgggagccatagtaagggacggccagtgggtagagaagggaagcatacgaatctttttttacctggaaaagcggtaatcgtcggagagtgcagcggaagcc

SEQ ID NO: 156198 - DNA, 489 bp, Zea Mays
gttccctgcctaccgttttgttgtgcacatgagccttgtttgacatcctaagtgtttgggcccgcctgaccatctgtcagtaggttaaacatggtggtgatgaggatatgacgcctttaaatatgattactagtgaaattaggaaaaggcaaggatgaacttggcacttactattttcaaacaaggccagacccatctatttcttatatcaaacccttgctggcgagaagtgggaagattggagccacgaatgggtgattgcaatgaacgagtctagcgaacgccttgtcttaccgattgaggggccatctgctgaccgcaagctttagaggggaccgcttcctccaacaatacttgacctggtgttggacagaatcaagacactgacatccaagggtctcacatcaatgcacgtgcttggtgattttctgaagtgccggatcatgccattatagcagaggtcacaattgtcttgttggttcaccggtc

SEQ ID NO: 156199 - DNA, 499 bp, Zea Mays
tgattctgaagctgaatttgtggtcttcatgggaataaagtgcgtagacttagttaggcgatccacaacaacccatatagcatccctgactcgaggggaacggggtaagccaaccacgaaatccatggtgatatgctcccacttccattctggaatttccaacggcttcaataaacatgcaggcctcttatgtttagccttcacgcggtggcacaccccacaggctgccacatacttagaaacaccaaccttcatcctcttccaccagaagttttgcttcaaatctctgtacatcttggtttcgccagggtgaacggtgtaaggcgctttatgagcttctctcaatatatccatcttcacctctgatttctgtggcacacaaagacgacctcttaaatgaaccaaatcattctcatcaatggtgaactctcaaggtttaccatcgccgaccctctttcgagcctcctgcaacaaacgatcctgctgctgtgccacacgc

SEQ ID NO: 156200 - DNA, 576 bp, Zea Mays
gtggtgctcaatttggccgagcagtgctggcggccggaggggagaaagagtactggcgcaacgaaacaggtggctttcaccgtggcggctcctccggcgatcaccggacgtgcatagcacggttagccgcgacgtggtaaagcgtttggacacgcggcggatggcagggatgactcaacggcggtgagatcttatctgatcgacgatgagcaaaggggaaaagtgtgtcggctagccggattggtgtccagctccacggcggcaatgatttttctaccccacgacgttatccatttaccctgggcacgaatcgagacgccggcggcacgaattgcggtgaagagatcatcggcggcgaggttctgaaccttatcctcccggggcactgtaccatggcgaggatcattcagtgcacctgatagccaaagtttagggcgaattttctctcaattttatgtagtaacatgatcatcaccctgtagcaaagttatagctctaagatccagctacaatattgttatagcaatcctaagcaaattcttgctcgatcatgtttgaattcatgcccaaagtcac

SEQ ID NO: 156201 - DNA, 1517 bp, Zea Mays
atgtcttctatatatcatgttgtcagtgcttatttgttgcacctatattaattcttatgacaaacgagttcttaataaaatactcacacttaacacatatcttttcaatagaagttatggacttggtttgtatgaacatgccatatcctttttgctcttattgtcacaagtccatgcaaatgatgtttgcaaacctcaattccactattatacaaaatacttgaggttgtgttttcatcaattgccaaaaaggggagattgaaagcatctaggtcctagttgggttttaatgattaatgaatacgctagactattatggttaatatatgttttgcaaaaacattataaattaggtcatggtactagttatttcttgggcatatgtgctactcatgtccctattgatggaattcaattctagtttataaagatgagcataaagattaatggatgactagttctaattgtccttggagttgagtgagggacacttaaattccttacttttcccttttaccatactataaaggggcatgattgggtagcttgatctagttgagtcttctaaaatccagtgctagcttgctctatggaagccaaaatattattgagatcaaagccaacttgaagattgtttgaactagatagagttggatatgttgtctatgcacaagacatgcataacaccttatctcgattggtttcattcaatgcgacactgttgagtctggtgtgcaccatacgagagttactatgctaactctaagtagttggggaggctttggagtcattgaatgtatctggtgatgcactagatctcccatcgtacatgcatcattgcaagttaaagactttgactagggagtcagtgcactcatcgaacgtacctagtagtgcactgggctcatcactaaatcgatctatttgtagatggagaacccaagagactagcatggttcactggatgagtatggtattcactggatgtgtcatatattaatgactagtttggaaactagccattatagactcatcagatgtgtttggtgtgggaagaagtggtgcactgaacacactcgataccctcgattctcttgagtcgatgggtaatcgctagtcctttacctgagggctataaataccaatccatgtcatccatttgtttagtacaagaaaccctttgaagagaaagagagagcctttgtctagtgacgtgtttgagctttgataatcgcgagactagggacctcattagtgcatagagagtgacaagtgtgcatttatgattctcattaggtttgttcaggtcaagtgagattttgttcttattactcttcgagatcgacatcacctacacagtttggtggcgatcgagagtttggtgatcactcgatggagagtgtgggtggcccaactcatggtgtaaatggtagttggttattgactatgctagagtgtttaataatcgacatgtagagagcacttgatatttgagcgtattaatgctttgtttgggg

SEQ ID NO: 156202 - DNA, 404 bp, Zea Mays
gtgaaatctaagggggtgaggtccatcttctcgtgttgatagaggattgggaagtcttcctctcacactattgctctctcagaaatcttgaatgaatcagtagagaagtcccttcttggatgaagattatatacgcttctaaaagcttccaagttacggtgggcgtcggtcatttcctctcctactctccgctctccccgtatagccaggctgcttacctgttcgtcctcccatctccttcccattagcagcaaggccactgctaccagtctgcactctgcatgcttgctgtaccgccatcaccaagctgtccaaacaaaggcaaagggagcgatcctggagccgtggaaagcgaggctgctgccgtccagggctccaggctaaactctgccctggctacactc

SEQ ID NO: 156203 - DNA, 288 bp, Zea Mays
tggatcgtccggtgtccaatacatagaatggcatcatgttgacaaaatccaaccttactctacaccaaagcaacactatgctcccccgcctcaagcccatcaaagcaaaaagcattccaacacctaggacagagtaccacccgacgcacagggaagtagaagggttcccaccaccatccaccatagactacccacatatagatagctgatataacaatgcccaaccattcgagtttcacgtttcagggtctggtcctataccacctgctactatggagaaaattcggg

SEQ ID NO: 156204 - DNA, 443 bp, Zea Mays
ccatcatcgggccttaactctgaacaagctcggtagacatgtggaagataggagggagcatgcatataggctttccatgaccactttagaggtggtgttacttttattgctcagagatgctttggatgttgttggtgggctactgctggtgctagtgctcgttctacaatggtgtaggaaagagtaatagtagtgacagagggagtgaggaagcagatgacacaggggagacaaatgggtcctatattctaggcccaaagttgacaactacgaatcaagttactatcaaaccatcataattgtgaccttgtgtggcccaattagcatgtttcgagaccccgatctgcaaattcaaaagcccaggatggcaccattgtccaagtgtagtgtcatgatacgattgtatcatgaatgttgcctactatcgtccgactttgaggttg

SEQ ID NO: 156205 - DNA, 339 bp, Zea Mays
gggtaatccatttatttccactttcctctttatctgagaagttgtcagtgaagatgatcaattgttcagtgctgtgaagatttccgtatatcttttcttatgctgaaaactgcagagtcagatctgatatgtgtgcaatttctacagatgtctgagaacaggcgtagaagtgcgaggcgtgctcagccagagcagtaggcaccccaagaggaggcagctccgcagcagcatttgccaccgccacccccgatgaccattgagcggatgttcttgatgcaaacccaggcagttcaggcaattgattagacattagcagcgatgcagcaggttcagcagtag

SEQ ID NO: 156206 - DNA, 617 bp, Zea Mays
gtttcatcaggtctggatctcgctcagactgaaggactggattctggagccgtgtcctcgcgtcgcggtaggggatgggatctccgtacaactgtaaccccagacccaacgaatcaaaaaacatctaactgtaacacgggaccaggcttcgcttgctgttgttggcccaacaccgccacttcgccgggaaacccatggtatcagacgacccaaagcgcagagatcatcccgaaggcactgaatgaatctctccggggcggggcggggcgaacccatccgatacgctgccccctgaacatcaacactccctcctcagcgaaggtcgttgtccatccaccgatgcccaccggaaccatgcgcaacccacccgccccagactgaaatactgaatgagcgcaacgacgtaccgaaaaggacggcgggcggcgctgaaaggaaggtgggagagcggcgctgaaaggaaggtgggagaaatcacggattcacgggcgagtgcggacgcggtgagcctcgccgttacctactaggcggatcgagcgggcgggggcgctaggccagaggcggagagtggcaggggaaggggaggggtggagggggcgcgagagccacgggatgcg

SEQ ID NO: 156207 - DNA, 934 bp, Zea Mays
gaataattaatctaagtacaaattcacctcaagtttgaaattcaaatggggattcgaaattaagaaaattaagagagaaaggaaaagagaaagtaaaaatataaaagggaaatgaataaaacacctaactgggcctcagcaccccatttcggcccactcccgaaccccaaccgcacggcccattcaccacttcacacgcgcttgatccagcctctgttcgcccggccccacttgccagcctgtaccgcgtgcgccagtgtcgctgtgtccctgggccgtgctgtcaggagcttcttctccttcgtaacagagtgtgtgatactcgccgcgaagaccgcgccgtccgcgtaacagactccacgcacggagttttctggccccataaagcgtgggcgataaaagttgtgtaccggacccctcctccatcgctcctatttccctcgtcctgagttgcccaccagcaccgccaccatcgctaagagaaatcggacccgctgctgtccaactcgtggttagggagcgctcggacatccgtggggcgttccagagctgcgtcggtgttcctggtaacctcggcggtcattaatttcgctgggggcgttgcggcgccagtgcaattgcacgtcggagttccgcgccgccgcaaatccacgtcagttcttgagcgcgcatcaccttcacttcggcaccggtaatgattcccccactaatttcgcgcttgccccgatttgcggtagggtctttctgtgacgattttggggctctgggggacccgtccggagttcgccgggggcgctccctcgcggttgttgtcgcgccgtcgctgctcggccggctaggggtagaagaaaagccagtgtcgtccgatcccactgaacggctcagattagatatcaaataccctttcactcgaattagatcgggaccgttagat

SEQ ID NO: 156208 - DNA, 358 bp, Zea Mays
atctgccctctctggtgattccccgtctgctcactggcggtgatcgtcggcgacgtgctcctgtgactttctccagcgtgggcacctctgcctcctctcggtgagcagccttgccttccctctctctaatctctacttcgctggtcagtgagcttgccaccccttgattgctcaaattccaaattccttccgaattctgtgaatctctgtgcttgaatgagtccctagtgccacattatatccccctgcaggttcctagctccttagggagggcttcatattctcacatgagcttttctccaaaaccctaattccctgcacgccacgtgctcggtgaaatgtccaaaccactcaaaat

SEQ ID NO: 156209 - DNA, 646 bp, Zea Mays
ccccccccccctctaggtgctctcactagcccaacccaacgatttaccaggcacggcaaaggctcggtggcccactccccagtcctcaggcggccaggcctgcaaaacccccaccggtgactggcccactccccagtccctctgtcgcgatcctcagcctcactcgatccctgtcccactatcgtggactctgtcggcgattcggtgactccgttggcgaccaaaccctagccaccaccctccggtttcaagtcccgccgtcggccaccgcatcgcgctcgtcgcctcgtctatgtggatcaatcaccggcggctcacaggatctccctcttctctccctcctgtcatccacggaccacgtcgggtacggtatggactagctctccttcctcccttcctccttaccgtacatcatcgttagctggtggtctgctctgtgcctccgtcgttgctgtgctcccgacgtgtcttgtggttgtggatctcctcccaggcagctaagtagctaaccctaaccgtaatccctaagtccctaacctaaatcgcactcagcttctcttaatcctctgtcgttttggtcaagtcaccatctctgctggccagatctccatcttcctctcttctccggtgctccggctgcgcaggt

SEQ ID NO: 156210 - DNA, 725 bp, Zea Mays
atcacacaaagatgccaatttgaatatcaaatgaaaaaccacttaacaccaattgaaggctaaacgaaaggatgactgactataacaatgcatgcctcagtggcacctaagccaattgaagactcacaggaagtataacatttacgcaacttggacatgcttcttacttaactatcattgcatataccaattgaagatcaacacaatcatgcatataaagcgtaatgtctaagcatgccacaattaagaaggtttcttagatgcaccaaaagaaacaacattttaagggcataaatcacctaaaccaagatactaccgattgaaagacaagaacatagctatgatcacaatgaatggaatttcaagaatatttaatgaaaatgcatagcttcattttccatacctttgcctttatgagagcactagttatcaccaattcaggactccttacgcatctcatagctcaaaagggcacgacatggatttgaaattcacacaataccaaaccagggtaatcatgtgaacatggactaaacaaaatgtcatatttgcacatagcatgacttacacacagttacatgtttgtccatatacaccaagagggttaatcgctgtggatataacaaatgaaagagctacccatgaatgattcaaaagatatatcctaaatagcaccagtcatgattaaacaaacatcattatgattcatttagcacaggcaatca

SEQ ID NO: 156211 - DNA, 348 bp, Zea Mays
agagcgtggtggtccaacaccgacggcgtgatgcgaccgcagggaggacacgagcacagggaataagtgagggaggaataactgtgatggagatttatacggctgggaggtgcggtcatggtgaagcgtgcgtagtcgccatgcagtagccaccggcgaatttttagccgagcgtgccgtagaggtggttgagagagggaagggatagagctgacaaataggtcccaccccgcagtgacaccgagtcaagcacccgcgcggcaataccaatcggccgccgacactgggaccgcccgccgcacccgccttgcatccccgatgagagccagacaggtgggccctgctcac

SEQ ID NO: 156212 - DNA, 899 bp, Zea Mays
atattgcagaaatgccctcaggtttctatttcttcaccgtgttcggtcctcgacgaagctccacacaggaagccgaaatccggcgagctataccggccggagagggcgaagaccgacgctaatctttggttcacacctgattctacccctaaggagtatttcccctcactcaatttctaaattggagctctatcataatctgcccacggggacagcggaaaaacttaaaggaaccgcatgttccaagcgattcacggtggtataatccaattggataggttggggagcatcacggttacctgggaatacttaaacggggaagtagaagacgtgagctaactcgaatcgcgctggtcacggaaggattcttgcggcggggctaagaacagggaggaaaggactcgtgggttcgtcagtggaattgagccaattgaatgattgcttgagcgcgtgatgcaacgacgaagcaacgctagggcccaatttatagtcggctggccgaggatggatgagatccccgagctgtgactgcgctggcgagcacacccgcgcggcggattccggtgacagcgcggtgatcgccgtttaaccggagcctgccacctcagtgacactttgacacgtcgccggtaacttttgccgtggctgccgacgtcttacccgagccacggcgacatccttatcgccggcgagccaatccttatccacggcgcgattttactgaaaaccgatgaacagtgcaccggattcagtggaaagcttaactgacagaccaagttggagccctattttctcctactttccgatgacaacacaagtccaactctgcagcaaacttgtagagcactataccaactacaactttgctatatggtgttgtcacaaaaagtcattgaatc

SEQ ID NO: 156213 - DNA, 737 bp, Zea Mays
acttgccccggtcttcttcaccgcctacgtcgccgtcaacgtgaagcagcacgtgtcgatcgacctcagcctcgagcgccccaacttctccaaatggaaagccttctttaacgccctctgcggcaagtacggactgctaggccacatcaacggcacggtggccgcgcgcccggctgatcccatgtggtctcagcctgacgcgtgcgttcgcgggtggatgtacaactccgccgacgacgctgtcctcgacctcgccatggagcccgatcaagacgcccacgcactgtacgtctccatcgaggccctgttccaggcgaacaaggagtctcgcgccgtcgtcctcgagcaggagttccacaacctgtcccaagccgacctctccatcgacgcctacgctcagcagatgaagcgcaccgctgatgcgctccgggaagtcggccacactgtctcccccgcgcagctcgttctcaatctcctgcgcggtctcaatcctcgcttcgccaacacggccgacatcatcgccaacacgtcaccgctgctcgacttcaagtctgccaccaacatgatccgtgtcaaggaacttcgcctcggcaccgagaacaaggaagcttcggcatcggctctcgctgtttccaccgccccgtcctgcacgtcgccagcctgccactccaccacctcctccttcagcaatgggtgcagtggcaagggcaaggggcgcggtggcaacagtggcggca

SEQ ID NO: 156214 - DNA, 941 bp, Zea Mays
cttggttttcactgaagggttgtcttcatgcacccttcatcatgaagatgatcaaagtagtcacccaggttcgctatgagaagctagtcaagcattcctgctatattccttactgggttaattctagcaatccaacagcaaggtctaagtgggctccaactgggtcaggaggtcctgcatcttctgatgagccaccacctcagcctcctcttcttgagacctcctctcgtgttgctgccgcctctcattcgatggactgcggcggtcgaggaacaggtcagggcaggggtcggggatgaggtttgtttgtgcgtctggccaagggaatcgccatggtttttgtcaggtgccgcaactgtgctgttgatgaggctatgcaccgacgtgagacccgggcgcttcatgatgatatgcgaagctttgtagcctccatgggacatcccatgccacaacaacctcctcttgttccaattcctgcatatctagaaatctcaatgaatggcacgagcgagaataaggtgtgtcgtttattactccgaaagctgaggcaaaggactacgatgactcatcttactttcagtctactcctgctgccgcaataggacccattctaggtgatcccaaaccctctggctctgctcatcctccaccttatcagggtccttcttcatcggcctatcctccttctgatgaccctcctcaagacttgtcatatgaagaagagatggcccataccttctttgcggattatcctccctaaactccttcaccaggtccctatggtggtagtgaccctagtggctggtgaatctacgcgtctcgatgaagacaaagattgaagcccgtagttgattgaccgtcgtgtggctttctgtatttcttttatgtaatataaatttatgtactaaactcccaaactcctggtttgtaatgagtacttt

SEQ ID NO: 156215 - DNA, 497 bp, Zea Mays
cagaggcgaagccctgccatccggcgtgttctaccacgtcattggcactccagctgtacgcaacccaaagggtctgcaaataaccaccaacgccgagggccatcgcattgtcaacctcatcatggccgaagactggtgggccccaataaccctgttcttggaaggatattaccatccaggtgatgtcaacgaggccaagcgcctcaaacaccgatgccgggatttcacacttattgagggccagctatacaagaaagggatcagtcaacccttgctcaaatgtgtcacagagaccgaaggcctccagatcctgcgcgaagtccacagcggcacttgcggctctcactcggggcctagggccctcgatgccaaggtgatccgtaaaggtttctactggcccgctataatctgcaccacaaatcgagtcacgaggtcgtgtgaagcctgccagaagttctctccccgttcgggcaacccctcgcaattcacacagctga

SEQ ID NO: 156216 - DNA, 525 bp, Zea Mays
gcttctgtctgaaaagctgaagtcgctgcttgtttagcgctttcggtgtcatgcgtatcgtcggcggtaactgcacctgatggcttagctccatcaaaatcctctatatcatgactcatagtgtcggtctgatcttgatccgagaagcattggctcactacgtactttaggatgaggcagaccttgtctacgaactttccaaggttgcatttcccttctagtagctcatgacggacctgaaccagtcgctcgaagcggcgaaacagcttagacttgtcgtgcgacagcacacttgatcttgtgacatcgtcttctcctgcatatgccgcttggatcatggaagtggtctcctcaaccatgtatctcaccgccttctctatttcagactggccactcagtacatctgaaccatctctcgtggcatgagtagctatctgctccaatgcctggcttatctgttcaataatagcttcaaagctttccccgctcgcttcatgcttccatgtaccgccgccgacgcctcga

SEQ ID NO: 156217 - DNA, 439 bp, Zea Mays
ctaaatttggtgagggaacctcctctactatcgaagcagaacaaaccgctctcgccgctcggagcgctgaagggtctattgtagtgccgaaggtgcctacagtcgggccaaccgaagccaaagatgattcggccgaagagccaaaagtggaaaaaacagtgaaatgccagaaattctgagcccaccagcagaggcataattatcgaaagtgcaaaaagctcctgccgcaactcccaagagaaggaggatagccagcgtgctagacgatgtcatggagaccgcaaaggccttgagccctgctcctacttagaaaattgccgaagccgtcaaagtctaggccgaagatgaagctgggccttcagtgcccattaaaacgaaggctgacgcgtctgaagataaagctgagcaacaaacttcagatactggcatgatagtgggg

SEQ ID NO: 156218 - DNA, 730 bp, Zea Mays
tttgacctctcgtgtatttgtgaatgtttctgcgaggtctgctaggtaatcttatttcttgctaatgaagactgtatcgtcaacgtatgtgaatatattgcgaccaatctgattatctaggatggtcttcatcattctggaaaaagttgagcccgcattcttgagactttgggcatacatgtgtagcatcaagtgccaaagggtgcaatgaagcttgtcttggccttgtcatcctctattatgtagatttaatggttgtttgagaaataattgaggagggtcatgacttcacaccatgaggcggagtcaacaatcttgtctattcttggcagtgacatgccatccttgggacatgccttgttgaggctagggaagtctatacacattttccacttgccatttttctttttgatcattacaacgttagcgagccatatgttagataatcgattggctcgataaaatttggcatcgaggagttgttgcactttggcccttactgcctcggttttcttgtcagacatcttgcaaagtatttgattcttaggtttgactgaagggctgacaatgaggttgtgttcgatgatgttgtggcttacaccaacaaggtccgaaggggaccaagcaaaaacatccttgttcttgtctagataggctaatagctggccttcttcctaactgtcgaggtcttggcttaggcctcctttggaacaagaaaaagtgaaggaat

SEQ ID NO: 156219 - DNA, 552 bp, Zea Mays
ggaggatcaaaacagataaattatgtctaaaatcaagagtcggaataagggggatagagttccccgccaatctggtagtaatgggtacctagggcgtagacatagatgtcattatagggatgaattgattgacgaagtatcaagtaggccttagctgtgataatagtactgtggggttggtgtcctcatcgagagaagaagtagtggtgaagttgatcttgtctgaaccaatgaagggaagctatcaccacatatatattgatagtaaggaagccaattcgcttaaagtctttagagtagtatcagaattcctagatgtgttccccgagaagctactgggcatgccacctgagagaaaagttgagtttgccatagagcttatcccaggcaccgccctatttctaaaagagcctatagagtgtccagactagaactagtggaactcaagaagcatatagaagagttgttggagaagggctacattagaccaagcaactcaccttgggccgttccagtgctgtatgtagagaagatggatgatactaagaggat

SEQ ID NO: 156220 - DNA, 689 bp, Zea Mays
cgcgaaggggtacactaggatctgagtcgttggatgatcaatcaatggtatagattagatggatccaccaagaatccctagccctcggatccctgatggccggttcggatttaaaatgatcagatcgatctgcgtccgcccgatcaaaaatctagggccccgatctaaaacacgcgaagggttatgcctaggctaatctgggccgcacactcatgattcaacggccatcgcctatctcccccacccagccgcacagccggcggcgcgcgagtacagacgtggtggcgccatgtctggagagccccagatcccgacatcgtgcacggagctttgatctacgaaattctacatggtgctctctacaagggaatcacggtggtcggtaactcacctcgcaatacgccacagggagcacgggtcatggtgcacggcaacccacggcctcagctggacaccggcgcgaagctggtcgattctccccaccgccgcacagatgcactatcaaacaggacccccggccccggttgagccccacaccagtgatgtcaaggcacgaacgtcgagaaggcagccgcggtgctcaaactcacgcgctaattctctctcttctcaactgcactcgtcgctaggcaacctatgctctcgctgctccccttctctttctctcgacggagcgaacacgacggcac

SEQ ID NO: 156221 - DNA, 1018 bp, Zea Mays
gtcagaaaaattgtggattatcctttttgcgtgatgcaaaaaaaagatagtagctttgccacatcatttgcatttctctctcgttgctttgcctttttcctaaaattattgtcaatatttagcattaggcgaaaccaacattttgcaaatttcaattctgaattacaatataaacctattataaacttacaggttatacatgtcctgtgctgttacaggcacactctcaggaccaccgtgcatttctgaaacataatccataatacaatgttgcgggattcgactctcctgcattgaacttatgaactccatgtattcaggatcatgcgtcttgttgcattgtaattgattttttctgtatccttcttaaaaaattcatgattatgatccaagtgcaacagatcaatacacactgatataactgtctcttttgcatcatcataaatttttttaagtttcataccggccttgcattgtgtccgcttcgagctggtattacgtacctttgggtttgatgttctccttactgcactctttccttccatcgagcaattcaaccacttacaattttccgttccctatactttttcaatgggaagccaacttcatatgcatacctactataaaatttatatgcttcatccacaccactgaatgtcataccaactttaggtaccaacctcggatcaattgtaacttcctgtgcaaaaaattaaaatatatatgtatgtacatatatccataacatgtatgttgtatggtgtcctacataattttacatcgtatgcacaatataacatttcataccatctagctgcattccatcgtatacaatttaatctacaatactgaaaatccaaatcagttatatagtacttacatgtctctgcagaatcactggtgtgtcccgttcatgctcaccaatagtacgcatagtagtaagttgttgtcctccttgatttatggtcatcctcgatgcctctaatgtgttctgatcatcaaccctcggcgccctcaa

SEQ ID NO: 156222 - DNA, 335 bp, Zea Mays
cacacctggatcgttgttgaggagcaattcctcggtaatcgtgaagctcgcgcccttcatcttgacgccaaattctatgtctttatgcatggtgacctctctgtcggtgactattgccataagataaatgggatggctgacgctctcggtgatctcggagtggttgttcgtggccgcatcctcattctcaacgtgctacacagcttgaacgagaaattaaaccacatgaaggtccactttcatgcactccaagctgctaccttccttcgtctgcaacgacctcatcctcgaggagattgactacaacacatcaacaccgccaccagcagccgccc

SEQ ID NO: 156223 - DNA, 753 bp, Zea Mays
ctatgggatcattatattgctatgggttcattatatggacaatttgcaataaaatgactggtaccacatttcaagcatgccctcttgccacgggcttgtagtcctttttcttctggttccttaggatctgctggaaactcttgatgattagcaccatttcttcatcatcaaggtcggaaacgtcgatggtttcctccttgcttggcctctcctctttctcactggttacaaggcaaagacttgtggctcatggaggagacactcccatgcaccaaatctttaatgtacttggagtccctcaccatcatctcatggcttaggaacttaccaagcacctcctcagatgacatgtttttgtacctaggattctcacgaattaaagatacaagtgtagcattacaataattaaaggaccctatcatgatcttgacaacttcatgatatgtccatttcttcctcctaattttgagagcttgattcacattgagtcggctttacatctcttgtggtccttctccattgagcatggcgaatctcctgagctccccttctaggaactccatctttatgatcttcgtgtattgtatttagtgtatcccatatttccttggtgttctccaaaccattcaccttgttgtattctgccctacatagacaagcaagtaatactatagtggcttgggagatgtgtttaacaatttgctctacctccattggattgtagttttcatcatcactatcggggatctcgat

SEQ ID NO: 156224 - DNA, 351 bp, Zea Mays
aactacacatatatagcgcgaagaacaagtcgaatagatatttgatattgtatctgtgatcagggcagttagtaacatctttactcttaatcgggataatgtttctacaaatgcgcccaggtagatatctaatgtcattcacaactaaatagtagtttgcttgcatatattattgatctctagaactggaaagggaggctggtggactctggattagtttatttatatcatgctagtacacagtactacctaccgtacgaggtggagaatgtagacaagatcctgacagtacgtgtgttgtagcatgctgaaagagacgggaagtggacagtacgtgtgttaccatatgca

SEQ ID NO: 156225 - DNA, 643 bp, Zea Mays
cagaaaagaaatagaggaataagagaattacataaaatatacctagaagtatattttcagagttagtactttaaatgtgcaaggtagtttgaagacaaatgtgccacagtgtcagatttacatttgaatttgaaaagaagtcaaaataaaataaaagaaagaaaatcaaaaacagaaaaaaagagaaaagaataaacgagttcggccactgggccgattgtccccaccggcggcccacttcccttctcctccactccctcatagtccactagcgccgttacacttacaggcgagccccactgaccagtccttcaacccatgcgccagaagcttcttcctcccccaacagaatcgcacgcgttccctgtagaccttccccctcgtcgtgcgcttcacccagtcaacagcttgtcgtgagctcagcggactccgtcgattccgccgtggatctcggccactcgcgttccctccacgttcagcttctcggccgttgatcagtcgttcgctctggccacgtttctcccgcccttcttccccaaatccgcgccgagctcaactaccgtgcgcaactgattctgcgatgtccaggcgccttcctctcaacggatcaacggatcgcgcgtgtatggcgctgtggaaatcg

SEQ ID NO: 156226 - DNA, 532 bp, Zea Mays
gtcacggggaggggaaaatggcggttcgcccgcggggaggaaccgtccgccggtgatcttggtggcggttcaccgccggtggtccatttccgagtggtcgaggaggtggcttagcacgggtaggggtagggggtcatggtggtggggtcaattaagccagtggacactcggggtggccgatccacgacaaggtggtgggctcccacggcggtgaggttgacggcgaggcttatgaggcggaataggtgagggaggagggcgtgttgtgctcgtggagaggtggtgaagtttgtgaactacactaatttgattctaagccactggagagaggagggagaagctcaccggagagaagggaggcgacggcgccgagctcgattggttccaggggaggggagaggaagtggccgaggccagtgcggggagatgaggggctcggggcggtccttttataggcgtccggggaggtggaggccgtcgggcaccggcgaggcgtgccgaggcggtgataatggtgacacagtcgtggcga

SEQ ID NO: 156227 - DNA, 611 bp, Zea Mays
ggcaaaggacgaagctatgaacactgcctgcggtgattgagggaaaaggagactaaacagagtgtttgatgtgattggattcatttaccctgactattgctttttcgtacggaaacaaggaacaaagaggaaaatcgcaactacgacctcttccgtcctgtcgaagccaaaaagagctaaagatttgactcatcggccgaagttgcactctttagaaaaggctgctgccctgccagctgcagaaaagataaaagttgtaaaaatatgtcgaagctactccattagcttcggagataatacctgctgtgactgctgaagctactactgctcaagtagaagaaatagaaccaaagattttaaaactaagcagcaactgaagttgcatagtcccccagccataacggggttgtcaaagtcggccaccgctttagtggtaactcctagaaagggagaagaatggctagcgttctggatgttgttctgaaatcttcgaaggtgctaactcctgcttctaccaagtcttccgaggataagattgaaggattgggtgaagtagctgttgcaagcgcttctcctacctgcgttgaagctggtccttcaggaactaaacc

SEQ ID NO: 156228 - DNA, 890 bp, Zea Mays
gaccgacgacgccgtgacgtagttggttaatggcaaggcggtaaacatatggtagtgggcggaattatagggattagattccacatgcaaacgtgcttactctaatacgtgggcgcgtaatttatggatcttgcatggggtataatggaggtagttaaagataatattgaataagatgttgaaagatatggcataaaacagatacgctataaatgttgcatatatactatataccgtttggcataaaacattgagtcattgtgcgtaagtagtgtgttagggatatttttattacatgtacattgctataatatcggcacggtttcaaaaattatggaaatactctggaaacgtggatgcggttacttgtttagtatagcatccgtgatttcctttcattcgaaaaaaataccccctagactgcagaactagttggcggtggagatagctggctctggacaatcgccgacgatggtaggagatggcgttcgtcttgatccagacacagagggagtagttgatggtaacttactggttacaccacctcctgctctactggggcctgtaatcgacgagataagcataggggaggaaggagaacaacggattcgacctccgatgtccaatattagctccagggagatggatacgcctcaaatactgcattcacatgtaagtccaattgttgtatttgattcttgattgattagattgttatgatcataatccatggtacaaacaacattgtcaatgaattgcagcaaaaacattgatccgaatatagtgccaacagtagggatgactttcaaggatattgatgatgcatataaattttataaaaggtatgcatatgaagttggatttccattgaagaaatacatgaagaagac

SEQ ID NO: 156229 - DNA, 739 bp, Zea Mays
cgctattgccgaagctggccgagatgccagtaattactagaaaaattattgggagaaaacagttgcagagcttcgctcatcgaaagaaagatgttttgaaaaatctgtggaatgtgtaaaaaagataaagactagcttcgccaatgtggccgcgtactcgagtgaagacaacttcataagaggcgatcctgagggcccaattgagtggatcagcagcgaagccgaagcttttgaagaaattttgagtgaccgtggggacgtctgcgccttctctagtgcgaggggaattgcagctattttggagaagtcaggttgtgagcatgttaaaaccttagctcaggccgaagctgccctctgtattgatgatacgaaggacccctcggccgaagcaagcttaataggtggaaattttttcactaacatatgggaaaatggcggccgaggaatggcccatgaaataataaagaagaacgaaaaaaatattcatgacactcgagagtcaataaaaacagctgaaaaggctgcggagcttgagagacgaataggtattacttaatggtttttaactttgttgtttatttttgtgactttgaactgatttacgttttttaccgcagctgaactatctcctccccagagcccttcgagtcactggccgacccagaggcaaaggaatcaacagaaattattaagatggccaacactattgtagacgaagtcgttacccaactgctgaccg

SEQ ID NO: 156230 - DNA, 734 bp, Zea Mays
gcgtggggccgtatgtcagccgtaatgggcgcgctccctctcaaaccttgctctctgccactgggtcctcctcgtcagttcgccctgtggatcttcccctgaacaccgcactccgcccacctcgcgcaacggatgccgagttcttcggcatggcggacctgtgcgactatgcttctgcgcgcatataaggaagccgggtccccacgccgttaacctagccacaactggttgcctcttctaccctctggcgcgacctcgcgcactggatctcctctccgctgccatacgccatcgtcacaggggggcttcgccgccgtcggctggagaaggaaggctacctccgccgctccactagctgtgagtactcctaaggacatacgctcgtacctcctactccggttgcaactagaatcgttcgataaaaggcacgcgtcacctggcgatttctcgccggagtggtagaaccgtcgtgcgccgtggacagggctcgcgcgcacgctttacttcagttgggttctgtccacgtgctcgggccattcatgacaacgtgtagagtatctagattggaggaattggtgctcgatgcatcggattgaagttcttccgatggctctctgccgtgggagctcgggcaccgatgttacccggtgagggctggggaagatgcaccgtggaccgttggatgctctatgcgcggctctgattgaaaaccaggtgtcggtttgggcgcgttc

SEQ ID NO: 156231 - DNA, 334 bp, Zea Mays
caaggtttactatagtcatttaaggtttatttcagccattcgccgtttttaaaatttttaaaggaagaatcatttagcaattcaaggtttactttagtcattcaagaaaaaacattcatcacttcaagataatgaatcaagacaagggcgactgttgcgttggatgggtgaaggcgtgatagtaatgaattacagatgttgggacggcgtgtcggcgtgggatagcgtggttgtgggttggattggatcgaagtagagttggttatttgcgcccgagtgagacgtgtgtgcggcgacacgtgggggtattagttgtctgagaggtcgtgcagag

SEQ ID NO: 156232 - DNA, 804 bp, Zea Mays
ctggtgccaatgtatgtgcataacgggttaaaggccatcaagcatgcttgcacttcattcacacttgcgattgatggccccctgatgccgaagcgtgaccgtatgggacactggataatacccttcacatcttctctctcactcagatcattcttgaataggaccattgcttcatccaagagcctggccatttctttcggaatgtcggcacaggatacctcacatcagaacggtgcacaaagctataacaaccgaagttgttatgatactgctccttcctaatcgccttcatctggtaggataattcatgaatgttgcaaaaacacttagcatctggctccagccattggcttctcatagcccaaataaaaactccatctttaatcaaggcttcaggagtaagctgatgaaggtatatctcaaatgtctttagcactttgaccagcatcttgtgtaacgaaaaacgaagtccaaccttcataaaacttttaaacagtaccacctcatctgcctcaggaagaggaataatgctttctcctccagccctcactatggatatatcatggaaatatttgcccttcgtcgcttcaatttgcccttgcttaacagttgatttcctgaaaacaacatggcttagcctccatggccgatcttcggcatcttcattttcactctcaacatcgaagctcttgctgtcgctggaatctccagatatcccagatagcatttcatcagtgattttcaatattggtcctctccatggcttcatagaaaccagcgagtgcggggtccacgcttttctta

SEQ ID NO: 156233 - DNA, 298 bp, Zea Mays
atacatctgcgggtccgtctgctggtcctgctgctgctgccggtgcctcgcgtccctcccctggccgcggatctcccacgccacgtggtcgtggtcgaggtcgtggccgagggatgggtgcccgcttggcccatgggtttgcggcatttttctccatgtgccagaacattgctgtggatgtccatgaggtggcaagacgtcagcgggagactgacgataaccttcgtcgtcaagcttcctctttgggtactcccttcgccccccgctcgcctgacgtgcctctccatcctcctccccc

SEQ ID NO: 156234 - DNA, 382 bp, Zea Mays
tgggaataaactagtaatatgctactggctcgacatttatgggatcacatggctctacgcgtgccgtattgatttcctgggtgtcctacgtacatttttgaaaacgattggaattcgaacagggcttcgattaaaaccaatgtctctgtcagagtgtagcgagccatacggcacggcgtctgcgagcgaggacgttcttttttctagtttccaaaggaaaaacaacgattaaaaacgggaaacgggatagtgacattttttggagtgacggattttccgaccgaagaatcgagaaggatgtgcagattcaaccagcgcggtgcaggaggtggaagaaccaaggaacgattcctgtcctgagagccggagagcccgcatggaa

SEQ ID NO: 156235 - DNA, 405 bp, Zea Mays
ttcaattgggagatttgaagaggaaggccattacccaagggaagggtagcagcagtgttcgtcctcactacgttccacctcagggtaccccagctcgtctaggaggaggaccacgtccagctcagtatgctccacaggggactccgcagacaccccacactcgtcaggctgcccccactggcaccccggcgaggcctacaggacagaagaccggccctacatgcttcaagtgcaatcaggttggggactatgctaatacttgtccgctggggaattctggtacaccagctcagaacaagcaacagactcccggcaagggatactctattgccagggttaatcaagtcagcgctgatgctactcctgaaggtgctgacatcgcacttggtatgtattatattaatg

SEQ ID NO: 156236 - DNA, 1033 bp, Zea Mays
agttgtggtacactaaataacctacaaaatatagtcagaaagtttacccaaaagagattaggattttagaattttgaaatccaaccctctcacaaagatcaaccgcgttcaccttgttccaaaactcaaaaccacatggtccaaataacaaaatggcgccaaaatatcctaggcacgctctggtgaaatttgaaatcaaaccaaaatcgtttgacatgatttggcttggttttggtcttgggttcctgctcggggatagaccagacttgaccacacattttctccatgttcccaaggcaatctacactctggaccagtagagaaaagataggatatggttcagagaagagaagttacaaaggattttgctgagaactactcattaaggtgaccaaacagacacttaaacacgagcagaagcaaaccgccacgtgctcgaccgcgactggcacggcagtgcatgcccgaccgcacacctgcgcccacacccatgcctataagagcccacaaggcctcgaccatactcccccgcatgccctcactcccgccagagccaaagatcgtcggagttcgccgcaaagagcaggcaccaccgcccgagcacggccgacatggctagccattctcgtagacccccaacctcgtccgagcccttggacagcttccctgagaggccgtgaagccttcccaagcttgatccaaggccctaccccatcgaaacagtgagatcgacctcactggacttcggccgcgcgccgccgcacgtggaccggactacaaggtgagccattcccaaattccatgcacccacgacctcactgacattttgtgaagctccctgactcactggatcaaactctaccaccgtgttcaagtcgagcttctcgccgccaacaagctcgaccgcctgtgcatgaggccagaacagctccggccaccacatgcgacgagctgaccatcgacgggaccctcgtgaccaccccgacgttgccgaccaccccaccggaacttcaccatcgccggtaagccacgc

SEQ ID NO: 156237 - DNA, 402 bp, Zea Mays
taggaagtagcagtgtatgcataaaaattacagagaactcgagcaccttgggaagcaggacaaccgtcgtcgagcgtgtagaagaacaatgtgacgcgtgcgcggaggattgtcagcggcgggcggctccaagacactgacaacggtggcgccgattagggttgagggcgagtggcggcggaggacggtgaatcgccctggcgggaggggaggaaggggaatcgccctggcgtcgcctgaataatcgcggcgagtcggccaggaaggttgactgcgcgggggttagggtatagaaatgtttgaccgagtgggaagtggggtagtgcgccaattcctgaatttctggaacgtgggtcggctgaagtatttacgctaaatctctattgtgtataaacggaagaa

SEQ ID NO: 156238 - DNA, 377 bp, Zea Mays
ggaagaaggcacaggaggttgggttggaattggatgggaacgccggaacggcaccgattcctctccgcagcagcacaaggccccgtgcggccgtgccggcttcccctgccccccgtctctctctcctccatctccttgctgacacctttgcgtgccctgtggttctgatccgatctatccatcatccaaggccgcctccatcctgtccctgcttctcgcgcgcgcatgcacgctaggagggaggataggaatggcgacggaggtaaaccgggacgccaacgctgacgaccctcctctgccgcaaccggccccttccccgtcgtcggaggggaaggatgccaacaacatcagggacagggtatccttctcgtcgtcct

SEQ ID NO: 156239 - DNA, 539 bp, Zea Mays
catggctcttctgacgggtcgtgtgttgccgtactcttggcacgacgttctgtctcgtccgtccggcgtgcgagttcctgtagctcgctctatgctcgtactgtcgtacatgatgggtcccacagaacatgctctcggtaagtttgaggtttgtgtttagtacagtttcatcttccgtcaacaaccttacgtcaacctccagcatgtgtaagcatgcactaggtgtgtcatcatgtcctttttggtatgtgggtgaagactttgttgccgtgacccccttggtactgtacgcatggcatggatatggtttggtggtgatgtgtcatgttacggccgtcatggaccatcaacgtcgtcctgggctccctccttgcgggtctgtttggtcattcgctctgcctcgtagactcgctcggcgtgggcttggttgttcgccccacctcacatacttgcttagaggggacttggtcattcgtcccgcctcgcaaacttgctcggcacggacttggtcgttcgcccagcctcacaatctttgctcg

SEQ ID NO: 156240 - DNA, 350 bp, Zea Mays
cataataatctttgaaagggatcgaaggtggcaggtgcatgtacacacatgtaattagatggactcacagagcttagaacattaaaggggactgtgccttagtagatctatcagttaggataaaattgccatttgaatagcatgtaaacagtaaacaaaagttgctaaacaacacatgagcactacagtgccaagatttaagtataatcaatttccacttatgaagctaacatagcgagtgcattgagttatttgcagtctctttccaacatttctctgcactacataatcacatgttcagtagagacatgctacacttaaaccagtagcctttagtcgagaaagaaagg

SEQ ID NO: 156241 - DNA, 274 bp, Zea Mays
ctgcgaatttaaaataaactactcagatctattaataataaacgtagcggtgaagtttaattaagatcaactagaaatatcaaagatctgaattaatgagagacaaaatcacaccaacaacgcacaagagacacacgattttttaccgacgttcggtcacaccaccaaggtgccctactcctcgttgaggtgcccacaaagggccgggtctctctcaaccccgttcctcgttgccaaccacacaggtcaaggcaatcccttactcaactttgcc

SEQ ID NO: 156242 - DNA, 1222 bp, Zea Mays
agatccaacgaccgatcctcttggatattgtttagtggcagaacatatgatgcatggtccatgtggagcattgaacccaaattctccatgtatgaaaaataatagatgctcaaagaggtatccaaaagaattccatgaagaaactaacttggatgaacaaggatttgctacatacagacgaagaaacaatggacgctatgttatgaaaggcggttacaaattggataataggtgggtagtgccatataatcagattctgttgaagacttaccaagcccacatcaacattgaatggtgcaataaaactatctttgtaaaatatcttttcaagtatgtaacaaaaggtccagattatagcaaagtatatttgcagagagtaagaaatggcgaagacataccttacgacgaagaaactaatacaagaaacgaggtcaaagaatatttggatactcgctatctatgtgataaggattcctgttggcgtgtgcttggatatgagatacacagacactatcctgcagtagaacgaatgccagtacatttacctaatgaaaattacataacatataatgcagcaagtaatatatccaatatattaactgaatcttttcttcggaaaacaatgctcactgagtggttcactaccaattcaaatacaaatgcagcgcacaatctaacatatattgaattcccatctaaatggcgttgggacgacaaaacaagaacctggaaaccgagacatggaagagaaagaaaaattggtcgtatatactatgtacatccatctacaggggaaagatactatttgaggatgctgctaatgatcgtcaaaggtgctcagagctatgaagacttaaggacatataacaatatattacacccaacattcaaagaagcatgtaaagcacgtggccttcttagtgatgataatgagtggtataatgcttttgatgaagctgccagatgggcaacctcggatcaactgcgacatctattcgttactatgcttctttattgcgaagttggagatgagtatacattttttgaaaaagtatggcaactactagcagatgatatccaatataatatgagaaaaacattgaaccttccctcttaccagatgcccataaatgaaataaaggatcatttaattgacaaattatctgtacttttcaacaaatatggctcaaacataagagattatagtttgccacaaaaaaac

SEQ ID NO: 156243 - DNA, 826 bp, Zea Mays
gccacatcagctcctcaagttcccacgtagcctcgcgctcagactgattagtccataagaccttgacatacttaattgatctcttcctcaaaacacgctccgaggattccaagatacgcaccggacgacactctagagtcagatcctgctgcacaacaattggttccatcttgatctgatggtctggatcccacaagaacttcctcaacatagagacatgaaataccaggtgtacccctgccatggaattcggcaattgcaagcgataagccaagttgcccacccgggccaagatagtgaatggtctaatgtatttcgggctaagctttccggagacaccaaaccgaacaacttctttagtaggtgataccctgagaaggacttggtcacccactacaaattccaaatcctgccttctcacatcagcataactcttctgacggctctgagcggccaaaatattctgacgaatttcctgaaccttcttagaagtctgttgaacccaatcagaaccaaccagggatctctctcccaaagtctcctagcacagaggggagatacaccgcctgccatatagagcctcaaatggtgccatcttgatgctagcctggtagctgttgttataagcaaactctgacaatgcaagatgatcctcccagctacccttccatgacaaaacacaagcacgcaacatatcttccaaggtttggatcgtacgctccgactgaccatcagtatgagggtgaaaagcgacactaagtgaaagcttggtacccaatgcactatgaagactctcccagaatttggatacaaatttggagtctcg

SEQ ID NO: 156244 - DNA, 753 bp, Zea Mays
gttgttctcgtgtagctggaaatcatttagcatcatttgccaggcagcctcgaactccatttcattcaatggatgatgtattatagattggaaccttgttttgaaattcatttcctcgaatcttgcatacaattcattcaagtggggcatatacctgttttgcacatgccacaaacacaatcgatgtattgtgtttgggaatactctgcctagtgtgattggcatcacagggtcttgatctgaaatcgaaacatttacataacattgtgcaagttagtatgatatcatacagtacgtgtttaatcaatatgagccatttattacaacatacctgtcaacattactcgtggtccgtcacatcccatgcatgttttgaaagtattgatcaagacccactcgaatgtatcaactgtctcgtctcctagtaaagcaaacccaaatattgtgcattgtaggtggtggttcgagccaacaaacatgcctaatggcttatcatacatattagtcttatgtgtagtatcaaaggtaacttcatcaccaaaatcaatgtactcggcttgctggctagcatgggaccaaaatatgcttaaaatcttcccttctttgtccagttgaaagtcagaaaaaaattgtggattatctttcttgcataatgaaaaaaaagataatagcttcgacacatcatttgcatttctttccctttgccatgctttcttcctgtcaaaaacataatgattatgcactacatatttt

SEQ ID NO: 156245 - DNA, 459 bp, Zea Mays
gctagccacactaggtgatgaacctcttcgatgaagccagcgtctagcagctttcggagctcctttcgaatgaagtcctgccgttcaacggactgcttgcgaggtttttgactcaccggcctggcgtcggggttgatcttcagatggtgctcgatcacctccctggggatcccaggcatctgcgacggctcccatgcgaacatgtcagcatttgcctgcaggaaggcgacgagcgcgagttcctatttttcacccagatctcccgcaatgcgagtagtctgggtggaatctgcagtaagctggatggctttaacggggatgccatctgccacgaatggttgtacctttggcaccttggggagtgccttggtaccgggggttgaggggttccccccttcgtcgtccgggcgagcagtctctaccgcgagggcgtgcagcttctctacggccgcaagcgcg

SEQ ID NO: 156246 - DNA, 302 bp, Zea Mays
gtacatgtgtaatggcttgtatgaagttgtgtgccctcgcacattcggctatgcttgcgagggcgttacatacttggtcaggtgtaattgttatgctggactggtgcgcatgtagtcggtctttgcgcggacagtttggtgtggtcgttttcgcgtttgttacgcttcgtccggctgtgccctcgggcaactgttgtgctagtccggctgcacccttaggcgacttctgcgcggatagtcttcgcggtagacttcggttttttgcacttgttgtgctagtccggctgcacccttaggcgact

SEQ ID NO: 156247 - DNA, 824 bp, Zea Mays
cataattgggttctcaagactgacctcaccaaactttctatcccacattttctatttcgaactccactgtgcctacagtgcgtgaacagtttcgtgcaagtccatatacatggacctcgcaggacttgcaaaccccacacgtagaacaatggtatgcacaagtattgataccatcggtgtgtgcaaatgttatacaaaccttgtcacaaccaaaagcaatgtactaagtagtataatcaagcgcttgcaagcactaagccatactatatatgcacctaaacactttattggctagagcttcacaggaatgaatctctatccaagagtatattctagtaactcttaactacactaaaacgagcaccaaccatcaaactaactgttgctccaatttgactatttatgtgttcgatgtacaactagactgtcaggtgcgtgcaatcgattcagtgtcatcatcaaactcaatatctcctcaggtcatttaatcttgtgaatcgttagaccatccaatgcattatgcatttcctttaccaagctcttctaatcactggacctttcaatgttcactaacattcttataatcggaccatctagtgctaagagttgtgcatcattgcttggtcttcatttttcattactttcctcaccaatttgttcggtgcatgtttctccattgtctaggccatcaacttcttgaaaattctgaactgtggtttattcagtgtgatgtcttaggtcttctagttggtattctaggtcttctcttgtactctcgatcactcctttgaggtgtttgtttaccaagtccattactttcatca

SEQ ID NO: 156248 - DNA, 1641 bp, Zea Mays
taatcacaaaagagggattagccactaattaagtatgtcgctttgcttttggttggcatcgagggcacagtgaggcgccgtgtcgcatggacgggctgcctcctctcgttcctcgccattgtttaatcagcctcttctccgctggtacgcatagatccagcacatgctagctaaggcaggctttcatcagatcagatgagctgatgagcatgagctctcgtcgacaaacacccggcccttggcttggctcctctcttcggcctttctttttcatctgacaagtgacaagtgacaggaagcttgcttggctgtgatgtttacttgtatttaggcctttagggttccaaggcaggagaatccggctgtttcgtttcatccccgcactggagtctccttctcatagatcgatgcagcttcattcgtagtatatagagtattattatttttcccttgccttgtatcttgcgtgtgtaggagtaggctacaagcggcatcccatgcatctcgtctttccttgcagctctatcctactactagagattagagacacatcagaggtgcattgggaaatggtgacatggattctccacctgtcgcagctgtagcaacattgccggcagctgttctgctgtggcctgtagctgttactgcaatcgtgttggggttgcagtagcagtggcagcagaacaaggtagcctgtgtgtatgagagagagacacacacacacagagatggtcgccgttcgtgtcctccggggggtgctgccggccggcctgttttgcagctggacgtgcagctgcactgcagccatgcgtttgcagatttgtgtttaaggttcatgctacacactgtggaactgttctacgccactggctgtgccaagctgtgtacgacaggagcataggctggcgtcttatgtaggctgcagtacacaggttcagatgtttcttacaacaacagaacccatcaggaagtcaccagaccctgaaaaccactacccccctgccagcctcagccctcagccattgacgatttagtttagttacatctgtctgtttttgttgatagaatctaaggaggtcaatttgagattactgcaattgatacgacaataacagacgcagccacgcaggaaattatccattgcttatgttaaggcatgtgaactatagaaataaactccctgttcccgaatacaactttgactatatcttgttacaacaacgtttttttataattttttttcctaaattatggtttaattttgctctgggttttcaactgcaaaagcaataaaaaaaatgaagatcatttcatgtgagtgactagttcagatatctaacatgaagccaacaattattatggctgtgcacttctccaaaagtttcaagtgtatcttctatacaaatctatgcactcaatattagatcttgtaataggaatgtgccggttcttgttgctaaagtttaagtttttccaccatgcatttctctttaaattattcgaataaatgtatcttatactgtgcattaatgcatttttttacgctacagatgtttcactttctcctaaagttggaaagtaaccattcctgtcccaaaaaattcatacccacatgcccatatggagggttatttccct

SEQ ID NO: 156249 - DNA, 408 bp, Zea Mays
ggaaaagtaatataaatacaatcaatttgtttagtgcctcaaacaatcaatttacactcgaaagcctgctctcacaatgaggacgactcacgaccttggcattttgaagaccaggtacgagtattgtggaatggccattaacattgccagcccgggtcatctgatgatggcgttgtaggcacattcgaagttggccacctcgaagcggaggaactcggtgcagaagtgatcaggcatgttgtaggtacatgtgccctagtgagtactctccctgacccgttatgatgccaaataagggattgtttgactcttgaagttatgcaatggagatcccaagttcctaaagtgtcttcaggaaagtgatggtgacactccttccatcgtcgatcagcacactcttgactcggc

SEQ ID NO: 156250 - DNA, 998 bp, Zea Mays
gggctcactgcatgacacccaactcaagacagatcgaaggtatgtgttttcttccttgatccttttcttgtcatgtcagcgggacgtaagggaaaactgcaaaccctcacaaagtgcacactcgcaggtgcaggggcactcactgagctagccttctcaagcaaagctaccctagcgtctctctctgctagctcggtctgcaagccaggacaaatggtacatgcacccaacaagctagacctagatctcaactagccgtgctcatctagcaaggtggcatacttgctatgcaaactggtgatatttgacatgtgtagagcgcactcatgacatttagtctcgtcggacaccacaacttaagctttagaagactcaagttccctaagtgtgctcccgtacttggatctaaactctctcctctcacgagcagcctacctaagcaacttatcctgactagccaaagcagtgttcagctcttctatctcatcggcggaaggtaatacttcagaagtagtgttgtcaccgatgtctttgtcgtcgctggcaccgaccacgtcctcaccaagtgccatggtgtagaggcctccagtggcatcggtgatgaagcacaacccgttcagcttgtcctcgacccgcctcttagcatcctcatcgctcaaggaagatacgacatcatcggagtcatggtcgaggtcactgaggggggcgaggaaggcacgctccttgatctttgccttctgaaggtactttttctcgagcgcctccttgtcgaatcctcccttggacttgttggaggagtaattgcccttgtgccaaccagagtgatggtcgtgtaggccggactccgccttccctttcttggggcagttatcaacgaagtggtcaggattgccacagttgtagcatccgtccttggacctgccacaccgccggctcaaatgattgttgtggaacctcatgaaccgactggccacaagtgctagctcctcatccccaag

SEQ ID NO: 156251 - DNA, 402 bp, Zea Mays
tctgatcaccatttttcttcatctcatgtgttggttaccattttaagtagggcttatgaactaatctatattctcatgtcaacagggggtgtactttgtgatggttgctgttttttggcttaatcctttcttcagccaccttcaacgtgagttacacaactctttacctttcattaagaggcgaggaagtttgaccacattcatgtcaaagccaagaatagtgtaaattttagaaaacagtttacttgaggtacctcatagtcatatggatagataataaggacattagatatctggtacttgtgaatttgaagatttcatatgccaatttttttggtagatggaacatgacacatgtatttatggagcttttatactcacattcttgtatttgttgtttgt

SEQ ID NO: 156252 - DNA, 606 bp, Zea Mays
gggacctgttcgttctctgtatgctagcttgcttggattcggacaatcggtaccgtccctggaaggggtagcttggatttggatgaggactctgttgcttcgtcgatcggggattgagtgttcgatttcgagtccgcttgcttggtctggtccgccggtgttccagggagttcggcgtgtatgtgtgtgttggtcttggactgacaagtctgaactgtatatttttttcctcctctttgcggatacttcacgtttttattctgtgttgcgtagagcgtacgtgagtggtcttggtttgtttgattttgcccttgagcaggcggactcagttgctcaagtcttgattgcccccatctaatcaccggagcacagtggctttgcttgtatctgcagccagttcgtctggaaaggtttttttatctgtttttttaaggttgcttttgaatagtgatcgtatattcgcgctttgcttgcacgtggtattcttttctgttcttagccgcaactattcatcggtgtcgaacagagatcctttttcagcgtgaacttggctgtttttgagcgaagtatgtcgtgcatattttgagtggcgcaagtccgttggct

SEQ ID NO: 156253 - DNA, 340 bp, Zea Mays
caattcaagggattcacattgcagcatgtggaccgggccaagaatgaagaagctgacgcattggccaaggcagccgccaggggtgaagccctacccttcgacgtgttctatcacgtcatcggcacgccagccgtccgcagccctgaagggctccaaataaccaacgacagcgagggccaccgcatgatcaatcttatcatgaccgaagactggtgggcgccataaccctatacctgcaggggtactatcacccagtcgacagcaacgaggccaagcgcctccaccaccgaagccgggacttcgcattgatcgagggccaactttacaaaaagggggtcag

SEQ ID NO: 156254 - DNA, 746 bp, Zea Mays
tgtgatgtaacaagtagaagcactcatacccttatattataataatcactctttctatattgtacatgttaatgtaaattatgttaatgtaaatctttccgcttttactccgatgttgtgtaatgcttgtgatatgggatgtacgctcttgagaaatgttgaagaagaggcaggaatcaggtcctatcgagctattgggtgcatctgggtgactgtctaaagtatttggaaaaagaacagttgtaggtgggcataatattttgtaaggttccgttacatcaaacaatcaaacattaagaaaaagggctaagaaattagggttcgtcacttgcaagagagaagtcacgaccacaaaggcgcctaagaacgacgactactaagaacggcgtcctacatgggagcggaagttgtggatagagagatttgctgtcatataaccagacatgggaaagatcgagaacatgaggagaggaggatggaaacctaatcgccagagcgaaggcgttcttagttgctaggagggagggtgtgccctcaccctttctttttttatcttgcctgttcttttgcgtgttttgtgacctaccggtatacctgtacatgtgggccggcctggcccggcacaggcccacaaaggcacggcacacaaaagcacatatctaattatgggccatgccttgtcagcacgtgtgccctgtcatcggcacacggcacggcccacaattatttatttgtgccaggtcggc

SEQ ID NO: 156255 - DNA, 830 bp, Zea Mays
ccttacctgacctctcatctcgaagaagaccgattgagccggccatctccctgtcgcgcccgtccctcgttcttgctctctccatccattcaccacctctctgagctctctcatctcatgcggtgactgccagtggggatggccggcgttcccggcggccactgtacccaggtcgcacaactcctcgcttgcggccagaccgtacagctcccccataccgaaatttcactgtttgcagtacggcacagatcgatcgcggcggcgacctcgcgcaggagcatatccgccggccactctccggtgctcgccatgccgcattaacacggggagcagagaaagttcgtcgaaatgcggcggccgccaaattaactagtaagtatattagtatcaggttcgcacgcgctgccccggcccacgaccacgacgagtaggttcggtgggagcgcgacgtgatggcgtctccgtgcagaggcccgaatccgagtgggcaacaagatgattggaagaaagaggtgaggttcgtacacggtggaagcaagtacctcgcccggtcgatcaccgtgcgtcaccgtagtatacaacgttgttgggtccctcgaaacgacgccaagtcagccaggcaggcacgtgcgcgtcacgcgtttttttaggcttcatgccatttgagcagagcacactgcagcgtttcttcagttattaaagatcacactgcagcgtaccagctgtcttctccgaataccatgctccctagtctatatctatacccctatataaagcattactttaatttttgcaacaagcacctaaacaaatgactctagaatcatccc

SEQ ID NO: 156256 - DNA, 653 bp, Zea Mays
atagggcagacatcgttaccaatcacctttagcaccatcgaaaacttccgcatggagtacatcgacttcgacattgccaagctctacctcccctacaacgccatccttgggtacaccatgctctacaaattcatggtgaccgcccactatgggtatcttgtcctcaaatgcccatatcgtctagagtcatctttgccccaaccgaccggctcgacacggtcaacatcctagagtctagagaggctttagaccgtctcccacgacatcacaaatgatcagcctcttgagttggacctccctcctcaaggaccaccgtctgcatcagtgtcgacatggtagggaaggagggagttccttcctcctcgtcccatcaaccagcaaccagctcacctaaggcgctctgccacacctcctctagctccccgatgtcaaaaaccgcagagcaagcccctcatagacaatgcgcattagggaccgcatgagggtcaaatagaaaagtgtgctagtcaccttcctccgagataacatcgatgtctttgcatggcatccttctgacaagctcgaggtccctaggaaggtgatcgggcaccggctggtggtctacctaggcacacggtcaatcaagtagaaggtgtgatgcagtccgcatagca

SEQ ID NO: 156257 - DNA, 722 bp, Zea Mays
acccctagattctccaatactcttgtttcaaatatttacctctaaaaaaactctactacccatttaaacatttcagtttatatgaccatgaccttcctgtcttctgagaccctctcatgttccgttgataagtcgctatctttttggcaatttgtactctcttggtcttaattattctcgtaccattggaatcttgcatactcttatttttatatatgcttacctttatatcccaatatctgtttgagacatttcagttaacatgcccttgaccacccttgtttcttaatgatccatgagcggtcattctactttgcatatccttggtgatctcgttgtctccttgtaactccactcggtaatgaatctttacttcaacccttctgttggaaccttacctatcttacccttgattgttttctccactttgtcgtttcgcgagtctcgccttaactatatcctttgttatgcttttaattattatcatatgcacccttgacacctctatatcctacatcgatgtttgtctcatacctgtcctttaaaatcgcccctcttccgtctcataccttctttctcttgatcatatcctcttctttggctcgcgagtttgtaacctcatcctttgttgtgcttttgtctcttattgcatttacccttctcatctctcaatcttaccttggtaattatgctatgttcgttatctaaaacctccaatctcc

SEQ ID NO: 156258 - DNA, 582 bp, Zea Mays
ggcgcatgttggttcctcacggtcgataaagaaattaagaaataaattgagacttaaaagataataacaaagcaaaatcgagactttgcttgtcatagtagagccagagcataggttatgttggcatgagagtagagatggaggaccacgagtctacagtggatgcgtcacagatggagtgaatactagagagggagacaacttctagatttatggtggagagctagagcctgaaggggattgcctcaatgattgttggaggagggtggcggttgaatgcgatggtggctattggagtcggatcatggaacttgcatgacttgcgagagccgagtgagaggagcacgagggtagggttggataggggatcagtcggggcacgacacatgccgatcaaccgaggcatggcacatgcctcccttgttatatactctaactagtacaaagcctgtgcgttgtgatgacacaccaatcatatttgatggtataatggtgcaacgactgtacgacacacaagggcccaatgttgagatgacgcacactagttcctcacgaccgacaaagaaattgagaaatatatcg

SEQ ID NO: 156259 - DNA, 323 bp, Zea Mays
tatagtccattagcggtggcgtccaatttggagaaggcgtgctagcgaccggagagaggggaaggttactagtgcgagttaccgtggcactcactggagcatcgactccgatgatagacaggccatctattgcgacctacggcgacgtggtaacaaggcagtagcgtggcgtgctcgggttaacggcgatcatcaccgcgacggccgcgcggccacgtcgcggcgcaagtggatgaggtgacagagcggccatagtgctccgacttcatcccgtgtcaaagatctttcaccccgagtcattattcggacgtccaatggtgcaa

SEQ ID NO: 156260 - DNA, 857 bp, Zea Mays
tgaactttcagtgacagtgagattggatgaacttagggctcgattttgagtaagatcctgtgactttttgtgggtgcacaatgtaaaaaaattaaagctggttaattaagcttcaactttgatacagggtgatggttgggtcaccacataaaatatggagcaaattgaccccaaacatgctctgtcaggcgcttcaaacagagattccaatggtacagtagactgaacgagatcgcaggtgcagtgcaccttgatgccggcgacccctgcgcctggattcacgccagtgaggtgattcgtgctcaccggtgcctggataacgtctcgcagtgaaaagatcaccacggatgagcttaagacactgttccgtccggccgccgtgtccgctctgccccaatcgctttgaatcaaccctcgccagagttagacacctcgcggtcttgtgccacgtgcctcggcactttaaccacatcgcagtgagtcgcgtcatgcatgtccagtgatcgccggtgagtccgccacggtgaaagccactaatcgctcgcatcaatgcaactctccttctctggccgccaccgcgccattccaaattcacgcgccaccgcccccggagcctataaattgagcgtgccttcgggtccataaggtagtcaagcacccaagccaccaagccgtgcctccaattgctcaccagagctcgccaatttcagatttcccccaaatcagccaaaataccgttgtgtgaacacctcgccgtggccacccttctgcaggtcagttcaagctttcttaattggtgttctagctttcctcatgtcccctgaagctcaccgacccattcgattgaactagacctc

SEQ ID NO: 156261 - DNA, 991 bp, Zea Mays
cggacctggaggaaacagacgactgcgagggtccgagccgttcaatctgaatcggacggagaggatcggacataggggaaacatgcggctgtgggggtccgagccgttcgatctgaatcggacagagaggatcggacccggggggaaataggcggctgcaagggtccgagtcgtttgatctaaatcggatggagaggatcggacccaggggaaacaggcgggtgcggggttccgagacgttcgatctgaatcgaacggagcggatcggacccggggaaatcagacggttgcgggcggcgccactcctctctgcggcggtgaggtcaccggagttgaggttggcgcgagctagggtggcttcggggtcaccggagatgggcagagagggagagggcaccacggcaaactcaatggcggggaagaggccatgaatccacgggcagagaggggagaacggcggtgagaaggtctcgggcgggtcggagaaactccggtgagccattccggcaacggggaggggacttaaggcgcgctaaggccttggctaacttcagcagaggcaggggtgacacagggacctactccggggaactagaccgggctaaaccggttggccaccgcgcgagcatggcggaccgccgcagccgagtaccggcgaaggcaaaattggccgagcacagggcgcaataagggaaattgggcacggggacgggtgtctcacctcggggtggagctcggggaggcttggagcggtctccggtgagctggacggccgagaacgtgggcgcgggtctccggcggcggctggcggcgagggcagagctcgagagagggcgaagctgcgcgaaataaggtgaggggtgtgcgcagggcactggtggggctctatgaagggagctgggcgcgtgggcgggtgttgtggccgagaaatccggcgacgtgcgcgagtgcgcatgcgccggtccacggcgagcgtggaggggcagaactg

SEQ ID NO: 156262 - DNA, 1764 bp, Zea Mays
ggcgggcagcactgcctctgacccataaaccatgaagaacggggtgtttccatgcagagctcgactgggttgagttctcaagctccaaaccacgtatggcagctctctgatccattttcctgcaaggttttcattcttgtcaaatactttcttcctgagtgcttccagtatcatcccggtggctctttctacttggccattggctcttggatgcgctactgatgcatacttaatctggatgctccactgctcgcagaagtcgaagaattcaaagctggtgaagttggatcccaggtcggtaatgatgctatttggtatcccaaacctaaatattatgtcttgtatgaattcccctgccttggctgaggtcaaagaggcaatgggcttgtactctatccattttgtgaatttgtcaatggcaaccatcacgtgagtatagcctccctgagctttcttgaaaggtccaatcatgaccagccccagcatgcaaatggccatgttacaggaatggtctgcagctgttgtgcaggtaaatgttgttgccttgataagaattggcaagcttcacatctctggactaactcggcagcatcactcttcgctgttggccaatagaaaccagatctgaaagccttcctgaccagagttctagatgttgcatgtactccacactgcccggcatggatttcatctaacagttgcttcccaatagccgagtgaatgcatatcatgaggactcccgtcacacctcttctgtatagtgtgccccctatgagggtgtagtgggctgactgctttgcgatgtgttccactgccgccttgtcatctggttcttcttcattttctatgtacctgatgataggctctctccagtcattggggtccgactctggttggctcaatgtgttgcactcttctgtctgatctgagagaatgctcgggcgtgatacttcttggacgaagatcctgggtggaacctgggcccgactagatcccagctccgacgacgcgtctgctgccacgttgcggactctttccacgtgatggaactccaaccctttgaatttgtcctctaattttcggacggctgcatagtacttgcccatggaatcagtcgagcaatcccaatctttatttatctggcttatgaccactagcgaatctccatataccatcagcttcttgatgcttagtgatacggtgatgttcaatccgtggatcagtgcttcatattctgtcgcattatttgatgctggaaataatagctggagtgcatacttgagttgttcacctccaggagcaatgaagaggatccctgcacctgctccctacaacttcagcgagccatcaaagtacattctccatacttcggtagtctccaggttgtctaggacctgatgctcagtccattctgatacgaagtcaaccagtgcttgagtctttattgccgtgtgaggtcgaaactctatgtcgtgagctcccagctcacatgcccacttggctacccttctgatagcttctttgttgtggagaatgtaacctattggaaatcctgtgactactatgactttgtggtcgtcaaagtagtgacggagcatgtgagcggttagaagtaccacgtatagcagtttctgaacttggggatactttacctttgagggcccgagaacttcgttgatgaagtaaaccggatgctgcactgggtatgtatgtccttcctccacccgctcgactactaacgcggtgcttaccatgtgagtcgtg

SEQ ID NO: 156263 - DNA, 342 bp, Zea Mays
ggacgaacctaggtgctccgtttctgatatgatggatcagataaaacgtcgaaggggtatgccagagccgtctgatttaaaaccaagggcggcgatcgcatcgaccgaagggtatacgttagccgctcatctcacatcaatggtcctgatcagaccgtagaccaaagcacaatcacaacccttaaatcccggatccacgcgcaagattttattaaacccgatctacggttgtggtgccactaaaccaaaatggaaaccacttctaatccgtgccgttcaacgggagatccacggcccatcggcccgtctcctacccccttctaccgaaaacgtcggtgccgc

SEQ ID NO: 156264 - DNA, 662 bp, Zea Mays
ctcgtctagagtggccgaagcagcaggtttcctcttctttccctggcctcgcagtggataacggtagtccgggtaaacaaagccaatagcgtcaaaaactctgttcaatctcttctttccccggcctccgaaggttgtggataatgcattatcttccgccttggaatacgacccaagcagctcatcactagtaacttcaatgcattttagccagtcatcgtttggttcatcgaatttatccccgtatctgaatgtgtactttagccggaccagatcaccttcactagatttgatgatggtttccttcggcatttcccagctctctataagcggccatactctgtatgctatgtgctcttgtaccaaatctcccataccaataaagaagcagacagtaccaaatgccttttaacatgcttcgacgccttcgtcaatttcaacctttggccttcggaggctgaagcgggaccagatgggtcgcataataacttccttgatatcttctctttcattcaagtcatttttcacataaaaccattcctccatccaggccccgggccaccttttctggtatgtcggtaccgggtagcttgcgttggggcgagcgacaaatccataacaaccgaagttgttatgatactgttctttccccgtggcctttg

SEQ ID NO: 156265 - DNA, 363 bp, Zea Mays
taacgctcgcaccagcctcagcgacctccccgccactgtacccgagccgtcccctcacccctcgcctgcccgagccatcccgtcgccgattgctccatccccgccatcatggcgagctcgtcggcgctcgccgtcccctcccttccttccccctcccgggcgcctataaaagggaccgcccgagctccgctttctccacaccagccccggccatctcctccactcctccccgggcccaattgagctagcgccgccgcgttcccccttcactccggtgagcttcgttctcgcctctctggtagctttcagtcgaattgctttagtgtttgagctccgccactccctcacgatcgcaatgcaccc

SEQ ID NO: 156266 - DNA, 540 bp, Zea Mays
gatgtgtggagggtggacatcgtgatccatcggctcggagggactcaggtcaccggaaaatccccgtcgttcgtgcgtaccgcggcggagccgcttcgctctgtggtctgctccgtcgtcaactcaaccgcgagtaagtactcccttccagaatttgtcgtggcctcagcatcggttagcaactagcgcggcgagaaatcatgcattgtaggccagcgagggaattccggccatggcgcgccaccgtgcggggcggcaccgccgtgcgtgttccgttgggggaagatcgtgcaccgtcggatccactgggaacggctccgattagatctgatgtacctattcgcgcttcaggttatgcaccgtccgatcgggatcgaatggtggacactcgtagctgggttcattaaatctgggccgttgatggttcatcatgcggtcctcactgcgtaccggttcgatgtaatgcagatctaatctgcgcccttcaaatctaatcagacggctcacatccaaccataccccttcgggcgccattctttc

SEQ ID NO: 156267 - DNA, 492 bp, Zea Mays
cgacggagtgcggctccgcggcggagaaggcgcgccgatgagcaattcacggcgatggggagctccctcctggttcgggtggccagagctcgatcccagggttcctaccaaaaccccacgactactctcgggtcgccaattccgggtggacacggctatccgccgcggcggcgacttgggtggtgcggtggcttcttccctgggagctacccagttgacgacgagggaacaggaggtggtcttgcaacggtaatggagacgaccacatttgtagccagggagtgcgtgagtccgcgcgagaacgagccacggcgtccgattcctacggcgagcgcggcggaggtggttgaatcgtgcgacattcgcgcggagctgggcgatgacagcgtggccctacgaggaagcgagacaatgcgcgcagaacggtggggtccaccagtcagtgaagggcaaggcgcgcgtcgcgatggtgtgactgacatgttgagccca

SEQ ID NO: 156268 - DNA, 1170 bp, Zea Mays
gagacatcgcgatgctctacgatctatagagatcataccttgtagagaaaacatgcgaaaacctaagtcagtcccctacctggcgcacctgcctaatcctatgaatgggggctactgtaacatcccaaaatcctaacctagggttgaaaccctaatctaccctttcccctccttttcatcctctaattccaagaactcccttagattttctttcatcatatgcatacaccttgtttaatcacaagcacctcacttagattctattttccagcacctagattacccacaaaataatttgttcaaaagaaaaagatgcaaaaagggaaataggaattagaaaataaaaagaaaaagagaaaaaccctttcccccccttgctgggccgattcccggcccaaacccgcggcctcgtctccccgcgcgcccgcactcattctcccctcggcccatttccggcctgctcccacgcgcacgccagcccgccctgcgctctccctccctctcactgacgaaccgtcctcacccgtcagccgccctctctctctcgcacgctcactcccactggcagtgtggccccgcttgtcagccgtttcgtcgtcctcccgccgtcccttcatcacggtcacctccagccatcacctctgtcccctcccccgtcttctcgccgcacagggaagtttggcaccgctccgtcctccccccccttgaccagcgtcctcgccggtaccgccccgccgtggtgtctcctcggcggtgctgtgcggcatttatggccggcgctgtgcagctcaccggcgctgcgaagctccaccgccccccttccctcgcgcgcctataaaagggccgccccgagctcctccttccccgcaccggccgcggccatccctctcctccctcgtccgagctcaattcgtggaagagtcgccgcctatgtcttcctccccggtgagccgtccctctcttctccctgcccctctgttggtccatcaagcgattgcttaagcctcctagcttcaccacaccgccacggacgcagtacaccacttccccaccccgatttctcgcccaaagctcaccgacggcaatcccgccgcgaagctccgccgcctccccgcgaacaaccccctccccgacctcctctgaccaaattgagcccacctctaggttcgc

SEQ ID NO: 156269 - DNA, 838 bp, Zea Mays
cgattttttcatgttgggtaattcaggaaattggaaattcgagtatgagaatcaggatccaaaatttaactgttcataacctttagccaaaatttcgggtccgaaatttcaggttcgggtagtcctaaattacccaattgtattatcaagtagtgaagacaatgaaactaaagtaaacattacatgtaataaaataacatattttttcaaacaagttgctagtctagtttcatagacacaccacactactcataagtctcatacacattgattgaagttcattgtttatatattagtacatcataaatttataatcacattacaataatacaaatatttgggtaattcggttaattcagaaaaatcgggtaccaggacttataatcgagtttacagccttgctatctgaattagtgatcacgtaattcgggttcaaatagataagatttaggttacagatagcacaagttagagcgacggatgttggtgcagccaacctagttactgtcagtgtagacattcaatgtagtcggtgatgtggcataactgatgaaaagaccaagatccgcatatgtgtttgacgacaacgacgtgagtctcccaagtatcatgcatgtacaggtagaccagattgacaacatatgtgatgttggggaggatgaaggttagttattgtagggcggtgttggggataaatatccccagggtcctcatgaacactaaaacatatcgcggtccgcctaacgagcttcttgccgagtcaccctatgggatgggccagcaggacgtttccaactctggcgagcccgatccaagctgatgaagaccgacgaccgag

SEQ ID NO: 156270 - DNA, 626 bp, Zea Mays
cgcggacgtccccagtccgaaggtcgtttgctgccaccaaatgtttccagccctcggtgaagcccacaaataacgggcagtggtggtaaacgacaggccataatctcttcttggggtccttcagcattataacattacagccatgccttctctgtctaactacattggaaagtgcacttctatctgctccgtgcttcccgacccgatcctgctctggaatttagtccttcgtaggcagtaaagactctgggacctcacagttactagacattctgccttcctgtttggggaggaaaggagggacacagaggcgggtttgggctcgatttcttttgaatcaccttttttccaagttcctttattgatggaaccagtatatcagactaacagtatatcctcggtcgacccccttattgatagaactagttgtgcactaggtacctactaggatggatgtggtctgcatcggtgcgtctaatagagttgatgaagacgcgaccaaacttgaatggcagacaacgagcagctccggtgaagggagcggggaggatagttctagtgacgacaatccttgtcctcctatacctccaaggaagaaaaaaacatcagatgagcttgatgccgac

SEQ ID NO: 156271 - DNA, 835 bp, Zea Mays
gggtggcggcgctggtgttgagactttccccccttgtgggctggaccccgagtgttgcccctcctcgcgtcctggccacgaggctgatcaacacctgaagacttctgagattccattatgtactgatgctgcatctccatgcctaatgcctgctctaccgtagtacgaaaatccagcagtggaaatacgcccagagcatgcctgatagagggtttcaggccctgacggaactggctcgccttttccaattcattgtaggccacatgagggacaaagcggaccatcttgttaaaacccacttcatattctgtgaccgacttcttctcctgcttgtaagactgcaaatctatcttcatcttctccaggaaagtgactgggtaaaacctcctttcaaattgcctgataaaaacatcccaggtcaggattcccggtgaagacgagtgagctgtctgcacgcctctccaccaaatttgagccccccttcaatagttgcgtgccaaagcgaacacgatccccaaacactatctcaaaagcatccatcttatcttccacataagtcagccaatttgccgcctcaaccggagtaccactgccatcaaaagtgtccaacttcatgcccatccactgtatcagagagaccactgacgagaaggggcacctcagccccaccacctagagcagcacccgcaaggacagtgcccccaggaactcctccactaccggcaccctgagcacccgcgccctgagcagcaccagcaggagcaacaggaatggcttgcctcagaatgaacaacttctgctgcatggcctgcatcgcgactaacattgccgccgg

SEQ ID NO: 156272 - DNA, 482 bp, Zea Mays
cagttacccaacgttcaatattttgttcaacattcatcatctatggatttcttgttttattcgctactataagaacacgattttaagagatatgtcttttattaacaaaggcggatataactacgcagggactcattgaattaattcaagtgaagattacctctagaatagatgtttgcccaacctggcatgaaggttcttgatttgtggcggagttcgtgctcgatcttgattaggatgagcctttggtcgagtcccattatgatgattgcgcgtaataggaaccacgaactcagtttgtgaatgtctgtgccttttctatgagtactttggctcattcagagttggttcagccgagggctcgagtcgtccacatattggcataggtgcatctgaagccttgacacgcatggacacataaactagcaagttgttgatctgattcaaatcttcatgggtttgcacgttgtccttcgatagca

SEQ ID NO: 156273 - DNA, 572 bp, Zea Mays
gccgggtgtcccgagagaactggccgagcacaaacttgatgtccactggggcaagcgagtggaggcttatgttgatgatgtcattatcaagacagaaaactcagagagctttatcgaggatctgcaacaagtcttcaacagcttgaggcgctaccgatggaagttaaacccagagaaatgtgtattcgaagtgccaactggaaagctacttgggtttatcgtcaatcatcatggaatagaagcaaatccagagaagattgaagccattatgaggatggaacagtcacggtcacagaataaggtacaaaggctcactggatgcatggcagcgcctgagcagattcatatcaaggctaggcgaaaaaggaatgccattctataaattgctcaagaaggtggacaaatttcagtggaccacagaagcgcaggaggccttagatgcactgaagaagttcttaaccacaccgccagtactcaaaccaccacgccgagctacgtccaatcagccaactgaagattgctatatatttcctgcacgactcacgtggtgagcaccgcgttagtagtcgagc

SEQ ID NO: 156274 - DNA, 728 bp, Zea Mays
ggctaactcgaagtgggttcaatcactgttttctggagtcactgacaatttacacaggagtcccccaagttctatttcttcaccgcccgtggtccccgacggtgcacggcgcggcagagctccggcgagcgcgtagaccagccaaatagggcaacggctggcgctcagcttcgacctaaaccaaattcattacctaacaaacgtttcccctaatttaattgtgcaaatggtggcctattctatcctgcccacgagaaccgcgaaggccatgagcatttgatcgcgttctcgatgattggtggtctctcagttcgaattggtgactcggtaagcatcacagagctatgagagtgctcaaacgaggaagcaggggacagggactgaccggaaaggggttggccgcggtgaagctgttcttcgcggtggcggcgacaaatttgggggaagtttgaaattccagagctcgggtgaaatattacgggtgggagtgggtgctaaggcttcacgatgacatagcgcagctgccccgaccatcaatttatagagggcttcgacggtggcgctcaatttggccgggcagagctggcggctggagacagagatgaaacatggcacagtgggttcgtgtcctcagtcgtggcgagctcaccggcgacgattggacagccgtagcgagttacggcgtcgcgctggaaaggcaaagccacgcgacacaaggccgagaggcg

SEQ ID NO: 156275 - DNA, 610 bp, Zea Mays
ccgattagccaccgtagcgccacaattcctttcttcccccaattcggttctccacgccgtcgtgagccaccgtgtcatggaccaccgtctccaggtcctctctcgtcctccttaccctcgtttcagcacccttgcatgctagggctgcttatcgacccaaccaattgaactagaccacgctagattaccaagaacacctcgggttgtcctcagttttcgctgtcgtcatggacagagggatttcaggctagaatcgtgcaattgatagagggattatggtcgcctagggtaggatttggtgttagccgagttagggcaccggccattgcgtattccggccagtacaagttcgcggagcgcgcatgccgccgttccccattgtggacctgggactgtgaagaaacggaaatgcgagggcctaactatgaatgttagagagaaagtgaatagtgactaggggttcttcaccagttatttgaatgaccgaggtcctctgttcaaagtcgccagcgctaaggggcctagatgattcacaatctccccctttttggtaattgatgacaacactacacattttatccaagagaagttttgattttcaaatcttcct

SEQ ID NO: 156276 - DNA, 459 bp, Zea Mays
ccaaaacatactaggataggcgagtaaacctctcaaatagtccattacactcgcttcttcaccttgctttagatccaaaaacgctttgaactttatttacgtaggggcttctggaacatggcgtgcccgaaatacctcccagaactcaacccgagaacttaacgtccttctagctgcagcgcaaggtattctgcccaccaactaaacttggcttctagtcttcaaaaacaagtaaaggtagcatagaaaggcaaagacagacaacatgaacaaggtagacgaaacacgtactaaagctactacatagggggtttaacttaaagttatatgtcatgatgcatgctcgtcctattcgtcctcacaatcttgccagcatatagtggcttgcacgctctatggcggtggcatacctactcactccggagttaactagtcgtaatttcctagagtttagtcagt

SEQ ID NO: 156277 - DNA, 516 bp, Zea Mays
tgggtggatagctccaaggggtggaatccgcagaaagtggtcaacccgtgcagagcaatcgcctcgatcgtatcctcagcccggtatccgaaggactcaaagttcagcgaacgccagcctggctgcaggggatgaggctccaaggtcatcctcaccctacagcggggcactcggtgcttctcgaactgctgcaccgcgtactgaggaggtgtcgtgtatccggccccctgaagtacctcccacaaaatacggggaaagccctctcgtgcaagcccgtcagtgtgggacagtgcattcccgtcgtctgaggatccgtgggaagtcatctgtgtacggttaagcgtaagtaaaagaaaaaaagaattataaaaagaaaaaggaaaacacaactcagcctccctctacatataacaatggtacgggggtacttagttggtcatcattttgtattaaagtctttacccaattatccatttgttttaatttaagaatgcatgcatgctcgtcctgaacgac

SEQ ID NO: 156278 - DNA, 485 bp, Zea Mays
ccgccggtgtgctggacatcactccggctagctgccgtgcctcccccttgctcaccgaacccgtggataaggttctcaccgccgttaagccaccaccggcgtccgccgcgtggctctacctttccaccgcatcgccgtgactcactctagctccccgttgatcgccggagcaattgccacggcactggacaccaagccattgcgccagtaaactttccctttctctgaccgccgcgcgtcaccgttcaaattcccggccaccgccctcccgtagtataaattgaccctgccgcgagctccgtaaggtagttaagcatccagccaccaagaattagcctcaatcgttcaccagggtgtgcgaattttgaacttcccccaaatccgcgcaagaacatcgtaggagagacctcgccgcggccagctcaactcaggtcagtccaagtccctcaattgcttgttctagcgtccctaggccctcctcaagc

SEQ ID NO: 156279 - DNA, 701 bp, Zea Mays
tgaactatcttctatttcaaggcacactcgacataattttcatgaagtcttccatctgagacaaggaatttactctgacatgcctatttctaaagttttggagataatgaaatccaccaacttggatgtaagtggaatatagtgattctttctgaaatgtgcgtgagataatgtcagcccaaattctgatctttttattctttgcatcatgtggaaccaattttacagaatgcccctactcagtcacttttgagttttgtgaatgccatccttgatcggatcattgaaaatgagaatggagaaattccttatgtaggctactcaaaagcaatacagttagttgtttcttttcatacatgagaactttggtacatttttgttttatacttctttcatccccttggataaaaagatagcattctttgcacagaatatcgcttgcttgttgagaaaggtaataatggagattgaacgccgcatttctactcaagcagaacacataagaaatgtaaggaatgctattttatacttatttttcaaattattcttgttgtaactcttacttgtatggcagcaaaatagccttatcagagcacgtgaagagaaatataaatcaaggataagagtactagaggcacttgcaagtgggacaggtggacaaatgcaaataaattcaagtgcggcaaatggaaaaataaatg

SEQ ID NO: 156280 - DNA, 609 bp, Zea Mays
tatgagtatttggtgatgtcatttgggttaactaatgtgccagcatacttcatgtatctgatgaattcagtcttcatgcctgaactggataagtacatggtggttttcatcgatgatgtcttggtgtactcaaagaatgaagaagatcatgccggtcatttgcatgtagtgctccaacatctaagagagcaccgtctttatgccaaactgtcaaaatgtgatttttggctgaaagaaatcaaattattaggtcacactatctcttaggagggcatagctattgatccacataaagtgcaagaggtgatgaactggaagccgccaacaactgtccgtcaaattcgaagttctctaggatttgccagttattatcgaaggttcattccagacttctctcaaattgtgaagcccatgactgaattgttgaagaagggagcaaaatttgattggggtcagaagtgcgaagatgctttccacaccttgaggcagcatctgaccacaacaccagtgttagcgcaacccgacaacaacaagccattttatgtgtattatgatgcatctggcactggactgggttgtgttttgatgcaagacaaccgagtcattccc

SEQ ID NO: 156281 - DNA, 298 bp, Zea Mays
acttcttctcccaacacttttcttctgtctcagtcactcgtctctctctaccacatggtcaccactccaatctctccaccacacagtcctggacgaggaacccgccctcatgcctcgctgttgcctcaatcttgcctcatgccttgtcgctaactctgatgcacatagacacctgcacacattcctagtctaccccttcttgcatggggtcgcgttggcctatgcatgcctcttcacacgcaactgggttcagactagcctcttctagaccgctacctgtcggcaaccttgtttcctc

SEQ ID NO: 156282 - DNA, 1035 bp, Zea Mays
ccggtctgggcatcgaacatggtaacaccccccaccaggtagtcgtcgacagacaactcctggcctattcccctagtctctgacaccgccgtttcaacaacacgcggtggcgaagacatcttcgcaggcgccgctggcgccgcgggggggcatcgtcgcagctggaatagccccctcgcgctagggcgcgatgtcttggcgtcgtagcacaggtccactagtcgaagcagggctttccgtttcttccactgggtctcttgatgatctttctccatcactgttgacacaatagcaccaatgtttcttctgtaaggaaatattttcaactcacgagccaaacgggacataaaatagtcatcgcaggtggcccgagaaatagggtccttcctatgccatcgacgaccctctgtaaccttcaacatacgcgaagatgtttcccggagctcgagcgaagtcataacctcaccaggcctggcgcacatccccatcaactcctcaacaaaaagccgagaggccttcggccccatcttttccccctccgtaccttgcacatctattttcctctttcgagttgctacgaccacaacctttcccattgaggtgccccctttagactgggtcttcacctgttttcctcggtcgtcctcggcattagtagagtccccctccaggtaaggatcgtagcgcaagctattcaattcaaaaactcggttcaacctaacgttggaaccatggatatcccagctcctcaacatctccgtcttcggcacatattttccaacaatattaatcacctccgactccacctcccgaacgaaggtggctgtgtcccgccctcgcaaatcgatggcaaaggtagggctccacaccatcttggtcacccaaagatgacatcgagcgaagcctgacttcgcccagaccccactcgtgagccaacggccacacactgtaggcaacaaactcttcaactaaatcacggtcgctgctcaaccgggctgcgtcacgaagggcctcctcgtttttatcccccttctt

SEQ ID NO: 156283 - DNA, 1037 bp, Zea Mays
ggagaaagctcagctgcattgaaacacttttggcttacgaagctaagttataaagagcatccctataagtccggcctgcttgacagcttcttgaactcttttggcttcttctaaagcatcatgaggttctttctcattccttttaatagcttcatcagcaatttctcgtccacccttcagccatacttcagaataaaatttcccacctaaggtagtagcttcggctaaagggtttctaacgtcatcagccgaaaaggcaaagtctgccttagctacagccttggcatgatcacagccaactttctccaaaatggacttagccccacaagcgccgacaaaggcacaaaagtcccctctgtcgctaagaatttcctcaaaagcttcgacctcgccatttatccactgaataacttcgtaaggatttccatgaatgaatttctgctcggaagaaaatgctccaactttagaaaagttgttcttcagatttgtagcacatttcatagcatttttccttagcagaacgaagctcatcaacatttttctgtgcccttgatctttcaatttcacatattttaccacttcaacattaaagttctcagttgctttgacaactttcttcttcagctcttgcatcttggcttcatgagttttagcttgagcagaaagcctggcttcgctagattttaatctttccactaaagagtgtaggatcttatctttctctagagcttcgtttctcaatgttatgatctccgaacgaaggtttcctagtgctattcgacagctctcatcctctgcatctttttgggccttcagagctttacttagaatcaagccctcgcaaacaaagagtgaacacataacgatgataagaaataccacaaaaatagttcatcgtaacacaaattacaaatgacaagccaaagtatacaaaccttcaggctattctaggcgaggctatctgcaagctgatccttggtcatcgcagacaaaccgagttcaagcttcggataccccatgttatccatcatttcacg

SEQ ID NO: 156284 - DNA, 1048 bp, Zea Mays
gcggcgtagacgccctggcgccatggccgacgcacagacgaggcgccccagcgaacgcggtggcggccatggccggaaatggccagatcgacatcccggcctcaagctttagttcaaaacgcgccacgtgatgtgtagaagaaggcgagagcaggtgaccagttcttaccggcgatggcggtgtgtcgcacgcggaccacggagagggattgattccgcccctgcttcaatctccgacagggaattcctcgactaaccgcccccgattaaatcacggaggattctccttgccagcagcaccccgaggtggtcttcgcagcccctacgccgacgtcccgacagcgacgcccacgagtttcaatcgtcgcggcgaaacctccccatacgctcaccacgatctccccaatattcgactctggatatggaatggtgggctggtgacgcggcgcgcgggtataggtataggcagggaaggtcgcgcgaaggtcggaatgcccagtacacacacggtcagcagaaatcgcgcaggagcgacggtgatttcggccggacgctgcgcacgtcaggatgaagatccgcagtaaccgggggctctactggtcagctgtgctgggatataagcctgcggctggagaagtcccgccaaggtggcccactggtcaacggcttgcggcaagcacagctgagggcgtcaacacgagtgcgggtgaggctgagcgccagggatactatggctgggcgacagggttggagacgtagccaggaacgaggcaggtatgcggtgccctggtgtgcatggaagctagctaacgacgggtcccgtgtagtgaccatggaagcatgaggccatgtgctttagcctgatgtcatgtgcgactaggattcataaaatagaaagaaaaaaatgtgggctcaatggaattccataggaaaagggagtgtgggctgattttgtttttcctattttatttactcctttctttttttctattttgttttccttttctcttttcctttctattcttttttcaacttaaactcaatttca

SEQ ID NO: 156285 - DNA, 2177 bp, Zea Mays
tgatcaaagtccgatattgaaagtccctaaagactgacaagagccgacagagctggagtgcggatgtcgctactcccctcacttcctctatagtgtcggctgttcttacggatcagcgggacttcttcctcttcttcctcttcatcattgtcaagcatgcatgcaacatcctgtgcacccttggcatcaacctctgaaatggcctttgtcgggacatcatcaggaactggcacggaagggccagcatcctgacccaagcatgacagtcgccggagccgccttctcttcctcttctcctcgacaggtgtagttgggcgtctcactcgcgcgcgaacgctttgggcgagcaccttcaagcttccgagtttccacctcttcaccaaattcctccccagttgtgatagccattggctcggtgcaggtagagtcggatgattcccccgccagcaggctaagcacaacatctatctcagcgtcatcagtgctagctggcatctcgaagtgagtctgcctctcatcttcgggaatgttctgaattgaagtaatcaaggctttgatatctgctggagaaggtcgcactctaagacccaggttaccatcacgagcaggagggttggacacaaactcagaaaatggcctgattggcagcaagttccaagcagaatatgccacaggagcactagcatttgaaattctacccctcaagatcatgtccagtcggctcatcaaatcttcagtgggaatcttcttgttcgtgacccgggtagaatcgttaaaaccactatacaaataagcagggtacgccctatccttcaggggttggatgttcttgaaaatgaaatcagcaaccacgacctcagcagtcagacctctgtccttcagcaagcataccttagcctctgttatctccgaaggagtcagagattctatccagctcgatgtgcggacatctggctgcctccctgaccgagagggggggagagacatgcagtggttctccacaatgaaccactcaaggcaccaccctttgatgttatccttgaggggaatgtggaggtactctgtctttctcctgcggtgaagctctaggcttgcgccgccaacgagttggtgctgtcccccagccatcctaggccgacaatgacacagatatttccagagaccgaaatgggggagaatcccgagaaaggtctcacatagatgtacaaaaatggaaacttgcaagatagaattagggttgagatgagtcaagttcaattcatagaagtcaaggaggccgcggaaaaagggagagacgggaagagcaagaccacaaataaggaaatggacataaatggcaaattcatgggtatcctctgtcggaacagtgaccccacgacaaattcgccaagagtagagctctttcggaagtaaaaccccaacgtcgacaagatgaaggaggtcagattctgagataacggacatgtggttacccgcgaatggcaactggctattggggtcgatgggtgggatgattaccgcgatagagctttgcctcttccgtttcggcgccatcgcaatctggccggcagaacgaataggagcaagatctcaggatggcagaggagtggtttaaggcggaaatgtgaagttagggctcagaaatcataaacgcatgtcggcacaaatataaatggggtttctcgggttgggcactacttctaaaaaagcgccaagtcattactcgagaaagcagaacttcaggcatgactcggcgttacctctaaaacgctagtattatcagctatcactcggcggttacctctaaaacgccagcagcatcaagcatgactcaacgttacctctaaaacgccggtactatcagccatcgctcgacggttacctctaaaacaccggcattatcgagcatgactcggcgttacttctaaaacgctggtatcatcagctatcgctcggcggttacctctaaaaatgccggaagtgttagatgcatggatgaactaccaagtgtgcatatagaaaaagcagtaaaagcacaacgctcactaaaagcatctgaagtccttcattaatattaaggggggtttacacaaacttaaattctgactcattatgagtcgaccttttttacccctaccttctactgcattacactaccctacgttacattactacac

SEQ ID NO: 156286 - DNA, 1635 bp, Zea Mays
gtaaacctatagccaaacataccaaagacaaaaaaaacacccaacaacctacatatggagcactggggaaacatcccacgtagcactaggcagtctattacagctcaattttctgctatttgaagtaactcctttttcaaaaagctattgataacaagccaattatgaccagcaaaagaactactaaatccaccgtttcctcttgcatcattagccactaggtcttcaattcttcatcgaaggattcttctagatattggcgcccatcctttcgagcgatcaaaaacctcctttgccatccctttgattagctggcttccttcctccatcattcttctttccttccttttctgcaaaattgcccaggaatccaaccagtgacaagagaggaaaacaacatcagaagggtcaataatccgtttattgttgaaacatacatcatttctagtcttccagatccaccagagcacagatcctaatcctacaatcaaaaggttcctaattctcttatcagagcctaaaagccaattaccaaaagtatcttcatgtttctttgggactgtccttagattaagaacaatctgaacaatcctccaaatatatctagccaccgagcaattaaaaaaaacaaatgatcagttgattcgaataaaccacaaaagcaacattctcctccccctttccacattcttttgattagatttcctttagacaaaattttactcctagctataagccacaaaaagattttatttttttggggaattttaactttccataagaatttgaaagggacttcagacagatcactcctaatttttttgtaaagagacttggctgaaaatcccttcttatctaaagtccaagacactgaatcgtcagcgccagtcaggtgaatatccctgcacatgtgtttcatttcatcaagattattcaccgtgtcaccaaagagtcttctctggatttttaaggcctcaaaattggagcaaatcaccttatccacacagatatttctgttttcagagatgtcccataatcttttaaaccggacgcagaaaggttgatcccctatccacacatcatgccagaaactcgtgcgattcccgttgccaaatttttttctacaaaacttgtagaaagtatctttgacattcatcagccctttccaaaaatacgagtcttcttgttttttgtcaaccaaaataagggggttccccttaatgtattttcttctaactatttgctgccagagaccctcagtggattccaacctccaaatccacttcgcaagcaaactgaaattcatgcatcttaaatcaatcacacccagccctccctggtctttggggagacaaacaatattccaatttgctaagtggaacttcctagaggtattacccccttgccagagtagtctttttctataaatgtccattttgtttatcaccccttctggcgctgaatacatagacagcatgtataaagggatgttagacaagctactattcaacaagagccctagggctgtccaccactccaccctaggagtgaggagggatggcagcttcctcagagtgacatgggcgtgagggtatagagagcttggctagtttgggagccataaaaccggaaggg

SEQ ID NO: 156287 - DNA, 666 bp, Zea Mays
ctccactactttcaccgttggcgatgaaccaccgactgtttttccgagtcaaaggagcttcagtctcttcctcctcatcatccacattagcaacacaaacagcacatccattggggtcagcaacagatggagcatccacattgggatcagcagcagattggggacacccattggggtcagcatcaacaagtccagttgcaggcatttcttcagtagcaggaaccgaggtaccagcgtcctgatcaaagctggatactcgccggaggcgtcttcttttcttcttctgctcatcagcagaaggatcaggctgattgactcggcaagggcgcctcgggcgagtactgacaggtttctgagcatccaaagtcgtatcaacctctaggaggggcaccattgccaacgccccagcaggagcagcatcagaagaatcctcagctagcaaatcgagcatagcgtttatatctgcatcactagggtgcaggggcacctcaaaatggacctgccgctcgtcattaggaatctccccaagcgaagcaaccaaagcactaacttcttcagcagagggtcgcactctaaggcccaagctgtcatcagtaatgggtggattcgacacgaaaagggtgaaggctttgggaggaggcaagttccaggccgagtacgccactg

SEQ ID NO: 156288 - DNA, 572 bp, Zea Mays
cagagataatggtcttgggtatcccatgcaaacgtaccacttggtcaatatagatctctgtgtatttttctgccctgtgggtggtatgtactggtaagaaatgagtcgtcttggttaacctgtccacaataacccatatggaatcatggtgttgggaggtattaggtaatcccataataaaatacatgttgatatcttcccatttctaggatggtatagggagtggctgcaaggtgcctacttcatcctagtccaccaatatagggatcgaaggtcatgatacatcttgttgcttctagggtgcatggaaaatttggagagatgagcctcgtccaagattctcttcctgagctcctgatccttagtaacaacaagtcggtcctcaaaccataatatgcccttgctgtcctagcaaaaacacttgtacttttccactttttgggtgagcatatccttgaagatttggactcccttatcaccaagttgtgtcatgataatctgatcttgcaaggttggctcaactgagatataatccagagttcccggagaaactacttccatgttcaacttgc

SEQ ID NO: 156289 - DNA, 583 bp, Zea Mays
agccttaaccattacgctagaggctcttttgcgtactcctgtgttgtaacaccatggtgctgtgcctctaactatcggtagtagtactgatagcctcatatttatatgatcctttcttcttaagaatactctcctaggcttatatttgcgcagtttgattctgtacatgttctagatccactgccagtaagcaattaatagtcacatttgttgacaatgtttccagagaaattcagatgtcatcttctttaaccaaaaggaaccctgctcaaacaatgtatgtttaaatctatgttggactcgaaggaatgtattgttgaaatgtaggatggttcagtcaatgtactttaaaccatcttttgttggtttaatcagcatctggagctaggaagtttggtatgtgaatagttcagtgagtgttgtttattctcaaaaatcaactatgcgttgattaatgctttgttgagatcaaattagtatccttgacttcaaatagcttggtcttctgtgaagttgacctatggccttcaatttgtgcttaaggcagggaaacatgtagaaagctttattgtttttcttaggg

SEQ ID NO: 156290 - DNA, 463 bp, Zea Mays
ggagccttagcttcttttcggtatgcaaagtcgtagcacccaaagtatttatggaggccatcttccctagccttggtttgataatgaagttcgtggactctgccgaagccttcggcatttgcgctcataccctggcttcaagagcccatatgtagacgatgagtctgactatagcgtttagtgtcacctgatgaagatacatctcaaatcttttaaatacttcaccaatcatcttgtacaacgggaatcgaagcccgatacggaagaagctcttgaaaaccaccacctcatcatccttcggctctagaactattttgtcacctatgaaccttatcaagtcatcatcgttctttctgaaataaccaagcttcttcactaaaactaagtcatcaagtttcatggtggatctgccaaactcaatatggctgggcttgcttggacttaagataccgacatcatcttc

SEQ ID NO: 156291 - DNA, 755 bp, Zea Mays
cacagttatctctaccaacagctggtcggtcccgatctcccgcgctgcgactgcgtgccgtggagcatggcagaaagcaaaggaagaatgtctcccggccacgcatgtggtttggcgcgcaaggcgacgcgggaataaacaaaacaagcgtgaggtaatgaccacaacgcaaatctcaaggcactggaacaatttttttttatcgttgtcccctgacacgcatgtcgccgtccgtccgtccgcaccgcgggtcacaacgccaaccaccgtagaatttgtggcccggccactcaactttgttcgttaaaatttccatctcgtgacagctaaattattttcgtctcgttaggctatagtcatcagatgactgtgagctggaggtcagagaaggatgatatgtgtgagctggaggttcagtggttgcgtgtgatcacgcatgaaattaccttggctctgctacgaggtagtattgggccttgccaaatgaggagcaagttctacgtaccggatcaggccagctgcttagccatattagcaagcaaatgacctagttgaatgctattatatatatatgtccaaacgggtcacccgacctagaccgagctgaacccggtgaagcctagcacgaattgggacaggcatagctcgacctggtttggtctacgggccgtgtcgtgtcggctatgggtcacggacgagacccagccacaatctgttaggctgttttatcgtgtcagacccacctgtggcctgac

SEQ ID NO: 156292 - DNA, 404 bp, Zea Mays
actgcctccactacggcaagcactggtagaaagaggaaatgcacatccgatgtctgggaggacatggataagattttcgccactgaaaatggtgttcaggttagagtaggagcaaggtgtcatttttgcaagaaagaacttgctgcccgttctaccattggcattggtcatttgtctcggcatagggacaaatgtaaacgactccatggccgaactgggaaccaatctatgcttagatataatgttgatggtactgtttttcgttgggaatatagtgctgaagttgcacgtgttcagttatgtcgtttgattgctaggctggaccttccattatgctttgttgattgtgttgcatttgatgaatacattaaaactgcccgtaatcctaggcattgcaatgtttc

SEQ ID NO: 156293 - DNA, 376 bp, Zea Mays
cttttccaaaagactccgcgcaaaagtcgcctacgggtgtagccggaataacaggtacgaaaaatcgaagtcttttctaaagaactccgtacagaagcctacgggagcggcctgatcaacgaaagcacgcagcttcatcacacaaaattatggttacatacatacagcgagggcatcacacattacattggctcaaccttcgggatgatacacatctccctatagttgaacaacattatcctcaattcctcacccgcaaacagacttcgcagctccccctcacccacactcgccccagctggcgaggacaacaattcccgtttgccagtcccgtccacacgaagatgaccaccctccatctcaccacgatgacgcc

SEQ ID NO: 156294 - DNA, 315 bp, Zea Mays
cgcaggcttttttggctcactgtaccatctacttacgtcaattataactacatgttatgctcaatcttgttacagtttatacacttttttggtgtgcgcatgtttcgtggcatccgggcccacgaaaagatcgtgtccccgcaatctgggcagccgtactagtccccacataaatattgatattacgatgtcttatgcttccatttatgatacagtaatccacgtgtcggtccatgggccttcgcgttgatttcgccagcagtttacgtgtatcgggcccacgaatccagcaaccgagcacgcattttttcagct

SEQ ID NO: 156295 - DNA, 455 bp, Zea Mays
cgacggttggggtggcgtggggccgaaggcgccttgttggaagcagcaggagccttgttggaggtcgtcgaagccccgccttgtggaggtttggtggaggtaagcagggcggcagatggagaagacgcacgatgagccatcgtgagttcctccaacagaagagtggcccggacatcgtggaacgtcggaaaggggcgaccgaggtgaagatgacgtccgatgtcggagaaacggtcgctgaggccacgcagaacgttgaggaccaacgtccggtcggatactggttcgccaagatcaccgagggcatctgccatggttttgaaacgacgacaataatcggagacaggtagatcaccttggacgaagtgccggaactgagcgtcgaggtggagggcgcaggtttcccgattcccgagaaactggttctcgagagtcagccaagtggtgtgggcagt

SEQ ID NO: 156296 - DNA, 507 bp, Zea Mays
caggggtctaggtgtcaaattcaggggcttaatttatactcctctctatatgatctggacggcgggttaattataacaaaaccgggggctctttagcaaaaacgacacgacgaaggggtaagtttgaatatgggccgcacgttccgattcagacggccaggattagattcccatataaacgcatcggtacagcgctggtgaccgcgagatcccagatctacggtccgaactgagccacgtcttggattagatcctgagcgctatttccgcgatcagtggctccgaatgaatcgatctccataatctaatcgtcaccacccaaccccagatcgacggctctggtgtcttcgtctttcctccgcccgaccagcgcggtggcgcaacatcgccccgcggtggagccctgccggagcacaccggttcagccactccgaaccccataacccgcgcagacccgtgcgtcgtggtgcgaaggccttcccgaatccaggggtgacgttttcatcg

SEQ ID NO: 156297 - DNA, 402 bp, Zea Mays
cctgattataaccttctggcccatcccgcaggacgaaccaatgggaggcccatcaggcgtcccatgatatgttttagtgtttgtgaggacccggggatatctattccccacagtatgcttggctcatctactcaccatggtgcaatgcacacctctcttggtggtggcagtgagcgcaatagccgatacaattcacctactagtggctcacaccctaagtgatgaaggactagcttagtgtggcagttgcaatctccatctccatggtctagcatggtgcaacaactgctacctttcctagccccgtggaggtcgcctacttaaggtaggcagggtaaggcagtcacacccccacaaactagggtaggacagtcacgcttccacaaactcgatgaagtcgta

SEQ ID NO: 156298 - DNA, 431 bp, Zea Mays
gccgtggtggtcgtgcgtccgggcaagcacgtcgcctagctccagtggggagcggaaccgtggccaggctccctctcggtgttgtcccggtggccctcgcagcctcgcttgcgcgacctgggcgataggaagaagacgacgtgggaggaagaaaaaaaatcagcctgggccatggtgctgtgaccaacggtggggatttgctgatgcctgatgggtgtcgcgcccgtgtggatgatctgagtcattggtcacatgatgggcgatccagatcggtatgcacttacctctctgcgccatctaatcgggatcgtatacttccaatccaacggtccctgttgcgtttcccttcgcgggtacatcttactaaagattccctgaacttcctaggaaccaacccgccatcccgtgccattataagacccttaccgttt

SEQ ID NO: 156299 - DNA, 624 bp, Zea Mays
ctggcggcatcattaccgtatctatgccatgccaaccgctaggatccgtagcttgagtctcggtatggctcgtcatgttgcgggtcctatagatgactagtgcacttagttctaggtttgataggtcatgagtgggccgcatgcctaggggtcgataggccatgagtggaaggaggattgattctcccgttgtggctcgatgctcggcgcagttaatgtggtcattcaattatggtgggtcagtcctgggtcaggcacaaatccactcgagtgtcttcctcttggttcaccctaccccgcttctgacttcgcctcgcatgatccaggggtgggtccttctagggtggacctttccctcgtcctcctactaacttgtggacctaggggcttggggatatttccccgatagtttcccttgagtccccaagggatagtgtctccccttggtggcttcccccgggtcaggcttagattgctccgtctctctcagcgttcgagtccagagggttggtaggatttgtgggacccgtcattggtctttcagggggccagtcagtcactataagtagagggtctctccgctatatccttaatcggctttgtccaatgcatttttgcccttca

SEQ ID NO: 156300 - DNA, 848 bp, Zea Mays
caatggctgccattgaggattccacaggtggccagcccgacacagggttaagacccatcatatgaagttgtggcctagtctgggttcgtttcctaagctggaccgccaccactacaagcctcataaagggagaaatcggcaacctcaactatagatccaggttcttgtgagtggaacccggaccctcctcgtgggtccatcggatccctggagaaaggggtacgaagggccccacgaccccttaaggaagacactctagttgcggcacctaaccaccgggtagctccaggcccagtatataccatccagaccttaggacaagtgaggttcggcgtcgccacgtgttcggaccggtgcggctaagacctggaccatctcggtgcgacccgggtccacagttagggagggcctgggaataccgtgtcaccacttattctcgagcatgccccttgtccaggcagaggtcttgtgccgacaagtggccagacgcacctgacgtaagccgtcggacgatgcctaaggtaagcctttgacatgtggctcaccagcattgggtgcagatgggatgcatacttacccatgcgagcagcgggtagcatgtcccctacattaaatgcgcgcgacgcaccaggtctgcaatgtgcgaattttactgtcacctgcacggtactgaggcaagaacattgacccaatgcaccgtttgtgcgcccttcattatgacttccattgttcttcgtgcgttattgaggcatgaagagacgtacggaggagacaagacgacaccgcccacacctacgcacgacagtgtatcagactacgccgcaacctacaacaagggctacacatgt

SEQ ID NO: 156301 - DNA, 746 bp, Zea Mays
aggagccgtgtaaacaccttttgttgccagtgagtatgtaagcgctgctcattgaggtggattaagctgcgctgatctgtatgaatgacgaaagaagagtgttgtaagtatgacctccagtgatctacagccatgagaatcgccaagtattccttttcatatgttgaaaggccgcgggttttgggtccaagagccttgctgatgtatgccaatggatgcccatcttgcattaaaacagcccctacaccctgatcacaagcatcggtttccaaaacgaaaggtttcgagaagttcggcaaggacaacacaggtgcttgactcagactagttttgaggcactgaaatgctgtgtcatggtcagaggtccaccaaaatgcagaattctttttgagtaaattggtcagtggtttggagatgatgccaaagtgaggcacaaactttcggtagtaacctgctaagccaaggaagctccgtaactcctttgcattagacggtttaggccaattgaccaccgcagtaattttactcggatcggtttgcacaccttctttgctgatgacatggccaaggtatgagatggagcgagttgcaaatgtgcatttggatagtttgacttgccatttatccttctgtaacagggacaacaccactgacaattgctgcaggtgatcctcaagggaagagctgtacaccaagatgtcatcgaaaaagacaagagcaaacttgcgaagaactggagataaagt

SEQ ID NO: 156302 - DNA, 416 bp, Zea Mays
ctactcgctgcaaaggcaagggaagaagagaaaaactgttgcttcggctaccactgttgtgccgaagggcaagaaaatgaaggttctgacccaccggccatgatatattgaaccgagcgtagtgcctaaatttgtcaaagggacctcttcaactgccgaagcaaaacaagctgcttccatggtgcagagcgttgaagagtctattgtaatgccgaaggtgcctacagtcaggccagccgaagctaaagatgatacggtcgaagagccaaaggtggaagaaacagtaaaaatgctagaaattctgagcccaccggtagaggcaaattcgtcgaagatgcaaaaaggtcctaccacaactcccaagaggaggaggatggccagcgtgctagatgctgttatggagaccacaaaggcct

SEQ ID NO: 156303 - DNA, 704 bp, Zea Mays
acgggcaaggccctctcacctagagaggaaggtctcagtccaccccgagcccaccatggagcaagcactcgcagttgaagaccgcctcctcgacaactgctagaatcacggtgttcacgaccgcctcggcggacggctacaccacaacaaccgacgacacgccacacatggctaccacccttagagggtggtcgctacgacagtggggaagatcgaagcccctctctcgagccaccaggtgcacaagtcttcagccgaaccattcatagggcatcgttcccggctcggttctgagccccgacttctatcaccaagtactcgggggataccaagccgaagctatggctcgctgactaccgactagcctgttagctcggagggatgagtgatgacaacctcatcattcgcagcttacccctcttcctgtccgactccacttgagcacggctagagcacctctcacccgcctagatccatgactgggaagacccgatcagggttttcgatgggaattgttagggcacatacgtgtgccctagaaattcttgggacctacggaagtgtcgatagaagcaagacaaaactctgcgagagtacatccaccgattctccaagcaatgcacaacataaccaactccgatctcatcggagcattcctcaccggcacctcctaccgcaatctttggtggacagaccgtgaacct

SEQ ID NO: 156304 - DNA, 470 bp, Zea Mays
gccgcggtaaaaatcttccgcggtgtggcatcaaaacattgaggtggcgctgcgcggttagtcggcggtcaccggaccatcgccgtggcgatagcgcgcgggtaagctcgccagcgcggttacaccgccgtgaacctcatccaactccggccatcggcctataaattgagcctgaatcctgcttcttcaccacatcatgcacacaagcacttgagcaatcgactcaatttcaccagaagaactcacaaagtccacaaatccattccgccctgttcttcgcgctgttgtgaaggactcctccgtggccagcactcatcgggttagtacctaccaaattgcttcctgttctagcttgtcttcaaccttctattgctctcggagctggtcaattaaactttatcgaagcctacactccggaacaccaaatcgtcccgtagaatgccgccgcgacgccctctctatcgacccgc

SEQ ID NO: 156305 - DNA, 1164 bp, Zea Mays
catatggtggcaatccaaacctttgttattgaagatcttgtgttatgttgggttgttggttgagggtataggaagcaccccattttaggtttggtatgggtttaggcgaccaccatgatatcagggcctctatggagatttaacaaattataggttaacgagagaggtcatagtgtgggagtgtgtatgatgcgtgagagacaccaaatttagagaggtttaggccacaagagcttaataacatatgtccactaagttgcttgattgtattgcttggaaccggaaatggctaagtgtgtgtgcctgtctaggtgtcctagacttgtgttcatcccaacgtggttggctttcattggcctccccctatgaagggtcccctctaccttttatagttcaagggagtgggggttacaagttatgttgggtcggtctggtagcttgaccccacctaatgtactttcgaaagtgtaaatgtccatctttgccccgtagaattgtcacccacacatcacagtggatgtcgttaccggatgtggcaggtgccgtccatgcgtgtgcgcacaatgccacactagcgccacacctaggatgctcaggcctaacagccagcatggagtaggctatgagcacggtcatgcatgtcccgtcgtataggcacaacaactctcttccaccaactccttgactaaccgtggcgtgggcagctagaaacatggagttcccagagccctttaggggcattgaggacctaagggcatatggtgcatcctattgtggttggtggagtggctctggcgagagaccccaaacacatggcacatcggaaccccattagggacaagggctaccagtgatgcatgtcacaaccaggcctcgttaatggattggagagggtgtttcaagcttgaaggttggttaagacgtgtgtggcagggtccaacttgaggaagttggacatgctcgaggccaagatccatagatggatctgcgctgcctgtggcgccgcccgtgacttctttgccaccaagagttgcctcttcttccacattttccacaaccttctcatctctagtaccaccatcatcgctgcctcagtgcttgccacacatgacaacccttctacaaggccgacaatgatgccttgttgcagcttttcgatgccac

SEQ ID NO: 156306 - DNA, 640 bp, Zea Mays
aaaaaacttcggtggtggcccggcgagcgccaacatcgaggatgacattgaagattgtgatgctgtcagagttggtggtcgtgcgcttgatgaggatgaagaggaggaaaaggaagttgtccctttggttcgcaagaacagccgcagccatagcagcaatgacgttccaatgcaggccttatcgggactagttagtctcgaggggttgatgatgtctgccattgaccatgtactagagtaaattattcctgaagaccttttattggagcctcctaagactgaaagttttgtcgtccgtacagaggtcccggatgacgtccctttggctggtaatccctgttgggcaagaactaacacggacagtttctcatgcttcttcgaccttggagggcggtctagctcgcggggacacactagctcttgacgttgcaggccagggtcacccggcacctatgggtacgaccgagggtgcttccgcttccgaaggtgccgctgaggataacccagaccccgaggttggtgctgaggatgatccagcccccaagggtgccaagcttggttcctcttcggctgcctccatggatgttcatatcggatctccaccggtacaatctgaggaacctgtggtgatgagtccgcc

SEQ ID NO: 156307 - DNA, 540 bp, Zea Mays
ttcaaaaatgaatacatcagttgaaaggaaagccaaaaaaaaagaagtatgaagagaagtagatgtagtagtaaggcatcaaaatgggaactgagtggtagtgctcctccagatgaaaaaagacatttaatttgtattgtaatatgcattctcaacattgccaacaacagtacattgctttccagcaaacatcatcattagcaagtggaagataacagaaaatacggagcaatataaaaaaatcaaactatataaataaggtagggctacaacctgggatatcaaagtttcatgttattcattgatctaatggaataaagaatataaaaaagatcactgattccatctgacacaatacatcatgcaactgaaagcgctgtatttttatttctaattaaaacccctgattcggctaaaatgactatatagtttgttaaaaatgtgaatataggaaaagcggccaattcaagctcataagatacttttgtcctcttattgaacaaaatcaaataacatacagcagtatctgatacaatacat

SEQ ID NO: 156308 - DNA, 395 bp, Zea Mays
gggacggataggattagcatatgcgtttcctcgcgttgacagtgcggtggccgtcgatctgagaatggacgacagggattggcacactgtgtaccgattcaatcagatcaactgagaccgtggattttaattggatggcccacaatcgagttagggtagatggatccttatccgtcgatctcagatcggacatctcacgctgcgtactggttcgagttaatagagatctaatctaggcgcctcgtttcagatcggacggttgtgataaccctataccctttcggcctcgtcaattttgctaaagagcccatcgacttcttatgaatcaacccgccatccccaccagtgcaaaaataatgtaacttaggtcctggaattcgcagaacagaccctag

SEQ ID NO: 156309 - DNA, 474 bp, Zea Mays
ggtgttgctcctccggccgttggtggcgttcatcaaccggcgcaacgcggggcggcaccgcgtcggcaactgggagctggtgctgctgctcgtcgccgtatcgtggatcggcaacttcccgcagcacgtggggtttgacgggatgccggtgagcctcctgctggggctggcgttccccagggagggccccgtggcgaggagcatcatcgacacgctcgcgtacccgctccacgccctcgcgctgcccttctatttcggcgccatggggatgcggcttaacttcagcgccatgtcgggcgccatcctggtgccggcgatcctcctgacgctgctcggtttgatcggcaagtgcgccggcaccatcgccgccgccaggttcctcaagatgccgaccgccgacgccctgcgcttgggcgtcctgctcaacatcaaaggccacgtcaacatgatcgacatgagcttcgccagttccga

SEQ ID NO: 156310 - DNA, 924 bp, Zea Mays
gaaaaagaaatcagcaagccacaataggaagttgtgaagcagaagaagatgaaagtggccactaatgccgaagggcaactttagggtccaaaagcgaggcgaccaagaagaaagttaggattaatgaggaaaatatttttattgagccaaaatccacaaatgaggagaacaaccttcagctctaggtatggatgcttcaaaaatgatagaggtaacaactaacccttgccttttgggcaggtagtatctatgaaaccaaagctaattcactttgcttctttaatgaaggagaagggaaatgatgataaagtgacagaggtacccatccaagatgaaatcctcctaggagaatatggctagagctaaagctagttggcgtcaaagacttagatgtggaagtgttaaaaatgccaaggaaagctagaggcatgactttggtgatggatgtgctcttcggaactctgttcgtcggggagcccgtggaaaaggtgtcaagtccttcgataaaagatggagatgaaagcatagtggttgtagcgtagccaagagcagccgaagccgaagatgttgctaccagggagaaggttaccccgtggaaggtgtcgaacagtgaagttgatgaagccagggagccacgaggagaaaaaataaagttaattgaagaacaagtacccctgcttgaaggtgcaaagaaaatgaagcaaattgagtatgtgcttcatcatgcagctgaccaagtgctaacactgaacaagttgccaaggtgcagacttaagccgaagggctagggcatctggcaggagcgactatgtttggtggcagtgatgaagactttttgtacaacctgccggatagtaaagagattgatgtggcccaaattataatgaataacaccggacatccaaaacttgaagacaaattatc

SEQ ID NO: 156311 - DNA, 482 bp, Zea Mays
gtattgagctcaggctgctgaattcatggtcctcatttacctcaaaattcttgaacctttttaattaaaattcttgattttttatgtgggtgctcggggaaaccatccccacttctcaacctgggctcataattcttgcttaatttcttgaattcagcgtttcttggtggtgcttgattattgccgtctgatattgcacagtcctgagtttctagttgcttcgtcagcaaccggtagaggtgtcttttttgcgggatgatagaattgagcttgattgcggtggagcccttttggatttgcagccgattcttgaatcttttcttttctctctctccttggatgcctgcatgaaagccatgctcttaaagcacggttccttttcttttcttcctatcagtttactcatttcttttctggaggtggctcttgtgttggattactcccttaattactctcttatatactttatatgacaaaaatct

SEQ ID NO: 156312 - DNA, 548 bp, Zea Mays
catgatgatcctacggagctcatggtggcctcaatttataggaggcaagagcggtggccgggaattcgagcgacgacgcgcggcggtcggaggagtggaaggttactggcgcagcggattggtgtcctatcaccgtggcagtcattccgacgatcaatggggagttacaatgggtcacgacgatgcggtggaggtgccaaggcacgtggcacaagatcgtgaggaggcagtcaccgacgaggttatccgaagtgaccgtggcaagcttggtacggtggctggagtagtttaatggccggagtttatccacgacgaggattcttactcgatcccaggtgctatccacacgatccgagcacgaatcacggcggcatgagcgagaatccgtgcgcggctcgtcggcggcgagtttctgaacttgttttccccgatgcactgtaccatggcgaggtgggttcagttggcctgacagatcaaattcagggcaaattttctctaaattttgtatggcaacacatccaaggctctgcagcaaaattgtagcccaa

SEQ ID NO: 156313 - DNA, 386 bp, Zea Mays
tgtttgactaataacttgtttgctcggagtgttgtaaatacttccctgacatgctgtaagtgcgctgcccaggcagagttgaataccaaaatatcatcgaagaagaccaggacaaacttctggatgaagggtttcaggacatcattcatgaggggctgaaatgtggacggtgcgttggtgaggccgaagggcatgactagaaattcgaagtgacctcgatgagtgcggaacgttgtcttctcaatatcatctggatgcatgcgtacttggtgatatccactgcggaggtccaactttgtgaagaagcagacaccgtgtaactcatccaagagttcgttgaccaccggaatgggaaacttgtccttgactgttttggtattgagggc

SEQ ID NO: 156314 - DNA, 485 bp, Zea Mays
gaaggtttggccttctgtggaactgcgagtttaaggaagccctcgaatttcttggtgggtcctttatccgcttggagtatctgcctcgaggagtttgtccaaaagcattgcgacgaccacgatgttctggcttgctttgggaagtcgcggcgatccagtctcgttgtaggtccggcggaggcaggcgatagccagtatggcgcgcgttggccaaaaaccccgtcgcagccgccttgttagacgtcacggcagcccctggctcctagttatggaacctcgatcgccctgagtggggccttgctctggcgatagttcctgggatggcaggtcgagtcaaggcagggcgaatgttacgacgtataccacgacactagcgggggcctcttttgggttctctgcgagcacagatgggtcccctgtcaaggtgaccatgaggaatgtcccccctaatggtcccctaattctatagaacctgttagttttta

SEQ ID NO: 156315 - DNA, 460 bp, Zea Mays
gtggctttttcttctgttgccttctcttcaaattctgcaggcttcgtctcagtaggcactgagggccctgcctcggtttcaacctgggttgttgtagcttcaacatctatttgcttagtatcagctttgggttgcgttttgtaagcttcggcaaccttccctttgggagcgagacttatggagtcggttgtttccagtacatctaatacatttaccatcctccttctcctaggagttatggcagaactcttttgtgccctcagcgctgttgcttctgttgaaggacttaaagtccctggcatctttattatctcttcagttgttgacctttcagccttatctttgtcatccttcgtttcaactaactcaaccgaaggtgccttcggcattgtagccggttcttcagccctctgcatcagaggagtagtttctcttgattcagcagctgaagaggcctctg

SEQ ID NO: 156316 - DNA, 334 bp, Zea Mays
tgttgcttgagatccacggcggggtctgtcgccattatgccgcacccagggcccttttcgggaatgcgtttcgataaggcttctattggccgaccgtagtggtggatgcagtgcacatcatgcgcacatgcgaaggatgccaattttacgccaagcagacacatatgctgtcccaagccctacaaaccatccccatcacgtggtccttagcggtctggaggctggacatggttgggcccttcaaaaaagtgcctggggctacacgcatttgtttgtcaccatcgacaagttcacaaagtggatcaaagcccgaccgattgcgtagatcaagtcc

SEQ ID NO: 156317 - DNA, 939 bp, Zea Mays
tggaggttggcgaggtggctggtcttcctagtgcgaggaccaagtgtcagcgacgaagggtggtgtcgaagcatagtgtgggcgagttttcgtggagtggtaggcgccgtcagatggggaaggagcgggacagtctttgagtagaatattttggtaaacgagagctattgtcttcgccgattgggacgagcattggtgaggggatctgcggaatctttttgagggtgaggaattgaaaataatgttgttcaattataaggaggcgggcatcatcccgaaggtggagccgatgtagtatgaggtgccctcgctgagtgtataaggtgccctcgctgagtgtatgtaattgcaacttgtattgtaatatggcctgttggccgttttcccgcacttgtgctaatccggctgcaccctggggcgacttttgcacggggtgtctttttagtaaaaaacttcgattgacgcacttattgtgctattccggctgcaccgttaggcgacttttgctcggagtgtctttttaataaaaaacttcaattaacgcacttgttgtgctattccggctgcacccttaggtgacttttgctcggagtgcctttttaataaaagacttcgattaacgcacttgttgtgctattccggttgcacccttaggcaacttttgctcggagtgtctttttaataaaagacttcgattaacgcacttgttgtgctattccggctgcacccttaggcgacttttgcgtggattgtcacacgcgagggtagtctatgctacctgtcgcggtgacttcgaagtggtcgaatgtcgaagactgtcgaaacggtctttttcgacatgttgcgtctgagtttttgtttttgcgggggcttttgctggtatattacatggctccgcctcgttaaaaacctcacccccgggaggaaaagagtgcgggc

SEQ ID NO: 156318 - DNA, 491 bp, Zea Mays
ttgtatggaagaaagtgccagacccccctaatgtggtccaatgtaggggaaaggacactagaaggacccgactttgttaaagaagccgaagagaaagttgccctgatccgcaagaggttactagaagctcagagtcgatagaaaagttatgcagacaacagacggagagaactcagatttgaggaaggagatttcgtatacctcaaggtctccctgatgtgtggtgtcaaaaggttccaaatgaaaggaaagctagcaccgcgtttcgttggcccctacccagtcattagcagagtgggacccgcagcataccgccttgagctactagaatccatgtcagatattcacaatgtgtttcatgtgtcccagctccgtaaatgcctgcaagtaccagagaaccacattgaggcaaagacaattcagattcaaaaagatctccagtaccgagaaaagccaataaagattctcgactcagcagtccgaaggacccg

SEQ ID NO: 156319 - DNA, 524 bp, Zea Mays
cttggtaagaacagccctagcatacttggagcctcctcctctccgtgattcacgtacccacgctcgatactaggaaatggggagccgggcgggatatcactggtggtgtggtggggcatggccgcggcgtgcccgcaccagtgctctgctttccgtcgtgaggtggaaggaaatgcagcagccgttagatcatgggtgagcgatcacgatcagggcatggctgggcctcgcgtgaaccgtggatctgggaggtatcggctgtgattagatcacacgtaacgtttcatccgaatcgatccgggtcgtctgatctggatcttgcatatgaggatcgatctctattattttaagcgtgggccgtttatcgtagatccgacgatctaggatgcgtaccggttcggcgggcaaatcttctactctgggcgcttggctgatgatccaaggaattagtcacgtgtaccccttcaccgtgactaacttataaaagagaccccagacttcttgcaaatcagcccgcagtccgg

SEQ ID NO: 156320 - DNA, 2100 bp, Zea Mays
atgcatctgcttaaatcgctcatgtcagttttgtagttaccatttaactcaaacattaacacaaaacaggggagatcaatcaaacaaaaaaatattgacttatgacagctctatggattgatttattcaagcacatagggagtaggttatcacaggtaagagatgatgtagcagcttgttcgaggccatcacagaacagatgaaaatctgagcggcacggagaactgcatttttgttgtcgccaaccttcaatgcaaagatcgccacttatctggcccctttgctctgcaaattggcttcaccactctgaaaccatattcatcaaaactgattcaaagcaacaaatcaaaaaaaagcaacaacagaataaaggtaaccccgataaccacaagcagcaattagatttgacctcaaataaaattcagttcacatcatagttggatctgtcgacccacatcatccaattctcaagaatcactaactccacaaaactcaacgaactaagtatcacattaagcagcacacaaaaaggagacagaagaaagcacacaggtaagtaaaggctcagataaacaatgggtagaaagtttgcttgtcagcccaaagagagaaaaatccctcattcagagtggtgcatgactttgcatcatcattgcccttataacctagctttcctctgcatcacagaaagaaaggggaacaacagaagagataacagataaaaaatcaagcagtaacacacgatggcaatcaaaatataggacacaaaagagaaaacagatccaaatcaaacaataaaaacacatgcagaagaaatgacgacttggccggctccaccagacagacatggtgacgtgccgaggcaaccttagccgctgtaacataatagcatgagtgtattgactacctagtaaagcagaatttaaacaagacaaacaggtatataatacagtttgcttgcccaaatcaacgtgtcaataattttttcaaatctgtaacatagtctaacactgttcaccaacctagcgaaagatagatacagaatcacctaaatagaaaggcatataatgcagggcccaatacaattacacaataatcaaacagaactatctcaaactccaaacatttgccacgcgagagaacgcaaatttaaaagacacaaataatgaatgttgtggtcattggaggcaaggctgtgaggaagcgattgatgagagacccatcagccaaagtacagcctcgtactatgagaccactgcatttactctagggccccaacatccgagcaccccgcagagaacctgcgggcatttcgaagctaaaaggagagcttcccccaaatggcatggaacccttagacataaacaacagaagcatcaaatcaaatacagaacaacataataccgcagcttcaaatcctgattagatagcccttgaaggtttgcatcaccaacatacaagacacaaccactagcttgcattaaaactgacagaggtgtgtccaacctgacatctaaacactcgcatcatgtaacactgttagatattcaagccagtatttgcgtcactgatagagaagcattcaagctgacatgtaaactggtatgatatccaacaaccagcacaccacacagtcgaacggctgaggtgagcaaggcattctacctcggtctagagtcggacactgctggggtcgcttgtagccaatgatcgtgccccgcacgcacgtcatgcgccagaaacaaaacggcggcggggtgggatcacatggctgcttacccggcgggaggaggggggacgtaatcatcgccgccgccggagtgccttacgacgcggttgcgagtaaggggaggggagtgacggcgcggcgaacggaaccctagttagaagatgtgggcgggcgggggttttaaaagttgccgctggttggttggacggctgcgattgcatcgagtggagagggctcgtgtccgtcgcgtcaaatggacctggcctagggttcatgcccactgatacttcagtatgggcctacaaattctcccgggctgcgtttcgatgcccaaatggaaattgtggtacgatgctatattttgcataact

SEQ ID NO: 156321 - DNA, 431 bp, Zea Mays
ttttatttaaaagacactccgcgcaacagtcgcctaagggtgcagccggaataacgttaatcgaagtctctcattacaaagacactccgcacagagtcgcccacgggcgcagccggaccaacacaagcgtacaaatacggccaacatgccacatcaccatacaaattacaattacatacacacggcgagggcatcacatattacatcggctcaaccttcgggatgatacccatctccctgtaattaaacagcattatcctcaattcctcactctcaaaaagcttccgtagatccccctcgcctatgcccgccccaatcggcgaggacaacaattctcgtttaccaacctggtctactcgaagtcggccacgctccatacccatgcgacgacgcctgccgctccgcgaaaattcacccacactatgttttcc

SEQ ID NO: 156322 - DNA, 567 bp, Zea Mays
gtttagatgggaagaaggggcaccaaaactttagaaaccatggcttaactaagtgatgatcatgatgggatggataccctggcttttcatgtatcttcactttgaaaaagactctaaaaccctagcacccccttgagccattaaacccccaagcattggattagtgagaaggagaagcaaatgaccatttcatgacttgaaccctataccaaaacggaagtacacttatatatctacgggaaatagtaaggaaattgttccaaaaaggtcccacaaaacccccaaaattagcccccaagtggagaacactatatagtgactcacattttttctaagtcaaaaatcagcccactcccaaagactggagatgttcattaagttgttggcgccaaatccttaagatccaaatgacaaaaagaagctaaactacccaaggcacacccctgaaaagtttgaacccaaaccagaattgtttgacacggtttgacacgaatttgtctcggtttgaacagtgcagacagacatgacttggcgccaccatatcttccaaaccagacccgatctccc

SEQ ID NO: 156323 - DNA, 699 bp, Zea Mays
cgaaaccctaaaacgagtagggaaacgatccgtaccggggggctccgcccccccgggcgtccctatggggcggagcgtagcgatccaacttggtcgccttcttcaaaatctggattacaaactcaacagaccaaacatacggttcgacctgacctggcatggccacatggtcacgtacttagcacgacctcaggccccgcacaggtagcctttgggtcatctcaggcctaccgtcgtgtcggactgtcgactcaagcacggctcgtgagccaatcgtgtgggccgagctataccgttggcccaaacagccagtggtatagagtcaggcctagcctgaaaaccaaaccaaacataataagtcgtacactccattcacctttgactgatttacttgtctgctccatcaccattcaggctctcaacgacagtttcagtttctattgtgtccttctcaagactgtgttgcatatgcggatcttctaactctcagtctttgatacatgataagacctacaccatgttcggtgtaaagccgtcggcgacgcacctcgatcaccgtgccaaccagactaaaagtagattctgaaaactgacatctaattgattgacggtatcactatcaaggtatggaaacaactcagattgggcattagtaggccaggaagaaagtagactgaatattagtagtaccattccgag

SEQ ID NO: 156324 - DNA, 671 bp, Zea Mays
caaacatgtattgatgtgcatgtgcatacgtgacgatatatggatggagagagggcgaccgggaccaataataataaagagaagggccggctccttgtggagtcggagtcgtgcatcgcgtgctacttactccctccgtccacgaacgttgggcgttctaaagattctaagacagattagcacctctaccaaaagacgcatgtacccttgtttttttgtttgattacaaggttggagtaattacaattaaagctaattacaatctacagcagcagtatccaagcgacttgcacccctgcagaagcattttctggcgccaaaaaatgtccacatccctccttggcgccaagcgacttgcacctctgttagccataaaaaatgaaaagttttcagaaaagtttcacatggcgccagttgcttttgccaaaatcagaaaactttgacatggcgcccaacaacctgtacataaagctgctgcaacctgccacaagccgccaacaccacccaagcgtaaagagacaccatgcctttgctacctgatctaaatcattctgcatccgtacctgatctaaatcaagctgcacaaagcgacacccaagatattagctcttctatccctggtaagttcatcataaaccagcaacgaacattagctcagctcattccattgt

SEQ ID NO: 156325 - DNA, 492 bp, Zea Mays
cttctgttactctctcccccacttcttcttccttgaagacacgccattgatggcgttaaaaccggctgttcctcctcagcgatcctctccctccctctctctataaattgaagccgactctctctccaatccatcccaagctcgcctctcgcgccctcctctcttgccgaccacagtgtccatcatcaccggagcagccgtatccgtcgccggagccccgcccgacgtcaagaacccctgcccgccattgccgtgtacctctgctgctcgccgtgcattagcacctcgccgccagcccaccagcccgcaacatcgtcaccacgtcgttgtcgttgctcgctgaagctccacctatctcgtcgtgctgcgatccgcgcaagcagctgcaacgagtttgtcgtcgacgaccccttggagttcgcccacaccgttccgctcgtcgacactgtgtacaaattctgcgtcaaggccttctattcccttccgaccgaa

SEQ ID NO: 156326 - DNA, 608 bp, Zea Mays
ctcaattacagagtccacaagcttcaaaattcacaacttttgtaccttcaaactgttgtatgcaagactatctgcgagatcgcccttcgtcatggcacaaaggccagcttcgagcttcagaaaacccatacttctggccatctcccagcagacggataattctttgttgtccgggaggcagtacaagaaatcatcttcattcgtactgttaaacactaaggccccctttgggtacttcagttctcgggcatagtgtttagcttcaaaaatttcttcttcggataatctctttcccgaagcatgtcgaatgatataatcaagatcttcggagagtgcttcaaggacaagggattcggcctctttggccgcactcttctcaaaacctatattaatatctggagttattccttcggttctgctcggtggcggcaagcttcgtctcagtaggcactgtgggctctgcctcggtttcagcctgggttattgtagtctcgacttctatttgcttagtatcagctttgggttgtgttttgtcagcttcggcaaccttccttgcgggagcgggacttatggagtcggttgtttctaaaatatctaatacatttacc

SEQ ID NO: 156327 - DNA, 1250 bp, Zea Mays
tgaaggtcggtgtcccttgcatcgaaggtaaggggaatgtgtgaccactttgtttggaccactgggtcagtgagagcgacatgattcacccttcggtagtgatctttcttctgtcgtttgttttcaaactctatgctggatcctccggtgatcatatgtattaccccctaaaaggtgggttggagaactcttcttcttgttttggcggcggagggggttgctggaaaggtttgtggttttgttgtggtagcggagggggtggcgactgtgctaatctctcttggtcatgtatccttggaaattgagcaggaatttgtcacagagggttttccatgagtcgaccgatagcggtggtagccttgtgtaccacgtgaggattgggccttcgagaccaatgatgaatgactttgccaaggtggaatcctctccccatgaagatgccatggcaacttggtagctcattatgtactgggttggatctgtattgttattgtactttgggtaggtgcctgctcaatagttttgcggccatggggaggcctagagttgtgctgatagggggctttgctcgtcaaggtactttatccttggaaagcaatttgcatgtgggctagcctgtggtgataaacatgattagctgctccaattgcttgctggtgaggggggtcttcgcgttacatgtcggtgatttcctgctctagtgcccttgatttttcctcctcgtccatgatcagttgcctcactctggcctgcatattggttccttgtcttttggatgcaaggatctctctacttctgaaggttgctgttttttatgcgaagggcccgtagcttgagctggtcttcggctaagattcctaggtcttctccctcttgcaagatatctccatcttctagggctaggagatgtgccgagggcgcaaatcctggtggtgggtcgtcataagggaggtcttcagagctacatgtatggacactttcctgtggtgtgggttggtcttcggctgagggggcttgttgttggttgcctccgtctcgttttcaactgtggcgggtaaggtgtcatctgcgagggctgctttgcctttcttttcgacgaggactacttttgtggcttcatcgagggagggcctggctctggtggtcgcctttttgggaaccaccaggggtgttggttttcatagcacatatggtgggcaccgaatgttgggaccgttggacacatgtacaggtgaccccatacactcgtg

SEQ ID NO: 156328 - DNA, 490 bp, Zea Mays
cgcttggttctagcccttggctcctcaccgcccaaacaaaaacccatatcctgataatggctttaggggtaatctgatgaaggaaaatttcgaaggtcttcagcacttcaaccaggaatttgcttaacgggaaccgaagccctgcattcatgaagctcctttaaacaaccactttatcttcttcgggagcaggggcggcactatcccctccagctctcacaatggacatatctcgaaaatatcttcccttcatggcatcaatctgactctgtttgatggacgactttccgaagatagtatgacttggccgccagggccgatcttcggcatcttcgttcccactatccacataaaagttctcgctatcatcagaatcctcggacaacgcagctaatatttcattcgtaatcttttctgtgtttgtcttttccatagcttcgtaaaacccagctagagcagggtccacaaccttcttctcctcagacatctt

SEQ ID NO: 156329 - DNA, 488 bp, Zea Mays
taatcatagagagtagagcccctctagtgagctttttagatgccaatagtaggcccaggtaagtgcatgggaattggaccacattacacggcaaggtatcctgcaacattgtcatgtcaagatcttgacaatgtataggggtcattgagcacttggacagattggtcacaaggcccgaagccaccccgaataccctgagaatttctttaatcagtcgcagctccgtaacacatggtcgaaagtagagaacgacatcatccgcatataatgaaatcctctgaccgctgcctctatgcaataaaggttgcaacaaccctagctcacaagcctttaccaccagagaattaagcacatccataacgagaataaataccataggggatggaggatccccttgcctcaaaccccgttgatgacaaataaggtccccaggttccccatttaccaacactttagtggaggagcgaagcatcttacagatgatattg

SEQ ID NO: 156330 - DNA, 726 bp, Zea Mays
taatcagagagttcggggttcaatatgtaaaattcagggcctagttgtaatgcttttcgaattatgatggacggcgggttaattcgagaaaaggacaaggtctctttagcaaaagcgatgggtcaaaggggtatggaggcattctggccattggattagaaaccaagggcacggatctgacctacttttaagtgaaccggtatcccatccaggcccttgggtcagagatccttggcacacgggacatccacgcgtttgactaaatcctatccacccgatcagttctgaacgccccggatttaatgaaccgaagcgctgaccatggttctaatcctatccgcccgtgatcgatccaacgatggtcgtgcatcggcaccttacccaccgcgccgagcgacggagccttgccccacggcgacggccatggccggagacggccatcccggtgcgcaacaccctaacccccaattagaacggtgctacacattgagaagggcaaggcaggtgacaaggaggtagtgttatcggcaagggtgtagtggtgggaacagtccacggtgagctgaaaatctgcggccgagtattgctccggtgagcaattagtccacccccggaggacatcctctcccgaaaggaacatggagacgtgtgggtaacacaagcgagcatccccagccactcatcagggacctgacaaccaccaacgtgtgaatcattcgctgtggc

SEQ ID NO: 156331 - DNA, 679 bp, Zea Mays
cagacctaccccacataaaagaatctcgccctcgagatttagactgggtttgagaaaaggtaagggtattccttcctcaatgagtcctcactctcccaggtagccccctcttctccttctctgctccattggactttatagagccttacttctgagtttcgggtctttcgaatggctgaatcgagaatcttcactggcttttctcggtactgcagatccttctgaatctgaactgactcctctgcgatgtgactctctggtacttttaagcatttacggagctgagatacatgaaatacattgtggatatttgacatggattctggtaactaaaggcggtaagctgctagtcctattctgccgatgataggatagggtccgacgaatcatggagctagcttcccttttgcttggaatcttttgactccatgcattagggagaccttgaggtagacaaaatctccttcctcaaaactgagttctctccttcgattgtctgtgtaactcttttgccgactctgagctttgagtagtctcttgcggattagggcaacttcctcttctgcctccttgatgaaggtaggcccttctaggatcttttcccctacgttagaccacatcagagcggtctggcacctcattccatacaaggcttcaaaaggtgacatcttgatactgg

SEQ ID NO: 156332 - DNA, 576 bp, Zea Mays
tgcctccctgcttgatatataggaactcctccttcttaatcttcatgagaccagcaggaatgtggtagtttctgaagttgttggagaattctgcccatgtaatggtgtgagcagcagcatgtgctgcgcagtatgcatcccaccaatccgtagcggggccagtgaggcgactcgatgcatatagcactttctccctgttggtgcactaagctatattgagcatcttttccacggactttaactagtcgtcagcctgtagtgggtctgaggattagagaatataggtggcttgtgactcataaacttcttatgcttgtccctgggcagagctggtggtggtggaggtggtagttgttgtcgttcctgtcgctcttgacacatttcttgacgttcttgacgcatttcttgacgttcttgatggatctgtacttgcatttctatcatcgtgttggccatttgttgtagtagtcgcatttgagcagcagacacatcatcagtaggcgggggattcggagaaggattgatttctagttccggattagctacagcccttcttcgatgaattcatgtgggtag

SEQ ID NO: 156333 - DNA, 313 bp, Zea Mays
ggaggttctgtcacaccgagcgcgacaggattccgacccagttttccccagctcctgcaaccacctccggagatcgttggagaagatcacggaaggttggctgggaatcggtttgggagtctccgcgcccagtagattggattgaccaacaccagcaaagagggagcttcttacgtcctggtcccacaggcagcccacggagcagcgtgagctgagggcatgacgcgtgggtcccacccatagtgtccagggcgcgcacgcagtactgggccgcgcaggagtggaaactgccgatgggccgggaacggataaa

SEQ ID NO: 156334 - DNA, 1005 bp, Zea Mays
gtttccttgtggagatcctgattatgggtttctttttgtccaagatctccgtacccctatatattgtaaccaatgcatctctcaatcgactacagactattatacacagtttcatactcttcaaaatgaaaccctagctctttgataccatgttagagagtggcccaccaagtgcattgccatactcaaggggcaaatatacaatgtacatatgcaaagaagcccttcaagtagagggaaaatacatatacatcctatacatctaacaatatgcagctctcctgtctgtttgagaaagactcctagccatgtctgttgttaagttcaagtacatattttattttgcaaagaaggcactcatggaaaacattattattgtcagtttaatctttgggcacttggaatttttaggtaatgtatactaagagatagttaatatagggttttagtagtagacttataatagggttaacccctaaaaaatctgttcaaatgattactgcaaatcaggcaagtggccctggtaagtatgatcctgtgtcaaatggctttgcgaaacttttcaaattggctttgaaagtccctagctcattctcccaacattttaagatataatggagtgaaaccttttactttgcatatgcattaagaaggtgaaatctggaagagagactggctatagattatgttaccatactaatagacatctctaatagctcaaatttattttgtgtcttgcttggcagggggtaataagtgtgcagcttactcctagaatcactaccgaggacttaaccctttttaaaactggatgccatttgagatagcatcatccatgattgaactctgctgaaatactgtgttcataatatgtggcggattttaaatcatcttttatatgcttgttgagaattctcccagcgtaggggtgctctgaaattttaaattacagaaataaaatgcaagtgtgaccatgctgtactgtgcgcctgtatcatgtctatt

SEQ ID NO: 156335 - DNA, 398 bp, Zea Mays
cacatcctcgagagcctgatcaaagttagctatggacaattcctgcagaccaacgagagtagacaaagctggagaaggaatatcgctactctccccactgactatgtaacaccgactattcttccgaattaagggaatctcctcttcttccacttcgtcctcgtcaacaatacgaacaatacccccattggggtcagctctggcaggattacacccattgggttcagctcgagcaagatcacatccagtgggttcagcatcatcgaggtcacacccattggggtcagcgtcagcagggtcacacccattgggatcaactccagtagaaagttccactggcacttcttcagcagcaggagcagaagggccagcttcctggtccaaacacgacactcgcc

SEQ ID NO: 156336 - DNA, 684 bp, Zea Mays
gtcgtcgctgagggcggccagtgctggatcggttctgtgtgcttggcgcaagttgtcgatgaaggagaactgaggtgccgccatcgtgaatgctgaagcctcttccatgtcgcagcaggagggcatcggcgatgatgttggtgctgcccggtttgtactgaaccttgaagtcgaatcccagtagcttcccacccaatgatgttgagggatggttgccaggcgttggtcgaggaggaacttgaggctgtagtggtcggtgcggacgcagaaatgcctgccacacaggtatggcctccaatggcgaacatcctatacgaggccaatgagttccctcgtatgccgcaagggaagcatgtcgaggggccactggcctactgtagaatgccaggggtctcttgtcttgcagcaacatggctccaaactcgtaggaggaggcgtcgcactcgacgatgaaaatcttggtgaagtccgacaaggccaacacggtggcgctggtgagtgcctggaaggcggctgtggctatgtccgtccacccaaacccggacttgcgtagcagtgccgtcaagggtgcggctatgaggccgtagtgctgcacaaatttgcgatagtatcccgccaagccgaggaagctgtggagcgcccgggcgaatgccagtaccggcttggatcttccccgcatccatg

SEQ ID NO: 156337 - DNA, 490 bp, Zea Mays
agacatacacaaacagtagacagacagacacaccattattaacatttaggtcttcaaacaagagctgcaacatgattataatgtcccagagaaagttatggcttattacattcaacaatcaacaaggtcagttacctgagcgcttgagcctgaggccttagtggccaatctctaagcacaaaacctacaatcctcatgacaataacaaagtaagaacatgctgctagttgaaaacaaactatgacgtacgacacactctgcataatcaaaagtgatatgcacaagaaataggatagtatctcgcacaacaggcttgaaacaattttgggacaatcaacgacggctcagatctctcaccggtcgactgcttccttgaatggtagcgctacagatgacccccacggtccccaaccccagccctcgtcgacgcagcactgtaaccggcgcaagtgtacttgctcaaatgcggtggggcggcgagggttagggt

SEQ ID NO: 156338 - DNA, 502 bp, Zea Mays
cttgttctcccctcatgcacttaaacctaaattagtgcattagaccaactcaaccgtgagcataagagctaatccaacccgtagagtcatgatgagttgtataatcagtctatccccacctagcatcaaataagattttgaactacctcatgtagcccatctcacccataactacttcgaccatatgccccaactctgctaatatgcattaacctcgaattaatgagaccaatactgaaaaattaaaagatcaacctcatcaagaaagaagagaagtcaaactcaatcttcagatgcattaccactcaacacggaattctttcctaccataaactttcttacccgaggctaatcttgctctaaactacccctcttttagcctacataataacgtggctatacctacatatacctatgctcttctaatcacccacaaagatttttatttgagactctcgacttttggaccgacgatagactaaaagctgaattacaaaccaat

SEQ ID NO: 156339 - DNA, 421 bp, Zea Mays
gtagctctttttcaatgttgagtacttcagaaacagcattggtaatggggagttcagagcaaagaagccttcaggcttttgagaaacagcattgggctgggagaccgacttcatcgtcttgtccgttgcagaaatttgtaccgtaactatgatgacgaatacatggatgaatgcacgaaggcatgacgtcggcgagcagaaactggagtgctgtaatccatgcccgtgttaactccgatcagatagatgttcagcctacctacagacgctcgaaagtgttgggtgaggcgctcaccggttggtgagggttgtatatgttgtggggccgggtctgcgttgtcgacttgtcgccagacagttcccaatagccagagagcagccgtgcagaaggagtgggccgcgctagcctgcgagataccgc

SEQ ID NO: 156340 - DNA, 738 bp, Zea Mays
ttttttgttggtgtaatacatccatcatcttcgacaggagaagccatggtcggcgacacgacagcaggtacatcctggacttggaccagcatggttggcgtcgtagcagcgatggtgtcctgggaaggggccggtatggttggcgtcacgatagcaacaacgtcatggacatgggacaacatggttggcgccacaacaacaacgttgtcttggacaacgatcggcggcacgacatcggtagccatggccggcgacacgatagcagcagcgtcctggataggggttgcgagcatggcgtgactttcaaatccacccatgacgttgagaagctccatgaaaccacctattgggggcgtgtccaagccagacagtgtctcgctgaagtccatatgcgagcagcggtgtgcctggctggcgcgtgagggagacaactggggaggccttcggcacgacggatgtggttggcgattgtgggcacctctgacgagaggccaaaagccggcggcgggaggtcaagaggccaacgacggcaaccctagccgccagttcatggccgttctgcctgttcaaaggtgaaagatagaagggtgaggcgtggggggggggggggttgcaaagggagcagaccaaagaagagggaaggtggaaggggtaacgtgtgaggaaaacaagagccgttggatttgaatggatggataggatataaaatgcacacgatacgcaccaaacgtccgtgct

SEQ ID NO: 156341 - DNA, 498 bp, Zea Mays
tagcttagttcaaaaatgaaaaatggcttcaaatctcggagaacttgcctccttgttgctgtggatgaggttgggataacatggctgctgtctgcttggggctgtggatgaaaaatggtagcagtctacactatgaacatatataaacatgcattaaatcgatgatgaaaaacgtgtgtgaaaaaaatattattgcaacatacagtacatacctcttgatctaggtgctgcaggtactgttcccctcgagctagctaaagttgtccagaaaagcatgcaaaatccgcaagctttcactcacacagtcacacgcatggagtcataaactcataactagctagctaaagctgtccagaagagcacgtagttgctactcctagtcctagctgctcagttacttcacttactacgatttgccagtgacattttgttttgagccggttcattcacctgacgtgacattctgaattggaaaattaatctacactcgcgccctac

SEQ ID NO: 156342 - DNA, 608 bp, Zea Mays
ctgagaccggattcaacacttaacaagtgtttcccctcaatcaatttcactagcgaagctctaaatcgtccagtccatggagacagcacaaacaacggatgaacagaagtgttcccgatgatctagggcagtgtcgctcaattgaatgggtcgagcagcattaggagaacctaaggacactaaaacggaagatgagagagtatgaacagacctggaacaagctagccacggcgaggactctttcacggtggcggaaaccgatttggggaaaaagagcaattcgtgggctctggtgagtaattgagggcacaagcggttggattggatgctggattacctaacggagtcgagggtgtgctcaatttatagtgtgcttgagcggtggctagtgaatttgatggagacgcgcggtggctggagaggaggaggggcactagcgcaaacgattagtggctttctccgtggcggactcaccggcgacgagccagtgatatagagcggcttacaacgacgtggtgaagcttcaaggcacgtggcatccgatcaacgggcggccaactccggtgaacttatctgagccggccacaaagcaaaaggggtacgacggc

SEQ ID NO: 156343 - DNA, 531 bp, Zea Mays
ggcaacacagattctggaaagatgacttcaacattattaggtcgcctcctattctcatatgtagtggcaccacaatcaagtgaagcacaactcaagaggaggccaatgcgggcacaatactactcagttagtgaacagagaacactgaacaaccaaaatatcatagcaattaccgtctgaagaggtcctcatctcaatctctgaattctaaacagaggagtggtcgcctactcgcctgttcagccgctgaaaagacaacagaggaggacgagaacgcgctggagggggagggggcctctgcagactacaaccgacgcacgatggagggagcgcaactgctgctcgagcagagggccgccaaagcacaacagggcggcaggagaggagagcggcgacaatgggtaagggacggcgatgctagataaggggtggctgagctggggaagagcgcacgcgcaatagtgcttaccgtattggtacaagcaggggcatagggcaaaacaacgtttgtgttgtgtacagatggtgggc

SEQ ID NO: 156344 - DNA, 923 bp, Zea Mays
ctttggctagtcaaaataagttgcttaggtaggctgctcgtgagaggagagagtttagatccaagtacgagagcacgcttagggaacttgagtctgctagagcttcatttgaggtgtccgatgagactgaatgtgatgagtgcgctctacacatgtcaaacatcaccactttgcagaccaagtactccaccttgctagatgagcacgacgagttgagatctaggtctatcctgttgggtgcgtgtaccgtttgtcctggcttgcagtctgagctagcagagacagacgctatgatagctttgcttgagaaagctagcttagtgagtgcccctgcacctacacagtgtgcactttgtgagggtttgcaatctgcccttgagtcctgcagacacgacaagacaagaatcgagaaagaaaacacataactttgatctatcttgagttgggtatcatgcagtgagccccagttcggcatgatggtaagtcagttcaagaggggaactggcgaactggggttaggctttgctaataaggatggcagtgtcactcactttgggaaggttggtgagtgcagtggtttgacaccttcagagaaaccttcacccactcccaagcttatcaaacccacctctgctaagcctgtcacccctgtgagagatggtgtgattgatgaacctatgagagatcctcctcagaaacaagtgtggcttccaaaacctaaccatattatcaacacacttgacacctttcccgacatctctagttatccccttcctagagcccctcaaccatccaaaaagaaagcccccttccacaaacaaaatccacccaagagagaggtgaggtaccattgtgaatattgtgagagggatgggcatctagcttcgttttgctttaggagaaagagagatgagtggtgggtt

SEQ ID NO: 156345 - DNA, 698 bp, Zea Mays
ttcccggcgatctaaggggtcctagtccaattggcagggtcggggagtatcaggagaacctaaggatgctgaaacaagaaagcagagggcaagatcggacctgaatcgagctggccacgacaagacctctttcacggtggtggaaacacagtttgggggaaatgagcaattctttgtctctggtgaacgattggaggcaattgctggtgctttggatgcgtaattatcctacgaagctcacggcgtgctcaatttatagagtccgtgagcggtggcgtccaatttcacgaagatgcgctagcggccggaggggaagaaggttactagcgcgcaagcttagtggctttcactgtggcaagctcctcggtgaccatcgaacatgcaagacgcgattcacagcgacgtggttcgaagcttgagcacgtggtgcacagcggtaagcgaccaacggcggcgaggtctatcccggttgatcggcgagcaagtgggtacggtgaaactcatccgtgattcatactccgccatgattatccccccaccaaagagcacgaatcgcggcgatggtgcagatcacgacgcaaggtcactggcagcgacgggatcagaatctgctgatattttcgttattgtaccattgcgaactccttcagtcagcctgacagaccatgtttggggcaaactttctcccaatttcgtat

SEQ ID NO: 156346 - DNA, 663 bp, Zea Mays
gggatgtggagcattgggagagcttcggggggatttaatagggaggaattttgatccgtttgagctgttgctagttgtgttgtgtcatttgcctctttctggaggaactagctttgatttcatcactcatgctgatttggctttgtctactagctagtggtgttgagccatgcttttgcctcttctttaggactagccttttttcttgctcatgttgagtcattgcccatttctttagggaccaaactttgcgtgctttgaatggcctattttggcttttatctggcttttggtcgtttgagtgagtttctcttcttcttcctttctgctatatatgttcatgtggtggttttgacaatgcactcatcacaggggagattgtgaagacaaggttgacttgtcccttgtggtttgaattgatgatgagtgattgtcaacgggtagcatctcaggtcgagtctggattgaccgaggcgtgagattatgtgttgtgcaaccatgtcggtcggcttgtagtgtgcaactatgaagcataggtacggtggtcaacgacacaagtgaaggtcatgagggttgatcggaagcgatgaaggacgagtgctgggacttgatcgagactcatcaagcacaaacaagggtagagacaaagcccccttgacaaga

SEQ ID NO: 156347 - DNA, 448 bp, Zea Mays
ggcctcgcgccgccggtggggaggatttgctgtgggccgttgatccgggttcaacggtggggattagaaatgggcaccgcttcggccgggtcaattcgggtcgttagatgcgatctgtacgatccctgttagatctcaattcataaaatcctgaccgacgatctttaatctgacggccatagcttcataccggttcatataaactgcgatttaatctgagccaatagttttagatcgatcggctgaggtgtgctcatacctcttcgaccgaggatattttactgaagagaccccggagaaatccttaatcaacccgcactcctttgcagtagtactttcctcgcaagttagtcctatttttagcatattaacccctgaccttctaggaaatcatgcccgccgtccatcagctggtgagatataaattaaatctgaaaaatattttctt

SEQ ID NO: 156348 - DNA, 437 bp, Zea Mays
gaatatttctgtgccaaatatgatggatgaaataccaattagaggtcgtgcgaagcgccaaaatgaaactactacttgccttcatcattatcgtgtcgggattttctttgttgttcttgataaaatatgtgttgagatgaataatcgatttggagaatccactattgagatattgacatgtttctcatgtcttgatccaaagaataacttctctaggtttgatatagatagccttgttcgaggtgctcagatttatgatgctgatttctctactagtgactttgcacaaattagacaacaacttcagacttatattcttcaagtaagaaggcatgctgcattctctacttgcactgatattgctagtttggcttctaagatggttgagacagagaaaaataaggtctttccattggttcatagacttattgaattga

SEQ ID NO: 156349 - DNA, 298 bp, Zea Mays
cgagctgggagctcacgacatagagtttcggcctcgcacaacaataaagactcaagcactggttgacttcgtatcagagtggaccgagcaacaagttcctgataacatggaggctactgaagtatggtgaatgtattttgatggctcgctgaaactgcagggagcaggcgcaggaatcctcttcattgcccctagaggtgaacaactcaagtacgctcttcagctattattcccagcatcaaataatgcaacagaatatgaggctctgatccatgggttgaacatcgccatatcactg

SEQ ID NO: 156350 - DNA, 807 bp, Zea Mays
cgggcaagtgtccttatttcgtgcatatttatctatctaaccacacgggaatcttttgggatacgcatagaaatgggtactctccccctatatatgcgaaggggtacgaccaattggaacacaacaaagtcgatccaaatcaatacaatctactttatttgcttcgtttttcatcgttctaggaggagtaatttagacctagtttagcctttccccaaccccaaatcttcatctcttttctactctacatcgtctagtgatatcacgggtggcctatcgatcctacggcatccacgggaactctcctccctgacggggtccctaccggggcgaattctagggttttctgaggatgaagacgaccctacgctgtcacgaaccgttcgagcctgcaacgcatgccgtccattgcggcgcagggaggagccgcttctgaagcgaggtcgtggaccgtccgtgctcccagtgagagcaccgtcaggcaggtcaccgtcagatgtttggcttaaatcggagcaaacactatgtttatgttgtggccaccacgtatattagaaagagcgtgaccagacgtggagatggaaagtatgccgtagaggttgaagccagagcaccacttcatgaccaacaacatgtcggacataaaatattattatcaatattactttgaatttccataaagtttataattgagtttgagagaattaatctgcgaaaaaaggttactataaccgaaattatgaagtctttataatttgacatactttgtttggtatttgtttccccagattaaccggagaactgggt

SEQ ID NO: 156351 - DNA, 715 bp, Zea Mays
tcacaggtgtcacaaaaggggctgaacacaatgctccctgcgcccctgccacatgcctgtttgggacagatccttgcggcactctgtttcctatgggattaataaatggtccatatgccacattttggtaatatggctgctgcagattagaatttgctactgcactcccactcgtacccttatttgttgttttctatggtgttgggtgcaactgctattccgaagctagatgtgcccgacgaattcgctgcacgtttaccctgactctcttcttgtatctgttgaactatagatcgaatctgtctaggcatgttgttgcttatatcttgcttaaattcagatctaaacgcatcgaaagaattacgcactccctcagaaatcatacgcgtaatttctgtgacatcagccccatacttgctagctacagaagtatcaatcatgtgagctagctcttcgcaagtgacagatgaacttaccttcttgccggacgtgcttgccccaacggtctgtttgatcacaccattcttggtttttcggaagcaagccaacctctcattccgtttctcttccatctctcgtgcgatttcttcttcaatctcctccctgtctgcctctgtaagatcttccatcgtgactttgatcatgttcaagggatgaacttcagatttgtctggcgccgttctcttcgctgtcttgtcctccatatatagccccg

SEQ ID NO: 156352 - DNA, 705 bp, Zea Mays
ctgacgccgtgaattccgcgctgggaccgagtccctcgctcgcgcaacgactgtcgtgatccacgcactactttggggtacaaatacctggcacgcccctgcctcgctcgtctctgccgcaaaccaggggaggccagccgctggagtttgcccgtcgccgtgggaagctccaattcaccgctgttgaaccgtccattttgggtcggaagccttatcctggtcccagggaaccgttccagtgcgtcgcggggggtgagcgtggtgtttggagtgccggaattgctcgtcgtagtctgcgcgccaccgtggaccgcaagacttcgtggccagcactctgcgcttcacggctgactctaggtactccctcggaccactcgattctacttaagttgcgtctagcggtcttcagggcggagatagtggacgagggtcaccagggggccatgcaccggcgggaccaacgccatggactcgtgctccatcgtctcgcgatactaggaggtgggagagccttggtatatcgtccgataatcatcgtgcggccaggatagaacatgggggatacctctttggattttatcgtgggtcgttggatgcgatcggacggacccgaaccgacctcagttctttaaattcacgccgttggataccgatccgtgggtcacggatgaataccggttcacggatccgggatctaatctgccc

SEQ ID NO: 156353 - DNA, 302 bp, Zea Mays
cttcaactgtggatgataattaataattctgagacttttctacctgtctgtgatgattttatattgaactgttgcctttacttgcctatgatgatatgttttataatgatgatcaatcaagggagtatgacttgttgctttgttttccttgctcattttgtgaattttgcttgtgatgaaatatatttgactgatgaccattcatgggaggttgacttactgctttgttttccttgctcttggttttcttcttgggtcaggcaaccaaacatactctctatcctttaatcagatttctccac

SEQ ID NO: 156354 - DNA, 392 bp, Zea Mays
caaaggtggccgcatcctgccctcgcaaataaatggcaaaggcaaggctctgcaccatccgatcaccaaaaagggcatcgggcaaagcctgacttcgctcagatcccacctgtgagccagcggccatacaccataggcaacgaattcttcaaccaaatcctgacacctactcaaccgggctgcataccgaagagcctcttcgctcttatctcctttcttcactttaaattgtggaagcgccaaataacaatgtgagcacagggtagatagggaaaacccagtcaccccttcgatatcctcctgtgccacataaaacaagaaatctcaccagttaccccacttattcttggcacacagaacaatttcaacaactttgatcgacgcctttccag

SEQ ID NO: 156355 - DNA, 637 bp, Zea Mays
tggacttagaaaaattttgatttttcttttgcgctcaaccctttggtgaaccttttggggtttttctgaaacctttttggggttactttcttactattatttgtagggtattaagtgcactacatcttttataattggcccaagacatgatcaagtggttttcatagctttttgggtcatacttacttatagtactccaattgtccacaggggtgcattagggttttgggcaatttctcccccttctatctgcatggtaagccaaggcatgatctctaagataggttgcacttatttaggatcttgatttccaagtttgaattcctttactctagttaagtcacatgtgatgatgggcttacttgtgtagtcttaagtgaaaaccctaagtaacacctaaggtgttacactgcccccatccaccagagctttcttgacctgactttcttggatcgagggatcgacatgcagagggtacttgccgaggtgatcgaagttaagccattgatcgacttggctgaacgtgatggagtgctccgaccaccaatatggtgttagaatactgtgggttgtcaccaggacctgtcgattggttagcttctgctacctgttgttctcctaggacccatggcccccg

SEQ ID NO: 156356 - DNA, 996 bp, Zea Mays
gacgagttcaatgtgacattgctacaggatcgtttaaggaaaggggaggatgatgaccttaccatcagatgtttcttccttatcttattgaaccgtctgttatttccaactgctagctggggcataacaaacaacgaagtgcttctgacagaagaaatgcaccgtttccacgagaccgattggtgccagcttatatttaatgacctttgtgaagcgacgaagaagtggcataaccgaagcaccacaaacgtctccacgacgatatacggatgctcaattgttgtccttgtaagtatagattttgtcttctgtacatacattgcagttttttagctcattattttttgtgggacatgatatatcatattttatgatgtttgttatgtttacttacacaacccttgcacattgaaattttctatagttgtattacctggatcacctgcatgcagctgctgcccctcaaaataaatttggtacacctcgcataaaatcctttgataagaatatcataaaagcattgactaaagctgacaagaggaaggcacaccatggggtcgaacctttcagatattgtgaagtaagttattcatatttaaacaagtgtatttcatgacaaattttatgtcaaatatatgtgcttagttttgagtaccattgtttgcaatacaaactcatggtccagttcaactttcactaacattttttaagtttcgaagctcgaccgagacatgctattcagttgtacctcagctcgatcgccaatccgaggcaagtttttgttgtattatatacatctttttttaagatttatgaaacaaatggattaggagtgtggtgatggattcttactaatttttctgaacaaccagccgaagtgcaggactaacatttatgatgcaccgtgccccgcccctactgctcggcccaccattaacatccaacttccatcgatcaaggatatgatgtcaagtaagatcaaccagctcccacccc

SEQ ID NO: 156357 - DNA, 318 bp, Zea Mays
ccgaagccatctgccagggaagagagtcactattatgcacatgcaaattgttttcaaccaagttattttattcattacaccaatacattacaagcatatgactactacaggctgaactacacgagagcgttccctgaggtactaccgaactcattttctaaagtatccccaaattccttgagaagatcatcaaggcttgctagggatatatcctcggcgtcggaccaatcatctatcctggggggaggtggggctggaggggtcttcttcttctccgtttggcatcctcggttggtggtcttcttctggattttcttc

SEQ ID NO: 156358 - DNA, 1903 bp, Zea Mays
gttcaagaagtttgggaactgttgggatctgttgatgctcaatcgttcgaggagacagtggagtcctcttctcagctgtttataactctttctcaggctgcagtgactggtactgagtattccaaaaccttgaaatttctgggaattatttcagatcatcaagtgttgatattggttgatattggaagttctcattcttttatcagttcctctttggctcacaagttaccaggaatatctgctttgtccatacccttgcgtgtatttgtcgctaatggatctcaacttgtctgcacttctgaactccagcacattcagtggtctgtggacaatattcaatttactactacgttcaagatccttccactatattgttatgacattattttaggtttggattggcttgagtcccacagtcctatggaggttcactgggaacaaaaatggatgtcattccagtcaggccctactacagttttattacaaggcatattaccccatatttgtcctactacaattattcaagtattagttgtcaccccggaatgtaacacagtggattttagtctgttaccttccgctattcagactattctgcaggagtatgaacacttatttgaagcccctacccatcttccaccaagtagggcttgtgaccattctattccattaattccaggcgccaaaccggttaacattagaccctacaggtatccacctagtcttaaaacagagatcgaacgccaagttcaggacatgttggacactggagtgatccaacatagccatagcgctttcaattcccctgttcttttggtcaaaaagaatgataatacttggcgattttgtgttgatttcagacaccttaatgctctcactgttaaatgtcaatttcctatacctgtcatggatgaaatttttcatgagttgtctgcagccaaatggttcacaaagttggatttacgggcatgtttccatcaattattactccaaccaggtgaagagcataaaactgctttttccactcatgaagggcatttcgaatttcgagtattagcctttgggttaactggagcacctgcaaccttccaaggggcaatgaaagcaacactcaagcccctactaaggcagtgtgttatggtgttcttcgatgacattcttatttacagtccttcttttgaccaacacctcatccacattcggtcgatgttggacttgttgaagcaagatgactggaggatcaaattatccaagtgctctttttctcagcaacaactatcttatttgggccatattatcagttctgatggtatatctatagatccagctaaaattgatgcaattgtcacttggcctcttccctccaataccaaagaacttcgcagcttccttggtcttgctggctattatcgcaagtttgtgcgtcattttggagtgattagcaagcccctaacgaatcttctaaggaagaaatctctcttcatatggaccactaagcatgacactgcattttctacactcaaatctgcattacagtctgccccagtactatctctgcctgactttaccaagcctttatgtatcgaaactgatgctaatggcaagggtgttggtgctgttttgatgcaagatgataatcccattgcatttgtcagcaaggcgttgagttctaaaactttgggtttatccacttatgagaaggaatacctagcaattttgcttgccgttgagcagtggcggccctatctgcaatatggggagtttatcatcaaaacaaaccatagaagtctgtctcatttgtgtgaccagcggctacacacaccttggcagcaaaatgtttttactaaatttcttggactccaatacaaagtattgtacaaaaagggatctgacaacagtgcag

SEQ ID NO: 156359 - DNA, 899 bp, Zea Mays
catcccttgagaggaaaggaggatgcatggatgatctcttgccaaatcatgtcaaaaacatttaagctttcagtgctatttggcttcatgaaggaaagcaggactttactttctcctaggatgttcatctgatttccccctttggggatgagagtcatcctgcagagagagttgatgtacctgtagtacttgtgcagatttgttgatttccagaattcatctgtctcagaaatgtgtagatccttggcttcatccctggtgggagggcgaaagtcatggatcttgatcttgtctccagagatatcgtcatcagaaaatcccaaaatgtgagcaaatcttctgtagctcactttataccaacttccttcaatgaagaaatttatataaggaaagttataaggactttcctcatcagcatgcttaatccacagagtagaataaaactgagcaatgatttcatcattccaatcatattggaatgtcatgatagtcttcatcctcttttgctcacaggcccttaatgcatgtgtcatctcaggatccccaatagcttcgcacccgctccagttgataaaacgctcatggaggatgggctggtgcttctttggaaggataactgaattatagaaatcgacatgaaggagagtccagaagcgattaccatcaatcctggcatcatgaacacgaaaggtaggattttggaatcgcatatcttgaagaagggcataccctccactagcactgaaatcaataacctgttcgttggcggaacgacgggcctgcgctttgtgaagcactaacccctagataatgggggcatgagcaggagggagattaacatcatcatcctttcctccttcgtcatcactagtagcctcccaggcctgtggattcgtcgc

SEQ ID NO: 156360 - DNA, 421 bp, Zea Mays
tggggcagaggataagaagaggattgacccggatccccctggtggggaggcggggcaaactgctcacgatcatcaaagtattcttcatcttcatcttcatcttctggagtcatgaaaggcaccccatatgcctactggtgccactcattgatttctggtggaggaggatgaagaggcacatcaggcgaacggggagcaaatggcatacccatagaggaagcttgacgacgaagattgtcgtcagtctcccgctgccaccgagccagctcatgcacatctgaagatatatttctgcacatggaaaagaatgctgcaatacattgggccaaacgagcacccatcccgcgaccacgacctcgaccacgaccacgtggtgtgggagatccgcgaccaggagatggacgcgagggtccggcagcag

SEQ ID NO: 156361 - DNA, 776 bp, Zea Mays
ttttccaggggctctttagcaaattggcacggcgaaggggtatctgcgcttcagagccatcggatccaagtcctgcggccatgattagatcctaccgttgaggaatctgtatgtgccagggatcgttggatccaagatctacgggtaaggttctatcagacaaaggggtatccttgattcaatctcagccgcacactgtccatcccacggccgaacggcttcttcatcctccatacgtctttgcctggggccagccgtgcgctgcacagccctgatgtcgaccttccagcaggagcgccaagcatcgcgcgggtgcccgcgatggggagcaagccggccggtgatgccgccgagggggaggagtggaagtccatcagcggcgagagacaccggtatgcgggccaaggcggacgaggagagtagcgaaacggcggtcggatctcactgtcactcagctgcctcgtcttcctccctcaagctctcgattcactgatgctactcgatgagcagggcagggcggttgacaaggaggttattttgccggccatcagaccccacaaatcaccgaccactaccgcagtaaacaaggcacagaatacgcgagtataaaactcccagggagatacgcaccggagatccaagtgatgactggaatgatggccgccggagacgccagatgcggacgacccttcccccggcaagcgctactccaccggcgagcctcacagcggcaatcggcacgagctctctctcacgggtaacagcgcgtttcactc

SEQ ID NO: 156362 - DNA, 410 bp, Zea Mays
ggaggataaccacatcgtcctcttcaaaatccatttccacgctgtcttcagattggttcaacgagccaactttgacctagggaatagtagctcccattgccagaatagtttcctcagcctgtgcctctggcacgcccttcgaaggtgtcagcgacatcccgagcgacacactaagtgaaaacgcaagtgatctctgaaactggctaaggctggtttgggagcaaacagacagtgtccgaaactagcttcgaaggcagagcgagcactagcagcagtgagcacaagcaacaaaagtcgtaccctataacgctgggcactgcccccttttatacgcacgatcatctcactttaattgtttcacccaatgaccattgggtcccactgtgtgtcatctgatttcacaacgagct

SEQ ID NO: 156363 - DNA, 449 bp, Zea Mays
agcatatgccatagccccgataatgactgggtcctggccaatgtgatatgtccctgaagagaacttcatgacaatttgctccatatttctaccatcttcactgtcatcagcagccaaaacagtcgccaaagctggagatatcatagcatctgctgcagcccgacactgccattctcagcgatatcgtcaatcagctgtatcttttgaggtcttttcctagaataaactaacagacttggcgacataagatgattccttgttaaggaagactccataaggtgaaggtcctgcaatttagattcaacaatgggaaggcccactcccccggagtagacagtaacgtcctgcaattcagattctaccatgggaatccgggattgagatgacagggggtaggtagccagaacatctccaatagcatcagaaataatagcagcttccgaacatgc

SEQ ID NO: 156364 - DNA, 633 bp, Zea Mays
gcgcgtttcaccggcaagcgcatgaagcttccggactcgtcgcagacctccaaacctcagttgtggacagggacgacgctgatggcgctcccagctctcaactctctctctcgacggggcaccctgctcccaaggtatccgcggtcgcttttagttggcgcggacggaggtggggtatcgggacccgatcgatagggatgaaaccaggttggtgcgaggtacgcgaaatccatgggattccgttgccgcaagcttcggtccagatttgacgacggaaacgaagatagtgctggccaacgggacccacttggcagaggaacacggcaagcagggtccacacggaagtgggaatgacgacaggctcgcctgtggaggccggttggccgatgagaccgagcgcgcactaggaagctgacaggatgggcccgcacggcagtgagaactcgcgaagtgggctgagcgcagggaaaaactaggccgaattgggtggagttggcccataaagccttttattcttttatgttttatgctttaatttctttttcttcatttccaagttcattctgaatttcgaatttgaattcaaaattgtgccacatcatattgtgaagtttagaaataccactttcagaa

SEQ ID NO: 156365 - DNA, 883 bp, Zea Mays
agtagggtatagtggtcaccctaagccgagtaagcgtgagcatgttgcaccgtcttaagtcatcaccgacttaaactgattgctccgttagtggggtatagaggtcaccctaagccgagttagcatgttgatttcaagtccaatcaaatcaaggtcagtcgatagtcaagagtctgaatgcctttgaaatgaaaactttattgatgatggagtccccgattacagagtacaaatttgcttcgagagcttttgaggccttgctaggggtaaaactttcttagatgctctatgttccatgagttccccacttccgtgccatccatttgagtaagccggtatgatctcgactgagtgacctctgatacaatgaacgacccttcccatagtggtgacaacttgtgccgtccttcctccgttagaattcggcgaaggaccaagtctcccactgcaaaggatcggtgtcgtacggatttatcatgatagcgcctcaaggtctactggtatctagccgactgaattactgtgttcaatccttttcctccaacacatcaatatcctctagcctggtagattctgcttcagctatgtttttgaaggccaaccttggtgccccgaacatgaggtcggcgggtagcactgcttctgaacacatatggccttttgtgacgaatatcccgtgacaataaagattttcgtcattgataattttgttttatgacataatttttgtggcaaaacaacattacgacgaatttaggccaacgtcactaatagcattgagaaaatgacataacactaaccactcatcgtatcatgacgaacatcttgtagtcataaggtactagcgataaacaccataaatatatgaaaatcctagatcttc

SEQ ID NO: 156366 - DNA, 310 bp, Zea Mays
acagggtacataatctattcctaaaaagttagttcataatcccatgaaatttatctgcttagccatcagatctactcagcttagtttcatgtattacctgcctcacattttgcttgcaggtatagttttgcgtttcattgaaattagtgcttgctggtatagttttgtgtttcattgaagctaaacttaggttaagtctggatgtgctatgttgctagtttggttggagtcactataactgtcaccatgatatcttcaacagcttgccattctggacagcaatacctttttgtgatactttcgacaacca

SEQ ID NO: 156367 - DNA, 959 bp, Zea Mays
gcatttaagtacggtccccaacaggacatcctagctgtgaggaggaagataacatgcgccgtgtgttacgctgttgaatagctagcgcgcgagtgatcccgtcgacgtattcctcgtcgccgctcctgcacccgacgatgacgccgacgacgccgccgccgccgccgcatgttgtcttcctcctcacaggtgcatacattcatcgtccatggcatcccactacgcatgcatgatccatggagacgtggcaggtgcacgatctttctcgatggacgggcggccggttctcgcctggcctgatgctagacttctggcctgatgctagacgtgtcgtcaggcgctctctagagtgagtgattgggcccttttgccctttctactgctagcactagccagtgccaacggcgtacatgtcccaatcaagatgccaccaccagtaggaagccacgtacgccacacgcacacggcaagtggagagcaccaacacccgtatagattttctggtactccctcccaaagttaagtgacgaaaaagccatccattcataacagctttgatttgatgtgtgcctgctgccatggagactggggaacggtcgagacagaatttcagcttgcttacacctgtgggcttcccctaaagagaaggcgatctagcctcgctttttttttttgctttgctgcctagtgctagtgcaaacgactcgcaaaagaggaggggaggtgggagaaaacagcaatctgctagtgtgttcatttactttttcacttgcggtctccttcacttaatcatgatgtgcagaattatttgaccgttgttttatctgcctctttgtgttgttaaaaaaacaatgatgaaagcgaaaagacatttttaaaaatatctaggaaagaggagggaattgttttaacaagattttttttaaaaaaaaattcgtttgtgtgctagtgtgtatctg

SEQ ID NO: 156368 - DNA, 512 bp, Zea Mays
cgaagtctccttcctgaaatatgagttccctccgcctgttgtccgcataactcttctgccgactctgagcttcaagtaaccttccgcggatcagagcaactttctcttccgcctctttgacaaaggcaggtccttctagtgctttttcccctacgttggaccacatgagcggggtctggcatttctgtccatacaatgcttcgaatggcgacatcttgatgttggcctgatagctgttgttgtatgagaactctacgtagggtagactagattcccaacttctatcaaatgctagcacacatgctcttaatagatcttcgaggactttgttaactctttctgtttgtcagtctgtctgagggtgataagcggtgctgaaatctagcttggtgcccatagccttctgaaggcttgtccagaatttggaggtgaactgggttcccctgtctgacactatctttcttgggatgccatggagtctgactatctccttgagataaatccgggcaagg

SEQ ID NO: 156369 - DNA, 319 bp, Zea Mays
cagacagtgattatggcaaccgaagtctgtacgcaacctgcccacatcattcaagaatagggaacgggccaatgtatcggggtgctaactttcctttaaccccgaatcgactaacaaccttcattggtgatactttcaagtacacatgacctccgacttgaaaaatcaatggtcgatgttgtttattcgcataatttttctgctgggcttgagcttctctcaagttatgtctcatgtgttggaccttttcttctgtttcattaaccaaatcaggcttgaaaaaccaccgttctcctggttctgaccaattcaagggtgt

SEQ ID NO: 156370 - DNA, 661 bp, Zea Mays
gggaaaatctatgcgaagttcttcttctctttcccacgttgcttcatcttgaccgtggtgactccactgcactttgcacatctttatgaccttattcctcgtaactcgagtcaatgtattaagaatcttgatggggcactcagcataagttagatcctcttgaacactaaggtcccctattggtagctgctcttcaggtacctgagacacttcttcagttgtgacacataaaagacatcatgtacatccaatagattatcaggtagctcgagttgatagtccatctctccaacttgcctaaaaactctgaatggtccaatgtagcgaggggacaatttgcccttaaccttaaatctcctcattccacgaagtggtgacaccttgaggtacacatgatcaccttcctcaaactccagtggtcttcttctattatcagcgtagctcttttgtctggtctgagctaccctcaaattctctcggattatacagacttgttcttctgcctcttgaataagttcaggtccaatgaactgtcttcctctagtctggtccaaaatagaggagtcatgcacttcctgccatatagagtctcgaacggtgacatcttcagattggactggtaactattattatatgagaactcagcataaggtagactttt

SEQ ID NO: 156371 - DNA, 924 bp, Zea Mays
tacaccggccacatcatcccctagtcgcaccgtgtgaagagccgacagtgctcgtgtcccttttttcctctgtcgtaactgaagggaggaagaacacaaagggtagaaatggctattccaccaaaaatcatctccactagatctgaagtgagagttagccacacaattttagcagtgaatctcagatctattgaatatgtcctcggactaggaccaagcaaatctctcacacgcgccttgattggggacgtaaacctccaatggttatggccccccccagttcacatgcgctatataaattgaggcagtgtcggcacggaatcaaacgttttcgctaaccctagctgccacactagaaatgatgtgagctcctactagcgccctagtgatcaaaaatcgcccaacctctccatggcatccgtagaccctaatggttctatgccactggccaccgacgctcctcccaacggacaagaggggaaacaaatccagagggagggactcaactcctatagtcgtctatgaccccacctactactgcggcgagtctccacctagccccgaagatatggtttccctatctatcttctcccttcgctctcactagcgctcaagttgtttacctcttactctatatgcaagaaccgataagggctctagagggatcggctagcccctagatgaaaagaggccgacatattcaacaatggtatcggaaccagaatgacaattcccctaacactagtctacaagaccgttagcacagaagaaccagaagaggtcgaggtggtcggggaaggctaaccctaactgacaaaatataccaagaacacagagtgaattcgggataggagattacaacagaagaacctataagaggtcaaggtggtcaaggaaccctaacccagaagaccccacccgatc

SEQ ID NO: 156372 - DNA, 446 bp, Zea Mays
ggttcgcgtacaggcgtgctctgagcgcgctcccgagtgtcagcccgcgacgaacatgtgtgtgtttgcttctgccatggttcaacggccgattggagcaccttagcgtgcagatcttggcaaaacacccgtgtacggtctcttccctgcaccaaatcctacctttttgatgtgagtcccaagcaaggatacggtcggggtagggagatataggggtgagaagttgcctttgtcctagctgtccaaactgagacaaaagctatgccaagtcgtgtcaaatgacttagggttgggttcaaacttttccagggggttctagaggtattttggcgccactttgtcaattaggccaagtggttttgagtttgggattaaggtgaacatgtttgatctttgcaaaaggtttggtttttggacttagaaaattctgattttccttttatgct

SEQ ID NO: 156373 - DNA, 567 bp, Zea Mays
ccagaacttgaggaaggtccctgtgcacttcaacggggcggacgactgctcggctggggatttcccccgcggcggcgcacagcttctctcctccaccccgccccggctgcgaatacgacggcgcacacgctgctttcttttctccagggcggctgagaccgcggatccgcaggcaacgagtttatgggcgagcagggctgcagggctatcggaagtaaccaatcgtggccgagtttcgcggagctaggcgcggtcaacgaccatggcggaggaatcggtcagttcggccatgaccagctaggagacaagatgacaggcgggtcccacctgtaagccatgcggggaaaggaagagtgaggcgccctggctgacgtacgggcccggcttgacagtgatacagatgagcgcgcgactgaccctagtggtccacatgtcggcgccggggctgaacttgggcggtatgtgcgcgggagtgaaggtctgttgggctaaatatggggaccgaggcccaattagatttcccctctttttctttttttctgttttcttttctcatttcaatcccta

SEQ ID NO: 156374 - DNA, 737 bp, Zea Mays
cgcggaagaagggagaaacaggaagaacaaggccgcgaataagaaaaggaacatagatgacagactcgtgggtgtcttctatcgaaacagtgaccccgcggcaaatccaaaaagggcagagctcttttggaagaagaaccccaacatcaacaagatgaagaagatctggctcagaaacaatagacatgtggttacctgtgaacgacaactgactgttggggtcgatgggaggaatgattgccgcagcagagctctggtccttccgcttcgacgccattgcaatctcgtcgccgggacgaaggggagcagaatttcagagaagcaaaaaggtggtttgaggcggaaatgcgaagttagggctcagaaatcagaagcgcacgtcgacatgagtataaatgggttttcccgggttgggcgccatttctgaaaaagggccaagtcatcactcgggaaaacaagacttccgacataactcggtcgttatctctaaaacgccgacaacatcaagcactacccgaccgttatccctaaatcgccaatattgtcaagcataactcggtcgttatctctaaaacaccgacaacatcaagcactacccgaccgttatctctaaaacgccgacagtgtcaagcataactctgccgttatctctaaaacaccgacaacatcaagcactaccaggccgttatctctaaaacgccgacagaatcaagcataactcggctgttacttctaaa

SEQ ID NO: 156375 - DNA, 376 bp, Zea Mays
cctcctctgacgggtagcgggcacggtagggaggctggacgctggcgtccttaaccaaccctcgatgcgtcccgaccatgggtatgtgtccctggtaagtgtccgaccctccttctattttgcgtcgtgtttcttacgtctttagttcttactgttgggattttcgttcgtccctaggggttgaggaattttaaactctcccggccaccggtcccggaggacgcgatgggccggaccgcgcgtaggctcgccgcggagaaggacacggaaaaggcccgagctcgcgagaggatgcgagctcgggaagctttggagaagcgtcgtcggaggcaagcaagggatgggctcccgttggagccgtctccggacacgtctg

SEQ ID NO: 156376 - DNA, 1060 bp, Zea Mays
agaagtcatccctatatgagtaatcgtaagcgcgtcagatcgccttgagttgctactggcttaagtcggttgcttttgttaatagggcttagtggtcaccctgagttatttaagcgcgagcatgttgcaccggcttaaggcgatgccgacttaagccgattgctccgtttagcagggtatagtggtcaccctgagttaagtaagcgtgagcatgttgcaccggtttaagtcatggccgacttaagccgattgctccgttagcagggcatagtggtcaccctgagttaagtaagcgtgagcatgttgcaccggtttaagtcatggccgacttaagccgattgctccgttagcagggcatagtggtcaccccgagttaagtaagcgtgagcatgttgcaccggtttaagtcgtggccgacttaagccgattgctccgttagcagggcatagtggtcaccccgagttaagtaagcgtgagcatgttgcaccggtttaagtcgttgccaacttaagccgattgctccgttagcagggcatagtggtcaccccgagttaagtaagcgtgccatgttgcaccggtttaagtcattgccaacttaatccgattgctccgttagcagggcatagtggtcaccccgagttaagcaagcgcgagcatgttgcactggtttaagtcgttgccgacttaagccgattgctccgtttgcagggcatagtggtcaccccgagctaagtaagaatgcaagttaaccatgaacaaactgagtatctttgaagcccctttttttattgatgacacatttccattttacagagtacatcgttgtcccgatagcttttgaaatacagctagggataaaacttcctgaggtgttctatgttccaggagttcccgacttcagtgccgtccatctgagtgagacgatatgatcctggccgagtgacttctgctactatgaagggtccttcccataagggagataacttgtgctgtccctcccccgttagaattcggtggaggatgagatcttctactgagaaggatcgctgatgcacggcct

SEQ ID NO: 156377 - DNA, 630 bp, Zea Mays
ccctggagtgaccactgccctatttatacacgaaggggagtgtccgtagtgtaaccgagtgttgtattcgaaggagggatgccttagcgtttgcaagtcgacgtgacggtgaactgtgctgttgacccacgcctgctgatttcccgtagagaacagatgcagagaccaaggggttgtccgtacgcttgagcccgaggaagaggtcgcccatgccatagttgttgtaacagcgccggggtatgggccaaaggctgcttacgaggtgtgtcagcgtcctggcacgtgatgatgtcgagattccctgctgcgcttatcgagatcagagcccctgcctggttgaggcggaagtcttcccgaggcgttagccgagccgtcccttaacgtgcgctaaacccgggcggagtggctgactgtgggattcgcaacatagttggtggccgaggccgagctcgggcgaggtggtgaattcgctcgagggccgaacttgacgtcgggcgaggtggagaaatcgccgaaggctggacccggggtcggggtgaggcagagaggttgtgaatgcaggctggatcctgcttcgggtgaggcggagagattgcgcccaaaggccagtccactctgcttgtcgtattt

SEQ ID NO: 156378 - DNA, 1102 bp, Zea Mays
tttgagtctgatgattctgggagttcggtgtcgtggatggaggagtcttcggatgaaggcttggattattttgcagcgttggatgtggctgcagtggagccttcgccgcgcgtggaaggttctggggggctcccgggtgcgagtactaggtataggcggcgaagggcggtggcgaaaccaagagttagtgaatcgtcgcgaaggggtcatcgtattggtatggagggtgaccgtcttcgcgtggaccggactggtaggcaagaattgttgtcctcgctggttggggcgagcatagatgaaggggagctgcgaaatcttttgagggtgaggaattgaggataatgttgttcaattatagggagatgggtatcatcccgaaggttgagccaatgtagtatatgatgtcctcgctgtgtgtatgtaaccgtaatttgtatgatgaggctgggcgccttcgttgatccagctgcactcgtaggcgacttctgtatggagtcttttttgtaaaaaagactttgatatttgtgcagttattgtgctatttcggctgcacccttaggcggcttccgcacggagagtcttttaggaaaagccatcgattttgcgcacttattgtgctattccggctgcacccttaggcgacttttgcacggagagtcttttggaaaagacgtcgattttgcgcacttattgtgctattccggctgcacccttaggcgccttttgcacagagagacttttggaaaagacttcgatattgcgcacttattgtgctattccggctgcacccttaggcgacttttgcacggagagtcttttggaaaagacttcgattttgcgcacttattgtgctattccggctgcacccttaggcggcttttgcacggagagtcttttggaaaagacttcgatattgcacacttattgtgctattccggctgcacccttaggcgacttttgcgtggagtgtcgcacgtgagggtaggctgtgctgcctctcgcggtgacttcggagtggtcgaatgccgaagaccgtcgatgcggtctttttcgacatgctgtatctgaatttttgcgggggatttttgcgggtatattacat

SEQ ID NO: 156379 - DNA, 274 bp, Zea Mays
tatatgggtgattgtggacaggctaactaaagtagcccactttattccagtgaagaccacgtatttaggagccaagttagcagagttgtacatggcacggattgtctgcttgcatggtgtgccaaagaagattgtgtcagaccgggggtcacagtttacctctcggtattggaagaagttgcacgagtccttggatacaagattgaattttagttcggcttaccatccccagaccgatgggcagactgagaggaccaaccaagtgctagaggat

SEQ ID NO: 156380 - DNA, 1046 bp, Zea Mays
gtccgaactctatccaatggctccgggctgctttacttcgggggtccgggttgtgcgcacaggggtcctgcgccttctgggcccgatggcgttgtctccgagaacgccaccttaactgctcacgagatacccctggggttgttctccgcgcggctagggatagccgcacaggcatcatgccttcataccgtagtaaggggtacccctaatccagggtaccaacagtcgttgagcccctgttcatcatggtcttgtggtcaaatattgttgctattaactaaatcttcttgctttattcatcatagatatttagttgtgtttctttgagtttattcctcattccttgaaagcaacacttttgtaagaataggaattagtactatacttcgattattatttatcttgttctaaccgctaaccgggaatcaagtgttgtttgaagttgtaatttttagatttcgtctattcaccccctctagtcaactatcaattacgatcagcactacactagacaaggacgtaagcctgaactgatataactcactgtctcacacccccttttctggaatccccacgattcaccatttggagtgagttcacgctagcattcttgtcgaatacaaattctattgtcctcctgttcccgaaaccacgtcactacctatctctatgttcatacgaggtcacgagcctcgccgaagtcgcaaactcgcaacctcacctactccgttccatgggccatagcggccatccccgcctgagcccgcggccatcccttctatggtcatatgcgtcctacgtacctcaagtgaccgtggctatagatcgccagcgtttgccctacctcactccacatgccgcgtcgaggatcactgcccctctcatgtcgtcgtggcctgattggcgcctaggataggatcggtgcccaccgtacctctcttcaagccacacctatgggatttggaagggagcaacgggaggggagatggaacggtgcagacagagagcgacgccacgtgtgcctcgtgagattattcagcgagcag

SEQ ID NO: 156381 - DNA, 314 bp, Zea Mays
ggacggtgtgcgcggtggacacaagatttatataggttagggcagaacgtccctacatccagtctttggcggcttgcactacccagacctttgctgatcaatgctcgtagtaggggttacaagtggacgagagagggaggagaggctcccaagtctcttgtgtggaggaggtggagctaagggctacagagctagagttctaactaattcttcgcttggcgatggggctctagtatccaagcattcgtcgatgtccccctcctcctttcgccggttcgtccgtctgtcatctctgtgtgcctgtcctctctgtg

SEQ ID NO: 156382 - DNA, 336 bp, Zea Mays
gggtggacttgacgaacactatggcgaagtcagggtcactggaacggggctgagacaggcggagggggcctcgggctgaccagaggccactccggtgagccaaaattacccatggtgagatggaatcggtgcagaataaggttaggggaaggtcacttacctagagacgacgctcggagtggcttggcacggcgcgaggggactccggttggccggacaaggagaaatcgtggcggcggcgaactccgacttgtgtaggggagaggttgagtgcggacctggcagagggatcaatgagaggggaaaccactgtggattcccggtgcacaaggctcc

SEQ ID NO: 156383 - DNA, 512 bp, Zea Mays
tcgatgcgattgaggagtatgattggtcctgttgaagtcacctgtgttgttgatgtcatgtgcacaatgtggggacatgtatgtgtgtgtgctgtggtgcattgtagtagtggttgtgtaagatatgtgattgaagtgtgcgggtatatgccgtaatatggttatactcgcgatgaggaaagatgtatgtattgtgtaacatgatgtttagattgctattgtatatcatgtgaaggatgctcatgatggtcatgtaactgtagggtggtgtagtggcaaagcgagaagtaagtttagtgttttaaacggttagttgatagcatctatcggtgttgtcataatttttgttctatggtggatcgatgcttcgctttctcaattattccattccatgccctttggatatataaatgtcttgttgattggttagaggtcctatatgagtgttatcacagcccaataattattggaagcgagtagcgttcataagtctatccttgttaaaattgaag

SEQ ID NO: 156384 - DNA, 364 bp, Zea Mays
gttggggagagaggggaagggaatagagaaagtgagcagaggagctgtgttgtggcaatgacaatggtgagtcaccgtctacccgacatcccacatatcaacatgagtgggactaagggagaggaaaacagaggcagatgcgatggaaagagaaaggtgagatgcttagggttacagtaatttagaggatgacacgagagagttatatacccaagatctctgactgatggtgccgaaccttatatgggttggccgttgcagtcaagccatacgtcacatgctctgtgccagctgacccaagcaaagtcatatgatttgtgcctatctaacacaggtacgatgccagttagaccatgtagtgtca

SEQ ID NO: 156385 - DNA, 805 bp, Zea Mays
aagactctggctacacccgcacgagaaccgagggttaataaactattaatacagggtctcttaagtaaactaggcacgacgaaggggtacaatgcattatgggccgtcagatcgtccatcaagctcccagattagatcattcttcttaaatgctcccacactctcaaccggttgttggatcataaatcgatggcaccgattaggtcttcttctaagtgaaccggtacgagaacaggtccatccaatccccatcccatggttcacattcgacaaagtgaagaggtatgcttcagcttgatctccactgtccagtgatagatcgacgggccaggaccttccatcctcctctactcaccaaccaaagctcacacatgcggtgcaggtcaccctgcggtggcgccattgccgtggcccaggagttcgtacgcttaaacaccaaaattccaaaccgcccgcagtcacgcaaaggaaatggcagggaggaccacgtggagggtttcttaccgtgagttgtgcgcaccgaggcttggtccagtcgagattatggcaccgcagcaagacccacaccggcaaagaaactccatggtccgaggctgcccacgtcgaattggggtttcacaaagcctccacgcacgaccttgcatcacccctagaaagtcttctaggcgattcccaaggatcgagcaccggtgtaggcatgctgtggtgcgtcgcccgccactggtaatggtttcctcacggaaagaggcaagcgatccatcaggctagcaccatcgacattggcgagagggtggaggatgcgttt

SEQ ID NO: 156386 - DNA, 771 bp, Zea Mays
ccacgtcccctggctcgtccacgttactcgtcgtgcacgccccgggagccgccatcaccgtgaaaatagggcgaggggagtagtggagccaccgtgggatcatcaggacgtctgagccgtggggggactgaggattgggtcagcagtcgtcaggtgacacagtggtgctgttcgtcggcgtgccgggagggatcagacggtgtggcagcatggattcctcgccgaaggttctgccgccgcgagaagccgcctttcgccgtgtccgggatcggccactctccaatactcggtgagataactaaacctagttccgcaatcacctctattacggtttgcacctatcggatcgagatatcagggcgggattcggatagctgtagtggccggcgttgatctccgccgtaggttttgggcgacgccatcgttctggtcgctggaagaaagaagagggattggtgaccgttggatccagttggacggtcacgattagaaacaacataccggttggaccagattaaaccgtgagcattagatcagatctagcggttaggatcgggtgctggcatgggtggttttggtccgttgatccaagatcgtagggcggctatcgcgtgcggtttcatatttggtggcgatctaatcggggcactcggttgccgatcggacgacccacatcaacggataccttttcggcttgcacgtattacaaatgaacccccgcactttacataactcaacccgcaatccttagacagggtcgtctgtgtcttg

SEQ ID NO: 156387 - DNA, 553 bp, Zea Mays
tctgcttctccattggcaccaagcttgccttcgcctcagtatatcacccacaatccaacggcgtcgtggagcgcgccaacggcaagatcttcacggcgatcaagaaaatgctcctcgacgacaagaagggtaaatgggccgacctactacctaaagcagtctgggcgctgaacacgaccgagtgtcgggcaaccggatttactccctttcgtttgctgtacggtttggaggccatgaccccgcaggaaatcaagcatgggtccccaaagacaagcgcttcggcctcacccgatgtagacgagctaacctccaaagacctcatcgatgcagaccgtgtcttcgccctacaggccctcaataaatatcaagcccaaacgaagacctagcgcgaccacgcagtcatcccgagggaattcaacgaaggggacctcgtactcgtccgaacaacccggaccgagtcacgaggtaagctggagccgaagtgggaaggaccattcatcgtcaagacgaagtcgtcccccggcacgtacaagctaacaacacaatctagcaa

SEQ ID NO: 156388 - DNA, 919 bp, Zea Mays
ttcatattaaaaatccatttctaaatcatttattcgatttaaaacagtactgggctgggcctcaaatccagagaaacccagggggctcggggtaaaaatttgtagacacaaagcgcagtggaggtggatggcaggttctatttataataaacgcaggggcacgattgcaaaactgcagtgccgaaggggtattggaagaattggaccgtccgatcaaaattggacgccccagattagatctggatcacgccgaaccggtatgcagcgcgatccgtccactccgcgatcaacggcgcggattttaattctctccgatctcactagtgtcgcccgatcacgatctaacggcacccaaccaatgtggcgaaagggtacatcaagttctaatcctggccgttcgtcacccgatcaacggtgcgcctaagttcttcctccctacgccctcctatttcctttttctctctccattgctgaccggtggcgcgtgagcacgaccgtggcggaggccatggccagcggccggccccaaggctccccccgaggtagctatacaaagtggagacatacgcgaagctggggaaggagttcttaccaagattcgcccgtggtgaagctctgtccacggcggcagacgagtccgcggcgtcccaattgcttcggtgagcgattcctcacggaagccaacgcgcgatcccgattccctactcgcgcgagttccacgccgtcacccgaagaccccgaatgctctatggacaccgagcgaccatggaatgctaagaacggcggcgacggatcttcgcttctcggctctcatggcggtgccggggaatttatcgagtatttggcgcagccgaggctgagacgagccaccggcgagctcgattcaatggcagcctcgcgagcacctcccaaccttttc

SEQ ID NO: 156389 - DNA, 598 bp, Zea Mays
cagagacgtgtggtgttcagatttgagcactcagggaggtgtttccatcttatactcgagcatcacaagatctaggcgggtctggcgtgtagaatgggaagtactcgagcatcacaagatatgggtggggctgacgcgtagaatgggaagaatgagatggcgggggtcatgcacttgcgatgggatgtgggccgatggtggtcttgtgcgctggatggcgacgagggaattgggttgattccttccatggcggcgaggcgtggattgcgtttggggcgtgggggatatgggcggggcatccgcggtgcatgggaagaacgattgggcggggtggtcctgcgcgtcgtcgcgatgggattcctgcgagttggattgttgcgaggtgtggatagcggcgaggggatgtgtttccttctgtggcagtgacgggattttttttccttacatggctgaggcattgatcggtgaggggtttgcgacgaggaccatacggatgcaggggtagaggggagagggcgtgcacggggaagaagggagacactaacatgtgggtcatatgcgtcgtgaggaggcagaagcgtgcaccatagtctacgtt

SEQ ID NO: 156390 - DNA, 667 bp, Zea Mays
tggcgccgctcctctccgcggcggtgaagtcgctggagttggggcgggcgcgtgctagggtggttccggggtcgtcggggtgggtcagagagggggagaacgactcggcgaactcagtggcggggaaatgataacgaatttgaggatagagaggggagaacgacagggagaaggcctcgggcgggccgaaggaactctagtgaaggattccggctgtggggagggggcttgatgcgcgctaaggcctgggatagcttcagcagagggaggggtaccttagggactaacaccggggcactaggccgggctaatttggcagtcaccacgcgggcacagccgaactccgacgaagccgaaattggccgaccgcaaagcgaaattggggaaactgagcacgggtacaggtgtctcaccttggggtggagctcggggtggcttggcgcggtatctggcgagctagatggccggggaggcgggcacgggtctctgacgatgtctggcggggtgagcagagcgcgagcgggggcgggactgcgagaaatgaggtgggggagtgagtgcgggcacgggcggggctcaaaggagctagggcgtgggcaaagcgacgtggccgaggatcccggcgatgtgagcgagtgcgcgctcgctgatccacggcgggcgcggg

SEQ ID NO: 156391 - DNA, 742 bp, Zea Mays
acgagggtagtctgcgctgcctctcgcggtgacttcggagtggtcgaatgccgaagaccatcgatgcggtctttctcgacacgttgcgttttagtttttgcgggggatttttgcaggtatattacatggctccacctcgttaaaaacctcaccccctgggaggaaaagagtgcggcctggaataatattgtttggtggattacaagggcgcttgggccctgagggtttaaacaaaaaaattgcggagattgtcaatattccaggaatactctaggtcttcaccggatggcgttgttagcctgtacgcgctgggggacaccttcatcttgacgatgaatggaccctcccacttcggctctagcttgccccatgactctgtccgggtggttcggacgagtacgaggtctccttcgttgaactctcttgggacgactgcgtggtcgcgtcaggccttcgtttgagcttggtatttgttgagggcctgcagggcgaagacgcggtctccgactctccgtcgatgaggtctttggacgttggttcgtctacgtcagggacggctgatgcgcttgttcggggtgacccgtgctttatttcctgcggggtcatggcctccgatccacatagtagacgaaaaggagtgaatccagttgcccgacattcggtcgtgtttagtgcccagactacttcaggtagctggtcggcccatttacccttcctgtcgtcgagaagccttttcttgatg

SEQ ID NO: 156392 - DNA, 637 bp, Zea Mays
gtgacaacgatcgtccaaggatccgaggatgacatgctagacatccctgggcccaaaggtattgagacacctgtacatgctatcaagaatttcatcctttagccacgacgggatgtccaattggctgatccaccaatgtcatcgtcccatgcccaaaacccctaacgcaagagtcatcacatgcagatcctattgcgaaattgtcatcacctccttaaacttcacatgttgcccagtctattccttttcaacaaccgtggccagctcctcatctgttttctgacccatagtctccgccataagcatcgccattaagggctccacaaccttcaccccatacacatcctctatgtgacccatctactccactagcaccgccttcaaggaatccaccttctccacaggcaaagaatactaaattttctataccaaaattggtttccctgttccagaaaaagaagactaaaacgattgctggcatagtgagatttttgtcagggattacacggagtcgcatgacacatactgttgatttacccgagcatgagaagtctgcaaaaaaaggctgatataatgaacataaagataaagaagccaactaaagaggattataaaaatgtgcctacaaatatgtgtc

SEQ ID NO: 156393 - DNA, 3909 bp, Zea Mays
acgagagccacaaactagcaacgagctcagtgtaggacgttttctgatatagtgtcacatgttggatgaatctttcaaagaagaacccctgtgtagtgaactgtcagcatcttgaacaaaccactcaagcactagcactaggggctagtgcctttgatatgtgacacttttgagttcaaaaggaaagttatgatgttttaacatccttatgaatttgtctaaatgcaattagaatgcttccttctagcccaggaagaaaaatgaaacatacttcattctggaaagctcttattgttgatgaaccatcaagtgtctctgtgaaagatgaatagattggtgaacgagcaacgctatcaagtcgccgtacttcacgtgatgtagacctgtaatagaactgtacaaaacattagtttctttctccatatggtacgccatagatatataccgtgatgcactgtgttaactaagaggaaaagaggattaactgttacacactgatgtattaaagtatggattttatatagtagtctataaaggttgagataaatgagttaagcatcaatacagaaataaatgaaaccagtacctgcaacttcctatagataagccagagtggaagtaagacgagtaagaaggaaacctgcagaccaaacattcatgaaatacaagaaacgcggtttagtttctttctgaggtacaaggttggccctatactattgtttacataatttacctgtgaataagacaaaacaaccagagtgccgaataagctgaagaagttggccacaaatatattgaggatgaaaggaagagaatcatcaacggcatagaggtctgacgataatctggaagttcataaagcgttgccaaggccaagggacatttcaatctttcgatgcttactgaaaactagaggtgatctgatgaataagataccaaacctgtttaggatccgaccactgggattttggtcaaagaaacaaatcggtgcactgatgatattttcaagaagagatgcatgaatatggattgctgcacggaggccaccgaatgcaaaagaaaatgcccttcccaaagtgaaaagagaattgatgatgccaaacatagcaaggataatctgcacaggcaagtttttgaatgagcataaatgtgctgaaaatatttctttcgtgaacaactgaacgccaaattgaacatactgattactacggttcatattcacttggtagaaagtagtcttacaagataaaacctcgtgttgttggtgcctgtgctggtatcaacccagtaagttaaccaaatatcattgccgttacgagatgtttgcattaagaatgcgcttaggaatattaaaacaacagttgaccaccccacaaatgctgcatattttctgtaaaaaagaaccattatgaataatagatcacacaagaccgaaatacttttatcattctattgtatatcgcactccagttcacaaaataactcacttgtagacaccaagctcaaccttgccttgtttccttgcctcttcttctacccgatcttttgtctcctcataacaaaccactgaatcttcaagtacagcatcaggtttcagttcacatgttaccattggtgttttatctttcacagaagctgcaaatgaggtaggacttgaattatctggcttagaggttcttgaatatggagttgccaagaaagatttcggtgtcccgaaccacttgatgagcccattagccatgactacaatcatatctgcagcaaaaatggcctgggaaacagaaaagaaaactaaaggaaaattacattgttctttcagcatcactcttattccatgcatacatcctagtagtatgagatataaccttaaatatgattcatacatttaataccaatgtggtgcagttttttttggacaagattcagtgaatactacctgaagattgtgtgtgcttagtaatcttgttttctgcattagttggtgccccataatagccttttccaggatgcacgaagcaacttgggagtcaaccgcgctaaggatgtcatcaaacaagtatacatcagaattgtggtacaaagccctgcaagtgtatgatcataatgttagctagcgagcttaagaaggatgaaagtccacaaagttgtcaaaaacatgaccttgccaatgctagacgagctctttgtccaccagataagttggtacctttctctccaatatgtgacatatctcctctggtcattgccgatatgtcaacatgaagcgcacatgcctctattacttcttcgtatctgcattaattttgtaatgcagaatgctaattaaaaggggaagcaataaattctatggtgtatgagcatctacaatagttcatgaatcatgatagctgctttaatgccatgcaatgacataatgaaacaaacttgtgataatgtatgtcagagacagataaactacctccttggatcaaattctttaccaagcaaaatattatctcgtaaagagccagataagatccatggtacctaaagaacaccagttacatttttaatctccagacatttcaatgcaaatcttaagcaatttcaggtcataaagtgttacctgtggtacataggcaattgaaccacaggagctaatagaaccactgatgacacgagtctctccaatgactgtgttcaataaagatgatttaccagaaccaacctgatatgggacataaaatttcctcagttcagaggaaaaattgcaatagcatcagattagattattataaaaaagatctgaatatatggttgtatttctttgcagatactggcaaattgagatataatataatgtgccaaacagtatgaacatgctattcagtttccccaaccaaacaaaccattaacgaaattgtgtacccccaccacataactttccaagaacaccttagtacaaaaacgaaaatgtgacaatcagaatagttacctcgcctacaattgcaataaagaaccctttttgtagctgcaaagatatatctctgagaactatgttcagctcagcaacagagctgctagaccaagaacaggatacattctgaaagacgatggccattggattatgagttactttggtatatctcttaaagtggtggtttaaaaggtcagcagaggcatttaactcggatgagtgatgctctggagtagataaataattactcagccgtctgctagagataacagcctgcagcaaacaaagcatgcaatgttagtgcagctgcgaatgtatgtaacagtataatggcataaaccaattatccacttacatcaatcatcccattaataacccatggaaatgagtttagcggtgatattagtgtgttaaagagtgcaacacaagtaaatacctgtaataaggattccagatattagcagaaagtttcttggtccaaaggcatatcctaagcatatcattcatgatattgttttaccgtggcagcatccaatgcgtgtcccgttattgcaaaaatagaaaaggtggaaagggagaacaatgtcggtgtggttgcccagaaatagacgcaccaagcatccagatattttcttgtctattgggaaataggaggcccttgttagttccagtacaatatgttcaacttattataaaatgtagattaatcaaaagcaattgcacaccgcgagatgcttcacttctgattctcttctttccaccaaacgttcagtgaatagtttctcccaactgtacatcttcactgttctaatatgtgctaagagctcccctgcacagcttatcctattcatggacaaattttggagtattagattctatattattgtgttgactaccaaacatttgcatgattcctcctgcctcatgacccaaaacaaatcaacaatatatgc

SEQ ID NO: 156394 - DNA, 2507 bp, Zea Mays
ctggatataaagatgtacaaagtgcagatactgccctatgctagtgactaaaagggtctgtttgcttcctaccctggaaagcacatttggctaggcagcaactcaaggcgtttgattgggtcggatctgcttgcctagctgcgactactaggcaagggtgcaaaccaaacatgccctgagagcatctctagtcattccccaatacaaatccccaataaagtggtaatgactactgtaatagtctcctatatgtacaaagtgtaggaggtcaagcacggacaacatatctggtccgctctggtttgctgagttggaacccaagtaggaggtcgagcatgaacaacgatatctggttcttgagcatgatcatgccgatgtgcacaatgtgcatggccccgcatatggtgaagatggggttgtgccatgattacccctagtcgtcgatgaagcccttccccaccatctagggtgccacagaatagctctggcatgaaggtaccatccaacacaagatactcgtacgagatactctgcttggtcattgctccccactatggtagcttgacccccgcagcatgagcgcaactgatcatccagcacacacacgacgctgaagtaggtggtgacatcatggtacctgtgcttgagcacttggtgtagtgcatgccacttgttgtggccgatctctcacaggcggcgcctgccatggtggagtggaccgatgagcacttgcagcatgtaggcgcactcatcaccatcgcagaagcacttgggcacttggtacacgaacatgcatgcctaggggctagccgtcaccttagcatgctcttgcgctagcttcttgcagatggcgatcacccatgccgagtcctgcacattggggctatggcgctgtgtctaggattgccttgacctagcaggtgatattgttctgactggcgctagagagcaggaccaatgctagtgacaatgttcattgttacttgttagtgagccgcacgacaggtcccgtggtcactatggcaacgaggacttttgtagcttggcgctgacgagcttgaccgtggtgaggtccagctgaggactttcttattgaaggcggtgaccatcgatggtggctatcaagattggtcctgggcattgggggtgacgccgaagaataatagaagtgttattttgccatgggaagggtggcacttccgctgaagccgtatagcggttctcggcttgctgcaattgttgtggttgatcccgtgtgatcaaaggcatgcagaaagatgatatctgcctggctactgctgttggctaggactttgtgcatatgccatcttgctatgttgcatttgatgaccatgacgtctacatgtggggcacttcaaagattcgtgtcccttgtatcgaaggttaggaggacatgcgacatcttgtttgtatcactggtccggtgactacaacatgattgacccttttgtaagtcttttcgttgccttttattttcgaagtctatgctagacccgccagatatcatgtttattatgccgtgaactgtcgattgttggaagtgaccttcatctttgggaggtgggggtgtatgatttgagggggagggtggagttggatcctttcttggtgggatagctggggtggtagtttgggggaaatgagggtaaggttgtgtgttttggtagtgagggggattgctgttggtatgaagtgtgggcgatggtctttgtcggctagtctggaattgatctggccattctttccttggcctctttggtgacggggcaatccctagttgaatgcccgacgtcctctccatggaagacacaatatgaccttcgctcttgtttggatcctctgtcgctgcctttgtcggccctcgccccccttgttgagtgcttggtatgctcttggttgcaaggcgtcccttagctaggttgctggtgatgagtgatgctattgatttggggttgttggcggtattgcggctgctggtttcttgtccaggatcgctgttggcttgcggagtgtcctttggcttccgctgtgtttctagctttctgtagtgcaactcctcagagcatgcaattcttttgaagagctggtacaactcttggagtgacgggtgggtccttggtgcagtgactgtataagtgtcgtgctcgaaggtcgctgatggcgtaatagactgcgatgtggtcttcgatcgatggcagttgtgacttgagcaggaggaatttattgtagtaatctcaaagactttctttctcttgctgcttgcagaggcaattatgcgagggcattggtgtctggctggtagccttggaagttaaggaggaatttattttgaagggcccgccacgagtcaatggataggggtggcaatcttgagtaccatgtcaatgctaggccttctagtgctatgatgaaagacttcattgttgcattatcgttccctcctggtgaagccacttatgttggttatctgttaagattccaaaagg

SEQ ID NO: 156395 - DNA, 1943 bp, Zea Mays
gcattacattgttgcaatacactcagaatgaatcctctaggtaaaatctcaaaggagtgtgtgacgtgatgttttcttataatacatagttaaggtgtattgcttaagttagagggagagaaagagagagagtcattccatgagccagtagcatgttgactctaagtgttaatgacaaatgagtaatcttgttaagaaaggtggttgtgctcaaagggtgagggctagaaggggtgaaatggcattaaaggtaattaggagctccaaaaccctaaatagtgccctatggaggattttgagttctaaccactttttgcaaaaagtgcaagtggcaaaatagtagagttttgagagcttaatacttttcccatttggagatttccaagtattgtggtgaaaattggagaaaatagcaaaagttcacaagtgctcaagaattggaattctaagaaaaagtgacattgagcaaagtttgaactcttgtagcttttgatccatgagtgctttgcaataagtcaccataacaaagttgtagagctactaagttggttaagggacctagccctaaaatcgtgtggaacctagtgtaaaatgttcccaaagtcgggttgtcagtcaaggggtgatctgaaattggactgtcagtgatatttgaccaactttggaactaaattatgcttgatctagtgagcaaatgactaggatccttatgacaaagttgaagctggcatataggagaacaactttgccaaagggtggtaggtgtgtcactgcttggaacaggaaataaaattgacccaaacttgctctatcagactactttggaatgggattcagaatgtttagttaacgaaagaagatcataggtgtagtgcaccttgtggccgctgatcccatgccatgattcgcgcccatcggtaaagatcatgatgcgtttgagcgtggataaacgttagaggtgaaaatatttgtggaggggtggatttggtcactggccggctcgaccaccgtacccacttgcccgcgcgatcggccgagctatcgccgctggaggtctccattttcctttacacgccacgcaagtacatgcttaccacgtcgctgtgaaggtgtccgatggtaaaacacgtcccaaagccctccgtttacccgcgtgccacgacgaccgaccctagtgaaaaatctaagcaccatcgtgagcactcctatcccaaattcgcgaagcaagcgatcaatccttttaaattgagtgccctccctgctcttgttacgcacccagcgtaccacccctcactctagatcatcgaccatagcccgagaattccggatttcccaaaaatcagttggaacgccatcgtgaaacacctcgccatggccagtccttcttaggttagttcatgtccctctggtccatgttttagcatcctctagtgttagtgaagctcactgagctccccgattgaacgctactacaacagagcatcgagaacatcatgtcgccgcctcagagcaccatcgagaacgccctcacgtcgaacagccctcccgtgctcccttcgtccaaattcgctcacgtaccacacctttggtgagccaatgatactcaacttcaatttaaatgctaccacattatgttgcttgtaatgggctcgtcagaactctagcccgatcgtggctagggcagatgcaaattaagaccaggccagtcgaactaggttaggggatatgctcgggtagtctcagcaggcatggagtctggctgcttattacctcaagagggggtcgtcggcgatgagaacacgtgactccggccaggtgtttgaccggggcgccgtcagggacctaaagtcgtgaagaaatagaaataggtggacctatatgaagttgtcagtgacatagtggaacagtgccgcgggcgctttactagatgtttaaaacaccag

SEQ ID NO: 156396 - DNA, 646 bp, Zea Mays
gtagccacggctgagcgggatctcgggtaccagtcgcccgagggggacctgaaagatatcttcaccggaggctcctactctggtgaagacaactagacagaccccaaagggaccctgtgttccccggtctacggagctggagcacgcctttcctccggaggcccttccggacccccacgggtccgagctacagacaggtatatgcagaagtgatcactgccagaggcaagggctcccgcgccgaagacagatgggaaccctgggtcggggcttagccccacggtagataccatatcaagaggggttccgtaactctcccccagctgagaaggacccttcaaggtaacgggagtgcaccgacctaaggggaaccatctagctacagctggaggagcaccttaccccgagaccaagtatctctgtaagttctatccatagagcaagactaaggggtcgagtctgtttccttttcttgtaactatataacgcatacgtgtacgacgacccggtggggcctgcccccataaacccaaactattggtctgcacacatgcgcgacaagttataaaaagaaactacccccctcagctgcactcttgcgatagttccatcttgctgctccatggtcctacctcgcagttttcca

SEQ ID NO: 156397 - DNA, 550 bp, Zea Mays
agaaaataaaagctagcttcgccaaagtgggtgcctactctgctgaagaaaacttcatacgaggcgaccccgaaggtgttgttgagtggataagtggagaagctgagaccttcgaagaaattttaagtgatcgttgggatgtttgcgcattttccggtgcgcagggaatttcagccatcttggaaaaggcgggatgtgatcacattaagactatggcccaggccgaagctgccttctccatagatgatacgaaggatccttcagctgaagcaaccttgatgggcgggaaattttacaatgatgtctaggtgaatagtggccgagagatggcccatgaaattataaacaaaagtgaaaaagatacccatgatgctcgagcggaagcaagacgagctgaagaaactgcagagcgcgaaaagcgtatatgtatttatttttggtttttagcttcgtcattttatttttgtggcttcggactgattaatatttcctacttcagcagaattatctccgcctccggaaccgttcgatcccctagccgatccagaaa

SEQ ID NO: 156398 - DNA, 612 bp, Zea Mays
tgtgggggtaggatgtgtcgtgactggcaaaggatcggtgttcaccggtaccttggggatgccgccgtatcccggcaggccatagggaatgtcctgcggggcggctggcgtggatgaagatggacatgcctcgacggccgcaacactggaggagatggaggacatctgctgggcaaagtcgcatagctgacgttggacttcacctagtgtcacggcgatggacgccagggacggttggagggcagtggctgccgtgctatcttcctcatcgtgacctgacatatatgataccgattgtaatgatctcaacttctgaggttgtatgagtgggtagtagggcgaggccttgaggattgagggcgagagggagccgtgctagcgcacggctgagacggaatgtggcaaggagcaatactcttcttagattgatctttgctaatcctcctaggtacaaactaaggactttatatagtccagtacaggcgcacataaactgctgccgcccctatttattctctaacaaactcctactatctctccttttgatatctaatctgacaaacttatccttatccctctaatcttgatctcctggcgtggcctggcctatgg

SEQ ID NO: 156399 - DNA, 671 bp, Zea Mays
ctatccgattgtgcatggttatcatcgtttcagctgccgaactcggatcagtagcatggttctgaaaagtgaggaggtgatcatttccaaacaaggtaggcatttcataagttgtctcgacacgggggagaatatcgatagtgagcttgggagcttgatccgggcctgtgttcagataattgattttgaacttaaactcattcataaggcactgtaaactactatgcagttcaggaatggccgcactcagccaggtaacctcaacgtttgggacaatgttgctattatgaaagcttgtgatgggagtcagcacggtgttttctcggtggtgttgattgagctgcacctcttgggtaccttggttgactaactgagcttgctctgcaacagagttgggctgcatctctcgagtgggttgagctggcatctgtgctgtgattgtgttcaagcccgggaggtttacctgcatatctagtccattggcaggactgtaacgctcttctgcattactgctagcttccgagatgattgaggaggcgcctgaagtgctattgttgttgccagcgtgttgagctgcaggcgcatgacaaatactaggtgataatgccggttcggcttccatcccatcagactgtcgggcgcgcggctccatactaggcatggcagctttc

SEQ ID NO: 156400 - DNA, 728 bp, Zea Mays
cctaccaggataggaaactcgtccgacaccgaggacatgcccctagccagccttgacgaccttctcaaggaatttggggacactttagagaaggagttcgggagtaccatagatagcactcgcgtgtaatgaacttatggtagttgtgtgctgtaatgaactgatgtaatgaactggtctaatgaataaagtaacttagtaaaaaaatgtggcatgtgcatggtagtaactcttttcccctggcagatggcttcggataaaaccacgcctaccgcctccgggattggaacaggttttcccctaagaactgaaggagaagctggcggagaagggagtgagacccacctccccgcacctccggaactaccactagacctagcccaagttctagccaatcaggcccgactcattgaagttctcactagaagtctggaaaaccagcgcccaggtggtggaagaccacaggacaggatgggagaatttttgagactcaagcctcccacgttcgcggggtccagcaatcccctcgatgcagacgactggctacgcacgatcaagaggaaactggaagccatcggatgccccgaaaatcagcgtgttcaactagcagctcatcatctttctgggatggccctagcatggtgggataccttcagcgaggccgtcagagatgctacctgggcagaattcgaaacagccttccgtgagcaccatgtaccccaggggat

SEQ ID NO: 156401 - DNA, 747 bp, Zea Mays
tagcgtttatcgtagtattgccttagagcgtgttacaactggtgcgtgtgtgggaagaaggaggacctgcccttttatagctcaagctagggtaggaccatacataagagatttgttctctactcgtaagaggacgatctgttgtctcggattgacgtgtcgtggtccataggatcgtgcgtagccgtactcctggtatggcgtattgtcccgctcattcgtcatacgggtccctgtagcgagtccacctctaatgtcttcgtagtagtgcacaacgggtcccgcgggtcagtctcatggtatggtcgtgtgtagcgcggcttcgcatgtcgtcacgatcccttgtcacttgtcggcgtgtgtaggcatacacccgatatggtgtatttattccgtcctttccggtacgcgggtcattgtagaaactcgggtgctgaggtcccccatgaccgaggttgactggcccctttaggcagtggggataatctcgagatcgtacgcagggcatacaatcgtgttgatagcgacctctcgacgttccttcggtgtgtcgcaagtatgcccagacgtggcctaggaatgacgcgtcttgtccttgctaatgcgggtcgatagtactagactgggaccttcgccacactgagttgctcggtcaggggttggtcgatcgttctgcctcatcgagttgcttgattaggggttggtcggtcgctccgcctcgctgggttgctcgacggggacctggtc

SEQ ID NO: 156402 - DNA, 663 bp, Zea Mays
caaagacccagccgttcccagccgccagccacgtcccattatctcgcttcggctaaacggagacccagccatagcccactatctccttcctagcttcggctagttggcttcttccggctttagcgaatgttctgtttctgtttctctcatacgacttcagatccttttttatctcttggtgttgattagacaaggtagcgccgccattcctatcatcagtgccattgctgattagcgccaccatccctaatttattactatcactaattagtgccatcgctgctctagcagatcatccctgatccagtgttgtcatcgctgctcgttggtcacggcaagaacatggaggaccatgaaaatcttgtggttcttagagatcatggagctgacaatcaacatttacaatctcccacgctttcttttgcatgtgaagacagttcaaccatcgatgatcatagagtcgatgaccagcagaaaacgcaggtatgttaacatattctttgacgtcattcttgttcatatatgatttgatcattgttgctatgtgcaaaaatatttaatacttattgttcataagaagcaggcaccgcacacagcatcactggctatatgtgagaatgctcaaaacgatggcaatagaatccttgaatcaatggtgtatca

SEQ ID NO: 156403 - DNA, 794 bp, Zea Mays
cgcaattcactccagtgctgatcttgctctattcatatcgatcggtcaaaataaacttcacctagtaaggctattcataagctatgagaccagaggattttctgctgtttttgcctgatgaagatactgcaaccagagtccttaatgggggtaggctgttcagaggccctcgattctctcttctgttcaaaagatggtcgcggtttgtgcatgcttcgtcagcttcgttgtccaagctggtggatattgagattaaaggcattccagaacatggttggtctctctctacagcggagcacatcttacgtggctcttgctggatttccgatatccaccaggattcggcacacaagaaaaacttttcatctttcctggtgagagcatggtgttttgatcctagaattctgcccacagaaatggatcttcatattattgaaccaggccctgccgttcttgagaagagatgtctatcttataaaatctcgatcggagtttgcccggtggatcttcagtctgtgagcctggatacaccgtcttcttctccaccgtcgtctgggaataatcacgatatgggaggtgatcgtggcggtcacgttcctcctgctcgtcgtcaaggctcttctgcggttcctcgacgacctgtccaacttcgcttgggcccgcggaccccatcgggctccggtcatgtcgggcatggatcaggaagtgtggaaacgtcgcagcctcttggctctggaatcaaggggtcgcactgggttcagcggccgccgcagttatgtttgatagaagccgaa

SEQ ID NO: 156404 - DNA, 527 bp, Zea Mays
tgttgggaagggtatcaagtgtgttcctgagatggttaggttttggaatccacacttgtttctgaggaggggctctcacaggctcctcaatcactccatttttcacagcaggggaggcatttttgggtggagtaagcttgacaagcttgggggtggctgatggtttctctgagggttttaggccactgcactcatcaaccttaccaaaacaagcaacactcccatccttaacagcaaagcctaaccccggtccgccagttcctctcttgaactgactgaccatcatgcccaactggggctcactgcacgacacccagctcaagacagatcgaaggtatgtgttttcttccttgatccttgtcttgtcgtgtctacaggactcaagagcagactgcaaaccctcacagagtgcacactgcgcaggtgcaggggcactcactgagctagccttctcaagcaaagctatcctagcgtctctttctgctagctcagtctgcaagccaggacaaacggtacacgcacccaac

SEQ ID NO: 156405 - DNA, 834 bp, Zea Mays
aaaagatctactgtttccctgaggaatgcctcctgaaactccaaaccccaatgccacagaacatgaaagaaaagagaaaaagaaatttaacttctttttcagaaaattgggatatcacactctaccccccttaaaaagaatttgtcctcgaattcgaccactccaagcaaagcatccaaggtaccccttatagcaccaccattcaaaacatgggtccattattggtcttaattaacacaagaacttctacctcggactaattgcctaaggaaactacacaacctgatatccagcatgaatcaaaatgcaatgaagctcaaagcaagtcatagatgcaatcaacactacgatttcacaccatcgaatttggatgcagctatacatcaacatcaatgtcttcaaacaacactcctttatgaaggggtaatatgcactaagcacaacccttaccagcttcaacaattcattttaattcaatggtgaaacatccacaccagattaatgtataagaagatcaaatacctcgcctcaaagcaccacaaaacaagtggttctattgaaacaaaactcctaatcttcctaaaccttgttcttgccatcatgaaaagataatcatgtaatctcacattctttgcaccccacaaaagggagaaagtctacagaactaatggagcaataaagccgacaagaagccaataacattctacgcggcacagttcatcgaagaaatgccaaaactccacaaagagcactgacagcacaacaacaacacaatacttgcttaatcaatgtcactatacttcatccaaaactcaactaagaaaaatatccaaa

SEQ ID NO: 156406 - DNA, 567 bp, Zea Mays
gcctgggaaggttgggatggcatcacggttgttgaagggtccgcggggtgccctgaattgctcaccggtgcgagcagatcaccgccgctcgccgtggccagggttgtacatgttaccatccccggtaagatatccatcccctgattcgcaatctgctctgctctaaattgcggctgcctgtgcggtgtttcatgcaagaattgtgcagggacagcgctattcggcaaaggcgccgccgcgcgggcgggcacgccgccgtcttcgtcatgtgggaggaagaggtactgtggggcgttgatctcgcggccagcggcttggattaacccgggaatactgcttggtgggattggatcaccgccgtggattcagtaatagagggcacaaattaaatctcgcgtaccctttcggctaggacaggtctgggacgtagatcatcgatcagagggcctatattcgatctgtagtgtggacgatttcgggccattgatctttgatcctagggcagtgaatgcatatcagattacaaccttccccgatctaatcatggcccttgatgcatgatccaac

SEQ ID NO: 156407 - DNA, 528 bp, Zea Mays
cgcagagagaggtcgtgttcaagaacgaattggctccaaatctttaagattatggccatgatcccgttgagagatctcttcccctgacattcctttgtcgtttgtgtgtggaggcttgcagatttcgctgactggatcaagagatatggaggggtgaagttgggtttgtctcactgccgagcatagggagaagatcccaggtttgatgtgtccaggtcacgcgtcccaatgccatcttctggtatgaggtagaggggttagttagacacatttttgtcaatgggagcttagagttttgagatagagatcaaggtgaacgcgctcggttttggttcaaaggctgaaaattcagaaatctgaatttcagatttccccattaaacctccacttgaatggcttgcttggagtttttaataaactattttggccaaacttttataatatttattgtagcttagttagtgtatttcatgttttataattggcttatgccatgatttcatgtttttcatggtctttcaccctttt

SEQ ID NO: 156408 - DNA, 884 bp, Zea Mays
gtcactaaattgtgcatcatgctggactttattttatgtgcattttgtggcaatacaaaaataaaataaagagaaatatattagtacctaagtgggaatttaagatttaaagggaattctagaaatgtggagaagagaaagagataaaggatatgaataaataaataatatatgtaaataaatacctccagaattagtatctctaaatgttacaagtataaattgtaataatgggccacaagagtttgaattaaattcgaatacaaattgaaattgaaaagggagaaaagaaaataataaagaaaaaagactaaaatctcgtttgggctggcttttcctgggtcggcccactaaccaaccgtccgcagccatttccactcaccagctcgtgtttgcctcgccgtgggcgcttggccactgaactggtggacccacgtgtcgggcacctaaccgagtgtcgttctccttgcgtcgctgtcatgtggccccaccgagtcggtactttcctttcctcttgcgcgcgcgacgtggatgactggtgggtccggtttaccaggggcagagaaggggtcttcttcccgtagctgacgacgggcatcgcggactctgtgcgcggtgggattcaaccgtaatcgtggagacctcggcgttcgactcgggagtccatgactccgtggttaaaagcggtgcgccgtgctcctttctccactcgcgatcaatcccaagctgcagcaacaaacacggccccagtacagagaacgcacaacctcgccttcggttcgtgtggccgtgaagagtccgggcacggcgtggcttcctggtgcggtggcgacttggcgacacagcgtctggaatcccggtgcttccatcgcgttgtgggctcg

SEQ ID NO: 156409 - DNA, 518 bp, Zea Mays
aacgtttgatatataatcaaatgaacactgcagaacaaaatggaccgcatgtttaacttcatgagtaaaaaaaggtctggagcaatgttttaaaccacctagcttcagtattaactcctatcaaagatagacatgttccaaacaatagagttggtggtctcacagacagagctatcacacacttctgtaacacagttacagaactgaatggcgtcgtttcattcaagagaaagaaacacaggaaacggtagtttcaagaaagaggcatatgcaagcacaagaagaaatttaaattccgaaactgtagcaagaaagcagcttccctcatcacgatcaattattgcagaagaacataatcgtttctttttcttagagggcaaacaagatcgagatgtaatttcctctggtcagtcacagctacataccgtgcagttagccatccccgggatgggtcgacgaactgatctcccttcctacctacctcctaaagccctgtgtgctccagatagcaatgtgct

SEQ ID NO: 156410 - DNA, 724 bp, Zea Mays
atttttgaaggatccattgggaaaacaaaaaagcacgaccgcagaagcaccaaggcttagaccaccactgatgaaggctcccccaacaaatcctctaggatggacatgttgagaagcaacaccaaagctttgagctacagatctaagggccgctttacaaaaaccttagcgtaatcatccagaacacttggagacaacacatcgtcatgatcagcctgcagaagacccagctccttcacaatcctcagcttgcccttctgaacacgctgagggactaacagtttctccactccagccccggcaagacgcctgctgcggtgagggaaggcactgccagcttggggcctggaacgttgctgtcgcttcttaggaacgccgaggatggaatcaacagtctttgacattctttcaatgaaacccgcctaagcatgggctagcgagagcactcgggaagcagccgcccttcgtcttctacagaagtaggtaattgggggacgggtccaaaccctcatgcctggagccaacatcttcatgggcgacttcatcccgaccaactccgcagggggcgcggccggcgacaaaggaggatccccagacccgtcatcgggcaaggggacactggagccgagcccctgcgactcccccacgaccggtgaagagaccaagtccccaccaccaccaccagcatgggagagcgataggggaccatccacaacaaggaccc

SEQ ID NO: 156411 - DNA, 413 bp, Zea Mays
gccgtccgtaaccctgaaggcttgcaaataactcaagacgccgagggccaccgaatcgtcaacctcataatggtcgaagactgtcgggccccaataacactatacctccagggccattaccatccaaccgatcgcaacgaggccaaacgactgaaacacaggagcagggatttcacaatagtcgagggccaactttacaaaaagggcatcagccagcctatgctgaaatgcataaccgaaactgaaggcctagagatccttcgtgaagtccacggcggaacctccgggtcacattcaggacccagggccctcgcagccaaggtgattcgtcagtgattttactggcccacgataattttcacggccaaccgagtcaccaggtcatgtgaagcatgccaaaaattctctcctcg

SEQ ID NO: 156412 - DNA, 1279 bp, Zea Mays
agtcgcagtaccgcgggttgatattctagaatctcaggggctctttagaaactctgccacggtgaaggggtatcgtgaagcattggccgtcggattagaatccaagcgccccgattgactcgcctctcacgcgaacttttgagcgatatgcaccctccgatcagatctcgacgccctagattaaaagaatctctcaactgatcccgagcgcccgtggccgatccaacgaccaagccgagccctaaccaaatagtcgcgctgatctaatcgtagccgcacatcaaacgctcaacgtctcctgcttcatcttccctcctggtggtcgagcacggcggcgcccgagcctccaaacggtggcgcttccgccgccgcggcgagccttgctctattcgccgccccaaccccgactagatggcgctactcgatccccaggtctcgacaacttacatggggccctatctacacactcaacagttgcgaccacccggctctcgcattcagcgggctgccgtgaagtccggcgacgaatccaccctcaccggagcactaaacttctaatcttccggtgctacatgttgaggacataaaagcgaaaggactggtggtgaattaccggtgaatcgattggagataagccctggccgcgggagcaagcggcccggcggcaatggccagctacggcgagaaatttcgagtacaccaaaggccccccgatctcccgggttgacacaaccgcgttcgcgcccacacgaggaagcacttgactcccaccttggtaccggaactcccctcaatctgagtatggcgcggcagcggtagaacggtcgggcggcggtgcttggtcggacgcgctggttctaggttgcggatgaagtcaagacggctacgcagggtctagttttataccggtcctatcctcactaccacgccgcttgcacgccgagctttgcggatcttggcacagcccgcgccgaattccgcgggaggaagacgaccagcacccgactgcgggtcccgacgccagacggaaaggaggcaccagaatccggggtccagtcgtcagtagccgagcaccgatgggctcgcgcgtgagtgaattcgagggaaaagaatagaaacgggccgagcgcgtgggttggccaagtgggccgaattcatgtttcctgggtccatcagagttaaaagctcttttccttttatgttttctttctatttcaaattcaaatttcaaatcaattccaggtttaagtttccaaactttgtggcaagtttattctca

SEQ ID NO: 156413 - DNA, 344 bp, Zea Mays
cgagcctatcgctccaccgcaaagcagaggggagaggcacgggaagggtcaccggagtggagcccagctcacggcggtgaagattcttactgggtgatgcttatctggtgtccacggcgcacgaatcacggcgaacggtaatcgacggcgatggaccaccggcggcgagatcctttgggcgctggcggtctgatctccttcagtcgtgacactgtaccatggtgagcgcttcaaagagcaactgacagagcaagttcaagtcacattttctctctattttccttagcaactcatccaaggctctgcatcaaagttgtagtgctacataccagctacaactcgac

SEQ ID NO: 156414 - DNA, 587 bp, Zea Mays
gcgcggtgatcgacctgagtgctccgccgcgccgccactacgccggctgcactctgctatcgcgcgctctcggccacgcgcatacactaacagaagggtctccatggctggctcgggagctccaccttgagtcctggagggtgtccgaggtctcgcccagcgtgtatggtgcgcggggcaactggcgatttctcgccggagttggggatccgcaccgcgtcgtggccggttgtccctgctttgccgtcgtcggtaagtttctcctctgtgtgatcaccatcatcccctccctgcgttgcaccggttggataggaaaactacgctctggtgcatttgggtgcggctccgacgaacccgccaccaccgtcgctcgggcgccgccgccttgggcgctcggtgtagaagacagggcttcggccgttgatcccctggtggatggctctggtaggctctaggttacccctttgaccgagttgaatccgcgtcgtgggatcttgatcgtgcgggtcagagcagatcaagcctcataaaatctgggtcgttcatttataatccagggatcccgagccgtaccggttcgcggtgat

SEQ ID NO: 156415 - DNA, 453 bp, Zea Mays
catttatttctacatttcttttgaatagtctttagacatctctcgattggatagcaccaacgtccctgcacgggcccccccattcgtgcctcataggggagatgaagaatcaaatgttgcattagattgaagaagccgggtggaaatatcttctcaagctttgactcttcatccctaagactcgcatagtagataagttcaccccctactcaggttagctgcatacccatcagggaacatcaacatcttgatccactgaagtacttccttcctctgggtcctgcttaggacgaaatcggccttaggccttctccatgtctttccaccacttggcggcttcatctcttggtttggtctatcacataacgctgccagatccactcttgcctttacattatcctttgacttatcaggaatgtccataattgttgcccacaatgcctcgacaacatt

SEQ ID NO: 156416 - DNA, 651 bp, Zea Mays
cgagcaattccaggtacaccagaccgccccgggcactagcgaaccacgagcgcgcttctacaatcctctgtggaccactctcctgggttgcccgagaccggatcgcaccgaaaccagggatggcgccctgcggcgagcacccgctacacttccactagtggcggcgaaaggaagagggcaaggagaggagtcgaagggatatgggaaggggtaggggactgcgacgcacgacgacttatatcttgatcaaggcacacacccaaggtgcggtcggtgccgcaatacttgcgcccccattcaacaaccccggtcggtgcagcgagttgttagggccgaacctggcaaagccggcccatcggtcagtggcagagaacacgagcgcgagcgcgggagacagacaagtggggcccggttgtcggtgagtcgtctgcgccgtgcacgtggtgctgacggagctggactggcgcgcggtttagtgggctgagccctgggtcggaaagggagaatgggccagaattattagtagtcggcctgggtagtgtttttccccttttcttttatatttcttcttccttttcttttgcctttttgatttgaactttaaattttgaattcaccaactattgtggttttattattctcaactaacac

SEQ ID NO: 156417 - DNA, 342 bp, Zea Mays
tgatgagctataccacggtctagaggacatcccatgcactagccgaggtcggatgagggaaggtaggagaaggctggagtactggaagccggttttgacgagagcttcccgacgacgacacacgatggtctgggcgaggctctgatggcgctgatctgtgctctcgatcccatggcatggtgtatcccacagttgtgcgctaggcaaggagcgcaacacctcattatttataccccgggatcagagaaggccggattacgcctggctgtgagtttgttaccgccgttatcgaaaaactcggtgaaatcctaacgaactgctagcgatatgttcgttcgtaac
